United States Patent Application Publication US 2026/0193644 A1 - sequence listing, part 8

SEQ ID NO: 17979 - protein, 750 aa, Homo sapiens
MANRLQRGDRSRLLLLLCIFLGTLRGFRARQIRYSVPEETEKGSFVGNISKDLGLEPRELAKRGVRIVSRGKTQLFAVNPRSGSLITAGRIDREELCETVSSCFLNMELLVEDTLKIYGVEVEIIDINDNAPSFQEDEVEIKVSEHAIPGARFALPNARDPDVGVNSLQSYQLSPNNYFSLQLRGRTDGAKNPELVLEGSLDREKEAAHLLLLTALDGGDPIRKGAVPIRVVVLDVNDHIPMFTQSVYRVSVPENISSGTRVLMVNATDPDEGINGEVMYSFRNMESKASEIFQLDSQTGEVQVRGSLDFEKYRFYEMEIQGQDGGGLFTTTTMLITVVDVNDNAPEITITSSINSILENSPPGTVIALLNVQDQDSGENGQVSCFIPNHLPFKLEKTYGNYYKLITSRVLDRELVQSYNITLTATDQGSPPLSAETHVWLNVADDNDNPPVFPHSSYSAYIPENNPRGASIFSVTALDPDSKQNALVTYSLTDDTVQGVPLSSYVSINSNTGVLYALQSFDYEQFRDLELRVIARDSGDPPLSSNVSLSLFVLDQNDNAPEILYPALPTDGSTGVELAPRSAEPGYLVTKVVAVDKDSGQNAWLSYRLLKASEPGLFAVGEHTGEQAPPNTDWRFSQAQRPGTSGSQNGDDTGTWPNNQFDTEMLQAMILASASEAADGSSTLGGGAGTMGLSARYGPQFTLQHVPDYRQNVYIPGSNATLTNAAGKRDGKAPAGGNGNKKKSGKKEKK

SEQ ID NO: 17980 - protein, 468 aa, Homo sapiens
MDSLASLVLCGVSLLLSVPRHEVPDILEVHLPHAQPQDAGVYSARYIGGNLFTSAFTRLIVRRCEAQKWGPECNHLCTACMNNGVCHEDTGECICPPGFMGRTCEKACELHTFGRTCKERCSGQEGCKSYVFCLPDPYGCSCATGWKGLQCNEGIQRMTPKIVDLPDHIEVNSGKFNPICKASGWPLPTNEEMTLVKPDGTVLHPKDFNHTDHFSVAIFTIHRILPPDSGVWVCSVNTVAGMVEKPFNISVKVLPKPLNAPNVIDTGHNFAVINISSEPYFGDGPIKSKKLLYKPVNHYEAWQHIQVTNEIVTLNYLEPRTEYELCVQLVRRGEGGEGHPGPVRRFTTASIGLPPPRGLNLLPKSQTTLNLTWQPIFPSSEDDFYVEVERRSVQKSDQQNIKVPGNLTSVLLNNLHPREQYVVRARVNTKAQGEWSEDLTAWTLSDILPPQPENIKISNITHSSAVIS

SEQ ID NO: 17981 - protein, 498 aa, Homo sapiens
MTVFLSFAFLAAILTHIGCSNQRRSPENSGRRYNRIQHGQCAYTFILPEHDGNCRESTTDQYNTNALQRDAPHVEPDFSSQKLQHLEHVMENYTQWLQKLENYIVENMKSEMAQIQQNAVQNHTATMLEIGTSLLSQTAEQTRKLTDVETQVLNQTSRLEIQLLENSLSTYKLEKQLLQQTNEILKIHEKNSLLEHKILEMEGKHKEELDTLKEEKENLQGLVTRQTYIIQELEKQLNRATTNNSVLQKQQLELMDTVHNLVNLCTKEGVLLKGGKREEEKPFRDCADVYQAGFNKSGIYTIYINNMPEPKKVFCNMDVNGGGWTVIQHREDGSLDFQRGWKEYKMGFGNPSGEYWLGNEFIFAITSQRQYMLRIELMDWEGNRAYSQYDRFHIGNEKQNYRLYLKGHTGTAGKQSSLILHGADFSTKDADNDNCMCKCALMLTGGWWFDACGPSNLNGMFYTAGQNHGKLNGIKWHYFKGPSYSLRSTTMMIRPLDF

SEQ ID NO: 17982 - protein, 686 aa, Homo sapiens
MVAERTHKAAATGARGPGELGAPGTVALVAARAERGARLPSPGSCGLLTLALCSLALSLLAHFRTAELQARVLRLEAERGEQQMETAILGRVNQLLDEKWKLHSRRRREAPKTSPGCNCPPGPPGPTGRPGLPGDKGAIGMPGRVGSPGDAGLSIIGPRGPPGQPGTRGFPGFPGPIGLDGKPGHPGPKGDMGLTGPPGQPGPQGQKGEKGQCGEYPHRLLPLLNSVRLAPPPVIKRRTFQGEQSQASIQGPPGPPGPPGPSGPLGHPGLPGPMGPPGLPGPPGPKGDPGIQGYHGRKGERGMPGMPGKHGAKGAPGIAVAGMKGEPGIPGTKGEKGAEGSPGLPGLLGQKGEKGDAGNSIGGGRGEPGPPGLPGPPGPKGEAGVDGQVGPPGQPGDKGERGAAGEQGPDGPKGSKGEPGKGEMVDYNGNINEALQEIRTLALMGPPGLPGQIGPPGAPGIPGQKGEIGLPGPPGHDGEKGPRGKPGDMGPPGPQGPPGKDGPPGVKGENGHPGSPGEKGEKGETGQAGSPGEKGEAGEKGNPGAEVPGLPGPEGPPGPPGLQGVPGPKGEAGLDGAKGEKGFQGEKGDRGPLGLPGTPGPIGVPGPAGPKGERGSKGDPGMTGPTGAAGLPGLHGPPGDKGNRGERGKKGSRGPKGDKGDQGAPGLDAPCPLGEDGLPVQGCWNK

SEQ ID NO: 17983 - protein, 152 aa, Homo sapiens
MPVKCCFYRSPTAETMTWSENMDTLLANQAGLDAFRIFLKSEFSEENVEFWLACEDFKKTKNADKIASKAKMIYSEFIEADAPKEINIDFGTRDLISKNIAEPTLKCFDEAQKLIYCLMAKDSFPRFLKSEIYKKLVNSQQVPNHKKWLPFL

SEQ ID NO: 17984 - protein, 117 aa, Homo sapiens
CQYKHIVDWCGCSPNDFKPQDFLRLQQVSRPTFFARKFESTVNQEVLEILDFHLYGSYPPGTPALKAYWENTYDAADGPSGLSDVMLTAYTAFARLSLHHAATAAPPMGTPLCRATW

SEQ ID NO: 17985 - protein, 265 aa, Homo sapiens
MESNLQGTFLLNNTPLAQFPEMKAPVCQYSVQNSFYKLSPPGLGPQLAAGTPHGITDILSRPVAAPNNSLLSGYPHVAGFGGLSSQGVYYSPQVGNFSKAGNEYPTRTRNCWADTGQDWRGGRQCSNTPDPLSDSIHKKKHTRPTFTGHQIFALEKTFEQTKYLAGPERARLAYSLGMTESQVKVWFQNRRTKWRKKSALEPSSSTPRAPGGAGAGAGGDRAPSENEDDEYNKPLDPDSDDEKIRLLLRKHRAAFSVLSLGAHSV

SEQ ID NO: 17986 - protein, 826 aa, Homo sapiens
MFAGFLQFLLLHTLHSGTGDLDYYWLDPATWHSRETSPISSHPVTWQPSKEGDRLIGRVILNKRTTMPKDSGALLGLKVVGGKMTDLGRLGAFITKVKKGSLADVVGHLRAGDEVLEWNGKPLPGATNEEVYNIILESKSEPQVEIIVSRPIGDIPRIPESSHPPLESSSSSFESQKMERPSISVISPTSPGALKDAPQVLPGQLSVKLWYDKVGHQLIVNVLQATDLPARVDGRPRNPYVKMYFLPDRSDKSKRRTKTVKKILEPKWNQTFVYSHVHRRDFRERMLEITVWDQPRVQEEESEFLGEILIELETALLDDEPHWYKLQTHDESSLPLPQPSPFMPRRHIHGESSSKKLQRSQRISDSDISDYEVDDGIGVVPPVGYRSSARESKSTTLTVPEQQRTTHHRSRSVSPHRGNDQGKPRSRLPNVPLQRSLDEIHPTRRSRSPTRHHDASRSPVDHRTRDVDSQYLSEQDSELLMLPRAKRGRSAECLHTTSELQPFLDRARSASTNCLRPDTSLHSPERERHSRKSERSSIQKQTRKGTASDAERMHRQRSPTQSPPADTSFSSRRGRQLPQVPVRSGSIEQESGHKKLKSTIQRSTETGMAAEMRKMVRQPSRESTDGSINSYSSEGNLIFPGVRLGADSQFSDFLDGLGPAQLVGRQTLATPAMGDIQIGMEDKKGQLEVEVIRARSLTQKPGSKSTPAPYVKVYLLENGACIAKKKTRIARKTLDPLYQQSLVFDESPQGKVLQVIVWGDYGRMDHKCFMGVAQILLEELDLSSMVIGWYKLFPPSSLVDPTLTPLTRRASQSSLESSTGPPCIRS

SEQ ID NO: 17987 - protein, 503 aa, Homo sapiens
MLDHEYTTKEVFRKNFFNDWRKEMAVEEREVIKSLDKCDFTEIHRYFVDKAAARKVLSREEKQKLKEEAEKLQQEFGYCILDGHQEKIGNFKIEPPGLFRGRGDHPKMGMLKRRITPEDVVINCSRDSKIPEPPAGHQWKEVRSDNTVTWLAAWTESVQNSIKYIMLNPCSKLKGETAWQKFETARRLRGFVDEIRSQYRADWKSREMKTRQRAVALYFIDKLALRAGNEKEDGEAADTVGCCSLRVEHVQLHPEADGCQHVVEFDFLGKDCIRYYNRVPVEKPVYKNLQLFMENKDPRDDLFDRLTTTSLNKHLQELMDGLTAKVFRTYNASITLQEQLRALTRAEDSIAAKILSYNRANRVVAILCNHQRATPSTFEKSMQNLQTKIQAKKEQVAEARAELRRARAEHKAQGDGKSRSVLEKKRRLLEKLQEQLAQLSVQATDKEENKQVALGTSKLNYLDPRISIAWCKRFRVPVEKIYSKTQRERFAWALAMAGEDFEF

SEQ ID NO: 17988 - protein, 272 aa, Homo sapiens
MPGGAGAARLCLLAFALQPLRPRAAREPGWTRGSEEGSPKLQHELIIPQWKTSESPVREKHPLKAELRVMAEGRELILDLEKNEQLFAPSYTETHYTSSGNPQTTTRKLEDHCFYHGTVRETELSSVTLSTCRGIRGLITVSSNLSYVIEPLPDSKGQHLIYRSEHLKPPPGNCGFEHSKPTTRDWALQFTQQTKKRPRRMKREDLNSMKYVELYLVADYLEFQKNRRDQDATKHKLIEIANYVDKVRPVLPILEHPDCSRGLGSVDPREHV

SEQ ID NO: 17989 - protein, 1283 aa, Homo sapiens
MSKSLKKKSHWTSKVHESVIGRNPEGQLGFELKGGAENGQFPYLGEVKPGKVAYESGSKLVSEELLLEVNETPVAGLTIRDVLAVIKHCKDPLRLKCVKQGGIVDKDLRHYLNLRFQKGSVDHELQQIIRDNLYLRTVPCTTRPHKEGEVPGVDYIFITVEDFMELEKSGALLESGTYEDNYYGTPKPPAEPAPLLLNVTDQILPGATPSAEGKRKRNKSVSNMEKASIEPPEEEEEERPVVNGNGVVVTPESSEHEDKSAGASGEMPSQPYPAPVYSQPEELKEQMDDTKPTKPEDNEEPDPLPDNWEMAYTEKGEVYFIDHNTKTTSWLDPRLAKKAKPPEECKENELPYGWEKIDDPIYGTYYVDHINRRTQFENPVLEAKRKLQQHNMPHTELGTKPLQAPGFREKPLFTRDASQLKGTFLSTTLKKSNMGFGFTIIGGDEPDEFLQVKSVIPDGPAAQDGKMETGDVIVYINEVCVLGHTHADVVKLFQSVPIGQSVNLVLCRGYPLPFDPEDPANSMVPPLAIMERPPPVMVNGRHNYETYLEYISRTSQSVPDITDRPPHSLHSMPTDGQLDGTYPPPVHDDNVSMASSGATQAELMTLTIVKGAQGFGFTIADSPTGQRVKQILDIQGCPGLCEGDLIVEINQQNVQNLSHTEVVDILKDCPIGSETSLIIHRGGFFSPWKTPKPIMDRWENQGSPQTSLSAPAIPQNLPFPPALHRSSFPDSTEAFDPRKPDPYELYEKSRAIYESRQQVPPRTSFRMDSSGPDYKELDVHLRRMESGFGFRILGGDEPGQPILIGAVIAMGSADRDGRLHPGDELVYVDGIPVAGKTHRYVIDLMHHAARNGQVNLTVRRKVLCGGEPCPENGRSPGSVSTHHSSPRSDYATYTNSNHAAPSSNASPPEGFASHSLQTSDVVIHRKENEGFGFVIISSLNRPESGSTITVPHKIGRIIDGSPADRCAKLKVGDRILAVNGQSIINMPHADIVKLIKDAGLSVTLRIIPQEELNSPTSAPSSEKQSPMAQQSPLAQQSPLAQPSPATPNSPIAQPAPPQPLQLQGHENSYRSEVKARQDVKPDIRQPPFTDYRQPPLDYRQPPGGDYQQPPPLDYRQPPLLDYRQHSPDTRQYPLSDYRQPQDFDYFTVDMEKGAKGFGFSIRGGREYKMDLYVLRLAEDGPAIRNGRMRVGDQIIEINGESTRDMTHARAIELIKSGGRRVRLLLKRGTGQVPEYGMVPSSLSMCMKSDKHGSPYFYLLGHPKDTTNPPPGVLPLPPPQVCRK

SEQ ID NO: 17990 - protein, 890 aa, Homo sapiens
MEGKSYVFRVLSANRHGLSEPSEITSPIQAQDVTVVPSAPGRVLASRNTKTSVVVQWDRPKHEEDLLGYYVDCCVAGTNLWEPCNHKPIGYNRFVVHGLTTGEQYIFRVKAVNAVGMSENSQESDVIKVQAALTVPSHPYGITLLNCDGHSMTLGWKVPKFSGGSPILGYYLDKREVHHKNWHEVNSSPSKPTILTVDGLTEGSLYEFKIAAVNLAGIGEPSDPSEHFKCEAWTMPEPGPAYDLTFCEVRDTSLVMLWKAPVYSGSSPVSGYFVDFREEDAGEWITVNQTTTASRYLKVSDLQQGKTYVFRVRAVNANGVGKPSDTSEPVLVEARPGTKEISAGVDEQGNIYLGFDCQEMTDASQFTWCKSYEEISDDERFKIETVGDHSKLYLKNPDKEDLGTYSVSVSDTDGVSSSFVLDPEELERLMALSNEIKNPTIPLKSELAYEIFDKGRVRFWLQAEHLSPDASYRFIINDREVSDSEIHRIKCDKATGIIEMVMDRFSIENEGTYTVQIHDGKAKSQSSLVLIGDAFKTVLEEAEFQRKEFLRKQGPHFAEYLHWDVTEECEVRLVCKVANTKKETVFKWLKDDVLYETETLPNLERGICELLIPKLSKKDHGEYKATLKDDRGQDVSILEIAGKVYDDMILAMSRVCGKSASPLKVLCTPEGIRLQCFMKYFTDEMKVNWCHKDAKISSSEHMRIGGSEEMAWLQICEPTEKDKGKYTFEIFDGKDNHQRSLDLSGQAFDEAFAEFQQFKAAAFAEKNRGRLIGGLPDVVTIMEGKTLNLTCTVFGNPDPEVIWFKNDQDIQLSEHFSVKVEQAKYVSMTIKGVTSEDSGKYSINIKNKYGGEKIDVTVSVYKHGEKIPDMAPPQQAKPKLIPASASAAGQ

SEQ ID NO: 17991 - protein, 276 aa, Homo sapiens
MAPLRFSANLSWLFPELSGLPARVRAAGSSGFEAVEVAWPYAETPEALARAAREAGLRLVLINTPPGDQEKGEMGLGAVPGRQAAFREGLEQAVRYAKALGCPRIHLMAGRVPQGADRIAVKAEMEAVFLENLRHAAGVLAQEDLVGLLEPINTRITDPQYFLDTPQQAAAILQKVGRPNLQLQMDIFHWQIMDGNLTGNIREFLPIVGHVQVAQVPGRGEPSSPGELNFPYLFQLLEDEGYKGFVGCEYQPRGEAWPWGRELWRDPDRGCFLLVG

SEQ ID NO: 17992 - protein, 1692 aa, Homo sapiens
MSSAVGPRGPRPPTVPPPMQELPDLSHLTEEERNIIMAVMDRQKEEEEKEEAMLKCVVRDMAKPAACKTPRNAENQPHQPSPRLHQQFESYKEQVRKIGEEARRYQGEHKDDAPTCGICHKTKFADGCGHLCSYCRTKFCARCGGRVSLRSNNEDKVVMWVCNLCRKQQEILTKSGAWFFGSGPQQTSQDGTLSDTATGAGSEVPREKKARLQERSRSQTPLSTAAASSQDAAPPSAPPDRSKGAEPSQQALGPEQKQASSRSRSEPPRERKKTPGLSEQNGKGALKSERKRVPKTSAQPVEGAVEERERKERRESRRLEKGRSQDYPDTPEKRDEGKAADEEKQRKEEDYQTRYRSDPNLARYPVKPPPEEQQMRMHARVSRARHERRHSDVALPRTEAGAALPEGKAGKRAPAAARASPPDSPRAYSAERTAETRAPGAKQLTNHSPPAPRHGPVPAEAPELKAQEPLRKQSRLDPSSAVLMRKAKREKVETMLRNDSLSSDQSESVRPSPPKPHRSKRGGKKRQMSVSSSEEEGVSTPEYTSCEDVELESESVSEKGDLDYYWLDPATWHSRETSPISSHPVTWQPSKEGDRLIGRVILNKRTTMPKDSGALLGLKVVGGKMTDLGRLGAFITKVKKGSLADVVGHLRAGDEVLEWNGKPLPGATNEEVYNIILESKSEPQVEIIVSRPIGDIPRIPESSHPPLESSSSSFESQKMERPSISVISPTSPGALKDAPQVLPGQLSVKLWYDKVGHQLIVNVLQATDLPARVDGRPRNPYVKMYFLPDRSDKSKRRTKTVKKILEPKWNQTFVYSHVHRRDFRERMLEITVWDQPRVQEEESEFLGEILIELETALLDDEPHWYKLQTHDESSLPLPQPSPFMPRRHIHGESSSKKLQRSQRISDSDISDYEVDDGIGVVPPVGYRSSARESKSTTLTVPEQQRTTHHRSRSVSPHRGNDQGKPRSRLPNVPLQRSLDEIHPTRRSRSPTRHHDASRSPVDHRTRDVDSQYLSEQDSELLMLPRAKRGRSAECLHTTRHLVRHYKTLPPKMPLLQSSSHWNIYSSILPAHTKTKSVTRQDISLHHECFNSTVLRFTDEILVSELQPFLDRARSASTNCLRPDTSLHSPERERGRWSPSLDRRRPPSPRIQIQHASPENDRHSRKSERSSIQKQTRKGTASDAERVLPTCLSRRGHAAPRATDQPVIRGKHPARSRSSEHSSIRTLCSMHHLVPGGSAPPSPLLTRMHRQRSPTQSPPADTSFSSRRGRQLPQVPVRSGSIEQASLVVEERTRQMKMKVHRFKQTTGSGSSQELDREQYSKYNIHKDQYRSCDNVSAKSSDSDVSDVSAISRTSSASRLSSTSFMSEQSERPRGRISSFTPKMQGRRMGTSGRSIMKSTSVSGEMYTLEHNDGSQSDTAVGTVGAGGKKRRSSLSAKVVAIVSRRSRSTSQLSQTESGHKKLKSTIQRSTETGMAAEMRKMVRQPSRESTDGSINSYSSEGNLIFPGVRLGADSQFSDFLDGLGPAQLVGRQTLATPAMGDIQIGMEDKKGQLEVEVIRARSLTQKPGSKSTPAPYVKVYLLENGACIAKKKTRIARKTLDPLYQQSLVFDESPQGKVLQVIVWGDYGRMDHKCFMGVAQILLEELDLSSMVIGWYKLFPPSSLVDPTLTPLTRRASQSSLESSTGPPCIRS

SEQ ID NO: 17993 - protein, 211 aa, Homo sapiens
MKSSDIDQDLFTDSYCKVCSAQLISESQRVAHYESRKHASKVRLYYMLHPRDGGCPAKRLRSENGSDADMVDKNKCCTLCNMSFTSAVVADSHYQGKIHAKRLKLLLGEKTPLKTTATPLSPLKPPRMDTAPVVASPYQRRDSDRYCGLCAAWFNNPLMAQQHYDGKKHKKNAARVALLEQLGTTLDMGELRGLRRNYRCTICSVSLNSIE

SEQ ID NO: 17994 - protein, 491 aa, Homo sapiens
MGCIKSKGKDSLSDDGVDLKTQPVPESQLLPGQRFQTKDPEEQGDIVVALYPYDGIHPDDLSFKKGEKMKVLEEHGEWWKAKSLLTKKEGFIPSNYVAKLNTLETEEWFFKDITRKDAERQLLAPGNSAGAFLIRESETLKGSFSLSVRDFDPVHGDVIKHYKIRSLDNGGYYISPRITFPCISDMIKHYQKQADGLCRRLEKACISPKPQKPWDKDAWEIPRESIKLVKRLGAGQFGEVWMGYYNNSTKVAVKTLKPGTMSVQAFLEEANLMKTLQHDKLVRLYAVVTREEPIYIITEYMAKGSLLDFLKSDEGGKVLLPKLIDFSAQIAEGMAYIERKNYIHRDLRAANVLVSESLMCKIADFGLARVIEDNEYTAREGAKFPIKWTAPEAINFGCFTIKSDVWSFGILLYEIVTYGKIPYPGRTNADVMTALSQGYRMPRVENCPDELYDIMKMCWKEKAEERPTFDYLQSVLDDFYTATEGQYQQQP

SEQ ID NO: 17995 - protein, 1278 aa, Homo sapiens
IEVFFKEIFLYILETSTSSFDHKWMVIQTLTRICADAQSVVDIYVNYDCDLNAANIFERLVNDLSKIAQGRGSQELGMSNVQELSLRKKGLECLVSILKCMVEWSKDQYVNPNSQTTLGQEKPSEQEMSEIKHPETINRYGSLNSLESTSSSGIGSYSTQMSGTDNPEQFEVLKQQKEIIEQGIDLFNKKPKRGIQYLQEQGMLGTTPEDIAQFLHQEERLDSTQVGEFLGDNDKFNKEVMYAYVDQHDFSGKDFVSALRMFLEGFRLPGEAQKIDRLMEKFAARYLECNQGQTLFASADTAYVLAYSIIMLTTDLHSPQVKNKMTKEQYIKMNRGINDSKDLPEEYLSAIYNEIAGKKISMKETKELTIPTKSSKQNVASEKQRRLLYNLEMEQMAKTAKALMEAVSHVQAPFTSATHLEHVRPMFKLAWTPFLAAFSVGLQDCDDTEVASLCLEGIRCAIRIACIFSIQLERDAYVQALARFTLLTVSSGITEMKQKNIDTIKTLITVAHTDGNYLGNSWHEILKCISQLELAQLIGTGVKPRYISGTVRGREGSLTGTKDQAPDEFVGLGLVGGNVDWKQIASIQESIGETSSQSVVVAVDRIFTGSTRLDGNAIVDFVRWLCAVSMDELLSTTHPRMFSLQKIVEISYYNMGRIRLQWSRIWEVIGDHFNKVGCNPNEDVAIFAVDSLRQLSMKFLEKGELANFRFQKDFLRPFEHIMKRNRSPTIRDMVVRCIAQMVNSQAANIRSGWKNIFSVFHLAASDQDESIVELAFQTTGHIVTLVFEKHFPATIDSFQDAVKCLSEFACNAAFPDTSMEAIRLIRHCAKYVSDRPQAFKEYTSDDMNVAPEDRVWVRGWFPILFELSCIINRCKLDVRTRGLTVMFEIMKTYGHTYEKHWWQDLFRIVFRIFDNMKLPEQQTEKAEWMTTTCNHALYAICDVFTQYLEVLSDVLLDDIFAQLYWCVQQDNEQLARSGTNCLENVVILNGEKFTLEIWDKTCNCTLDIFKTTIPHALLTWRPNSGETAPPPPSPVSEKPLDTISQKSVDIHDSIQPRSVDNRPQAPLVSASAVNEEVSKIKSTAKFPEQKLFAALLIKCVVQLELIQTIDNIVFFPATSKKEDAENLAAAQRDAVDFDVRVDTQDQGMYRFLTSQQLFKLLDCLLESHRFAKAFNSNNEQRTALWKAGFKGKSKPNLLKQETSSLACGLRILFRMYMDESRVSAWEEVQQRLLNVCSEALSYFLTLTSESHREAWTNLLLLFLTKVLKISDNRTKRTL

SEQ ID NO: 17996 - protein, 563 aa, Homo sapiens
SLILQKKPNIRNTSSMAGELRPASLVVLPRSLAPAFERFCQVNTGPLPLLGQSEPEKWMLPPQGAISETRMGHPQFWKYEFGACTGSLASLEQYSEQLKDMVAFFLGCSFSLEEALEKAGLPRRDPAGHSQAGAYKTTVPCVTHAGFCCPLVVTMRPIPKDKLEGLVRACCSLGGEQGQPVHMGDPELLGIKELSKPAYGDAMVCPPGEVPVFWPSPLTSLGAVSSCETPLAFASIPGCTVMTDLKDAKAPPGCLTPERIPEVHHISQDPLHYSIASVSASQKIRELESMIGIDPGNRGIGHLLCKDELLKASLSLSHARSVLITTGFPTHFNHEPPEETDGPPGAVALVAFLQALEKEVAIIVDQRAWNLHQKIVEDAVEQGVLKTQIPILTYQGGSVEAAQAFLCKNGDPQTPRFDHLVAIERAGRAADGNYYNARKMNIKHLVDPIDDLFLAAKKIPGISSTGVGDGGNELGMGKVKEAVRRHIRHGDVIACDVEADFAVIAGVSNWGGYALACALYILYSCAVHSQYLRKAVGPSRAPGDQAWTQALPSVIKESKGRKL

SEQ ID NO: 17997 - protein, 610 aa, Homo sapiens
MTEGSMGVTLEASAEADLKAGNSCPELVPSRRSKLRKPKPVPLRKKAIGGEFSDTNAAVEGTPLPKASYHFSPEELDENTSPLLGDARFQKSPPDLKETPGTLSSDTNDSGVELGEESRSSPLKLEFDFTEDTGNIEARKALPRKLGRKLGSTLTPKIQKDGISKSAGLEQPTDPVARDGPLSQTSSKPDPSQWESPSFNPFGSHSVLQNSPPLSSEGSYHFDPDNFDESMDPFKPTTTLTSSDFCSPTGNHVNEILESPKKAKSRLITSGCKVKKHETQSLALDACSRDEGAVISQISDISNRDGHATDEEKLASTSCGQKSAGAEVKGEPEEDLEYFECSNVPVSTINHAFSSSEAGIEKETCQKMEEDGSTVLGLLESSAEKAPVSVSCGGESPLDGICLSESDKTAVLTLIREEIITKEIEANEWKKKYEETRQEVLEMRKIVAEYEKTIAQMIEDEQRTSMTSQKSFQQLTMEKEQALADLNSVERSLSDLFRRYENLKGVLEGFKKNEEALKKCAQDYLARVKQEEQRYQALKIHAEEKLDKANEEIAQVRTKAKAESAALHAGLRKEQMKVESLERALQQKNQEIEELTKICDELIAKLGKTD

SEQ ID NO: 17998 - protein, 376 aa, Homo sapiens
MLDHEYTTKEVFRKNFFNDWRKEMAVEEREVIKSLDKCDFTEIHRYFVDKAAARKVLSREEKQKLKEEAEKLQQEFGYCILDGHQEKIGNFKIEPPGLFRGRGDHPKMGMLKRRITPEDVVINCSRDSKIPEPPAGHQWKEVRSDNTVTWLAAWTESVQNSIKYIMLNPCSKLKGETAWQKFETARRLRGFVDEIRSQYRADWKSREMKTRQRAVALYFIDKLALRAGNEKEDGEAADTVGCCSLRVEHVQLHPEADGCQHVVEFDFLGKDCIRYYNRVPVEKPVYKNLQLFMENKDPRDDLFDRLTVSWDGPAKPRNYRDHFPPQTTSLNKHLQELMDGLTAKVFRTYNASITLQEQLRALTRAEDSIAAKILSY

SEQ ID NO: 17999 - protein, 147 aa, Homo sapiens
MSVTKSTEGPQGAVAIKLDLMSPPESAKKLENKDSTFLDESPSESAGLKKTKGITVFQALIHLVKGNMGTGILGLPLAVKNAGILMGPLSLLVMGFIACHCMHILVKCAQRFCKRLNKPFMDYGDTVMHGLEANPNAWLQNHAHWGR

SEQ ID NO: 18000 - protein, 538 aa, Homo sapiens
MLQINQMFSVQLSLGEQTWESEGSSIKKAQQAVANKALTESTLPKPVQKPPKSNVNNNPGSITPTVELNGLAMKRGEPAIYRPLDPKPFPNYRANYNFRGMYNQRYHCPVPKIFYVQLTVGNNEFFGEGKTRQAARHNAAMKALQALQNEPIPERSPQNGESGKDVDDDKDANKSEISLVFEIALKRNMPVSFEVIKESGPPHMKSFVTRVSVGEFSAEGEGNSKKLSKKRAATTVLQELKKLPPLPVVEKPKLFFKKRPKTIVKAGPEYGQGMNPISRLAQIQQAKKEKEPDYVLLSERGMPRRREFVMQVKVGNEVATGTGPNKKIAKKNAAEAMLLQLGYKASTNLQDQLEKTGENKGWSGPKPGFPEPTNNTPKGILHLSPDVYQEMEASRHKVISGTTLGYLSPKDMNQPSSSFFSISPTSNSSATIARELLMNGTSSTAEAIGLKGSSPTPPCSPVQPSKQLEYLARIQGFQAALSALKQFSEQGLDPIDGAMNIEKGSLEKQAKHLREKADNNQAPPGSIAQDCKKSNSAV

SEQ ID NO: 18001 - protein, 105 aa, Homo sapiens
MVMEKPSPLLVGREFVRQYYTLLNQAPDMLHRFYGKNSSYVHGGLDSNGKPADAVYGQKEIHRKVMSQNFTNCHTKIRHVDAHATLNDGVVVQVMGLLSNNNQAL

SEQ ID NO: 18002 - protein, 291 aa, Homo sapiens
MPVSFEVIKESGPPHMKSFVTRVSVGEFSAEGEGNSKKLSKKRAATTVLQELKKLPPLPVVEKPKLFFKKRPKTIVKAGPEYGQGMNPISRLAQIQQAKKEKEPDYVLLSERGMPRRREFVMQVKVGNEVATGTGPNKKIAKKNAAEAMLLQLGYKASTNLQDQLEKTGENKGWSGPKPGFPEPTNNTPKGILHLSPDVYQEMEASRHKVISGTTLGYLSPKDMNQPSSSFFSISPTSNSSATIARELLMNGTSSTAEAIGLKGSSPTPPCSPVQPSKQLEYLARIQGFQV

SEQ ID NO: 18003 - protein, 258 aa, Homo sapiens
MGRQGLGGASAAGRSMQRSQSRSSLSASFEALAGYFPCMNSLEEEEGEAGGKKLRSTVQRSTETGLAVEMRNWMTRQASRESTDGSMNSYSSEGNLIFPGVRLASDSQFSDFLDGLGPAQLVGRQTLATPAMGDIQVGMMDKKGQLEVEIIRARGLVVKPGSKTLPAPYVKVYLLDNGVCIAKKKTKVARKTLEPLYQQLLSFEESPQGKVLQIIVWGDYGRMDHKSFMGVAQILLDELELSNMVIGWFKLFPPSSLV

SEQ ID NO: 18004 - protein, 137 aa, Homo sapiens
MEEKELQASKNLVTFTPSKDSTKDSFQIATLICSTKLTQNVDLLGLLNWRSNSQNIKHNLKKLMEVDGGEIVKFLQDTLDALFNIMMEMSDSETYDFLVFDALVFIISLIGDIKFQHFNPVLETYIYKHFSATLAYV

SEQ ID NO: 18005 - protein, 293 aa, Homo sapiens
MMTMTTMADGLEGQDSSKSAFMEFGQQQQQQQQQQQQQQQQQQQPPPPPPPPPQPHSQQSSPAMAGAHYPLHCLHSAAAAAAAGSHHHHHHQHHHHGSPYASGGGNSYNHRSLAAYPYMSHSQHSPYLQSYHNSSAAAQTRGDDTDQQKTTVIENGEIRFNGKGKKIRKPRTIYSSLQLQALNHRFQQTQYLALPERAELAASLGLTQTQVKIWFQNKRSKFKKLLKQGSNPHESDPLQGSAALSPRSPALPPVWDVSASAKGVSMPPNSYMPGYSHWYSSPHQDTMQRPQMM

SEQ ID NO: 18006 - protein, 489 aa, Homo sapiens
LEQIDMLFFGGSAVSGITSAVYSVARSVLAAALLHAVCFSAVKEPWSMQHIPALFSAFCGLLVALSYHLSRQSSDPSVLMSFIQCRLFPKFLHQNLAESAADPLPKKMKDSVTDVLKWDLIVCAVVAVLSFAVSASTVFLSLRPFLSIVLFALAGAVGFVTHYVLPQLRKHHPWMWISHPILKNKEYHQREVRDVAHLMWFERLYVWLQCFEKYILYPALILNALTIDAFLISNHRRLGTHWDIFLMIIAGMKLLRTSFCNPVYQFINLSFTVIFFHFDYKDISESFLLDFFMVSILFSKLGDLLHKLQFVLTYVAPWQMAWGSSFHVFAQLFAIPHSAMLFFQTIATSIFSTPLSPFLGSVIFITSYVRPVKFWEKNYNTRRVDNSNTRLAVQIERDPGNDDNNLNSIFYEHLTRTLQESLCGDLVLGRWGNYSSGDCFILASDDLNAFVHLIEIGNGLVTFQLRGLEFREYNILYGNVSQTPLLDQK

SEQ ID NO: 18007 - protein, 724 aa, Homo sapiens
IAENMADLIDGYCRLVNGTSQSFIIRPQKEGERALPSIPKLANSEKQGMRTHAVSVSETDDYAEIIDEEDTYTMPSKSYGIDEARDYEIQRERIELGRCIGEGQFGDVHQGIYMSPENPALAVAIKTCKNCTSDSVREKFLQEALTMRQFDHPHIVKLIGVITENPVWIIMELCTLGELRSFLQVRKYSLDLASLILYAYQLSTALAYLESKRFVHRDIAARNVLVSSNDCVKLGDFGLSRYMEDSTYYKASKGKLPIKWMAPESINFRRFTSASDVWMFGVCMWEILMHGVKPFQGVKNNDVIGRIENGERLPMPPNCPPTLYSLMTKCWAYDPSRRPRFTELKAQLSTILEEEKAQQEERMRMESRRQATVSWDSGGSDEAPPKPSRPGYPSPRSSEGFYPSPQHMVQTNHYQVSGYPGSHGITAMAGSIYPGQASLLDQTDSWNHRPQEIAMWQPNVEDSTVLDLRGIGQVLPTHLMEERLIRQQQEMEEDQRWLEKEERFLKPDVRLSRGSIDREDGSLQGPIGNQHIYQPVGKPDPAAPPKKPPRPGAPGHLGSLASLSSPADSYNEGVKLQPQEISPPPTANLDRSNDKVYENVTGLVKAVIEMSSKIQPAPPEEYVPMVKEVGLALRTLLATVDETIPLLPASTHREIEMAQKLLNSDLGELINKMKLAQQYVMTSLQQEYKKQMLTAAHALAVDAKNLLDVIDQARLKMLGQTRPH

SEQ ID NO: 18008 - protein, 401 aa, Homo sapiens
MIIEMATGNPYLPSSSDLDLLHKIVLKVGNLSPHLQNIFSKSPIFAGVVLPQVQHPKNARKKYPKLNGLLADIVHACLQIDPADRISSSDLLHHEYFTRDGFIEKFMPELKAKLLQEAKVNSLIKPKESSKENELRKDERKTVYTNTLLSSSVLGKEIEKEKKPKEIKVRVIKVKGGRGDISEPKKKEYEGGLGQQDANENVHPMSPDTKLVTIEPPNPINPSTNCNGLKENPHCGGSVTMPPINLTNSNLMAANLSSNLFHPSVRLTERAKKRRTSSQSIGQVMPNSRQEDPGPIQSQMEKGIFNERTGHSDQMANENKRKLNFSRSDRKEFHFPELPVTIQSKDTKGMEVKQIKMLKRESKKTESSKIPTLLNVDQNQEKQENTGNAQTERKKNLPDVE

SEQ ID NO: 18009 - protein, 160 aa, Homo sapiens
AVPGRQAAFREGLEQAVRYAKALGCPRIHLMAGRVPQGADRIAVKAEMEAVFLENLRHAAGVLAQEDLVGLLEPINTRITDPQYFLDTPQQAAAILQKDIFHWQIMDGNLTGNIREFLPIVGHVQVAQVPGRGEPSSPGELNFPYLFQLLEDEGYKGFVG

SEQ ID NO: 18010 - protein, 877 aa, Homo sapiens
MSGQTLTDRIAAAQYSVTGSAVARAVCKATTHEVMGPKKKHLDYLIQATNETNVNIPQMADTLFERATNSSWVVVFKALVTTHHLMVHGNERFIQYLASRNTLFNLSNFLDKSGSHGYDMSTFIRRYSRYLNEKAFSYRQMAFDFARVKKGADGVMRTMAPEKLLKSMPILQGQIDALLEFDVHPNELTNGVINAAFMLLFKDLIKLFACYNDGVINLLEKFFEMKKGQCKDALEIYKRFLTRMTRVSEFLKVAEQVGIDKGDIPDLTQAPSSLMETLEQHLNTLEGKKPGNKSGAPSPLSKSSPATTVTSPNSTPAKTIDTSPPVDLFATASAAVPVSTSKPSSDLLDLQPDFSSGGAAAAAAPAPPPPAGGATAWGDLLGEDSLAALSSVPSEAQISDPFAPEPTPPTTTAEIATASASASTTTTVTAVTAEVDLFGDAFAASPGEAPAASEGAAAPATPTPVAAALDACSGNDPFAPSEGSAEAAPELDLFAMKPPETSVPVVTPTASTAPPVPATAPSPAPAVAAAAAATTAATAAATTTTTTSAATATTAPPALDIFGDLFESTPEVAAAPKPDAAPSIDLFSTDAFSSPPQGASPVPESSLTADLLSDAFGSSASEPQPASQAASSSSASADLLAGFGGSFMAPSPSPVTPAQNNLLQPNFEAAFGTTPSTSSSSSFDPSVFDGLGDLLMPTMAPAGQPAPVSMVPPSPAMAASKALGSDLDSSLASLVGNLGISGTTTKKGDLQWNAGEKKLTGGANWQPKVAPATWSAGVPPSAPLQGAVPPTSSVPPVAGAPSVGQPGAGFGMPPAGTGMPMMPQQPVMFAQPMMRPPFGAAAVPGTQLSPSPTPASQSPKKPPAKDPLADLNIKDFL

SEQ ID NO: 18011 - protein, 135 aa, Homo sapiens
MEIPPVELPPEEPPNICQLIPELELLPEKEKEKEKEKEDDEEEEDEDASGGDQDQEERRWNKRTQQMLHGLQRALAKTGAESISLLELCRNTNRKQAAAKFYSFLVLKKQQAIELTQEEPYSDIIATPGPRFHII

SEQ ID NO: 18012 - protein, 51 aa, Homo sapiens
MNKDAQMRAAINQKLIETGERERLKELLRAKLIECGWKDQLKAHCKDNDFK

SEQ ID NO: 18013 - protein, 464 aa, Homo sapiens
MILANVFCLFFFLDETLRSLASPSSLQGPELHGWRPPVDCVRANELCAAESNCSSRYRTLRQCLAGRDRNTMLANKECQAALEVLQESPLYDCRCKRGMKKELQCLQIYWSIHLGLTEGEEFYEASPYEPVTSRLSDIFRLASIFSGTGADPVVSAKSNHCLDAAKACNLNDNCKKLRSSYISICNREISPTERCNRRKCHKALRQFFDRVPSEYTYRMLFCSCQDQACAERRRQTILPSCSYEDKEKPNCLDLRGVCRTDHLCRSRLADFHANCRASYQTVTSCPADNYQACLGSYAGMIGFDMTPNYVDSSPTGIVVSPWCSCRGSGNMEEECEKFLRDFTENPCLRNAIQAFGNGTDVNVSPKGPSFQATQAPRVEKTPSLPDDLSDSTSLGTSVITTCTSVQEQGLKANNSKELSMCFTELTTNIIPGSNKVIKPNSGPSRARPSAALTVLSVLMLKLAL

SEQ ID NO: 18014 - protein, 620 aa, Homo sapiens
MDAEAEDKTLRTRSKGTEVPMDSLIQELSVAYDCSMAKKRTAEDQALGVPVNKRKSLLMKPRHYSPKADCQEDRSDRTEDDGPLETHGHSTAEEIMIKPMDESLLSTAQENSSRKEDRYSCYQELMVKSLMHLGKFEKNVSVQTVSENLNDSGIQSLKAESDEADECFLIHSDDGRDKIDDSQPPFCSSDDNESNSESAENGWDSGSNFSEETKPPRVPKYVLTDHKKDLLEVPEIKTEGDKFIPCENRCDSETERKDPQNALAEPLDGNAQPSFPDVEEEDSESLAVMTEEGSDLEKAKGNLSLLEQAIALQAERGCVFHNTYKELDRFLLEHLAGERRQTKVIDMGGRQIFNNKHSPRPEKRETKCPIPGCDGTGHVTGLYPHHRSLSGCPHKVRVPLEILAMHENVLKCPTPGCTGRGHVNSNRNTHRSLSGCPIAAAEKLAMSQDKNQLDSPQTGQCPDQAHRTSLVKQIEFNFPSQAITSPRATVSKEQEKFGKVPFDYASFDAQVFGKRPLIQTVQGRKTPPFPESKHFPNPVKFPNRLPSAGAHTQSPGRASSYSYGQCSEDTHIAAAAAILNLSTRCREATDILSNKPQSLHAKGAEIEVDENGTLDLSMKK

SEQ ID NO: 18015 - protein, 55 aa, Homo sapiens
MDLITVHLLYGCPSLLHGPTLAGTVLGAAGDPRPWPVHASQPPYTGHPYVLPFRA

SEQ ID NO: 18016 - protein, 947 aa, Homo sapiens
MFQTKLRNETWEDLPKMSCTTEIQAAFILSSFVTFFSGLIILLIFRLIWRSVKKWQIIKGTGIILELFTSGTIARSHVRSLHFQGQFRDHIEMLLSAQTFVGQVLVILVFVLSIGSLIIYFINSADPVGSCSSYEDKTIPIDLVFNAFFSFYFGLRFMAADDKIKFWLEMNSIVDIFTIPPTFISYYLKSNWLGLRFLRALRLLELPQILQILRAIKTSNSVKFSKLLSIILSTWFTAAGFIHLVENSGDPWLKGRNSQNISYFESIYLVMATTSTVGFGDVVAKTSLGRTFIMFFTLGSLILFANYIPEMVELFANKRKYTSSYEALKGKKFIVVCGNITVDSVTAFLRNFLRDKSGEINTEIVFLGETPPSLELETIFKCYLAYTTFISGSAMKWEDLRRVAVESAEACLIIANPLCSDSHAEDISNIMRVLSIKNYDSTTRIIIQILQSHNKVYLPKIPSWNWDTGDNIICFAELKLGFIAQGCLVPGLCTFLTSLFVEQNKKVMPKQTWKKHFLNSMKNKILTQRLSDDFAGMSFPEVARLCFLKMHLLLIAIEYKSLFTDGFCGLILNPPPQVRIRKNTLGFFIAETPKDVRRALFYCSVCHDDVFIPELITNCGCKSRSRQHITVPSVKRMKKCLKGISSRISGQDSPPRVSASTSSISNFTTRTLQHDVEQDSDQLDSSGMFHWCKPTSLDKVTLKRTGKSKYKFRNHIVACVFGDAHSAPMGLRNFVMPLRASNYTRKELKDIVFIGSLDYLQREWRFLWNFPQIYILPGCALYSGDLHAANIEQCSMCAVLSPPPQPSSNQTLVDTEAIMATLTIGSLQIDSSSDPSPSVSEETPGYTNGHNEKSNCRKVPILTELKNPSNIHFIEQLGGLEGSLQETNLHLSTAFSTGTVFSGSFLDSLLATLMWKLAIKGSQFQGRSSGLCWPSTIIMSWNCFRCW

SEQ ID NO: 18017 - protein, 105 aa, Homo sapiens
MESKALLVLTLAVWLQSLTASRGGVAAADQRRDFIDIESKFALRTPEDTAEDTCHLIPGVAESVATCHFNHSSKTFMVIHGWTVTGMYESWVPKLVAALYKREPD

SEQ ID NO: 18018 - protein, 348 aa, Homo sapiens
MDFRTACEETKTGICLLQDGNQEPFKVRLHLAKDILMIQEQDVICVSGEPFYSGERTVTIRRQTVGGFGLSIKGGAEHNIPVVVSKISKEQRAELSGLLFIGDAILQINGINVRKCRHEEVVQVLRNAGEEVTLTVSFLKRAPAFLKLPLNEDCACAPSDQSSGTSSPLCDSGLHLNYHPNNTDTLSCSSWPTSPGLRWEKRWCDLRLIPLLHSRFSQYVPGTDLSRQNAFQVIAVDGVCTGIIQCLSAEDCVDWLQAIATNISNLTKHNIKKINRNFPVNQQIVYMGWCEAREQDPLQDRVYSPTFLALRGSCLYKFLAPPVTTWDWTRAEKTFSVYEIMCKILKPV

SEQ ID NO: 18019 - protein, 1298 aa, Homo sapiens
MSAPAGSSHPAASARIPPKFGGAAVSGAAAPAGPGAGPAPHQQNETGFHHVAQASLELLDPSNLPASASQIAGSTGPAQNQMQVPSGYGLHHQNYIAPSGHYSQGPGKMTSLPLDTQCGDYYSALYTVPTQNVTPNTVNQQPGAQQLYSRGPPAPHIVGSTLGSFQGAASSASHLHTSASQPYSSFVNHYNSPAMYSASSSVASQGFPSTCGHYAMSTVSNAAYPSVSYPSLPAGDTYGQMFTSQNAPTVRPVKDNSFSGQNTAISHPSPLPPLPSQQHHQQQSLSGYSTLTWSSPGLPSTQDNLIRNHTGSLAVANNNPTITVADSLSCPVMQNVQPPKSSPVVSTVLSGSSGSSSTRTPPTANHPVEPVTSVTQPSELLQQKGVQYGEYVNNQASSAPTPLSSTSDDEEEEEEDEEAGVDSSSTTSSASPMPNSYDALEGGSYPDMLSSSASSPAPDPAPEPDPASAPAPASAPAPVVPQPSKMAKPFGYGYPTLQPGYQNATAPLISGVQPSNPVYSGFQQYPQYPGVNQLSSSIGGLSLQSSPQPESLRPVNLTQERNILPMTPVWAPVPNLNADLKKLNCSPDSFRCTLTNIPQTQALLNKAKLPLGLLLHPFRDLTQLPVITSNTIVRCRSCRTYINPFVSFIDQRRWKCNLCYRVNDVPEEFMYNPLTRSYGEPHKRPEVQNSTVEFIASSDYMLRPPQPAVYLFVLDVSHNAVEAGYLTILCQSLLENLDKLPGDSRTRIGFMTFDSTIHFYNLQEGLSQPQMLIVSDIDDVFLPTPDSLLVNLYESKELIKDLLNALPNMFTNTRETHSALGPALQAAFKLMSPTGGRVSVFQTQLPSLGAGLLQSREDPNQRSSTKVVQHLGPATDFYKKLALDCSGQQTAVDLFLLSSQYSDLASLACMSKYSAGCIYYYPSFHYTHNPSQAEKLQKDLKRYLTRKIGFEAVMRIRCTKGLSMHTFHGNFFVRSTDLLSLANINPDAGFAVQLSIEESLTDTSLVCFQTALLYTSSKGERRIRVHTLCLPVVSSLADVYAGVDVQAAICLLANMAVDRSVSSSLSDARDALVNAVVDSLSAYGSTVSNLQHSALMAPSSLKLFPLYVLALLKQKAFRTGTSTRLDDRVYAMCQIKSQPLVHLMKMIHPNLYRIDRLTDEGAVHVNDRIVPQPPLQKLSAEKLTREGAFLMDCGSVFYIWVGKGCDNNFIEDVLGYTNFASIPQKMTHLPELDTLSSERARSFITWLRDSRPLSPILHIVKDESPAKAEFFQHLIEDRTEAAFSYYEFLLHVQQQICK

SEQ ID NO: 18020 - protein, 469 aa, Homo sapiens
MLKVHYPKFGVSEDCLYLNIYAPAHADTGSKLPVLVWFPGGAFKTGSASIFDGSALAAYEDVLVVVVQYRLGIFGFFTTWDQHAPGNWAFKDQVAALSWVQKNIEFFGGDPSSVTIFGESAGAISVSSLILSPMAKGLFHKAIMESGVAIIPYLEAHDYEKSEDLQVVAHFCGNNASDSEALLRCLRTKPSKELLTLSQKTKSFTRVVDGAFFPNEPLDLLSQKAFKAIPSIIGVNNHECGFLLPMKEAPEILSGSNKSLALHLIQNILHIPPQYLHLVANEYFHDKHSLTEIRDSLLDLLGDVFFVVPALITARYHRDAGAPVYFYEFRHRPQCFEDTKPAFVKADHADEVRFVFGGAFLKGDIVMFEGATEEEKLLSRKMMKYWATFARTGNPNGNDLSLWPAYNLTEQYLQLDLNMSLGQRLKEPRVDFWTSTIPLILSASDMLHSPLSSLTFLSLLQPFFFFCAP

SEQ ID NO: 18021 - protein, 202 aa, Homo sapiens
MRRKEKRLLQAVALVLAALVLLPNVGLWALYRERQPDGTPGGSGAAVAPAAGQGSHSRQKKTFFLGDGQKLKDWHDKEAIRRDAQRVGNGEQGRPYPMTDAERVDQAYRENGFNIYVSDKISLNRSLPDIRHPNCNSKRYLETLPNTSIIIPFHNEGWSSLLRTVHSVLNRSPPELVAEIVLVDDFSDRDLPTASTPSPFVC

SEQ ID NO: 18022 - protein, 190 aa, Homo sapiens
VLYSGWLRKSPPEKKLRLFAWRKRWFILRRGQTSSDPDVLEYYKNDGSKKPLRTINLNLCEQLDVDVTLNFNKKEIQKGYMFDIKTSERTFYLVAETREDMNEWVQSICQICGFRQEESTAEPSCSHQHLPQEQEPTSEPPVSHCVPPTWPIPAPPGCLRSHQHASQRAEHASFLRQVHPAWWRECQPAC

SEQ ID NO: 18023 - protein, 815 aa, Homo sapiens
MATQVEPLLPGGATLLQAEEHGGLVRKKPPPAPEGKGEPGPNDVRGGEPDGSARRPRPPCAKPHKEGTGQQERESPRPLQLPGAEGPAISDGEEGGGEPGAGGGAAGAAGAGRRDFVEAPPPKVNPWTKNALPPVLTTVNGQSPPEHSAPAKVVRAAVPKQRKGSKVGDFGDAINWPTPGEIAHKSVQPQSHKPQPTRKLPPKKDMKEQEKGEGSDSKESPKTKSDESGEEKNGDEDCQRGGQKKKGNKHKWVPLQIDMKPEVPREKLASRPTRPPEPRHIPANRGEIKGSESATYVPVAPPTPAWQPEIKPEPAWHDQDETSSVKSDGAGGARASFRGRGRGRGRGRGRGRGGTRTHFDYQFGYRKFDGVEGPRTPKYMNNITYYFDNVSSTELYSVDQELLKDYIKRQIEYYFSVDNLERDFFLRRKMDADGFLPITLIASFHRVQALTTDISLIFAALKDSKVVEIVDEKVRRREEPEKWPLPPIVDYSQTDFSQLLNCPEFVPRQHYQKETESAPGSPRAVTPVPTKTEEVSNLKTLPKGLSASLPDLDSENWIEVKKRPRPSPARPKKSEESRFSHLTSLPQQLPSQQLMSKDQDEQEELDFLFDEEMEQMDGRKNTFTAWSDEESDYEIDDRDVNKILIVTQTPHYMRRHPGGDRTGNHTSRAKMSAELAKVINDGLFYYEQDLWAEKFEPEYSQIKQEVENFKKVNMISREQFDTLTPEPPVDPNQEVPPGPPRFQQVPTDALANKLFGAPEPSTIARSLPTTVPESPNYRNTRTPRTPRTPQLKDSSQTSRFYPVVKEGRTLDAKMP

SEQ ID NO: 18024 - protein, 179 aa, Homo sapiens
MNSSNGNDNGNGKNGGLEHVPSSSSIHNGDMEKILLDAQHESGQSSSRGSSHCDSPSPQEDGQIMFDVEMHTSRDHSSQSEEEVVEGEKEVEALKKSADWVSDWSSRPENIPPKEFHFRHPKRSVSLSMRKSGAMKKGGIFSAEFLKVFIPSLFLSHVLALGLGIYIGKRLSTPSASTY

SEQ ID NO: 18025 - protein, 930 aa, Homo sapiens
MGGSCAQRRRAGPRQVLFPLLLPLFYPTLSEPIRYSIPEELAKGSVVGNLAKDLGLSVLDVSARKLRVSAEKLHFSVDAESGDLLVKNRIDREQICKERRRCELQLEAVVENPLNIFHVIVVIEDVNDHAPQFDKKEIHLEIFESASAGTRLSLDPATDPDININSIKDYKINSNPYFSLMVRVNSDGGKYPELSLEKLLDREEQRSHSLILTALDGGDPPRSATAHIEISVKDTNDNPPVFSRDEYRISLSENLPPGSPVLQVTATDQDEGVNAEINYYFRSTAQSTKHMFSLDEKTGMIKNNQSFDFEDVERYTMEVEAKDGGGLSTQCKVIIEILDENDNSPEIIITSLSDQILENSPPGMVVALFKTRDLDFGGNGEVRCNIETDIPFKIYSSSNNYYKLVTDGALDREQTPEYNVTIVATDRGKPPLSSSRSITLYVADINDNAPVFDQTSYVVHVAENNPPGASIAQVSASDPDLGLNGHISYSIVASDLEPLAVSSYVSVSAQSGVVFAQRAFDHEQLRAFALTLQARDHGSPTLSANVSLRVLVGDRNDNAPRVLYPALGPDGSAFFDMVPRSAEPGYLVTKVVAVDADSGHNAWLSYHVLQASEPGLFSLGLRTGEVRTARALGDRDAARQRLLVAVRDGGQPPLSATATLHLVFADNLQEILPDLSDRPVLSDPQAELQFYLVVALALISVLFLLAVILAIALRLRRSLSPATWDCFHPGLCVKSGPVVPPNYSEGTLPYSYNLCIAHTGTKEFNFLKCSVPLHSNEDMVCSVSPGALIPPHGGEDLTSHPETLTSQAPPNTDWRFSQAQRPGTSGSQNGDDTGTWPNNQFDTEMLQAMILASASEAADGSSTLGGGAGTMGLSARYGPQFTLQHVPDYRQNVYIPGSNATLTNAAGKRDGKAPAGGNGNKKKSGKKEKK

SEQ ID NO: 18026 - protein, 825 aa, Homo sapiens
MPALACLRRLCRHVSPQAVLFLLFIFCLFSVFISAYYLYGWKRGLEPSADAPEPDCGDPPPVAPSRLLPLKPVQAATPSRTDPLVLVFVESLYSQLGQEVVAILESSRFKYRTEIAPGKGDMPTLTDKGRGRFALIIYENILKYVNLDAWNRELLDKYCVAYGVGIIGFFKANENSLLSAQLKGFPLFLHSNLGLKDCSINPKSPLLYVTRPSEVEKGVLPGEDWTVFQSNHSTYEPVLLAKTRSSESIPHLGADAGLHAALHATVVQDLGLHDGIQRVLFGNNLNFWLHKLVFVDAVAFLTGKRLSLPLDRYILVDIDDIFVGKEGTRMKVEDVKALFDTQNELRAHIPNFTFNLGYSGKFFHTGTNAEDAGDDLLLSYVKEFWWFPHMWSHMQPHLFHNQSVLAEQMALNKKFAVEHGIPTDMGYAVAPHHSGVYPVHVQLYEAWKQVWSIRVTSTEEYPHLKPARYRRGFIHNGIMVLPRQTCGLFTHTIFYNEYPGGSSELDKIINGGELFLTVLLNPISIFMTHLSNYGNDRLGLYTFKHLVRFLHSWTNLRLQTLPPVQLAQKYFQIFSEEKDPLWQDPCEDKRHKDIWSKEKTCDRFPKLLIIGPQKTGTTALYLFLGMHPDLSSNYPSSETFEEIQFFNGHNYHKGIDWYMEFFPIPSNTTSDFYFEKSANYFDSEVAPRRAAALLPKAKVLTILINPADRAYSWYQILVLDGKLLRTEPAKVMDMVQKFLGVTNTIDYHKTLAFDPKKGFWCQLLEGGKTKCLGKSKGRKYPEMDLDSRAFLKDYYRDHNIELSKLLYKMGQTLPTWLREDLQNTR

SEQ ID NO: 18027 - protein, 411 aa, Homo sapiens; identical to SEQ ID NO: 931

SEQ ID NO: 18028 - protein, 276 aa, Homo sapiens
ALYGLEDFPLDVARKKLFSSSQGRSTGEAFVQFASQEIAEKALKKHKERIGHRYIEIFKSSRAEVRTHYDPPRKLMAMQRPGPYDRPGAGRGYNSIGRGAGFERMRRGAYGGGYGGYDDYNGYNDGYGFGSDRFGRDLNYCFSGMSDHRYGDGGSTFQSTTGHCVHMRGLPYRATENDIYNFFSPLNPVRVHIEIGPDGRVTGEADVEFATHEDAVAAMSKDKANMQHRYVELFLNSTAGASGGAYEHRYVELFLNSTAGASGGAYGSQMMGGMGL

SEQ ID NO: 18029 - protein, 204 aa, Homo sapiens
MQWLMRFRTLWGIHKSFHNIHPAPSQLRCRSLSEFGAPRWNDYEVPEEFNFASYVLDYWAQKEKEGKRGPNPAFWWVNGQGDEVKWSFREMGDLTRRVANVFTQTCGLQQGDHLALMLPRVPEWWLVAVGCMRTGIIFIPATILLKAKDILYRLQLSKAKGIVTIDALASEVDSIASQCPSLKTKLLVSDHSREGWLDFRSLVK

SEQ ID NO: 18030 - protein, 431 aa, Homo sapiens
MPFTLHLRSRLPSAIRSLILQKKPNIRNTSSMAGELRPASLVVLPRSLAPAFERFCQVNTGPLPLLGQSEPEKWMLPPQGAISETRMGHPQFWKYEFGACTGSLASLEQYSEQLKDMVAFFLGCSFSLEEALEKAGLPRRDPAGHSQAGAYKTTVPCVTHAGFCCPLVVTMRPIPKDKLEGLVRACCSLGGEQGQPVHMGDPELLGIKELSKPAYGDAMVCPPGEVPVFWPSPLTSLGAVSSCETPLAFASIPGCTVMTDLKDAKAPPGCLTPERIPEVHHISQDPLHYSIASVSASQKIRELESMIGIDPGNRGIGHLLCKDELLKASLSLSHARSVLITTGFPTHFNHEPPEETDGPPGAVALVAFLQALEKEVAIIVDQRAWNLHQKIVEDAVEQGVLKTQIPILTYQGGSVEAAQAFLCKNGDPQTP

SEQ ID NO: 18031 - protein, 955 aa, Homo sapiens
MPGGAGAARLCLLAFALQPLRPRAAREPGWTRGSEEGSPKLQHELIIPQWKTSESPVREKHPLKAELRVMAEGRELILDLEKNEQLFAPSYTETHYTSSGNPQTTTRKLEDHCFYHGTVRETELSSVTLSTCRGIRGLITVSSNLSYVIEPLPDSKGQHLIYRSEHLKPPPGNCGFEHSKPTTRDWALQFTQQTKKRPRRMKREDLNSMKYVELYLVADYLEFQKNRRDQDATKHKLIEIANYVDKFYRSLNIRIALVGLEVWTHGNMCEVSENPYSTLWSFLSWRRKLLAQKYHDNAQLITGMSFHGTTIGLAPLMAMCSVYQSGGVNMDHSENAIGVAATMAHEMGHNFGMTHDSADCCSASAADGGCIMAAATGHPFPKVFNGCNRRELDRYLQSGGGMCLSNMPDTRMLYGGRRCGNGYLEDGEECDCGEEEECNNPCCNASNCTLRPGAECAHGSCCHQCKLLAPGTLCREQARQCDLPEFCTGKSPHCPTNFYQMDGTPCEGGQAYCYNGMCLTYQEQCQQLWGPGARPAPDLCFEKVNVAGDTFGNCGKDMNGEHRKCNMRDAKCGKIQCQSSEARPLESNAVPIDTTIIMNGRQIQCRGTHVYRGPEEEGDMLDPGLVMTGTKCGYNHICFEGQCRNTSFFETEGCGKKCNGHGVCNNNQNCHCLPGWAPPFCNTPGHGGSIDSGPMPPESVGPVVAGVLVAILVLAVLMLMYYCCRQNNKLGQLKPSALPSKLRQQFSCPFRVSQNSGTGHANPTFKLQTPQGKRKVINTPEILRKPSQPPPRPPPDYLRGGSPPAPLPAHLSRAARNSPGPGSQIERTESSRRPPPSRPIPPAPNCIVSQDFSRPRPPQKALPANPVPGRRSLPRPGGASPLRPPGAGPQQSRPLAALAPKVSPREALKVKAGTRGLQGGRCRVEKTKQFMLLVVWTELPEQKPRAKHSCFLVPA

SEQ ID NO: 18032 - protein, 1066 aa, Homo sapiens
MAGALRRGRALGSRPSGPTVSSRRSPQCPVAQEGLGARSRPRVAPRSLARCGPSSRLMGWKPSEARGQSQSFQASGLQPRSLKAARRATGRPDRSRAARPTMDPSAHRSRAAPPNMDPDPQAGVQVGMRVVRGVDWKWGQQDGGEGGVGTVVELGRHGSPSTPDRTVVVQWDQGTRTNYRAGYQGAHDLLLYDNAQIGVRHPNIICDCCKKHGLRGMRWKCRVCLDYDLCTQCYMHNKHELAHAFDRYETAHSRPVTLSPRQGLPRIPLRGIFQGAKVVRGPDWEWGSQDGGEGKPGRVVDIRGWDVETGRSVASVTWADGTTNVYRVGHKGKVDLKCVGEAAGGFYYKDHLPRLGKPAELQRRVSADSQPFQHGDKVKCLLDTDVLREMQEGHGGWNPRMAETGTVHRITDRGDVRVQFNHETRWTFHPGALTKHHSFWVGDVVRVIGDLDTVKRLQAGHGEWTDDMAPALGRVGKVVKVFGDGNLRVAVAGQRWTFSPSCLVAYRPEEDANLDVAERARENKSSLSVALDKLRAQKSDPEHPGRLVVEVALGNAARALDLLRRRPEQVDTKNQGRTALQVAAYLGQVELIRLLLQARAGVDLPDDEGNTALHYAALGNQPEATRVLLSAGCRADAINSTQSTALHVAVQRGFLEVVRALCERGCDVNLPDAHSDTPLHSAISAGTGASGIVEVLTEVPNIDVTATNSQGFTLLHHASLKGHALAVRKILARARQLVDAKKEDGFTALHLAALNNHREVAQILIREGRCDVNVRNRKLQSPLHLAVQQAHVGLVPLLVDAGCSVNAEDEEGDTALHVALQRHQLLPLVADGAGGDPGPLQLLSRLQASGLPGSAELTVGAAVACFLALEGADVSYTNHRGRSPLDLAAEGRVLKALQGCAQRFRERQAGGGAAPGPRQTLGTPNTVTNLHVGAAPGPEAAECLVCSELALLVLFSPCQHRTVCEECARRMKKCIRCQVVVSKKLRPDGSEVASAAPAPGPPRQLVEELQSRYRQMEERITCPICIDSHIRLVFQCGHGACAPCGSALSACPICRQPIRDRIQIFV

SEQ ID NO: 18033 - protein, 400 aa, Homo sapiens
MENKAMYLHTVSDCDTSSICEDSFDGRSLSKLNLCEDGPCHKRRASICCTQLGSLSALKHAVLGLYLLVFLILVGIFILAVSRPRSSPDDLKALTRNVNRLNESFRDLQLRLLQAPLQADLTEQVWKVQDALQNQSDSLLALAGAVQRLEGALWGLQAQAVQTEQAVALLRDRTGQQSDTAQLELYQLQVESNSSQLLLRRHAGLLDGLARRVGILGEELADVGGVLRGLNHSLSYDVALHRTRLQDLRVLVSNASEDTRRLRLAHVGMELQLKQELAMLNAVTEDLRLKDWEHSIALRNISLAKGPPGPKGDQGDEGKEGRPGIPGLPGLRGLPGERGTPGLPGPKGDDGKLGATGPMGMRGFKGDRGPKGEKGEKGDRAGDASKDILLGPWDMVLAQG

SEQ ID NO: 18034 - protein, 390 aa, Homo sapiens
MVARPLHSTEGQPESLGKMFSVQLSLGEQTWESEGSSIKKAQQAVANKALTESTLPKPVQKPPKSNVNNNPGSITPTVELNGLAMKRGEPAIYRPLDPKPFPNYRANYNFRGMYNQRYHCPVPKIFYVQLTVGNNEFFGEGKTRQAARHNAAMKALQALQNEPIPERSPQNGESGKDVDDDKDANKSEISLVFEIALKRNMPVSFEVIKESGPPHMKSFVTRVSVGEFSAEGEGNSKKLSKKRAATTVLQELKKLPPLPVVEKPKLFFKKRPKTIVKAGPEYGQGMNPISRLAQIQQAKKEKEPDYVLLSERGMPRRREFVMQVKVGNEVATGTGPNKKIAKKNAAEAMLLQLGYKASTNLQDQLEKTGENKGWSGPKPGFPEPTNNRKS

SEQ ID NO: 18035 - protein, 291 aa, Homo sapiens
MTGKTQTSNVTNKNDPKSINSRVFIGNLNTAIVKKVDIEAIFSKYGKIVGCSVHKGYAFVQYMSERHARAAVAGENARVIAGQPLDINMAGEPKPYRPKPGNKRPLSALYRLESKEPFLSVGGYVFDYDYYRDDFYNRLFDYHGRVPPPPRAVIPLKRPRVAVTTTRRGKGVFSMKGGSRSTASGSTGSKLKSDELQTIKKELTQIKTKIDSLLGRLEKIEKQQKAEAEAQKKQLEESLVLIQEECVSEIADHSTEEPAEGGPDADGEEMTDGIEEDFDEDGGHELFLQIK

SEQ ID NO: 18036 - protein, 513 aa, Homo sapiens
MTGKGLGEDTEDRWGAGALGPCGRSGLKGGGCVWEAEAGGSRGQEIETILANMETSLRSGQIPTLDSSEHNLSPEPLELDRMPHSPLISIPHVWCHPEEEERMHDELLQAVSKGPVMFRDVSIDFSQEEWECLDADQMNLYKEVMLENFSNLVSVGLSNSKPAVISLLEQGKEPWMVDRELTRGLCSDLESMCETKILSLKKRHFSQVIITREDMSTFIQPTFLIPPQKTMSEEKPWECKICGKTFNQNSQFIQHQRIHFGEKHYESKEYGKSFSRGSLVTRHQRIHTGKKPYECKECGKAFSCSSYFSQHQRIHTGEKPYECKECGKAFKYCSNLNDHQRIHTGEKPYECKVCGKAFTKSSQLFLHLRIHTGEKPYECKECGKAFTQHSRLIQHQRMHTGEKPYECKQCGKAFNSASTLTNHHRIHAGEKLYECEECRKAFIQSSELIQHQRIHTDEKPYECNECGKAFNKGSNLTRHQRIHTGEKPYDCKECGKAFGSRSDLIRHEGIHTG

SEQ ID NO: 18037 - protein, 1285 aa, Homo sapiens
MQSNMVRKKNPPLRNVASEGEGQILEPIGTESKVSGKNKEFSADQMSENTDQSDAAELNHKEEHSLHVQDPSSSSKKDLKSAVLSEKAGFNYESPSKGGNFPSFPHDEVTDRNMLAFSSPAAGGVCEPLKSPQRAEADDPQDMACTPSGDSLETKEDQKMSPKATEETGQAQSGQANCQGLSPVSVASKNPQVPSDGGVRLNKSKTDLLVNDNPDPAPLSPELQDFKCNICGYGYYGNDPTDLIKHFRKYHLGLHNRTRQDAELDSKILALHNMVQFSHSKDFQKVNRSVFSGVLQDINSSRPVLLNGTYDVQVTSGGTFIGIGRKTPDCQGNTKYFRCKFCNFTYMGNSSTELEQHFLQTHPNKIKASLPSSEVAKPSEKNSNKSIPALQSSDSGDLGKWQDKITVKAGDDTPVGYSVPIKPLDSSRQNGTEATSYYWCKFCSFSCESSSSLKLLEHYGKQHGAVQSGGLNPELNDKLSRGSVINQNDLAKSSEGETMTKTDKSSSGAKKKDFSSKGAEDNMVTSYNCQFCDFRYSKSHGPDVIVVGPLLRHYQQLHNIHKCTIKHCPFCPRGLCSPEKHLGEITYPFACRKSNCSHCALLLLHLSPGAAGSSRVKHQCHQCSFTTPDVDVLLFHYESVHESQASDVKQEANHLQGSDGQQSVKESKEHSCTKCDFITQVEEEISRHYRRAHSCYKCRQCSFTAADTQSLLEHFNTVHCQEQDITTANGEEDGHAISTIKEEPKIDFRVYNLLTPDSKMGEPVSESVVKREKLEEKDGLKEKVWTESSSDDLRNVTWRGADILRGSPSYTQASLGLLTPVSGTQEQTKTLRDSPNVEAAHLARPIYGLAVETKGFLQGAPAGGEKSGALPQQYPASGENKSKDESQSLLRRRRGSGVFCANCLTTKTSLWRKNANGGYVCNACGLYQKLHSTPRPLNIIKQNNGEQIIRRRTRKRLNPEALQAEQLNKQQRGSNEEQVNGSPLERRSEDHLTESHQREIPLPSLSKYEAQGSLTKSHSAQQPVLVSQTLDIHKRMQPLHIQIKSPQESTGDPGNSSSVSEGKGSSERGSPIEKYMRPAKHPNYSPPGSPIEKYQYPLFGLPFVHNDFQSEADWLRFWSKYKLSVPGNPHYLSHVPGLPNPCQNYVPYPTFNLPPHFSAVGSDNDIPLDLAIKHSRPGPTANGASKEKTKAPPNVKNEGPLNVVKTEKVDRSTQDELSTKCVHCGIVFLDEVMYALHMSCHGDSGPFQCSICQHLCTDKYDFTTHIQRGLHRNNAQVEKNGKPKE

SEQ ID NO: 18038 - protein, 21 aa, Homo sapiens
VRMSASQLEALCPQRITFWKM

SEQ ID NO: 18039 - protein, 609 aa, Homo sapiens
MTEGSMGVTLEASAEADLKAGNSCPELVPSRRSKLRKPKPVPLRKKAIGGEFSDTNAAVEGTPLPKASYHFSPEELDENTSPLLGDARFQKSPPDLKETPGTLSSDTNDSGVELGEESRSSPLKLEFDFTEDTGNIEARKALPRKLGRKLGSTLTPKIQKDGISKSAGLEQPTDPVARDGPLSQTSSKPDPSQWESPSFNPFGSHSVLQNSPPLSSEGSYHFDPDNFDESMDPFKPTTTLTSSDFCSPTGNHVNEILESPKKAKSRLITGCKVKKHETQSLALDACSRDEGAVISQISDISNRDGHATDEEKLASTSCGQKSAGAEVKGEPEEDLEYFECSNVPVSTINHAFSSSEAGIEKETCQKMEEDGSTVLGLLESSAEKAPVSVSCGGESPLDGICLSESDKTAVLTLIREEIITKEIEANEWKKKYEETRQEVLEMRKIVAEYEKTIAQMIEDEQRTSMTSQKSFQQLTMEKEQALADLNSVERSLSDLFRRYENLKGVLEGFKKNEEALKKCAQDYLARVKQEEQRYQALKIHAEEKLDKANEEIAQVRTKAKAESAALHAGLRKEQMKVESLERALQQKNQEIEELTKICDELIAKLGKTD

SEQ ID NO: 18040 - protein, 590 aa, Homo sapiens
MEMYETLGKVGEGSYGTVMKCKHKNTGQIVAIKIFYERPEQSVNKIAMREIKFLKQFHHENLVNLIEVFRQKKKIHLVFEFIDHTVLDELQHYCHGLESKRLRKYLFQILRAIDYLHSNNIIHRDIKPENILVSQSGITKLCDFGFARTLAAPGDIYTDYVATRWYRAPELVLKDTSYGKPVDIWALGCMIIEMATGNPYLPSSSDLDLLHKIVLKVGNLSPHLQNIFSKSPIFAGVVLPQVQHPKNARKKYPKLNGLLADIVHACLQIDPADRISSSDLLHHEYFTRDGFIEKFMPELKAKLLQEAKVNSLIKPKESSKENELRKDERKTVYTNTLLSSSVLGKEIEKEKKPKEIKVRVIKVKGGRGDISEPKKKEYEGGLGQQDANENVHPMSPDTKLVTIEPPNPINPSTNCNGLKENPHCGGSVTMPPINLTNSNLMAANLSSNLFHPSVRLTERAKKRRTSSQSIGQVMPNSRQEDPGPIQSQMEKGIFNERTGHSDQMANENKRKLNFSRSDRKEFHFPELPVTIQSKDTKGMEVKQIKMLKRESKKTESSKIPTLLNVDQNQEKQENTGNAQTERKKNLPDVE

SEQ ID NO: 18041 - protein, 535 aa, Homo sapiens
MLHKSEEGRVLVEFTCKNQPKPSLPTEWALCGEREDRLELLKLSTFALIITPGDPRLVISSGCATRLFEALEVGAVPVVLGEQVQLPYQDMLQWNEAALVVPKPRVTEVHFLLRSLSDSDLLAMRRQGRFLWETYFSTADSIFNTVLAMIRTRIQIPAAPIREEAAAEIPHRSGKAAGTDPNMADNGDLDLGPVETEPPYASPRYLRNFTLTVTDFYRSWNCAPGPFHLFPHTPFDPVLPSEAKFLGSGTGFRPIGGGAGGSGKEFQAALGGNVPREQFTVVMLTYEREEVLMNSLERLNGLPYLNKVVVVWNSPKLPSEDLLWPDIGVPIMVVRTEKNSLNNRFLPWNEIETEAILSIDDDAHLRHDEIMFGFRVWREARDRIVGFPGRYHAWDIPHQSWLYNSNYSCELSMVLTGAAFFHKYYAYLYSYVMPQAIRDMVDEYINCEDIAMNFLVSHITRKPPIKVTSRWTFRCPGCPQALSHDDSHFHERHKCINFFVKVYGYMPLLYTQFRVDSVLFKTRLPHDKTKCFKFI

SEQ ID NO: 18042 - protein, 731 aa, Homo sapiens
MNNILKLKSSDSEGNFETPEAETPIRSPFKESCDPSLGLAGPGAKSQESQEADEQLVAEVVEKCSSKTCSKPSENEVPQQAIDSHSVKNFREEPEHDFSKISIVRPFSIETKDSTDISAVLGTKAAHGCVTAVSGKALPSSPPDALQDEAMTEGSMGVTLEASAEADLKAGNSCPELVPSRRSKLRKPKPVPLRKKAIGGEFSDTNAAVEGTPLPKASYHFSPEELDENTSPLLGDARFQKSPPDLKETPGTLSSDTNDSGVELGEESRSSPLKLEFDFTEDTGNIEARKALPRKLGRKLGSTLTPKIQKDGISKSAGLEQPTDPVARDGPLSQTSSKPDPSQWESPSFNPFGSHSVLQNSPPLSSEGSYHFDPDNFDESMDPFKPTTTLTSSDFCSPTGNHVNEILESPKKAKSRLITSGCKVKKHETQSLALDACSRDEGAVISQISDISNRDGHATDEEKLASTSCGQKSAGAEVKGIEKETCQKMEEDGSTVLGLLESSAEKAPVSVSCGGESPLDGICLSESDKTAVLTLIREEIITKEIEANEWKKKYEETRQEVLEMRKIVAEYEKTIAQMIEDEQRTSMTSQKSFQQLTMEKEQALADLNSVERSLSDLFRRYENLKGVLEGFKKNEEALKKCAQDYLARVKQEEQRYQALKIHAEEKLDKANEEIAQVRTKAKAESAALHAGLRKEQMKVESLERALQQKNQEIEELTKICDELIAKLGKTD

SEQ ID NO: 18043 - protein, 1278 aa, Homo sapiens
MAEAASPHLSLPSGLLELCALLGAPRDSLRSLEQVAYKKGVKHLSALLDPEVLSIFVPPFISKEDSQMAGANCGTLGKTRMRSLRKKREKPRPEQWKGLPGPPRAPEPEDVAVPGGVDLLTLPQLCFPGGVCVATEPKEDCVHFLVLTDVCGNRTYGVVAQYYRPLHDEYCFYNGKTHRECPGCFVPFAVCVVSRFPYYNSLKDCLSCLLALLKPCKDFEVDSHIKDFAAKLSLIPSPPPGPLHLVFNMKSLQIVLPARADPESPILDLDLHLPLLCFRPEKVLQILTCILTEQRIVFFSSDWALLTLVTECFMAYLYPLQWQHPFVPILSDQMLDFVMAPTSFLMGCHLDHFEEVSKEADGLVLINIDHGSITYSKSTDDNVDIPDVPLLAAQTFIQRVQSLQLHHELHAAHLLSSTDLKEGRAHRRSWQQKLNCQIQQTTLQLLVSIFRDVKNHLNYEHRVFNSEEFLKTRAPGDHQFYKQVLDTYMFHSFLKARLNRRMDAFAQMDLDTQSEEDRINGMLLSPRRPTVEKRASRKSSHLHVTHRRMVVSMPNLQDIAMPELAPRNSSLRLTDTAGCRGSSAVLNVTPKSPYTFKIPEIHFPLESKCVQAYHAHFVSMLSEAMCFLAPDNSLLLARYLYLRGLVYLMQGQLLNALLDFQNLYKTDIRIFPTDLVKRTVESMSAPEWEGAEQAPELMRLISEILDKPHEASKLDDHVKKFKLPKKHMQLGDFMKRVQESGIVKDASIIHRLFEALTVGQEKQIDPETFKDFYNCWKETEAEAQEVSLPWLVMEHLDKNECVCKLSSSVKTNLGVGKIAMTQKRLFLLTEGRPGYLEISTFRNIEEVRRTTTTFLLRRIPTLKIRVASKKEVFEANLKTECDLWHLMVKEMWAGKKLADDHKDPHYVQQALTNVLLMDAVVGTLQSPGAIYAASKLSYFDKMSNEMPMTLPETTLETLKHKINPSAGEAFPQAVDVLLYTPGHLDPAEKVEDAHPKLWCALSEGKVTVFNASSWTIHQHSFKVGTAKVNCMVMADQNQVWVGSEDSVIYIINVHSMSCNKQLTAHCSSVTDLIVQDGQEAPSNVYSCSMDGMVLVWNVSTLQVTSRFQLPRGGLTSIRLHGGRLWCCTGNSIMVMKMNGSLHQELKIEENFKDTSTSFLAFQLLPEEEQLWAACAGRSEVYIWSLKDLAQPPQRVPLEDCSEINCMIRVKKQVWVGSRGLGQGTPKGKIYVIDAERKTVEKELVAHMDTVRTLCSAEDRYVLSGSGREEGKVAIWKGE

SEQ ID NO: 18044 - protein, 1019 aa, Homo sapiens
MDLNNNSLKTKAQVPMVLTAGPKWLLDVTWQGVEDNKNNCIVYSKGGQLWCTTTKAISEGEELIAFVVDFDSRLQAASQMTLTEGMYPARLLDSIQLLPQQAAMASILPTAIVNKDIFPCKSCGIWYRSERNLQAHLMYYCSGRQREAAPVSEENEDSAHQISSLCPFPQCTKSFSNARALEMHLNSHSGVKMEEFLPPGASLKCTVCSYTADSVINFHQHLFSHLTQAAFRCNHCHFGFQTQRELLQHQELHVPSGKLPRESDMEHSPSATEDSLQPATDLLTRSELPQSQKAMQTKDASSDTELDKCEKKTQLFLTNQRPEIQPTTNKQSFSYTKIKSEPSSPRLASSPVQPNIGPSFPVGPFLSQFSFPQDITMVPQASEILAKMSELVHRRLRHGSSSYPPVIYSPLMPKGATCFECNITFNNLDNYLVHKKHYCSSRWQQMAKSPEFPSVSEKMPEALSPNTGQTSINLLNPAAHSADPENPLLQTSCINSSTVLDLIGPNGKGHDKDFSTQTKKLSTSSNNDDKINGKPVDVKNPSVPLVDGESDPNKTTCEACNITFSRHETYMVHKQYYCATRHDPPLKRSASNKVPAMQRTMRTRKRRKMYEMCLPEQEQRPPLVQQRFLDVANLNNPCTSTQEPTEGLGECYHPRCDIFPGIVSKHLETSLTINKCVPVSKCDTTHSSVSCLEMDVPIDLSKKCLSQSERTTTSPKRLLDYHECTVCKISFNKVENYLAHKQNFCPVTAHQRNDLGQLDGKVFPNPESERNSPDVSYERSIIKCEKNGNLKQPSPNGNLFSSHLATLQGLKVFSEAAQLIATKEENRHLFLPQCLYPGAIKKAKGADQLSPYYGIKPSDYISGSLVIHNTDIEQSRNAENESPKGQASSNGCAALKKDSLPLLPKNRGMVIVNGGLKQDERPAANPQQENISQNPQHEDDHKSPSWISENPLAANENVSPGIPSAEEQLSSIAKGVNGSSQAPTSGKYCRLCDIQFNNLSNFITHKKFYCSSHAAEHVK

SEQ ID NO: 18045 - protein, 167 aa, Homo sapiens
MRVVRLLRLRAALTLLGEVPRRPASRGVPGSRRTQKGSGARWEKEKHEDGVKWRQLEHKGPYFAPPYEPLPDGVRFFYEGRPVRLSVAAEEVATFYGRMLDHEYTTKEVFRKNFFNDWRKEMAVEEREVIKSLDKCDFTEIHRYFVDKAAARKVLSREEKQMVTKKK

SEQ ID NO: 18046 - protein, 398 aa, Homo sapiens
MKALQALQNEPIPERSPQNGESGKDVDDDKDANKSEISLVFEIALKRNMPVSFEVIKESGPPHMKSFVTRVSVGEFSAEGEGNSKKLSKKRAATTVLQELKKLPPLPVVEKPKLFFKKRPKTIVKAGPEYGQGMNPISRLAQIQQAKKEKEPDYVLLSERGMPRRREFVMQVKVGNEVATGTGPNKKIAKKNAAEAMLLQLGYKASTNLQDQLEKTGENKGWSGPKPGFPEPTNNTPKGILHLSPDVYQEMEASRHKVISGTTLGYLSPKDMNQPSSSFFSISPTSNSSATIARELLMNGTSSTAEAIGLKGSSPTPPCSPVQPSKQLEYLARIQGFQAALSALKQFSEQGLDPIDGAMNIEKGSLEKQAKHLREKADNNQAPPGSIAQDCKKSNSAV

SEQ ID NO: 18047 - protein, 615 aa, Homo sapiens
MCHPDKAFTSDKLQCVFNEYKAAVWVPPRPRPLSRAPLPEDRTEKHSTMPDSPVDVKTQSRLTPPTMPPPPTTQGAPRTSSFTPTTLTNGTSHSPTALNGAPSPPNGFSNGPSSSSSSSLANQQLPPACGARQLSKLKRFLTTLQQFGNDISPEIGERVRTLVLGLVNSTLTIEEFHSKLQEATNFPLRPFVIPFLKANLPLLQRELLHCARLAKQNPAQYLAQHEQLLLDASTTSPVDSSELLLDVNENGKRRTPDRTKENGFDREPLHSEHPSKRPCTISPGQRYSPNNGLSYQPNGLPHPTPPPPQHYRLDDMAIAHHYRDSYRHPSHRDLRDRNRPMGLHGTRQEEMIDHRLTDREWAEEWKHLDHLLNCIMDMVEKTRRSLTVLRRCQEADREELNYWIRRYSDAEDLKKGGGSSSSHSRQQSPVNPDPVALDAHREFLHRPASGYVPEEIWKKAEEAVNEVKRQAMTELQKAVSEAERKAHDMITTERAKMERTVAEAKRQAAEDALAVINQQEDSSESCWNCGRKASETCSGCNTARYCGSFCQHKDWEKHHHICGQTLQAQQQGDTPAVSSSVTPNSGAGSPMDTPPAATPRSTTPGTPSTIETTPR

SEQ ID NO: 18048 - protein, 1985 aa, Homo sapiens
MAERCGGPGACLAHLLAGLGVRREHRGKEISEATSRERPLDGRSCSDLAQGTTCNVSLKAQGQSCSEWDIHVGDHDDFWIWKQQGISGGPAQSLGRLQRPAVGSAFDLASHASLGPESLALEVASGESARTRLPQYPGPAPGHGEQGSSGCTCQQSPPTASEVPLRPEPPSNLEDAPLLLHPASFPRAEGTKGKPATPGTALPEPAQTLHTRPSSRRTRYYITVTLLGHRQAPGEEGEEPAQPAPHLCGPEESEGWWEPPQGPRPITGCRTAPPQEPQLRAQSHQGSTAQQQELQAGWTPGSPRRLELDHSGTRTPPDRLPGPHMEEAGGPMARAKARVVSATLTWRQRPPTQEEIKHGFHKVSLVSGAQMEAPQKEMFEFSRREEVEVNGFATQEEETVNCQGPRDTAGSKNFQSHGPIFSKKYIPPPKEKRPEGRLKEAVDQSDGSRQAPRTEPPCVGAMARTELLVPLPGPREPSPHPGVGLTSGSSRSLEEYRVTRTVRTTTVVGGHVDRRMSSSVTVRPVSSGEALPRGRQVSRMVPPVVVGSPPGSPSRSQAVKVLSNLVPAGHSPPASHLPRPTAGGPRSTGLGSTVGAALRQLPETGTAELKDSSALASTGIPASAHLPKNQDAPAACPDRDQGRAPDARACELWQVLGAPSSTELPLQTSQGQASVPSSPRLETHVPSPGLTHPAKQPVVPTHPGARLTPLVLPPKKKDGPVDPPAATVLPMVRSEHVTVPGQPPAPSTTRRKDVPSPGGLSAPSSPRNKFVQNSENVPVLPFTQREVVKGPGAPAASSPTRKEVVQGSSASAASSPTWKEVVKGPGAPAASSPTQKEVVQGSSAPAALFPTWKEVVKGPGAPDASFPTWKEVVKGPGAPAASSPTQKEVVQGSGAPAALSTTPKEVVKGPGAPAASSPTQKEVVKGPCAPAASSPTQKEVVQGSGAPAALSPKSTEVVQGPKGSSSIQKEAVQGIAGSLAPPLTKEETVQGPIAPATSLPKQDKGVQDSEGSPISSLTQKEVVQDPDALPAPSSSVDRVSPSPGGTPAPVPTGAEASTESQLVSDPTEGKTCTETSREEDEVALAADLEIFLDTLRSMEPPEILRTHRLPRAPRSSYLSMYATLPAIEEDQLGPWVLGPGPQEVPSLEEKEEEEEEEPENPYLSDDEKLQRRQEKAGPSPSRDLHPARPTQVSCSPLEMMKKHVAGTKGPHSELGLELQGGSRPTSRLGGSLLFGSLVPTAKEASTPEPLGTKLSALLPHGAPGLRKVPGQLPLLCSERSSPTEKLACSLPLEGWSPALKTQGKLNTRPGKVIFFSESGCQGSGREVWGDIVDASGWAPVASIRVVRGCWVLYEEPEFRGQKLVLPEGDMELRTPGTKWSPQGIGSLRRVVWDYSTPEISLFSEEGLKGEQVKLTEALKNSQGLEKPLQVASATVSAGLWLLYPKPLFEDTPYILEPGEYPTSEAWGTSDPSVGSLKPMRLGCPSVEKPGEPRAVVYEAPGFQGRSWEVSRDIYNLQQPEDSQSPHLASVGSLRVLGGCWVGYEKEGFRGHQYLLEEGEYPDWSHWGGYDELLTSLRVIRTDFGDPAVVLFEAMDFEGHGVEVSKALPDVELVQHGPSTQAIHVLSGVWVAYQEVGFSGEQYVLEKGVYRNCEDWGAGNSTLASLQPVLQVGEHDLHFVSKIQLFSRPDFLGDHFSFEDDQAALPASFRPQSCRVHGGSWILFDETNFEGDQHILSEGEFPTLTAMGCLASTVLGSLQKVSLHFSEPSIFLYGLECFEGKEIELSREVRSLQAEGFNNHVLSVRIKGGIWVLCEHSDFRGRQWLVGSCEITNWLTYSGTQRVGSLYPIKQRRVYFRLWNAALGGFLAVPDHVEDMKAGRVVVADPQAGGSCIWYYEDGLLKNQMAPTMSLQVIGPPSPGSKVVLWAESRLPRQTWSISESGHICSQMFEGQILDVKGGRGYDRDHVVLWEPDEDRASQIWTIHVL

SEQ ID NO: 18049 - protein, 236 aa, Homo sapiens
VLGLSDFEMQRIHVAAAVSFLGGVIQVAMFVLQLGSATFVVTEPVISAMTTGAATHVVTSQVKYLLGMKMPYISGPLGFFYIYAYVFENIKSVRLEALLLSLLSIVVLVLVKELNEQFKRKIKVVLPVDLVLIIAASFACYCTNMENTYGLEVVGHIPQGIPSPRAPPMNILSAVITEAFGVALVGYVASLALAQGSAKKFKYSIDDNQVECAPSPSPLQLYHCTVHSQILKMMNL

SEQ ID NO: 18050 - protein, 570 aa, Homo sapiens
MANPKEKTAMCLVNELARFNRVQPQYKLLNERGPAHSKMFSVQLSLGEQTWESEGSSIKKAQQAVANKALTESTLPKPVQKPPKSNVNNNPGSITPTVELNGLAMKRGEPAIYRPLDPKPFPNYRANYNFRGMYNQRYHCPVPKIFYVQLTVGNNEFFGEGKTRQAARHNAAMKALQALQNEPIPERSPQNGESGKDVDDDKDANKSEISLVFEIALKRNMPVSFEVIKESGPPHMKSFVTRVSVGEFSAEGEGNSKKLSKKRAATTVLQELKKLPPLPVVEKPKLFFKKRPKTIVKAGPEYGQGMNPISRLAQIQQAKKEKEPDYVLLSERGMPRRREFVMQVKVGNEVATGTGPNKKIAKKNAAEAMLLQLGYKASTNLQDQLEKTGENKGWSGPKPGFPEPTNNTPKGILHLSPDVYQEMEASRHKVISGTTLGYLSPKDMNQPSSSFFSISPTSNSSATIARELLMNGTSSTAEAIGLKGSSPTPPCSPVQPSKQLEYLARIQGFQAALSALKQFSEQGLDPIDGAMNIEKGSLEKQAKHLREKADNNQAPPGSIAQDCKKSNSAV

SEQ ID NO: 18051 - protein, 505 aa, Homo sapiens
CTGSLASLEQYSEQLKDMVAFFLGCSFSLEEALEKAGLPRRDPAGHSQAGAYKTTVPCVTHAGFCCPLVVTMRPIPKDKLEGLVRACCSLGGEQGQPVHMGDPELLGIKELSKPAYGDAMVCPPGEVPVFWPSPLTSLGAVSSCETPLAFASIPGCTVMTDLKDAKAPPGCLTPERIPEVHHISQDPLHYSIASVSASQKIRELESMIGIDPVLITTGFPTHFNHEPPEETDGPPGAVALVAFLQALEKEVAIIVDQRAWNLHQKIVEDAVEQGVLKTQIPILTYQGGSVEAAQAFLCKNGDPQTPRFDHLVAIERAGRAADGNYYNARKMNIKHLVDPIDDLFLAAKKIPGISSTGVGDGGNELGMGKVKEAVRRHIRHGDVIACDVEADFAVIAGEHSDGRPVRPATQGVSNWGGYALACALYILYSCAVHSQYLRKAVGPSRAPGDQAWTQALPSVIKVTNPSQPLAWKQLLPWMSSRPEVPSRKPRAGTLLPLKSQRQSQP

SEQ ID NO: 18052 - protein, 128 aa, Homo sapiens
MSRRRISCKDLGHADCQGWLYKKKEKGSFLSNKWKKFWVILKGSSLYWYSNQMAEKADGFVNLPDFTVERASECKKKHAFKISHPQIKTFYFAAENVQEMNVWLNKLGSAVIHQESTTKDEECYSESE

SEQ ID NO: 18053 - protein, 266 aa, Homo sapiens
MERSPDVSPGPSRSFKEELLCAVCYDPFRDAVTLRCGHNFCRGCVSRCWEVQVSPTCPVCKDRASPADLRTNHTLNNLVEKLLREEAEGARWTSYRFSRVCRLHRGQLSLFCLEDKELLCCSCQADPRHQGHRVQPVKDTAHDFRVEAAWLEGRIRQEFDKLREFLRVEEQAILDAMAEETRQKQLLADEKMKQLTEETEVLAHEIERLQMEMKEDDVSFLMTLLHHGARASPARHAYRCLQVPGLPAVPRLEEDACICGICTLQL

SEQ ID NO: 18054 - protein, 238 aa, Homo sapiens
FYDVYLEYTDENQHQYILAVPVLNLNLQHNKIFVNQDSNSGKWLLTRRIFLVDAVSGRENDLGTQPRVIRVATQISLSVHLVPNTINGNIYPPLITIAYSDIDIKDANSQSVKVSFSVTYEMDHGEAHVQTDTEFCTCCPGWSAMARSWLTATSASRVQAILLSQPPEYLGLQIALGVLGGLAVLASLLKTAGWKRRIGSPMIDLQTVVKFLVYYAGDLANVFFIITVGTGLYWLIFF

SEQ ID NO: 18055 - protein, 754 aa, Homo sapiens
MLTRNCLSLLLWVLFDGGLLTPLQPQPQQTLATEPRENVIHLPGQRSHFQRVKRGWVWNQFFVLEEYVGSEPQYVGKLHSDLDKGEGTVKYTLSGDGAGTVFTIDETTGDIHAIRSLDREEKPFYTLRAQAVDIETRKPLEPESEFIIKVQDINDNEPKFLDGPYVATVPEMSPVGVIRTALPNMDREVKEQYQVLIQAKDMGGQLGGLAGTTIVNITLTDVNDNPPRFPKSIFHLKVPESSPIGSAIGRIRAVDPDFGQNAEIEYNIVPGDGGNLFDIVTDEDTQEGVIKLKKPLDFETKKAYTFKVEASNLHLDHRFHSAGPFKDTATVKISVLDVDEPPVFSKPLYTMEVYEDTPVGTIIGAVTAQDLDVGSSAVRYFIDWKSDGDSYFTIDGNEGTIATNELLDRESTAQYNFSIIASKVSNPLLTSKVNILINVLDVNEFPPEISVPYETAVCENAKPGQIIQIVSAADRDLSPAGQQFSFRLSPEAAIKPNFTVRDFRNNTAGIETRRNGYSRRQQELYFLPVVIEDSSYPVQSSTNTMTIRVCRCDSDGTILSCNVEAIFLPVGLSTGALIAILLCIVILLAIVVLYVALRRQKKKDTLMTSKEDIRDNVIHYDDEGGGEEDTQAFDIGALRNPKVIEENKIRRDIKPDSLCLPRQRPPMEDNTDIRDFIHQRLQENDVDPTAPPYDSLATYAYEGSGSVAESLSSIDSLTTEADQDYDYLTDWGPRFKVLADMFGEEESYNPDKVT

SEQ ID NO: 18056 - protein, 860 aa, Homo sapiens
MGLKARRAAGAAGGGGDGGGGGGGAANPAGGDAAAAGDEERKVGLAPGDVEQVTLALGAGADKDGTLLLEGGGRDEGQRRTPQGIGLLAKTPLSRPVKRNNAKYRRIQTLIYDALERPRGWALLYHALVFLIVLGCLILAVLTTFKEYETVSGDWLLLLETFAIFIFGAEFALRIWAAGCCCRYKGWRGRLKFARKPLCMLDIFVLIASVPVVAVGNQGNVLATSLRSLRFLQILRMLRMDRRGGTWKLLGSAICAHSKELITAWYIGFLTLILSSFLVYLVEKDVPEVDAQGEEMKEEFETYADALWWGLITLATIGYGDKTPKTWEGRLIAATFSLIGVSFFALPAGILGSGLALKVQEQHRQKHFEKRRKPAAELIQAAWRYYATNPNRIDLVATWRFYESVVSFPFFRKEQLEAASSQKLGLLDRVRLSNPRGSNTKGKLFTPLNVDAIEESPSKEPKPVGLNNKERFRTAFRMKAYAFWQSSEDAGTGDPMAEDRGYGNDFPIEDMIPTLKAAIRAVRILQFRLYKKKFKETLRPYDVKDVIEQYSAGHLDMLSRIKYLQTRIDMIFTPGPPSTPKHKKSQKGNEPYVARPSTSEIEDQSMMGKFVKVERQVQDMGKKLDFLVDMHMQHMERLQVQVTEYYPTKGTSSPAEAEKKEDNRYSDLKTIICNYSETGPPEPPYSFHQVTIDKVSPYGFFAHDPVNLPRGGPSSGKVQATPPSSATTYVERPTVLPILTLLDSRVSCHSQADLQGPYSDRISPRQRRSITRDSDTPLSLMSVNHEELERSPSGFSISQDRDDYVFGPNGGSSWMREKRYLAEGETDTDTDPFTPSGSMPLSSTGDGISDSVWTPSNKPI

SEQ ID NO: 18057 - protein, 185 aa, Homo sapiens
QAAFREGLEQAVRYAKALGCPRIHLMAGRVPQGADRIAVKAEMEAVFLENLRHAAGVLAQEDLVGLLEPINTRITDPQYFLDTPQQAAAILQKDIFHWQIMDGNLTGNIREFLPIVGHVQVAQVPGRGEPSSPGELNFPYLFQLLEDEGYKGFVGCEYQPRGDTVEGLSWLRSYWDRRGHPEAGQ

SEQ ID NO: 18058 - protein, 218 aa, Homo sapiens
MTMYKSKRRHQRYINMAGEPKPYRPKPGNKRPLSALYRLESKEPFLSVGGYVFDYDYYRDDFYNRLFDYHGRVPPPPRAVIPLKRPRVAVTTTRRGKGVFSMKGGSRSTASGSTGSKLKSDELQTIKKELTQIKTKIDSLLGRLEKIEKQQKAEAEAQKKQLEESLVLIQEECVSEIADHSTEEPAEGGPDADGEEMTDGIEEDFDEDGGHELFLQIK

SEQ ID NO: 18059 - protein, 462 aa, Homo sapiens
MSERKEGRGKGKGKKKERGSGKKPESAAGSQSPALPPRLKEMKSQESAAGSKLVLRCETSSEYSSLRFKWFKNGNELNRKNKPQNIKIQKKPGKSELRINKASLADSGEYMCKVISKLGNDSASANITIVESNEIITGMPASTEGAYVSSESPIRISVSTEGANTSSSTSTSTTGTSHLVKCAEKEKTFCVNGGECFMVKDLSNPSRYLCKCQPGFTGARCTENVPMKVQNQEKAEELYQKRVLTITGICIALLVVGIMCVVAYCKTKKQRKKLHDRLRQSLRSERNNMMNIANGPHHPNPPPENVQLVNQYVSKNVISSEHIVEREAETSFSTSHYTSTAHHSTTVTQTPSHSWSNGHTESILSESHSVIVMSSVENSRHSSPTGGPRGRLNGTGGPRECNSFLRHARETPDSYRDSPHSERHNLIAELRRNKAHRSKCMQIQLSATHLRSSSIPHLGFIL

SEQ ID NO: 18060 - protein, 154 aa, Homo sapiens
MQWLMRFRTLWGIHKSFHNIHPAPSQLRCRSLSEFGAPRWNDYEVPEEFNFASYVLDYWAQKEKEGKRGPNPAFWWVNGQGDEVKWSFREMGDLTRRVANVFTQTCGLQQGDHLALMLPRVPEWWLVAVGCMRTGIIFIPATILLKAKDILYRL

SEQ ID NO: 18061 - protein, 161 aa, Homo sapiens
KYIPSVLHDVEMVFDAKLLSQLLYEFYTCIPPVKLQKQKVQSMNEIVQSNLFKKQECRDILLPVITKELKELLEQKDDMQHQVLERKYCVELLNSILEVLSYQDAAFTYHHIQEIMVQLLRTVNRTVITMGRDHILIDAADDRTEPIGCYGVLNVIVSAKG

SEQ ID NO: 18062 - protein, 1286 aa, Homo sapiens
MTGEVGSEVHLEINDPNVISQEEADSPSDSGQGSYETIGPLSEGDSDEEIFVSKKLKNRKVLQDSDSETEDTNASPEKTTYDSAEEENKENLYAGKNTKIKRIYKTVADSDESYMEKSLYQENLEAQVKPCLELSLQSGNSTDFTTDRKSSKKHIHDKEGTAGKAKVKSKRRLEKEERKMEKIRQLKKKETKNQEDDVEQPFNDSGCLLVDKDLFETGLEDENNSPLEDEESLESIRAAVKNKVKKHKKKEPSLESGVHSFEEGSELSKGTTRKERKAARLSKEALKQLHSETQRLIRESALNLPYHMPENKTIHDFFKRKPRPTCHGNAMALLKSSKYQSSHHKEIIDTANTTEMNSDHHSKGSEQTTGAENEVETNALPVVSKETQIITGSDESCRKDLVKNEELEIQEKQKQSDIRPSPGDSSVLQQESNFLGNNHSEECQVGGLVAFEPHALEGEGPQNPEETDEKVEEPEQQNKSSAVGPPEKVRRFTLDRLKQLGVDVSIKPRLGADEDSFVILEPETNRELEALKQRFWKHANPAAKPRAGQTVNVNVIVKDMGTDGKEELKADVVPVTLAPKKLDGASHTKPGEKLQVLKAKLQEAMKLRRFEERQKRQALFKLDNEDGFEEEEEEEEEMTDESEEDGEEKVEKEEKEEELEEEEEKEEEEEEEGNQEDSSSKMGYFPTEEKSETDENSGKQPSKLDEDDSCSLLTKESSHNSSFELIGSTIPSYQPCNRQTGRGTSFFPTAGGFRSPSPGLFRASLVSSASKSSGKLSEPSLPIEDSQDLYNASPEPKTLFLGAGDFQFCLEDDTQSQLLDADGFLNVRNHRNQYQALKPRLPLASMDENAMDANMDELLDLCTGKFTSQAEKHLPRKSDKKENMEELLNLCSGKFTSQDASTPASSELNKQEKESSMGDPMEEALALCSGSFPTDKEEEDEEEEFGDFRLVSNDNEFDSDEDEHSDSGNDLALEDHEDDDEEELLKRSEKLKRQMRLRKYLEDEAEVSGSDVGSEDEYDGEEIDEYEEDVIDEVLPSDEELQSQIKKIHMKTMLDDDKRQLRLYQERYLADGDLHSDGPGRMRKFRWKNIDDASQMDLFHRDSDDDQTEEQLDESEARWRKERIEREQWLRDMAQQGKITAEEEEEIGEDSQFMILAKKVTAKALQKNASRPMVIQESKSLLRNPFEAIRPGSAQQVKTGSLLNQPKAVLQKLAALSDHNPSAPRNSRNFVFHTLSPVKAEAAKESSKSQVKKRGPSFMTSPSPKHLKTDDSTSGLTRSIFKYLES

SEQ ID NO: 18063 - protein, 1031 aa, Homo sapiens
MAPWRKADKERHGVAIYNFQGSGAPQLSLQIGDVVRIQETCGDWYRGYLIKHKMLQGIFPKSFIHIKEVTVEKRRNTENIIPAEIPLAQEVTTTLWEWGSIWKQLYVASKKERFLQVQSMMYDLMEWRSQLLSGTLPKDELKELKQKVTSKIDYGNKILELDLIVRDEDGNILDPDNTSVISLFHAHEEATDKITERIKEEMSKDQPDYAMYSRISSSPTHSLYVFVRNFVCRIGEDAELFMSLYDPNKQTVISENYLVRWGSRGFPKEIEMLNNLKVVFTDLGNKDLNRDKIYLICQIVRVGKMDLKDTGAKKCTQGLRRPFGVAVMDITDIIKGKAESDEEKQHFIPFHPVTAENDFLHSLLGKVIASKGDSGGQGLWVTMKMLVGDIIQIRKDYPHLVDRTTVVARKLGFPEIIMPGDVRNDIYITLLQGDFDKYNKTTQRNVEVIMCVCAEDGKTLPNAICVGAGDKPMNEYRSVVYYQVKQPRWMETVKVAVPIEDMQRIHLRFMFRHRSSLESKDKGEKNFAMSYVKLMKEDGTTLHDGFHDLVVLKGDSKKMEDASAYLTLPSYRHHVENKGATLSRSSSSVGGLSVSSRDVFSISTLVCSTKLTQNVGLLGLLKWRMKPQLLQENLEKLKIVDGEEVVKFLQDTLDALFNIMMEHSQSDEYDILVFDALIYIIGLIADRKFQHFNTVLEAYIQQHFSATLAYKKLMTVLKTYLDTSSRGEQCEPILRTLKALEYVFKFIVRSRTLFSQLYEGKEQMEFEESMRRLFESINNLMKSQYKTTILLQVAALKYIPSVLHDVEMVFDAKLLSQLLYEFYTCIPPVKLQKQKVQSMNEIVQSNLFKKQECRDILLPVITKELKELLEQKDDMQHQVLERKYCVELLNSILEVLSYQDAAFTYHHIQEIMVQLLRTVNRTVITMGRDHILISHFVACMTAILNQMGDQHYSFYIETFQTSSELVDFLMETFIMFKDLIGKNVYPGDWMAMSMVQNRVFLRAINKFAETMNQKFLEHTNFEFQGFSRTGM

SEQ ID NO: 18064 - protein, 534 aa, Homo sapiens
MKIFQRKMRYWLLPPFLAIVYFCTIVQGQVAPPTRLRYNVISHDSIQISWKAPRGKFGGYKLLVTPTSGGKTNQLNLQNTATKAIIQGLMPDQNYTVQIIAYNKDKESKPAQGQFRIKDLEKRKDPKPRVKVVDRGNGSRPSSPEEVKFVCQTPAIADIVILVDGSWSIGRFNFRLVRHFLENLVTAFDVGSEKTRIGLAQYSGDPRIEWHLNAFSTKDEVIEAVRNLPYKGGNTLTGLALNYIFENSFKPEAGSRTGVSKIGILITDGKSQDDIIPPSRNLRESGVELFAIGVKNADVNELQEIASEPDSTHVYNVAEFDLMHTVVESLTRTLCSRVEEQDREIKASAHAITGPPTELITSEVTARSFMVNWTHAPGNVEKYRVVYYPTRGGKPDEVVVDGTVSSTVLKNLMSLTEYQIAVFAIYAHTASEGLRGTETTLALPMASDLLLYDVTENSMRVKWDAVPGASGYLILYAPLTEGLAGDEKEMKIGETHTDIELSGLLPNTEYTVTVYAMFGEEASDPVTGQETTSP

SEQ ID NO: 18065 - protein, 604 aa, Homo sapiens
MAVLVCPASCHGLKEFRIRRGMWRLCLVYYFYPASSTLYVLRIDVLNYTSKDEGPSAEGPQRNTRLGWIQGKQVTVLGSPVPVNVFLGVPFAAPPLGSLRFTNPQPASPWDNLREATSYPNLCLQNSEWLLLDQHMLKVHYPKFGVSEDCLYLNIYAPAHADTGSKLPVLVWFPGGAFKTGSASIFDGSALAAYEDVLVVVVQYRLGIFGFFTTWDQHAPGNWAFKDQVAALSWVQKNIEFFGGDPSSVTIFGESAGAISVSSLILSPMAKGLFHKAIMESGVAIIPYLEAHDYEKSEDLQVVAHFCGNNASDSEALLRCLRTKPSKELLTLSQKTKSFTRVVDGAFFPNEPLDLLSQKAFKAIPSIIGVNNHECGFLLPMKEAPEILSGSNKSLALHLIQNILHIPPQYLHLVANEYFHDKHSLTEIRDSLLDLLGDVFFVVPALITARYHRDAGAPVYFYEFRHRPQCFEDTKPAFVKADHADEVRFVFGGAFLKGDIVMFEGATEEEKLLSRKMMKYWATFARTGNPNGNDLSLWPAYNLTEQYLQLDLNMSLGQRLKEPRVDFWTSTIPLILSASDMLHSPLSSLTFLSLLQPFFFFCAP

SEQ ID NO: 18066 - protein, 328 aa, Homo sapiens
MQPLPPPQTNHEEPSRSRNHKTAKLPAPSIDRSTKPPLDRSLAPFDREPFTLGKKPPFSDKPSIPAGRSLGEHLPKIQKPPLPPTTERHERSSPLPGKKPPVPKHGWGPDRRENDEDDVHQRPLPQPALLPMSSNTFPSRSTKPSPMNPLPSSHMPGAFSESNSSFPQSASLPPYFSQGPSNRPPIRAEGRNFPLPLPNKPRPPSPAEEENSLNEEWYVSYITRPEAEAALRKINQDGTFLVRDSSKKTTTNPYVLMVLYKDKVYNIQIRYQKESQVYLLGTGLRGKEDFLSVSDIIDYFRKMPLLLIDGKNRGSRYQCTLTHAAGYP

SEQ ID NO: 18067 - protein, 201 aa, Homo sapiens
MAAAGAGPGQEAGAGPGPGAVANATGAEEGEMKPVAAGAAAPPGEGISAAPTVEPSSGEAEGGKETTLQCQTGRSNGHSENRVGELPLFEPLPGPTLTQEGAGDTSEVMDTQAGSVDEENGRQLGEVELQCGICTKWFTADTFGIDTSSCLPFMTNYSFHCNVCHHSGNTYFLRKQANLKEMCLSALANLTWQSRTQDEHP

SEQ ID NO: 18068 - protein, 923 aa, Homo sapiens
MLENYRNLVSLAMCSHFTQDFLPVQGIEDSFHKLILRRYEKCGHDNLQLRKGCKSMNVCKVQKGVYNGINKCLSNTQSKIFQCNARVKVFSKFANSNKDKTRHTGEKHFKCNECGKSFQKFSDLTQHKGIHAGEKPYTCEERGKDFGWYTDLNQHKKIHTGEKPYKCEECGKAFNRSTNLTAHKRIHNREKAYTGEDRDRAFGWSTNLNEYKKIHTGDKPYKCKECGKAFMHSSHLNKHEKIHTGEKPYKCKECGKVISSSSSFAKHKRIHTGEKPFKCLECGKAFNISTTLTKHRRIHTGEKPYTCEVCGKAFRQSANLYVHRRIHTGEKPYTCGECGKTFRQSANLYVHRRIHTGEKPYKCEDCGKAFGRYTALNQHKKIHTGEKPYKCEECGKAFNSSTNLTAHKRIHTREKPYTCEDRGRAFGLSTNLNEYKKIHTGDKPYKCKECGKAFIHSLHLNKHEKIHTGKKPYKCKQCGKVITSSSSFAKHKRIHTGEKPFECLECGKAFTSSTTLTKHRRIHTGEKPYTCEVCGKAFRQSAILYVHRRIHTGEKPYTCEECGKTFRQSANLYVHRRIHTGEKPYKCEECGKAFGRYTDLNQHKKIHTGEKLYKCEECGKDFVWYTDLNQQKKIYTGEKPYKCEECGKAFAPSTDLNQHTKILTGEQSYKCEECGKAFGWSIALNQHKKIHTGEKPYKCEECGKAFSRSRNLTTHRRVHTREKPYKCEDRGRSFGWSTNLNEYKKIHTGDKLYKCKECGKVFKQSSHLNRHEKIHTGKKPYKCKECGKVITSSSSFAKHKRIHTGEKPFKCLECGKAFTSSTTLTKHRRIHTGEKPYTCEECGKAFRQSAILYVHRRIHTGEKPYTCGECGKTFRQSANLYAHKKIHTGEKPYTCGDCGKTFRQSANLYAHKKIHTGDKTIQV

SEQ ID NO: 18069 - protein, 499 aa, Homo sapiens
MDAMKRGLCCVLLLCGAVFVSPSQEIHARFRRGARSYQVICRDEKTQMIYQQHQSWLRPVLRSNRVEYCWCNSGRAQCHSVPVKSCSEPRCFNGGTCQQALYFSDFVCQCPEGFAGKCCEIDSKPWCYVFKAGKYSSEFCSTPACSEGNSDCYFGNGSAYRGTHSLTESGASCLPWNSMILIGKVYTAQNPSAQALGLGKHNYCRNPDGDAKPWCHVLKNRRLTWEYCDVPSCSTCGLRQYSQPQFRIKGGLFADIASHPWQAAIFAKHRRSPGERFLCGGILISSCWILSAAHCFQERFPPHHLTVILGRTYRVVPGEEEQKFEVEKYIVHKEFDDDTYDNDIALLQLKSDSSRCAQESSVVRTVCLPPADLQLPDWTECELSGYGKHEALSPFYSERLKEAHVRLYPSSRCTSQHLLNRTVTDNMLCAGDTRSGGPQANLHDACQGDSGGPLVCLNDGRMTLVGIISWGLGCGQKDVPGVYTKVTNYLDWIRDNMRP

SEQ ID NO: 18070 - protein, 545 aa, Homo sapiens
MSGNWVHPGQILIWAIWVLAAPTKGPSAEGPQRNTRLGWIQGKQVTVLGSPVPVNVFLGVPFAAPPLGSLRFTNPQPASPWDNLREATSYPNLCLQNSEWLLLDQHMLKVLVWFPGGAFKTGSASIFDGSALAAYEDVLVVVVQYRLGIFGFFTTWDQHAPGNWAFKDQVAALSWVQKNIEFFGGDPSSVTIFGESAGAISVSSLILSPMAKGLFHKAIMESGVAIIPYLEAHDYEKSEDLQVVAHFCGNNASDSEALLRCLRTKPSKELLTLSQKTKSFTRVVDGAFFPNEPLDLLSQKAFKAIPSIIGVNNHECGFLLPMKEAPEILSGSNKSLALHLIQNILHIPPQYLHLVANEYFHDKHSLTEIRDSLLDLLGDVFFVVPALITARYHRDAGAPVYFYEFRHRPQCFEDTKPAFVKADHADEVRFVFGGAFLKGDIVMFEGATEEEKLLSRKMMKYWATFARTGNPNGNDLSLWPAYNLTEQYLQLDLNMSLGQRLKEPRVDFWTSTIPLILSASDMLHSPLSSLTFLSLLQPFFFFCAP

SEQ ID NO: 18071 - protein, 91 aa, Homo sapiens
MTKKTRDLRRQLRKAVMDHVSDSFLETNVPLLVLIEAAKNGNEKEVKEYAQVFREHANKLIEVANLACSISNNEEGVKLVRMSASQLEALC

SEQ ID NO: 18072 - protein, 522 aa, Homo sapiens
MWGRLWPLLLSILTATAVPGPSLRRPSRELDATPRMTIPYEELSGTRHFKGQAQNYSTLLLEEASARLLVGARGALFSLSANDIGDGAHKEIHWEASPEMQSKCHQKGKNNQTECFNHVRFLQRLNSTHLYACGTHAFQPLCAAIDAEAFTLPTSFEEGKEKCPYDPARGFTGLIIDGGLYTATRYEFRSIPDIRRSRHPHSLRTEETPMHWLNDAEFVFSVLVRESKASAVGDDDKVYYFFTERATEEGSGSFTQSRSSHRVARVARVCKGDLGGKKILQKKWTSFLKARLICHIPLYETLRGVCSLDAETSSRTHFYAAFTLSTQWKTLEASAICRYDLAEIQAVFAGPYMEYQDGSRRWGRYEGGVPEPRPGSCITDSLRSQGYNSSQDLPSLVLDFVKLHPLMARPVVPTRGRPLLLKRNIRYTHLTGTPVTTPAGPTYDLLFLGTADGWIHKAVVLGSGMHIIEETQVFRESQSVENLVISLLQHSLYVGAPSGVIQLPLSSCSRYRSCYDCILARD

SEQ ID NO: 18073 - protein, 848 aa, Homo sapiens
MVWDRQTKMEYEWKPDEQGLQQILQLLKESQSPDTTIQRTVQQKLEQLNQYPDFNNYLIFVLTKLKSEGILITTIASKGELQNWPDLLPKLCSLLDSEDYNTCEGAFGALQKICEDSAEILDSDVLDRPLNIMIPKFLQFFKHSSPKIRSHAVACVNQFIISRTQALMLHIDSFIENLFALAGDEEPEVRKNVCRALVMLLEVRMDRLLPHMHNIVEYMLQRTQDQDENVALEACEFWLTLAEQPICKDVLVRHLPKLIPVLVNGMKYSDIDIILLKGDVEEDETIPDSEQDIRPRFHRSRTVAQQHDEDGIEEEDDDDDEIDDDDTISDWNLRKCSAAALDVLANVYRDELLPHILPLLKELLFHHEWVVKESGILVLGAIAEGCMQGMIPYLPELIPHLIQCLSDKKALVRSITCWTLSRYAHWVVSQPPDTYLKPLMTELLKRILDSNKRVQEAACSAFATLEEEACTELVPYLAYILDTLVFAFSKYQHKNLLILYDAIGTLADSVGHHLNKPEYIQMLMPPLIQKWNMLKDEDKDLFPLLECLSSVATALQSGFLPYCEPVYQRCVNLVQKTLAQAMLNNAQPDQYEAPDKDFMIVALDLLSGLAEGLGGNIEQLVARSNILTLMYQCMQDKMPEVRQSSFALLGDLTKACFQHVKPCIADFMPILGTNLNPEFISVCNNATWAIGEISIQMGIEMQPYIPMVLHQLVEIINRPNTPKTLLENTAITIGRLGYVCPQEVAPMLQQFIRPWCTSLRNIRDNEEKDSAFRGICTMISVNPSGVIQDFIFFCDAVASWINPKDDLRDMFCKILHGFKNQVGDENWRRFSDQFPLPLKERLAAFYGV

SEQ ID NO: 18074 - protein, 1035 aa, Homo sapiens
MVRKKNPPLRNVASEGEGQILEPIGTESKVSGKNKEFSADQMSENTDQSDAAELNHKEEHSLHVQDPSSSTAGGVCEPLKSPQRAEADDPQDMACTPSGDSLETKEDQKMSPKATEETGQAQSGQANCQGLSPVSVASKNPQVPSDGGVRLNKSKTDLLVNDNPDPAPLSPELQDFKCNICGYGYYGNDPTDLIKHFRKYHLGLHNRTRQDAELDSKILALHNMVQFSHSKDFQKVNRSVFSGVLQDINSSRPVLLNGTYDVQVTSGGTFIGIGRKTPDCQGNTKYFRCKFCNFTYMGNSSTELEQHFLQTHPNKIKASLPSSEVAKPSEKNSNKSIPALQSSDSGDLGKWQDKITVKAGDDTPVGYSVPIKPLDSSRQNDVLLFHYESVHESQASDVKQEANHLQGSDGQQSVKESKEHSCTKCDFITQVEEEISRHYRRAHSCYKCRQCSFTAADTQSLLEHFNTVHCQEQDITTANGEEDGHAISTIKEEPKIDFRVYNLLTPDSKMGEPVSESVVKREKLEEKDGLKEKVWTESSSDDLRNVTWRGADILRGSPSYTQASLGLLTPVSGTQEQTKTLRDSPNVEAAHLARPIYGLAVETKGFLQGAPAGGEKSGALPQQYPASGENKSKDESQSLLRRRRGSGVFCANCLTTKTSLWRKNANGGYVCNACGLYQKLHSTPRPLNIIKQNNGEQIIRRRTRKRLNPEALQAEQLNKQQRGSNEEQVNGSPLERRSEDHLTESHQREIPLPSLSKYEAQGSLTKSHSAQQPVLVSQTLDIHKRMQPLHIQIKSPQESTGDPGNSSSVSEGKGSSERGSPIEKYMRPAKHPNYSPPGSPIEKYQYPLFGLPFVHNDFQSEADWLRFWSKYKLSVPGNPHYLSHVPGLPNPCQNYVPYPTFNLPPHFSAVGSDNDIPLDLAIKHSRPGPTANGASKEKTKAPPNVKNEGPLNVVKTEKVDRSTQDELSTKCVHCGIVFLDEVMYALHMSCHGDSGPFQCSICQHLCTDKYDFTTHIQRGLHRNNAQVEKNGKPKE

SEQ ID NO: 18075 - protein, 168 aa, Homo sapiens
MRSIRKRWTICTISLLLIFYKTKEIARTEEHQETQLIGDGELSLSRSLVNSSDKIIRKAGSSIFQHNVEGWKINSSLVLEIRKNILRFLDAERDVSVVKSSFKPGDVIHYVLDRRRTLNISHDLHSLLPEVSPMKNRRFKTCAVVGNSGILLDSECGKEIDSHNFVIR

SEQ ID NO: 18076 - protein, 97 aa, Homo sapiens
MHQTRTGKKTVRMPSVTQRLRDPDINPCLSESDASTRCLDENNYDRERCSTYFLRYKNCRRFWNSIVMQRRKNGVKPFMPTAAERDEILRAVGNMPY

SEQ ID NO: 18077 - protein, 512 aa, Homo sapiens
MGCIKSKGKDSLSDDGVDLKTQPVRNTERTIYVRDPTSNKQQRPVPESQLLPGQRFQTKDPEEQGDIVVALYPYDGIHPDDLSFKKGEKMKVLEEHGEWWKAKSLLTKKEGFIPSNYVAKLNTLETEEWFFKDITRKDAERQLLAPGNSAGAFLIRESETLKGSFSLSVRDFDPVHGDVIKHYKIRSLDNGGYYISPRITFPCISDMIKHYQKQADGLCRRLEKACISPKPQKPWDKDAWEIPRESIKLVKRLGAGQFGEVWMGYYNNSTKVAVKTLKPGTMSVQAFLEEANLMKTLQHDKLVRLYAVVTREEPIYIITEYMAKGSLLDFLKSDEGGKVLLPKLIDFSAQIAEGMAYIERKNYIHRDLRAANVLVSESLMCKIADFGLARVIEDNEYTAREGAKFPIKWTAPEAINFGCFTIKSDVWSFGILLYEIVTYGKIPYPGRTNADVMTALSQGYRMPRVENCPDELYDIMKMCWKEKAEERPTFDYLQSVLDDFYTATEGQYQQQP

SEQ ID NO: 18078 - protein, 290 aa, Homo sapiens
MAALTPRKRKQDSLKCDSLLHFTENLFPSPNKKHCFYQNSDKNEENLHCSQQEHFVLSALKTTEINRLPSANQGSPFKSALSTVSFYNQNKWYLNPLERKLIKESRSTCLKTNDEDKSFPIVTEKMQGKPVCSKKNNKKPQKSLTAKYQPKYRHIKPVSRNSRNSKQNRVIYKPIVEKENNCHSAENNSNAPRVLSQKIKPQVTLQGGAAFFVRKKSSLRKSSLENEPSLGRTQKSKSEVIEDSDVETVSEKKTFATRQVPKCLVLEEKLKIGLLSASSKNKEKLIKIFR

SEQ ID NO: 18079 - protein, 85 aa, Homo sapiens
MSDKSDLKAELERKKQRLAQIREEKKRKEEERKKKEADMQQKKEPVQDDSDLDRKRRETEALLQSIGISPEPPLVPTPMSPSSKS

SEQ ID NO: 18080 - protein, 2653 aa, Homo sapiens
MVSPPLLIISVAGTIECKPDHLLWRPGSTSPQSVSFLHGKVVMESLGRPIPPTSSPSLLPSAQLPSSHNPPPVSCQMPLLDSNTSHQIMDTNPDEEFSPNSYLLRACSGPQQASSSGPPNHHSQSTLRPPLPPPHNHTLSHHHSSANSLNRNSLTNRRSQIHAPAPAPNDLATTPESVQLQDSWVLNSNVPLETRHFLFKTSSGSTPLFSSSSPGYPLTSGTVYTPPPRLLPRNTFSRKAFKLKKPSKYCSWKCAALSAIAAALLLAILLAYFIAMHLLGLNWQLQPADGHTFNNGIRTGLPGNDDVATMPSGGKVPWSLKNSSIDSGEAEVGRRVTQEVPPGVFWRSQIHISQPQFLKFNISLGKDALFGVYIRRGLPPSHAQYDFMERLDGKEKWSVVESPRERRSIQTLVQNEAVFVQYLDVGLWHLAFYNDGKDKEMVSFNTVVLDSVQDCPRNCHGNGECVSGVCHCFPGFLGADCAKAACPVLCSGNGQYSKGTCQCYSGWKGAECDVPMNQCIDPSCGGHGSCIDGNCVCSAGYKGEHCEEVDCLDPTCSSHGVCVNGECLCSPGWGGLNCELARVQCPDQCSGHGTYLPDTGLCSCDPNWMGPDCSVEVCSVDCGTHGVCIGGACRCEEGWTGAACDQRVCHPRCIEHGTCKDGKCECREGWNGEHCTIGRQTAGTETDGCPDLCNGNGRCTLGQNSWQCVCQTGWRGPGCNVAMETSCADNKDNEGDGLVDCLDPDCCLQSACQNSLLCRGSRDPLDIIQQGQTDWPAVKSFYDRIKLLAGKDSTHIIPGENPFNSSLVSLIRGQVVTTDGTPLVGVNVSFVKYPKYGYTITRQDGTFDLIANGGASLTLHFERAPFMSQERTVWLPWNSFYAMDTLVMKTEENSIPSCDLSGFVRPDPIIISSPLSTFFSAAPGQNPIVPETQVLHEEIELPGSNVKLRYLSSRTAGYKSLLKITMTQSTVPLNLIRVHLMVAVEGHLFQKSFQASPNLAYTFIWDKTDAYGQRVYGLSDAVVSVGFEYETCPSLILWEKRTALLQGFELDPSNLGGWSLDKHHILNVKSGILHKGTGENQFLTQQPAIITSIMGNGRRRSISCPSCNGLAEGNKLLAPVALAVGIDGSLYVGDFNYIRRIFPSRNVTSILELRNKEFKHSNNPAHKYYLAVDPVSGSLYVSDTNSRRIYRVKSLSGTKDLAGNSEVVAGTGEQCLPFDEARCGDGGKAIDATLMSPRGIAVDKNGLMYFVDATMIRKVDQNGIISTLLGSNDLTAVRPLSCDSSMDVAQVRLEWPTDLAVNPMDNSLYVLENNVILRITENHQVSIIAGRPMHCQVPGIDYSLSKLAIHSALESASAIAISHTGVLYITETDEKKINRLRQVTTNGEICLLAGAASDCDCKNDVNCNCYSGDDAYATDAILNSPSSLAVAPDGTIYIADLGNIRIRAVSKNKPVLNAFNQYEAASPGEQELYVFNADGIHQYTVSLVTGEYLYNFTYSTDNDVTELIDNNGNSLKIRRDSSGMPRHLLMPDNQIITLTVGTNGGLKVVSTQNLELGLMTYDGNTGLLATKSDETGWTTFYDYDHEGRLTNVTRPTGVVTSLHREMEKSITIDIENSNRDDDVTVITNLSSVEASYTVVQDQVRNSYQLCNNGTLRVMYANGMGISFHSEPHVLAGTITPTIGRCNISLPMENGLNSIEWRLRKEQIKGKVTIFGRKLRVHGRNLLSIDYDRNIRTEKIYDDHRKFTLRIIYDQVGRPFLWLPSSGLAAVNVSYFFNGRLAGLQRGAMSERTDIDKQGRIVSRMFADGKVWSYSYLDKSMVLLLQSQRQYIFEYDSSDRLLAVTMPSVARHSMSTHTSIGYIRNIYNPPESNASVIFDYSDDGRILKTSFLGTGRQVFYKYGKLSKLSEIVYDSTAVTFGYDETTGVLKMVNLQSGGFSCTIRYRKIGPLVDKQIYRFSEEGMVNARFDYTYHDNSFRIASIKPVISETPLPVDLYRYDEISGKVEHFGKFGVIYYDINQIITTAVMTLSKHFDTHGRIKEVQYEMFRSLMYWMTVQYDSMGRVIKRELKLGPYANTTKYTYDYDGDGQLQSVAVNDRPTWRYSYDLNGNLHLLNPGNSVRLMPLRYDLRDRITRLGDVQYKIDDDGYLCQRGSDIFEYNSKGLLTRAYNKASGWSVQYRYDGVGRRASYKTNLGHHLQYFYSDLHNPTRITHVYNHSNSEITSLYYDLQGHLFAMESSSGEEYYVASDNTGTPLAVFSINGLMIKQLQYTAYGEIYYDSNPDFQMVIGFHGGLYDPLTKLVHFTQRDYDVLAGRWTSPDYTMWKNVGKEPAPFNLYMFKSNNPLSSELDLKNYVTDVKSWLVMFGFQLSNIIPGFPRAKMYFVPPPYELSESQASENGQLITGVQQTTERHNQAFMALEGQVITKKLHASIREKAGHWFATTTPIIGKGIMFAIKEGRVTTGVSSIASEDSRKVASVLNNAYYLDKMHYSIEGKDTHYFVKIGSADGDLVTLGTTIGRKVLESGVNVTVSQPTLLVNGRTRRFTNIEFQYSTLLLSIRYGLTPDTLDEEKARVLDQARQRALGTAWAKEQQKARDGREGSRLWTEGEKQQLLSTGRVQGYEGYYVLPVEQYPELADSSSNIQFLRQNEMGKR

SEQ ID NO: 18081 - protein, 167 aa, Homo sapiens
MSGSRESCTVGCVCVFTRMRVPVCLCVCITNLLLGLTVRLKLALCLYVAGDSRDMSREMQDVDLAEVKPLVEKGETITGLLQEFDVQEQDIETLHGSVHVTLCGTPKGNRPVILTYHDIGMNHKTCYNPLFNYEDMQEITQHFAVCHVDAPGQQDGAASFPAGYMYP

SEQ ID NO: 18082 - protein, 391 aa, Homo sapiens
MILNGEEIILSLQKTKHLLGPDYTETLYSPRGEEITTKPENMEHCYYKGNILNEKNSVASISTCDGLRGYFTHHHQRYQIKPLKSTDEKEHAVFTSNQEEQDPANHTCGVKSTDGKQGPIRISRSLKSPEKEDFLRAQKYIDLYLVLDNAFYKNYNENLTLIRSFVFDVMNLLNVIYNTIDVQVALVGMEIWSDGDKIKVVPSASTTFDNFLRWHSSNLGKKIHDHAQLLSGISFNNRRVGLAASNSLCSPSSVAVIEAKKKNNVALVGVMSHELGHVLGMPDVPFNTKCPSGSCVMNQYLSSKFPKDFSTSCRAHFERYLLSQKPKCLLQAPIPTNIMTTPVCGNHLLEVGEDCDCGSPKECTNLCCEALTCKLKPGTDCGGDAPNHTTE

SEQ ID NO: 18083 - protein, 916 aa, Homo sapiens
MCCSTHLFQPLQLAGGLEWPWSNLLCFLTPVKLHPEVWGLFPNQQSQEHAAFRFALSQLTEPPKLLPQIDIVNISDSFEMTYRFCSQFSKGVYAIFGFYERRTVNMLTSFCGALHVCFITPSFPVDTSNQFVLQLRPELQDALISIIDHYKWQKFVYIYDADRGLSVLQKVLDTAAEKNWQVTAVNILTTTEEGYRMLFQDLEKKKERLVVVDCESERLNAILGQIIKLEKNGIGYHYILANLGFMDIDLNKFKESGANVTGFQLVNYTDTIPAKIMQQWKNSDARDHTRVDWKRPKYTSALTYDGVKVMAEAFQSLRRQRIDISRRGNAGDCLANPAVPWGQGIDIQRALQQVRFEGLTGNVQFNEKGRRTNYTLHVIEMKHDGIRKIGYWNEDDKFVPAATDAQAGGDNSSVQNRTYIVTTILEDPYVMLKKNANQFEGNDRYEGYCVELAAEIAKHVGYSYRLEIVSDGKYGARDPDTKAWNGMVGELVYGRADVAVAPLTITLVREEVIDFSKPFMSLGISIMIKKPQKSKPGVFSFLDPLAYEIWMCIVFAYIGVSVVLFLVSRFSPYEWHSEEFEEGRDQTTSDQSNEFGIFNSLWFSLGAFMQQGCDISPRSLSGRIVGGVWWFFTLIIISSYTANLAAFLTVERMVSPIESAEDLAKQTEIAYGTLEAGSTKEFFRRSKIAVFEKMWTYMKSAEPSVFVRTTEEGMIRVRKSKGKYAYLLESTMNEYIEQRKPCDTMKVGGNLDSKGYGIATPKGSALRNPVNLAVLKLNEQGLLDKLKNKWWYDKGECGSGGGDSKDKTSALSLSNVAGVFYILIGGLGLAMLVALIEFCYKSRSESKRMKGFCLIPQQSINEAIRTSTLPRNSGAGASSGGSGENGRVVSHDFPKSMQSIPCMSHSSGMPLGATGL

SEQ ID NO: 18084 - protein, 672 aa, Homo sapiens
MEDHNCEQLCVNVPGSFVCQCYSGYALAEDGKRCVAVDYCASENHGCEHECVNADGSYLCQCHEGFALNPDKKTCTKIDYCASSNHGCQHECVNTDDSYSCHCLKGFTLNPDKKTCRRINYCALNKPGCEHECVNMEESYYCRCHRGYTLDPNGKTCSRVDHCAQQDHGCEQLCLNTEDSFVCQCSEGFLINEDLKTCSRVDYCLLSDHGCEYSCVNMDRSFACQCPEGHVLRSDGKTCAKLDSCALGDHGCEHSCVSSEDSFVCQCFEGYILREDGKTCRRKDVCQAIDHGCEHICVNSDDSYTCECLEGFRLAEDGKRCRRKDVCKSTHHGCEHICVNNGNSYICKCSEGFVLAEDGRRCKKCTEGPIDLVFVIDGSKSLGEENFEVVKQFVTGIIDSLTISPKAARVGLLQYSTQVHTEFTLRNFNSAKDMKKAVAHMKYMGKGSMTGLALKHMFERSFTQGEGARPLSTRVPRAAIVFTDGRAQDDVSEWASKAKANGITMYAVGVGKAIEEELQEIASEPTNKHLFYAEDFSTMDEISEKLKKGICEALEDSDGRQDSPAGELPKTVQQPTESEPVTINIQDLLSCSNFAVQHRYLFEEDNLLRSTQKLSHSTKPSGSPLEEKHDQCKCENLIMFQNLANEEVRKLTQRLEEMTQRMEALENRLRYR

SEQ ID NO: 18085 - protein, 318 aa, Homo sapiens
EKKSNYEVLEKDVGLKRFFPKSLLDSVKAKTLRKLIQQTFRQFANLNREESILKFFEILSPVYRFDKECFKCALGSSWIISVELAIGPEEGISYLTDKGCNPTHLADFTQVQTIQYSNSEDKDRKGMLQLKIAGAPEPLTVTAPSLTIAENMADLIDGYCRLVNGTSQSFIIRPQKEGERALPSIPKLANSEKQGMRTHAVSVSETDDYAEIIDEEDTYTMPSTRDYEIQRERIELGRCIGEGQFGDVHQGIYMSPENPALAVAIKTCKNCTSDSVREKFLQEACHYTSLHWNWCRYISDPNVDAAQTPGMQSNNASV

SEQ ID NO: 18086 - protein, 115 aa, Homo sapiens
MEDHNCEQLCVNVPGSFVCQCYSGYALAEDGKRCVAVDYCASENHGCEHECVNADGSYLCQCHEGFALNPDKKTCTKIDYCASSNHGCQHECVNTDDSYSCHCLKGFTLNPDKKT

SEQ ID NO: 18087 - protein, 763 aa, Homo sapiens
KASAQASLASKDKTPKSKSKKRNSTQLKSRVKNIRYESASMSSTCEPCKSRNRHSAQTEEPVQAKVFSRKNHEQLEKIIKCNRSTEISSAHARRILQQSNRNACNEAPETGSDFSMFEALRDTIYSEVATLISQNESRPHFLIELFHELQLLNTDYLRQRALYALQDIVSRHISESHEKGENVKSVNSGTWIASNSELTPSESLATTDDETFEKNFERETHKISEQNDADNASVLSVSSNFEPFATDDLGNTVIHLDQALARMREYERMKTEAESNSNMRCTCRIIEDGDGAGAGTTVNNLEETPVIENRSSQQPVSEVSTIPCPRIDTQQLDRQIKAIMKEVIPFLKEHMDEVCSSQLLTSVRRMVLTLTQQNDESKEFVKFFHKQLGSILQDSLAKFAGRKLKDCGEDLLVEISEVLFNELAFFKLMQDLDNNSITVKQRCKRKIEATGVIQSCAKEAKRILEDHGSPAGEIDDEDKDKDETETVKQTQTSEVYDGPKNVRSDISDQEEDEESEGCPVSINLSKAETQALTNYGSGEDENEDEEMEEFEEGPVDVQTSLQANTEATEENEHDEQVLQRDFKKTAESKNVPLEREATSKNDQNNCPVKPCYLNILEDEQPLNSAAHKESPPTVDSTQQPNPLPLRLPEMEPLVPRVKEVKSAQETPESSLAGSPDTESPVLVNDYEAESGNISQKSDEEDFVKVEDLPLKLTIYSEADLRKKMVEEEQKNHLSGEICEMQTEELAGNSETLKEPETVGAQSI

SEQ ID NO: 18088 - protein, 717 aa, Homo sapiens
MGKASPASGLSRPKTLVSPLRSNQWSLQKGLPEQYYSLTWFLSPILGLIFTPLIGSASDRCTLSWGRRRPFILALCVGVLFGVALFLNGSAIGLALGDVPNRQPIGIVLTVLGVVVLDFSADATEGPIRAYLLDVVDSEEQDMALNIHAFSAGLGGAIGYVLGGLDWTQTFLGSWFRTQNQVLFFFAAIIFTVSVALHLFSIDEEQYSPQQERSAEEPGALDGGEPHGVPAFPDEVQSEHELALDYPDVDIMRSKSDSALHVPDTALDLEPELLFLHDIEPSIFHDASYPATPRSTSQELAKTKLPRLATFLKEAAKEDETLLDNHLNEAKVPNGSGSPTKDALGGYTRVDTKPSATSSSMRRRRHAFRRQASSTFSYYGKLGSHCYRYRRANAVVLIKPSRSMSDLYDMQKRQRQHRHRNQSGATTSSGDTESEEGEGETTVRLLWLSMLKMPRELMRLCLCHLLTWFSVIAEAVFYTDFMGQVIFEGDPKAPSNSTAWQAYNAGVKMGCWGLVIYAATGAICSALLQKYLDNYDLSVRVIYVLGTLGFSVGTAVMAMFPNVYVAMVTISTMGIVSMSISYCPYALLGQYHDIKQYIHHSPGNSKRGFGIDCAILSCQVYISQILVASALGGVVDAVGTVRVIPMVASVGSFLGFLTATFLVIYPNVSEEAKEEQKGLSSPLAGEGRAGGNSEKPTVLKLTRKEGLQGPVETESVV

SEQ ID NO: 18089 - protein, 184 aa, Homo sapiens
MFRLWLLLAGLCGLLASRPGFQNSLLQIVIPEKIQTNTNDSSEIEYEQISYIIPIDEKLYTVHLKQRYFLADNFMIYLYNQGSMNTYSSDIQTQCYYQGNIEGYPDSMVTLSTCSGLRGILQFENVSYGIEPLESAVEFQHVLYKLKNEDNDIAIFIDRSLKEQPMDDNIFISEKYDYWGSDSM

SEQ ID NO: 18090 - protein, 713 aa, Homo sapiens
VPSAGEPGEEAPYLVKVHQVWAVKAGGLKKDSLLTVRLGTWGHPAFPSCGRLKEDSRYIFFMEPDANSTSRAPAAFRASFPPLETGRNLKKEVSRVLCKRCALPPRLKEMKSQESAAGSKLVLRCETSSEYSSLRFKWFKNGNELNRKNKPQNIKIQKKPGKSELRINKASLADSGEYMCKVISKLGNDSASANITIVESNEIITGMPASTEGAYVSSESPIRISVSTEGANTSSSTSTSTTGTSHLVKCAEKEKTFCVNGGECFMVKDLSNPSRYLCKCPNEFTGDRCQNYVMASFYKHLGIEFMEAEELYQKRVLTITGICIALLVVGIMCVVAYCKTKKQRKKLHDRLRQSLRSERNNMMNIANGPHHPNPPPENVQLVNQYVSKNVISSEHIVEREAETSFSTSHYTSTAHHSTTVTQTPSHSWSNGHTESILSESHSVIVMSSVENSRHSSPTGGPRGRLNGTGGPRECNSFLRHARETPDSYRDSPHSERYVSAMTTPARMSPVDFHTPSSPKSPPSEMSPPVSSMTVSMPSMAVSPFMEEERPLLLVTPPRLREKKFDHHPQQFSSFHHNPAHDSNSLPASPLRIVEDEEYETTQEYEPAQEPVKKLANSRRAKRTKPNGHIANRLEVDSNTSSQSSNSESETEDERVGEDTPFLGIQNPLAASLEATPAFRLADSRTNPAGRFSTQEEIQARLSSVIANQDPIAV

SEQ ID NO: 18091 - protein, 677 aa, Homo sapiens
MVFSKKKKKKKKNNMAAKEKLEAVLNVALRVPSIMLLDVLYRWDVSSFFQQIQRSSLSNNPLFQYKYLALNMHYVGYILSVVLLTLPRQHLVQLYLYFLTALLLYAGHQISRDYVRSELEFAYEGPMYLEPLSMNRFTTALIGQLVVCTLCSCVMKTKQIWLFSAHMLPLLARLCLVPLETIVIINKFAMIFTGLEVLYFLGSNLLVPYNLAKSAYRELVQVVEVYGLLALGMSLWNQLVVPVLFMVFWLVLFALQIYSYFSTRDQPASRERLLFLFLTSIAECCSTPYSLLGLVFTVSFVALGVLTLCKFYLQGYRAFMNDPAMNRGMTEGVTLLILAVQTGLIELQVVHRAFLLSIILFIVVASILQSMLEIADPIVLALGASRDKSLWKHFRAVSLCLFLLVFPAYMAYMICQFFHMDFWLLIIISSSILTSLQVLGTLFIYVLFMVEEFRKEPVENMDDVIYYVNGTYRLLEFLVALCVVAYGVSETIFGEWTVMGSMIIFIHSYYNVWLRAQLGWKSFLLRRDAVNKIKSLPIATKEQLEKHNDICAICYQDMKSAVITPCSHFFHAGCLKKWLYVQETCPLCHCHLKNSSQLPGLGTEPVLQPHAGAEQNVMFQEGTEPPGQEHTPGTRIQEGSRDNNEYIARRPDNQEGAFDPKEYPHSAKDEAHPVESA

SEQ ID NO: 18092 - protein, 723 aa, Homo sapiens
MLLFVEVASKGTGLNPNAKVWQEIAPGNTDATPVTHGTESSWHEIAATSGAHPEGNAELSEDICKEYEVMYSSSCETTRNTTGIEESTDGMILGPEDLSYQIYDVSGESNSAVSTEDLKECLKKQLEFCFSRENLSKDLYLISQMDSDQFIPIWTVANMEEIKKLTTDPDLILEVLRSSPMVQVDEKGEKVRPSHKRCIVILREIPETTPIEEVKGLFKSENCPKVISCEFAHNSNWYITFQSDTDAQQAFKYLREEVKTFQGKPIMARIKAINTFFAKNGYRLMDSSIYSHPIQTQAQYASPVFMQPVYNPHQQYSVYSIVPQSWSPNPTPYFETPLAPFPNGSFVNGFNSPGSYKTNAAAMNMGRPFQKNRVKPQFRSSGGSEHSTEGSVSLGDGQLNRYSSRNFPAERHNPTVTGHQEQTYLQKETSTLQVEQNGDYGRGRRTLFRGRRRREDDRISRPHPSTAESKAPTPKFDLLASNFPPLPGSSSRMPGELVLENRMSDVVKGVYKEKDNEELTISCPVPADEQTECTSAQQLNMSTSSPCAAELTALSTTQQEKDLIEDSSVQKDGLNQTTIPVSPPSTTKPSRASTASPCNNNINAATAVALQEPRKLSYAEVCQKPPKEPSSVLVQPLRELRSNVVSPTKNEDNGAPENSVEKPHEKPEARASKDYSGFRGNIIPRGAAGKIREQRRQFSHRAIPQGVTRRNGKEQYVPPRSPK

SEQ ID NO: 18093 - protein, 996 aa, Homo sapiens
MKQQALTEFEAYKHRVEDMQLCAEAQHVQRIVTMSREVEEIRRKFEEKLRSFGQLQVQFEKDKRLALEDLQAAHRREIQELLKSQQDHSASVNKGQEKAEELHRMEVESLNKMLEELRLERKKLIEDYEGKLNKAQSFYERELDTLKRSQLFTAESLQASKEKEADLRKEFQGQEAILRKTIGKLKTELQMVQDEAGSLLDKCQKLQTALAIAENNVQVLQKQLDDAKEGEMALLSKHKEVESELAAARERLQQQASDLVLKASHIGMLQATQMTQEVTIKDLESEKSRVNERLSQLEEERAFLRSKTQSLDEEQKQQILELEKKVNEAKRTQQEYYERELKNLQSRLEEEVTQLNEAHSKTLEELAWKHHMAIEAVHSNAIRDKKKLQMDLEEQHNKDKLNLEEDKNQLQQELENLKEVLEDKLNTANQEIGHLQDMVRKSEQGLGSAEGLIASLQDSQERLQNELDLTKDSLKETKDALLNVEGELEQERQQHEETIAAMKEEEKLKVDKMAHDLEIKWTENLRQECSKLREELRLQHEEDKKSAMSQLLQLKDREKNAARDSWQKKVEDLLNQISLLKQNLEIQLSQSQTSLQQLQAQFTQERQRLTQELEELEEQHQQRHKSLKEAHVLAFQTMEEEKEKEQRALENHLQQKHSAELQSLKDAHRESMEGFRIEMEQELQTLRFELEDEGKAMLASLRSELNHQHAAAIDLLRHNHHQELAAAKMELERSIDISRRQSKEHICRITDLQEELRHREHHISELDKEVQHLHENISALTKELEFKGKEILRIRSESNQQIRLHEQDLNKRLEKELDVMTADHLREKNIMRADFNKTNELLKEINAALQVSLEEMEEKYLMRESKPEDIQMITELKAMLTERDQIIKKLIEDNKFYQLELVNRETNFNKVFNSSPTVGVINPLAKQKKKNDKSPTNRFVSVPNLSALESGGVGNGHPNRLDPIPNSPVHDIEFNSSKPLPQPVPPKGPKTFLRYQ

SEQ ID NO: 18094 - protein, 206 aa, Homo sapiens
MTKLITETPDQPIPFLIDHLQSKQGNRGQLQRTLSGSAALWAESEKSESKGTRRDFRSYDKPWQLNAKKPKKSKSDLAVSNISPPSPDSKSLPRSVEHPKWNWRTKPQSRDFDELNHILQESKKLGKALENLSRSIAISDELDKETVTFNSSLLRPRVIGEWIGREENDADPLAAEMLQPPIPRSKNDQWESEDSGSSPAGSLEDT

SEQ ID NO: 18095 - protein, 1096 aa, Homo sapiens
MLLELAGQEALKPAGAIYMEKSGCSPFPVCWAKEYDRYLASSKIMAAAYLDPNLNHTPNSSTKTHLGTGMERSPGAMERVLKVFHYFESNSEPTTWASIIRHGDATDVRGIIQKIVDSHKVKHVACYGFRLSHLRSEEVHWLHVDMGVSSVREKYELAHPPEEWKYELRIRYLPKGFLNQFTEDKPTLNFFYQQVKSDYMLEIADQVDQEIALKLGCLEIRRSYWEMRGNALEKKSNYEVLEKDVGLKRFFPKSLLDSVKAKTLRKLIQQTFRQFANLNREESILKFFEILSPVYRFDKECFKCALGSSWIISVELAIGPEEGISYLTDKGCNPTHLADFTQVQTIQYSNSEDKDRKGMLQLKIAGAPEPLTVTAPSLTIAENMADLIDGYCRLVNGTSQSFIIRPQKEGERALPSIPKLANSEKQGMRTHAVSVSETDDYAEIIDEEDTYTMPSTRDYEIQRERIELGRCIGEGQFGDVHQGIYMSPENPALAVAIKTCKNCTSDSVREKFLQEALTMRQFDHPHIVKLIGVITENPVWIIMELCTLGELRSFLQVRKYSLDLASLILYAYQLSTALAYLESKRFVHRDIAARNVLVSSNDCVKLGDFGLSRYMEDSTYYKASKGKLPIKWMAPESINFRRFTSASDVWMFGVCMWEILMHGVKPFQGVKNNDVIGRIENGERLPMPPNCPPTLYSLMTKCWAYDPSRRPRFTELKAQLSTILEEEKAQQEERMRMESRRQATVSWDSGGSDEAPPKPSRPGYPSPRSSEGFYPSPQHMVQTNHYQVSGYPGSHGITAMAGSIYPGQASLLDQTDSWNHRPQEIAMWQPNVEDSTVLDLRGIGQVLPTHLMEERLIRQQQEMEEDQRWLEKEERFLKPDVRLSRGSIDREDGSLQGPIGNQHIYQPVGKPDPAAPPKKPPRPGAPGHLGSLASLSSPADSYNEGVKLQPQEISPPPTANLDRSNDKVYENVTGLVKAVIEMSSKIQPAPPEEYVPMVKEVGLALRTLLATVDETIPLLPASTHREIEMAQKLLNSDLGELINKMKLAQQYVMTSLQQEYKKQMLTAAHALAVDAKNLLDVIDQARLKMLGQTRPH

SEQ ID NO: 18096 - protein, 2799 aa, Homo sapiens
MTSIHFVVHPLPGTEDQLNDRLREVSEKLNKYNLNSHPPLNVLEQATIKQCVVGPNHAAFLLEDGRVCRIGFSVQPDRLELGKPDNNDGSKLNSNSGAGRTSRPGRTSDSPWFLSGSETLGRLAGNTLGSRWSSGVGGSGGGSSGRSSAGARDSRRQTRVIRTGRDRGSGLLGSQPQPVIPASVIPEELISQAQVVLQGKSRSVIIRELQRTNLDVNLAVNNLLSRDDEDGDDGDDTASESYLPGEDLMSLLDADIHSAHPSVIIDADAMFSEDISYFGYPSFRRSSLSRLGSSRVLLLPLERDSELLRERESVLRLRERRWLDGASFDNERGSTSKEGEPNLDKKNTPVQSPVSLGEDLQWWPDKDGTKFICIGALYSELLAVSSKGELYQWKWSESEPYRNAQNPSLHHPRATFLGLTNEKIVLLSANSIRATVATENNKVATWVDETLSSVASKLEHTAQTYSELQGERIVSLHCCALYTCAQLENSLYWWGVVPFSQRKKMLEKARAKNKKPKSSAGISSMPNITVGTQVCLRNNPLYHAGAVAFSISAGIPKVGVLMESVWNMNDSCRFQLRSPESLKNMEKASKTTEAKPESKQEPVKTEMGPPPSPASTCSDASSIASSASMPYKRRRSTPAPKEEEKVNEEQWSLREVVFVEDVKNVPVGKVLKVDGAYVAVKFPGTSSNTNCQNSSGPDADPSSLLQDCRLLRIDELQVVKTGGTPKVPDCFQRTPKKLCIPEKTEILAVNVDSKGVHAVLKTGNWVRYCIFDLATGKAEQENNFPTSSIAFLGQNERNVAIFTAGQESPIILRDGNGTIYPMAKDCMGGIRDPDWLDLPPISSLGMGVHSLINLPANSTIKKKAAVIIMAVEKQTLMQHILRCDYEACRQYLMNLEQAVVLEQNLQMLQTFISHRCDGNRNILHACVSVCFPTSNKETKEEEEAERSERNTFAERLSAVEAIANAISVVSSNGPGNRAGSSSSRSLRLREMMRRSLRAAGLGRHEAGASSSDHQDPVSPPIAPPSWVPDPPAMDPDGDIDFILAPAVGSLTTAATGTGQGPSTSTIPGPSTEPSVVESKDRKANAHFILKLLCDSVVLQPYLRELLSAKDARGMTPFMSAVSGRAYPAAITILETAQKIAKAEISSSEKEEDVFMGMVCPSGTNPDDSPLYVLCCNDTCSFTWTGAEHINQDIFECRTCGLLESLCCCTECARVCHKGHDCKLKRTSPTAYCDCWEKCKCKTLIAGQKSARLDLLYRLLTATNLVTLPNSRGEHLLLFLVQTVARQTVEHCQYRPPRIREDRNRKTASPEDSDMPDHDLEPPRFAQLALERVLQDWNALKSMIMFGSQENKDPLSASSRIGHLLPEEQVYLNQQSGTIRLDCFTHCLIVKCTADILLLDTLLGTLVKELQNKYTPGRREEAIAVTMRFLRSVARVFVILSVEMASSKKKNNFIPQPIGKCKRVFQALLPYAVEELCNVAESLIVPVRMGIARPTAPFTLASTSIDAMQGSEELFSVEPLPPRPSSDQSSSSSQSQSSYIIRNPQQRRISQSQPVRGRDEEQDDIVSADVEEVEVVEGVAGEEDHHDEQEEHGEENAEAEGQHDEHDEDGSDMELDLLAAAETESDSESNHSNQDNASGRRSVVTAATAGSEAGASSVPAFFSEDDSQSNDSSDSDSSSSQSDDIEQETFMLDEPLERTTNSSHANGAAQAPRSMQWAVRNTQHQRAASTAPSSTSTPAASSAGLIYIDPSNLRRSGTISTSAAAAAAALEASNASSYLTSASSLARAYSIVIRQISDLMGLIPKYNHLVYSQIPAAVKLTYQDAVNLQNYVEEKLIPTWNWMVSIMDSTEAQLRYGSALASAGDPGHPNHPLHASQNSARRERMTAREEASLRTLEGRRRATLLSARQGMMSARGDFLNYALSLMRSHNDEHSDVLPVLDVCSLKHVAYVFQALIYWIKAMNQQTTLDTPQLERKRTRELLELGIDNEDSEHENDDDTNQSATLNDKDDDSLPAETGQNHPFFRRSDSMTFLGCIPPNPFEVPLAEAIPLADQPHLLQPNARKEDLFGRPSQGLYSSSASSGKCLMEVTVDRNCLEVLPTKMSYAANLKNVMNMQNRQKKEGEEQPVLPEETESSKPGPSAHDLAAQLKSSLLAEIGLTESEGPPLTSFRPQCSFMGMVISHDMLLGRWRLSLELFGRVFMEDVGAEPGSILTELGGFEVKESKFRREMEKLRNQQSRDLSLEVDRDRDLLIQQTMRQLNNHFGRRCATTPMAVHRVKVTFKDEPGEGSGVARSFYTAIAQAFLSNEKLPNLECIQNANKGTHTSLMQRLRNRGERDREREREREMRRSSGLRAGSRRDRDRDFRRQLSIDTRPFRPASEGNPSDDPEPLPAHRQALGERLYPRVQAMQPAFASKITGMLLELSPAQLLLLLASEDSLRARVDEAMELIIAHGRENGADSILDLGLVDSSEKVQQENRKRHGSSRSVVDMDLDDTDDGDDNAPLFYQPGKRGFYTPRPGKNTEARLNCFRNIGRILGLCLLQNELCPITLNRHVIKVLLGRKVNWHDFAFFDPVMYESLRQLILASQSSDADAVFSAMDLAFAIDLCKEEGGGQVELIPNGVNIPVTPQNVYEYVRKYAEHRMLVVAEQPLHAMRKGLLDVLPKNSLEDLTAEDFRLLVNGCGEVNVQMLISFTSFNDESGENAEKLLQFKRWFWSIVEKMSMTERQDLVYFWTSSPSLPASEEGFQPMPSITIRPPDDQHLPTANTCISRLYVPLYSSKQILKQKLLLAIKTKNFGFV

SEQ ID NO: 18097 - protein, 1181 aa, Homo sapiens
METRAAENTAIFMCKCCNLFSPNQSELLSHVSEKHMEEGVNVDEIIIPLRPLSTPEPPNSSKTGDEFLVMKRKRGRPKGSTKKSSTEEELAENIVSPTEDSPLAPEEGNSLPPSSLECSKCCRKFSNTRQLRKHICIIVLNLGEEEGEAGATKIVPVEAGPPETGATNSETTSADLVPRRGYQEYAIQQTPYEQPMKSSRLGPTQLKIFTCEYCNKVFKFKHSLQAHLRIHTNEKPYKCPQCSYASAIKANLNVHLRKHTGEKFACDYCSFTCLSKGHLKVHIERVHKKIKQHCRFCKKKYSDVKNLIKHIRDAHDPQDKKVKEALDELCLMTREGKRQLLYDCHICERKFKNELDRDRHMLVHGDKWPFACELCGHGATKYQALELHVRKHPFVYVCAVCRKKFVSSIRLRTHIKEVHGAAQEALVFTSSINQSFCLLEPGGDIQQEALGDQLQLVEEEFALQGVNALKEEACPGDTQLEEGRKEPEAPGEMPAPAVHLASPQAESTALPPCELETTVVSSSDLHSQEVVSDDFLLKNDTSSAEAHAAPEKPPDMQHRSSVQTQGEVITLLLSKAQSAGSDQESHGAQSPLGEGQNMAVLSAGDPDPSRCLRSNPAEASDLLPPVAGGGDTITHQPDSCKAAPEHRSGITAFMKVLNSLQKKQMNTSLCERIRKVYGDLECEYCGKLFWYQVHFDMHVRTHTREHLYYCSQCHYSSITKNCLKRHVIQKHSNILLKCPTDGCDYSTPDKYKLQAHLKVHTALDKRSYSCPVCEKSFSEDRLIKSHIKTNHPEVSMSTISEVLGRRVQLKGLIGKRAMKCPYCDFYFMKNGSDLQRHIWAHEGVKPFKCSLCEYATRSKSNLKAHMNRHSTEKTHLCDMCGKKFKSKGTLKSHKLLHTADGKQFKCTVCDYTAAQKPQLLRHMEQHVSFKPFRCAHCHYSCNISGSLKRHYNRKHPNEEYANVGTGELAAEVLIQQGGLKCPVCSFVYGTKWEFNRHLKNKHGLKVVEIDGDPKWETATEAPEEPSTQYLHITEAEEDVQGTQAAVAALQDLRYTSESGDRLDPTAVNILQQIIELGAETHDATALASVVAMAPGTVTVVKQVTEEEPSSNHTVMIQETVQQASVELAEQHHLVVSSDDVEGIETVTVYTQGGEASEFIVYVQEAMQPVEEQAVEQPAQEL

SEQ ID NO: 18098 - protein, 704 aa, Homo sapiens
MGDYGFGVLVQSNTGNKSAFPVRFHPHLQPPHHHQNATPSPAAFINNNTAANGSSAGSAWLFPAPATHNIQDEILGSEKAKSQQQEQQDPLEKQQLSPSPGQEAGILPETEKAKSEENQGDNSSENGNGKEKIRIESPVLTGFDYQEATGLGTSTQPLTSSASSLTGFSNWSAAIAPSSSTIINEDASFFHQGGVPAASANNGALLFQNFPHHVSPGFGGSFSPQIGPLSQHHPHHPHFQHHHSQHQQQRRSPASPHPPPFTHRNAAFNQLPHLANNLNKPPSPWSSYQSPSPTPSSSWSPGGGGYGGWGGSQGRDHRRGLNGGITPLNSISPLKKNFASNHIQLQKYARPSSAFAPKSWMEDSLNRADNIFPFPDRPRTFDMHSLESSLIDIMRAENDTIKGQSSLFPMEDGFLDDGRGDQPLHSGLGSPHCFSHQNGERVERYSRKVFVGGLPPDIDEDEITASFRRFGPLIVDWPHKAESKSYFPPKGYAFLLFQDESSVQALIDACIEEDGKLYLCVSSPTIKDKPVQIRPWNLSDSDFVMDGSQPLDPRKTIFVGGVPRPLRAVELAMIMDRLYGGVCYAGIDTDPELKYPKGAGRVAFSNQQSYIAAISARFVQLQHGEIDKRVEVKPYVLDDQLCDECQGARCGGKFAPFFCANVTCLQYYCEYCWAAIHSRAGREFHKPLVKEGGDRPRHISFRWN

SEQ ID NO: 18099 - protein, 129 aa, Homo sapiens
MASHPQTRIQAYLEKNKIGPLFEELMTKLITETPDQPIPFLIDHLQSKQGNRGQLQRTLSGSAALWAESEKSESKGTRRDFRSYDKPWQLNAKKPKKSKSDLAVSNISPPSPDSKSCKEVSYSNAIQSM

SEQ ID NO: 18100 - protein, 418 aa, Homo sapiens
LSGSRQDLIPSYSLGSNKGRWESQQDVSQTTVSRGIAPAPALSVSPQNNHSPDPGLSNLAASYLNPVKSFVPQMPKLLKSLFPVRDEKRGKRPSPLAHQAQPEMGPDVLVQTMGAPALKICDKPAKVPSPPPVIAVTAVTPAPEAQDGPPSPLSEASSGYFSHSVSTATLSDALGPGLDAAAPPGSMPTAPEAEPEAPISHPPPPTAVPAEEPPGPQQLVSPGRERPDLEAPAPGSPFRVRRVRASELRSFSRMLAGDPGCSPGAEGNAPAPGAGGQALASDSEEADEVPEWLREGEFVTVGAHKTGVVRYVGPADFQEGTWVGVELDLPSGKNDGSIGGKQYFRCNPGYGLLVRPSRVRRATGPVRRRSTGLRLGAPEARRSATLSGSATNLASLTAALAKADRSHKNPENRKSWAS

SEQ ID NO: 18101 - protein, 172 aa, Homo sapiens
MDQALLLIHNELLWTNLTVYWKSECCYHCLFQVLVNVPQSPKAGKPSAAAASVSTQHGSILQLNDTLEEKEVCRLEYRFGEFGNYSLLVKNIHNGVSEIACDLAVNEDPVDSNLPVSIAFLIGLAVIIVISFLRLLLRVLLCHPGWSAVAPSRLTPSSASRVHTILLPQPPE

SEQ ID NO: 18102 - protein, 119 aa, Homo sapiens
MISVKRNTWRALSLVIGDCRKKGNFEYCQDRTEKHSTMPDSPVDVKTQSRLTPPTMPPPPTTQGAPRTSSFTPTTLTNGTSHSPTALNGAPSPPNGFSNGPSSSSSSSLANQQLPPACG

SEQ ID NO: 18103 - protein, 335 aa, Homo sapiens
VCQTPAIADIVILVDGSWSIGRFNFRLVRHFLENLVTAFDVGSEKTRIGVKNADVNELQEIASEPDSTHVYNVAEFDLMHTVVESLTRTLCSRVEEQDREIKASAHAITGPPTELITSEVTARSFMVNWTHAPGNVEKYRVVYYPTRGGKPDEVVVDGTVSSTVLKNLMSLTEYQIAVFAIYAHTASEGLRGTETTLALPMASDLLLYDVTENSMRVKWDAVPGASGYLILYAPLTEGLAGDEKEMKIGETHTDIELSGLLPNTEYTVTVYAMFGEEASDPVTGQETTLALSPPRNLRISNVGSNSARLTWDPTSRQINGYRIVYNNADGTEINE

SEQ ID NO: 18104 - protein, 522 aa, Homo sapiens
EFKKCCPGSPDIDKLDVATMTEYLNFEKSSSVSRYGASQVEDMGNIILAMISEPYNHRFSDPERVNYKFESGTCSKMELIDDNTVVRARGLPWQSSDQDIARFFKGLNIAKGGAALCLNAQGRRNGEALVRFVSEEHRDLALQRHKHHMGTRYIEVYKATGEDFLKIAGGTSNEVAQFLSKENQVIVRMRGLPFTATAEEVVAFFGQHCPITGGKEGILFVTYPDGRPTGDAFVLFACEEYAQNALRKHKDLLGKRYIELFRSTAAEVQQVLNRFSSAPLIPLPTPPIIPVLPQQFVPPTNVRDCIRLRGLPYAATIEDILDFLGEFATDIRTHGVHMVLNHQGRPSGDAFIQMKSADRAFMAAQKCHKKNMKDRYVEVFQCSAEEMNFVLMGGTLNRNGLSPPPCKLPCLSPPSYTFPAPAAVIPTEAAIYQPSVILNPRALQPSTAYYPAGTQLFMNYTAYYPSPPGSPNSLGYFPTAANLSGVPPQPGTVVRMQGLAYNTGVKEILNFFQGYQCLKDVW

SEQ ID NO: 18105 - protein, 589 aa, Homo sapiens
EEILDDLQNSQLPQLFPDTRPGAPAGSVDKQAIINDLMQLTAENSPVTPVGAQKTALRISQSRMIGNSASRPTMPSGEWAPQSSAVRVTCAATTSAMNRPVQGGMIRNPAASIPMRPSSQPGQRQTLQSQVMNIGPSELEMNMGGPQYSQQQAPPNQTAPWPESILPIDQASFASQNRQPFGSSPDDLLCPHPAAESPSDEGALLDQLYLALRNFDGLEEIDRALGIPELVSQSQAVDPEQFSSQDSNIMLEQKAPVFPQQYASQAQMAQGSYSPMQDPNFHTMGQRPSYATLRMQPRPGLRPTGLVQNQPNQLRLQLQHRLQAQQNRQPLMNQISNVSNVNLTLRPGVPTQAPINAQMLAQRQREILNQHLRQRQMHQQQQVQQRTLMMRGQGLNMTPSMVAPSGMPATMSNPRIPQANAQQFPFPPNYGISQQPDPGFTGATTPQSPLMSPRMAHTQSPMMQQSQANPAYQAPSDINGWAQGNMGGNSMFSQQSPPHFGQQANTSMYSNNMNINVSMATNTGGMSSMNQMTGQISMTSVTSVPTSGLSSMGPEQVNDPALRGGNLFPNQLPGMDMIKQEGDTTRKYC

SEQ ID NO: 18106 - protein, 721 aa, Homo sapiens
MTEGTCLRRRGGPYKTEPATDLGRWRLNCERGRQTWTYLQDERAGREQTGLEAYALGLDTKNYFKDLPKAHTAFEGALNGMTFYVGLQAEDGHWTGDYGGPLFLLPGLLITCHVARIPLPAGYREEIVRYLRHIEDKSTVFGTALNYVSLRILGVGPDDPDLVRARNILHKKGGAVAIPSWGKFWLAVLNVYSWEGLNTLFPEMWLFPDWAPAHPSTLWCHCRQVYLPMSYCYAVRLSAAEDPLVQSLRQELYVEDFASIDWLAQRNNVAPDELYTPHSWLLRVVYALLNLYEHHHSAHLRQRAVQKLYEHIVADDRFTKSISIGPISKTINMLVRWYVDGPASTAFQEHVSRIPDYLWMGLDGMKMQGTNGSQIWDTAFAIQALLEAGGHHRPEFSSCLQKAHEFLRLSQVPDNPPDYQKYYRQMRKGGFSFSTLDCGWIVSDCTAEALKAVLLLQEKCPHVTEHIPRERLCDAVAVLLNMRNPDGGFATYETKRGGHLLELLNPSEVFGDIMIDYTYVECTSAVMQALKYFHKRFPEHRAAEIRETLTQGLEFCRRQQRADGSWEGSWGVCFTYGTWFGLEAFACMGQTYRDGTACAEVSRACDFLLSRQMADGGWGEDFESCEERRYLQSAQSQIHNTCWAMMGLMAVRHPDIEAQERGVRCLLEKQLPNGDWPQENIAGVFNKSCAISYTSYRNIFPIWALGRFSQLYPERALAGHP

SEQ ID NO: 18107 - protein, 734 aa, Homo sapiens
MKARSRLMDSDMDYERPNVETIKCVVVGDNAVGKTRLICARACNATLTQYQLLATHVPTVWAIDQYRVCQEVLERSRDVVDDVSVSLRLWDTFGDHHKDRRFAYGRSDVVVLCFSIANPNSLHHVKTMWYPEIKHFCPRAPVILVGCQLDLRYADLEAVNRARRPLARPIKPNEILPPEKGREVAKELGIPYYETSVVAQFGIKDVFDNAIRAALISRRHLQFWKSHLRNVQRPLLQAPFLPPKPPPPIIVVPDPPSSSEECPAHLLEDPLCADVILVLQERVRIFAHKIYLSTSSSKFYDLFLMDLSEGELGGPSEPGGTHPEDHQGHSDQHHHHHHHHHGRDFLLRAASFDVCESVDEAGGSGPAGLRASTSDGILRGNGTGYLPGRGRVLSSWSRAFVSIQEEMAEDPLTYKSRLMVVVKMDSSIQPGPFRAVLKYLYTGELDENERDLMHIAHIAELLEVFDLRMMVANILNNEAFMNQEITKAFHVRRTNRVKECLAKGTFSDVTFILDDGTISAHKPLLISSCDWMAAMFGGPFVESSTREVVFPYTSKSCMRAVLEYLYTGMFTSSPDLDDMKLIILANRLCLPHLVALTEQYTVTGLMEATQMMVDIDGDVLVFLELAQFHCAYQLADWCLHHICTNYNNVCRKFPRDMKAMSPENQEYFEKHRWPPVWYLKEEDHYQRARKEREKEDYLHLKRQPKRRWLFWNSPSSPSSSAASSSSPSSSSAVV

SEQ ID NO: 18108 - protein, 168 aa, Homo sapiens
MRDGRYCRRAVLKPGPLSRAGYLRTGRRLDFVHHSGVFFLQTLLWILCATVCGTEQYFNVEVWLQKYGYLPPTDPRMSVLRSAETMQSALAAMQQFYGINMTGKVDRNTIDWMKKPRCGVPDQTRGSSKFHIRRKRYALTGQKWQHKHITYSIKNVTPKVGDPETRKA

SEQ ID NO: 18109 - protein, 581 aa, Homo sapiens
MAMSQESLTFKDVFVDFTLEEWQQLDSAQKNLYRDVMLENYSHLVSVGHLVGKPDVIFRLGPGDESWMADGGTPVRTCAGEDRPEVWEVDEQIDHYKESQDKFLWQAAFIGKETLKDESGQECKICRKIIYLNTDFVSVKQRLPKYYSWERCSKHHLNFLGQNRSYVRKKDDGCKAYWKVCLHYNLHKAQPAERFFDPNQRGKALHQKQALRKSQRSQTGEKLYKCTECGKVFIQKANLVVHQRTHTGEKPYECCECAKAFSQKSTLIAHQRTHTGEKPYECSECGKTFIQKSTLIKHQRTHTGEKPFVCDKCPKAFKSSYHLIRHEKTHIRQAFYKGIKCTTSSLIYQRIHTSEKPQCSEHGKASDEKPSPTKHWRTHTKENIYECSKCGKSFRGKSHLSVHQRIHTGEKPYECSICGKTFSGKSHLSVHHRTHTGEKPYECRRCGKAFGEKSTLIVHQRMHTGEKPYKCNECGKAFSEKSPLIKHQRIHTGERPYECTDCKKAFSRKSTLIKHQRIHTGEKPYKCSECGKAFSVKSTLIVHHRTHTGEKPYECRDCGKAFSGKSTLIKHQRSHTGDKNL

SEQ ID NO: 18110 - protein, 189 aa, Homo sapiens
KDDQKKSLSTGELEEVNEKLRDTADGTFLVRDASTKMHGDYTLTLRKGGNNKLIKIFHRDGKYGFSDPLTFSSVVELINHYRNESLAQYNPKLDVKLLYPVSKYQQDQVVKEDNIEAVGKKLHEYNTQFQEKSREYDRLYEEYTRTSQEIQMKRTAIEAFNETIKIFEEQCQTQERYSKEYIEKFKREG

SEQ ID NO: 18111 - protein, 291 aa, Homo sapiens
MSALNWKPFVYGGLASITAECGTFPIDLTKTRLQIQGQTNDAKFKEIRYRGMLHALVRIGREEGLKALYSGIAPAMLRQASYGTIKIGTYQSLKRLFIERPEDETLPINVICGILSGVISSTIANPTDVLKIRMQAQSNTIQGGMIGNFMNIYQQEGTRGLWKGVSLTAQRAAIVVGVELPVYDITKKHLILSGLMGDTVYTHFLSSFTCGLAGALASNPVDVVRTRMMNQRVLRDGRCSGYTGTLDCLLQTWKNEGFFALYKGFWPNWLRLGPWNIIFFVTYEQLKKLDL

SEQ ID NO: 18112 - protein, 680 aa, Homo sapiens
MKYQEVRCLTSFNISVSFPAETDDYAEIIDEEDTYTMPSTRDYEIQRERIELGRCIGEGQFGDVHQGIYMSPENPALAVAIKTCKNCTSDSVREKFLQEALTMRQFDHPHIVKLIGVITENPVWIIMELCTLGELRSFLQVRKYSLDLASLILYAYQLSTALAYLESKRFVHRDIAARNVLVSSNDCVKLGDFGLSRYMEDSTYYKASKGKLPIKWMAPESINFRRFTSASDVWMFGVCMWEILMHGVKPFQGVKNNDVIGRIENGERLPMPPNCPPTLYSLMTKCWAYDPSRRPRFTELKAQLSTILEEEKAQQEERMRMESRRQATVSWDSGGSDEAPPKPSRPGYPSPRSSEGFYPSPQHMVQTNHYQVSGYPGSHGITAMAGSIYPGQASLLDQTDSWNHRPQEIAMWQPNVEDSTVLDLRGIGQVLPTHLMEERLIRQQQEMEEDQRWLEKEERFLKPDVRLSRGSIDREDGSLQGPIGNQHIYQPVGKPDPAAPPKKPPRPGAPGHLGSLASLSSPADSYNEGVKLQPQEISPPPTANLDRSNDKVYENVTGLVKAVIEMSSKIQPAPPEEYVPMVKEVGLALRTLLATVDETIPLLPASTHREIEMAQKLLNSDLGELINKMKLAQQYVMTSLQQEYKKQMLTAAHALAVDAKNLLDVIDQARLKMLGQTRPH

SEQ ID NO: 18113 - protein, 185 aa, Homo sapiens
EQSLPPPAGLNSSWVELPMNSSNGNDNGNGKNGGLEHVPSSSSIHNGDMEKILLDAQHESGQSSSRGSSHCDSPSPQEDGQIMFDVEMHTSRDHSSQSEEEVVEGEKEVEALKKSADWVSDWSSRPENIPPKEFHFRHPKRSVSLSMRKSGAMKKGGIFSAEFLKVFIPSLFLSHVLALGLGCGN

SEQ ID NO: 18114 - protein, 504 aa, Homo sapiens
MKRGEPAIYRPLDPKPFPNYRANYNFRGMYNQRYHCPVPKIFYVQLTVGNNEFFGEGKTRQAARHNAAMKALQALQNEPIPERSPQNGESGKDVDDDKDANKSEISLVFEIALKRNMPVSFEVIKESGPPHMKSFVTRVSVGEFSAEGEGNSKKLSKKRAATTVLQELKKLPPLPVVEKPKLFFKKRPKTIVKAGPEYGQGMNPISRLAQIQQAKKEKEPDYVLLSERGMPRRREFVMQVKVGNEVATGTGPNKKIAKKNAAEAMLLQLGYKASTNLQDQLEKTGENKGWSGPKPGFPEPTNNTPKGILHLSPDVYQEMEASRHKVISGTTLGYLSPKDMNQPSSSFFSISPTSNSSATIARELLMNGTSSTAEAIGLKGSSPTPPCSPVQPSKQLEYLARIQGFQVHYCDRQSGKECVTCLTLAPVQMTFHAIGSSIEASHDQAALSALKQFSEQGLDPIDGAMNIEKGSLEKQAKHLREKADNNQAPPGSIAQDCKKSNSAV

SEQ ID NO: 18115 - protein, 902 aa, Homo sapiens
MVRKKNPPLRNVASEGEGQILEPIGTESKVSGKNKEFSADQMSENTDQSDAAELNHKEEHSLHVQDPSSSSKKDLKSAVLSEKAGFNYESPSKGGNFPSFPHDEVTDRNMLAFSSPAAGGVCEPLKSPQRAEADDPQDMACTPSGDSLETKEDQKMSPKATEETGQAQSGQANCQGLSPVSVASKNPQVPSDGGVRLNKSKTDLLVNDNPDPAPLSPELQDFKCNICGYGYYGNDPTDLIKHFRKYHLGLHNRTRQDAELDSKILALHNMVQFSHSKDFQKVNRSVFSGVLQDINSSRPVLLNGTYDVQVTSGGTFIGIGRKTPDCQGNTKYFRCKFCNFTYMGNSSTELEQHFLQTHPNKIKASLPSSEVAKPSEKNSNKSIPALQSSDSGDLGKWQDKITVKAGDDTPVGYSVPIKPLDSSRQNGTEATSYYWCKFCSFSCESSSSLKLLEHYGKQHGAVQSGGLNPELNDKLSRGSVINQNDLAKSSEGETMTKTDKSSSGAKKKDFSSKGAEDNMVTSYNCQFCDFRYSKSHGPDVIVVGPLLRHYQQLHNIHKCTIKHCPFCPRGLCSPEKHLGEITYPFACRKSNCSHCALLLLHLSPGAAGSSRVKHQCHQCSFTTPDVDVLLFHYESVHESQASDVKQEANHLQGSDGQQSVKESKEHSCTKCDFITQVEEEISRHYRRAHSCYKCRQCSFTAADTQSLLEHFNTVHCQEQDITTANGEEDGHAISTIKEEPKIDFRVYNLLTPDSKMGEPVSESVVKREKLEEKDGLKEKVWTESSSDDLRNVTWRGADILRGSPSYTQASLGLLTPVSGTQEQTKTLRDSPNVEAAHLARPIYGLAVETKGFLQGAPAGGEKSGALPQQYPASGENKSKDESQSLLRVFESAWMTPEEQFSL

SEQ ID NO: 18116 - protein, 56 aa, Homo sapiens
MVVSKMNKDAQMRAAINQKLIETGERERLKELLRAKLIECGWKDQLKAHCKDNDFK

SEQ ID NO: 18117 - protein, 338 aa, Homo sapiens
MELRSGSVGSQAVARRMDGDSRDGGGGKDATGSEDYENLPTSASVSTHMTAGAMAGILEHSVMYPVDSVKTRMQSLSPDPKAQYTSIYGALKKIMRTEGFWRPLRGVNVMIMGAGPAHAMYFACYENMKRTLNDVFHHQGNSHLANGIAGSMATLLHDAVMNPAEVVKQRLQMYNSQHRSAISCIRTVWRTEGLGAFYRSYTTQLTMNIPFQSIHFITYEFLQEQVNPHRTYNPQSHIISGGLAGALAAAATTPLDVCKTLLNTQENVALSLANISGRLSGMANAFRTVYQLNGLAGYFKGIQARVIYQMPSTAISWSVYEFFKYFLTKRQLENRAPY

SEQ ID NO: 18118 - protein, 743 aa, Homo sapiens
MGDSKVKVAVRIRPMNRRETDLHTKCVVDVDANKVILNPVNTNLSKGDARGQPKVFAYDHCFWSMDESVKEKYAGQDIVFKCLGENILQNAFDGYNACIFAYGQTGSGKSYTMMGTADQPGLIPRLCSGLFERTQKEENEEQSFKVEVSYMEIYNEKVRDLLDPKGSRQTLKVREHSVLGPYVDGLSKLAVTSYKDIESLMSEGNKSRTVAATNMNEESSRSHAVFKITLTHTLYDVKSGTSGEKVGKLSLVDLAGSERATKTGAAGDRLKEGSNINKSLTTLGLVISALADQSAGKNKNKFVPYRDSVLTWLLKDSLGGNSKTAMVATVSPAADNYDETLSTLRYADRAKHIVNHAVVNEDPNARIIRDLREEVEKLREQLTKAEAMKSPELKDRLEESEKLIQEMTVTWEEKLRKTEEIAQERQKQLESLGISLQSSGIKVGDDKCFLVNLNADPALNELLVYYLKEHTLIGSANSQDIQLCGMGILPEHCIIDITSEGQVMLTPQKNTRTFVNGSSVSSPIQLHHGDRILWGNNHFFRLNLPKKKKKAEREDEDQDPSMKNENSSEQLDVDGDSSSEVSSEVNFNYEYAQMEVTMKALGSNDPMQSILNSLEQQHEEEKRSALERQRLMYEHELEQLRRRLSPEKQNCRSMDRFSFHSPSAQQRLRQWAEEREATLNNSLMRLREQIVKANLLVREANYIAEELDKRTEYKVTLQIPASSLDANRKVRLPFLEKNKDLIG

SEQ ID NO: 18119 - protein, 873 aa, Homo sapiens
MSVSNLSWLKKKSQSVDINAPGFNPLAGAGKQTPQASKPPAPKTPIIEEEQNNAANTQKHPSRRSELKRFYTIDTGQKKTLDKKDGRRMSFQKPKGTIEYTVESRDSLNSIALKFDTTPNELVQLNKLFSRAVVTGQVLYVPDPEYVSSVESSPSLSPVSPLSPTSSEAEFDKTTNPDVHPTEATPSSTFTGIRPARVVSSTSEEEEAFTEKFLKINCKYITSGKGTVSGVLLVTPNNIMFDPHKNDPLVQENGCEEYGIMCPMEEVMSAAMYKEILDSKIKESLPIDIDQLSGRDFCHSKKMTGSNTEEIDSRIRDAGNDSASTAPRSTEESLSEDVFTESELSPIREELVSSDELRQDKSSGASSESVQTVNQAEVESLTVKSESTGTPGHLRSDTEHSTNEVGTLCHKTDLNNLEMAIKEDQIADNFQGISGPKEDSTSIKGNSDQDSFLHENSLHQEESQKENMPCGETAEFKQKQSVNKGKQGKEQNQDSQTEAEELRKLWKTHTMQQTKQQRENIQQVSQKEAKHKITSADGHIESSALLKEKQRHRLHKFLCLRVGKPMRKTFVSQASATMQQYAQRDKKHEYWFAVPQERTDHLYAFFIQWSPEIYAEDTGEYTREPGFIVVKKIEESETIEDSSNQAAAREWEVVSVAEYHRRIDALNTEELRTLCRRLQITTREDINSKQVATVKADLESESFRPNLSDPSELLLPDQIEKLTKHLPPRTIGYPWTLVYGTGKHGTSLKTLYRTMTGLDTPVLMVIKDSDGQVFGALASEPLKVSDGFYGTGETFVFTFCPEFEVFKWTGDNMFFIKGDMDSLAFGGGGGEFALWLDGDLYHGRSHSCKTFGNRTLSKKEDFFIQDIEIWAFE

SEQ ID NO: 18120 - protein, 331 aa, Homo sapiens
MILANVFCLFFFLGTGADPVVSAKSNHCLDAAKACNLNDNCKKLRSSYISICNREISPTERCNRRKCHKALRQFFDRVPSEYTYRMLFCSCQDQACAERRRQTILPSCSYEDKEKPNCLDLRGVCRTDHLCRSRLADFHANCRASYQTVTSCPADNYQACLGSYAGMIGFDMTPNYVDSSPTGIVVSPWCSCRGSGNMEEECEKFLRDFTENPCLRNAIQAFGNGTDVNVSPKGPSFQATQAPRVEKTPSLPDDLSDSTSLGTSVITTCTSVQEQGLKANNSKELSMCFTELTTNIIPGSNKVIKPNSGPSRARPSAALTVLSVLMLKLAL

SEQ ID NO: 18121 - protein, 708 aa, Homo sapiens
MQKMIPASQRAVTSPGQALSTVVKPLLQNTVDKILEALQRVFPHAEFRTNKTLDSDISCPLLESDLAYSDDDVPSVYENGLSQKSSHKAKDNFNFLHLNRNACYQPMSFRPRILIVGEPGFGQGSHLAPAVIHALEKFTVYTLDIPVLFGVSTTSPEETCAQVIREAKRTAPSIVYVPHIHVWWEIVGPTLKATFTTLLQNIPSFAPVLLLATSDKPHSALPEEVQELFIRDYGEIFNVQLPDKEERTKFFEDLILKQAAKPPISKKKAVLQALEVLPVAPPPEPRSLTAEEVKRLEEQEEDTFRELRIFLRNVTHRLAIDKRFRVFTKPVDPDEVPDYVTVIKQPMDLSSVISKIDLHKYLTVKDYLRDIDLICSNALEYNPDRDPGDRLIRHRACALRDTAYAIIKEELDEDFEQLCEEIQESRKKRGCSSSKYAPSYYHVMPKQNSTLVGDKRSDPEQNEKLKTPSTPVACSTPAQLKRKIRKKSNWYLGTIKKRRKISQAKDDSQNAIDHKIESDTEETQDTSVDHNETGNTGESSVEENEKQQNASESKLELRNNSNTCNIENELEDSRKTTACTELRDKIACNGDASSSQIIHISDENEGKEMCVLRMTRARRSQVEQQQLITVEKALAILSQPTPSLVVDHERLKNLLKTVVKKSQNYNIFQLENLYAVISQCIYRHRKDHDKTSLIQKMEQEVENFSCSR

SEQ ID NO: 18122 - protein, 186 aa, Homo sapiens
MGKEIQLKPKANVSSYVHFLLNYRNKFKEQQPNTYVGFKEFSRKCSEKWRSISKHEKAKYEALAKLDKARYQEEMMNYVGKRKKRRKRDPQEPRRPPSSFLLFCQDHYAQLKRENPNWSVVQVAKATGKMWSTATDLEKHPYEQRVALLRAKYFEELELYRKQCNARKKYRMSARNRCRGKRVRQS

SEQ ID NO: 18123 - protein, 148 aa, Homo sapiens
MVMEKPSPLLVGREFVRQYYTLLNQAPDMLHSLHIGYHMIIRFYGKNSSYVHGGLDSNGKPADAVYGQKEIHRKVMSQNFTNCHTKIRHVDAHATLNDGVVVQVMGLLSNNNQALRRFMQTFVLAPEGSVANKFYVHNDIFRYQDEVF

SEQ ID NO: 18124 - protein, 237 aa, Homo sapiens
QERRPRGRRRGQTPFYIRIPKYGFNEGHSFRRQYKPLSLNRLQYLIDLGRVDPSQPIDLTQLVNGRGVTIQPLKRDYGVQLVEEGADTFTAKVNIEVQLASELAIAAIEKNGGVVTTAFYDPRSLDIVCKPVPFFLRGQPIPKRMLPPEELVPYYTDAKNRGYLADPAKFPEARLELARKYGYILPDITKDELFKMLCTRKDPRQIFFGLAPGWVVNMADKKILKPTDENLLKYYTS

SEQ ID NO: 18125 - protein, 432 aa, Homo sapiens
MPHSPLISIPHVWCHPEEEERMHDELLQAVSKGPVMFRDVSIDFSQEEWECLDADQMNLYKEVMLENFSNLVSVGLSNSKPAVISLLEQGKEPWMVDRELTRGLCSDLESMCETKILSLKKRHFSQVIITREDMSTFIQPTFLIPPQKTMSEEKPWECKICGKTFNQNSQFIQHQRIHFGEKHYESKEYGKSFSRGSLVTRHQRIHTGKKPYECKECGKAFSCSSYFSQHQRIHTGEKPYECKECGKAFKYCSNLNDHQRIHTGEKPYECKVCGKAFTKSSQLFLHLRIHTGEKPYECKECGKAFTQHSRLIQHQRMHTGEKPYECKQCGKAFNSASTLTNHHRIHAGEKLYECEECRKAFIQSSELIQHQRIHTDEKPYECNECGKAFNKGSNLTRHQRIHTGEKPYDCKECGKAFGSRSDLIRHEGIHTG

SEQ ID NO: 18126 - protein, 194 aa, Homo sapiens
SRAEVRTHYDPPRKLMAMQRPGPYDRPGAGRGYNSIGRGAGFERMRRGAYGGGYGGYDDYNGYNDGYGFGSDRFGRDLNYCFSGMSDHRYGDGGSTFQSTTGHCVHMRGLPYRATENDIYNFFSPLNPVRVHIEIGPDGRVTGEADVEFATHEDAVAAMSKDKANMQHRYVELFLNSTAGASGGAYGSQMMGGM

SEQ ID NO: 18127 - protein, 927 aa, Homo sapiens
MQRAREAEMMKSQVLFPFLLSLFCGAISQQIRYTIPEELANGSRVGKLAKDLGLSVRELPTRKLRVSAEDYFNVSLESGDLLVNGRIDREKICGRKLECALEFETVAENPMNVFHVVVVIQDINDNAPRFVAKGIDLEICESALPGVKFSLDSAQDADVEGNSLKLYTINPNQYFSLSTKESPDGSKYPVLLLEKPLDREHQSSHRLILTAMDGGDPPLSGTTHIWIRVTDANDNAPVFSQEVYRVSLQENVPWGTSVLRVMATDQDEGINAEITYAFLNSPISTSLFNLNPNTGDITTNGTLDFEETSRYVLSVEAKDGGVHTAHCNVQIEIVDENDNAPEVTFMSFSNQIPEDSDLGTVIALIKVRDKDSGQNGMVTCYTQEEVPFKLESTSKNYYKLVIAGALNREQTADYNVTIIATDKGKPALSSRTSITLHISDINDNAPVFHQASYVVHVSENNPPGASIAQVSASDPDLGPNGRVSYSILASDLEPRELLSYVSVSPQSGVVFAQRAFDHEQLRAFELTLQARDQGSPALSANVSLRVLVGDLNDNAPRVLYPALGPDGSALFDMVPRAAEPGYLVTKVVAVDADSGHNAWLSYHVLQASEPGLFSLGLRTGEVRTARALGDRDAARQRLLVAVRDGGQPPLSATATLHLIFADSLQEVLPDLSDRPEPSDPQTELQFYLVVALALISVLFLLAVILAIALRLRRSSSLDTEGCFQTGLCSKSGPGVPPNHSEGTLPYSYNLCIASHSAKTEFNSLNLTPEMAPPQDLLCDDPSMVVCASNEDHKIAYDPSLSSHQAPPNTDWRFSQAQRPGTSGSQNGDDTGTWPNNQFDTEMLQAMILASASEAADGSSTLGGGAGTMGLSARYGPQFTLQHVPDYRQNVYIPGSNATLTNAAGKRDGKAPAGGNGNKKKSGKKEKK

SEQ ID NO: 18128 - protein, 517 aa, Homo sapiens
MDFRTACEETKTGICLLQDGNQEPFKVRLHLAKDILMIQEQDVICVSGEPFYSGERTVTIRRQTVGGFGLSIKGGAEHNIPVVVSKISKEQRAELSGLLFIGDAILQINGINVRKCRHEEVVQVLRNAGEEVTLTVSFLKRAPAFLKLPLNEDCACAPSDQSSGTSSPLCDSGLHLNYHPNNTDTLSCSSWPTSPGLRWEKRWCDLRLIPLLHSRFSQYVPGTDLSRQNAFQVIAVDGVCTGIIQCLSAEDCVDWLQAIATNISNLTKHNIKKINRNFPVNQQIVYMGWCEAREQDPLQDRVYSPTFLALRGSCLYKFLAPPVTTWDWTRAEKTFSVYEIMCKILKDSDLLDRRKQCFTVQSESGEDLYFSVELESDLAQWERAFQTATFLEVERIQCKTYACVLESHLMGLTIDFSTGFICFDAATKAVLWRYKFSQLKGSSDDGKSKIKFLFQNPDTKQIEAKELEFSNLFAVLHCIHSFFAAKVACLDPLFLGNQATASTAASSATTSKAKYTT

SEQ ID NO: 18129 - protein, 432 aa, Homo sapiens
MAAQPPRPVGERSMGSSREAARAPARSPAWASTQASTPGAALAVQRESPESGLQKHYSNLCMEKSQKINPFILHILQEVDEEIKKGLAAGITLNIAGNNRLVPVERVTGEDFWILSKILKNCLYINGLDVGYNLLCDVGAYYAAKLLQKQLNLIYLNLMFNDIGPEGGELIAKVLHKNRTLKYLRMTGNKIENKGGMFFAAMLQINSSLEKLDLGDCDLEESTVHVGRMLKENHCLVALHMCKHDIKNSGIQQLCDALYLNSSLRYLDVSCNKITHDGMVYLADVLKSNTTLEVIDLSFNRIENAGANYLSETLTSHNRSLKALSVVSNNIEGEGLVALSQSMKTNLTFSHIYIWGNKFDEATCIAYSDLIQMGCLKPDNTDVEPFVVDGRVYLAEVSNGLKKHYYWTSTYGESYDHSSNAGFALVPVGQQP

SEQ ID NO: 18130 - protein, 1830 aa, Homo sapiens
MAPWRKADKERHGVAIYNFQGSGAPQLSLQIGDVVRIQETCGDWYRGYLIKHKMLQGIFPKSFIHIKEVTVEKRRNTENIIPAEIPLAQEVTTTLWEWGSIWKQLYVASKKERFLQVQSMMYDLMEWRSQLLSGTLPKDELKELKQKVTSKIDYGNKILELDLIVRDEDGNILDPDNTSVISLFHAHEEATDKITERIKEEMSKDQPDYAMYSRISSSPTHSLYVFVRNFVCRIGEDAELFMSLYDPNKQTVISENYLVRWGSRGFPKEIEMLNNLKVVFTDLGNKDLNRDKIYLICQIVRVGKMDLKDTGAKKCTQGLRRPFGVAVMDITDIIKGKAESDEEKQHFIPFHPVTAENDFLHSLLGKVIASKGDSGGQGLWVTMKMLVGDIIQIRKDYPHLVDRTTVVARKLGFPEIIMPGDVRNDIYITLLQGDFDKYNKTTQRNVEVIMCVCAEDGKTLPNAICVGAGDKPMNEYRSVVYYQVKQPRWMETVKVAVPIEDMQRIHLRFMFRHRSSLESKDKGEKNFAMSYVKLMKEDGTTLHDGFHDLVVLKGDSKKMEDASAYLTLPSYRHHVENKGATLSRSSSSVGGLSVSSRDVFSISTLVCSTKLTQNVGLLGLLKWRMKPQLLQENLEKLKIVDGEEVVKFLQDTLDALFNIMMEHSQSDEYDILVFDALIYIIGLIADRKFQHFNTVLEAYIQQHFSATLAYKKLMTVLKTYLDTSSRGEQCEPILRTLKALEYVFKFIVRSRTLFSQLYEGKEQMEFEESMRRLFESINNLMKSQYKTTILLQVAALKYIPSVLHDVEMVFDAKLLSQLLYEFYTCIPPVKLQKQKVQSMNEIVQSNLFKKQECRDILLPVITKELKELLEQKDDMQHQVLERKYCVELLNSILEVLSYQDAAFTYHHIQEIMVQLLRTVNRTVITMGRDHILISHFVACMTAILNQMGDQHYSFYIETFQTSSELVDFLMETFIMFKDLIGKNVYPGDWMAMSMVQNRVFLRAINKFAETMNQKFLEHTNFEFQLWNNYFHLAVAFITQDSLQLEQFSHAKYNKILNKYGDMRRLIGFSIRDMWYKLGQNKICFIPGMVGPILEMTLIPEAELRKATIPIFFDMMLCEYQRSGDFKKFENEIILKLDHEVEGGRGDEQYMQLLESILMECAAEHPTIAKSVENFVNLVKGLLEKLLDYRGVMTDESKDNRMSCTVNLLNFYKDNNREEMYIRYLYKLRDLHLDCDNYTEAAYTLLLHTWLLKWSDEQCASQVMQTGQQHPQTHRQLKETLYETIIGYFDKGKMWEEAISLCKELAEQYEMEIFDYELLSQNLIQQAKFYESIMKILRPKPDYFAVGYYGQGFPSFLRNKVFIYRGKEYERREDFQMQLMTQFPNAEKMNTTSAPGDDVKNAPGQYIQCFTVQPVLDEHPRFKNKPVPDQIINFYKSNYVQRFHYSRPVRRGTVDPENEFASMWIERTSFVTAYKLPGILRWFEVVHMSQTTISPLENAIETMSTANEKILMMINQYQSDETLPINPLSMLLNGIVDPAVMGGFAKYEKAFFTEEYVRDHPEDQDKLTHLKDLIAWQIPFLGAGIKIHEKRVSDNLRPFHDRMEECFKNLKMKVEKEYGVREMPDFDDRRVGRPRSMLRSYRQMSIISLASMNSDCSTPSKPTSESFDLELASPKTPRVEQEEPISPGSTLPEVKLRRSKKRTKRSSVVFADEKAAAESDLKRLSRKHEFMSDTNLSEHAAIPLKASVLSQMSFASQSMPTIPALALSVAGIPGLDEANTSPRLSQTFLQLSDGDKKTLTRKKVNQFFKTMLASKSAEEGKQIPDSLSTDL

SEQ ID NO: 18131 - protein, 295 aa, Homo sapiens
MDLEKNYPTPRTSRTGHGGVNQLGGVFVNGRPLPDVVRQRIVELAHQGVRPCDISRQLRVSHGCVSKILGRYYETGSIKPGVIGGSKPKVATPKVVEKIAEYKRQNPTMFAWEIRDRLLAERVCDNDTVPSVSSINRIIRTKVQQPPNQPVPASSHSIVSTGSVTQVSSVSTDSAGSSYSISGILGITSPSADTNKRKRDEGIQESPVPNGHSLPGRDFLRKQMRGDLFTQQQLEVLDRVFERQHYSDIFTTTEPIKPEQAPPTIIALPPEEPPHLQPPLPMTVTDPWSQAGTKH

SEQ ID NO: 18132 - protein, 200 aa, Homo sapiens
MCQKEEFPCSRNGVCYPRSDRCNYQNHCPNGSDEKNCFFCQPGNFHCKNNRCVFESWVCDSQDDCGDGSDEENCPVIVPTRVITAAVIGSLICGLLLVIALGCTCKLYSLRMFERRSFETQLSRVEAELLRREAPPSYGQLIAQGLIPPVEDFPVCSPNQASVLENLRLAVRSQLGFTSVRLPMAGRSSNIWNRIFNFAR

SEQ ID NO: 18133 - protein, 713 aa, Homo sapiens
TDEQTDFGLGDAHQSDGLNLEREIVSQTTATQEKSQEELPTTNNSVSKEIWLDFEDFCVCFQNIYIFHKPSSYCLNFQKSEFKFSEERVSYYLFVDSLKPIELLVCFSALVRWGEYGALTKDSPPIEPGLLTAETFSWKSLKPGSLVLKIHTYATKATVVRLPVGRHMLLFNAYSPVGHSIHICSMVSFVIGDEHVVLPNFEPESCRFTEQSLLIMKAIGNVIANFKDKGKLSAALKDLQTAHYPVPFHDKELTAQHFRVFHLSLWRLMKKVQITKPPPNFKFAFRAMVLDLELLNSSLEEVSLVEWLDVKYCMPTSDKEYSAEEVAAAIKIQAMWRGTYVRLLMKARIPDTKENISVADTLQKVWAVLEMNLEQYAVSLLRLMFKSKCKSLESYPCYQDEETKIAFADYTVTYQEQPPNSWFIVFRETFLVHQDMILVPKVYTTLPICILHIVNNDTMEQVPKVFQKVVPYLYTKNKKGYTFVAEAFTGDTYVAASRWKLRLIGSSAPLPCLSRDSPCNSFAIKEIRDYYIPNDKKILFRYSVKVLTPQPATIQVRTSKPDAFIKLQVLENEETMVSSTGKGQAIIPAFHFLKSEKGLSSQSYGERHEELINLGSPDSHTISEGQKSSVTSKTTRKGKEKSSEKEKTAKEKQAPRFEPQISTVHPQQEDPNKPYWILRLLRLVCITLAGSLRKHLMLRVRLYLKAKLNQKKK

SEQ ID NO: 18134 - protein, 544 aa, Homo sapiens
MPTQQPAAPSTRAPKPSRSLSGSLCALFSDADSGSGMKAELPPGPGAVGREMTKEEKLQLRKEKKQQKKKRKEEKGAEPETGSAVSAAQCQVGPTRELPESGIQLGTPREKVPAGRSKAELRAERRAKQEAERALKQARKGEQGGPPPKASPSTAGETPSGVKRLPEYPQVDDLLLRRLVKKPERQQVPTRKDYGSKVSLFSHLPQYSRQNSLTQFMSIPSSVIHPAMVRLGLQYSQGLVSGSNARCIALLRALQQVIQDYTTPPNEELSRDLVNKLKPYMSFLTQCRPLSASMHNAIKFLNKEITSVGSSKREEEAKSELRAAIDRYVQEKIVLAAQAISRFAYQKISNGDVILVYGCSSLVSRILQEAWTEGRRFRVVVVDSRPWLEGRHTLRSLVHAGVPASYLLIPAASYVLPEVSKVLLGAHALLANGSVMSRVGTAQLALVARAHNVPVLVCCETYKFCERVQTDAFVSNELDDPDDLQCKRGEHVALANWQNHASLRLLNLVYDVTPPELVDLVITELGMIPCSSVPVVLRVKSSDQ

SEQ ID NO: 18135 - protein, 961 aa, Homo sapiens
MFLTYMETVTKELVSWMRGHESSVFSISVHASGKYAITTSSDTAQLWDLDTFQRKRKLNIRQSVGIQKVFFLPLSNTILSCFKDNSIFAWECDTLFCKYQLPAPPESSSILYKVFAVTRDGRILAAGGKSNHLHLWCLEARQLFRIIQMPTKVRAIRHLEFLPDSFDAGSNQVLGVLSQDGIMRFINMQTCKLLFEIGSLDEGISSSAISPHGRYIASIMENGSLNIYSVQALTQEINKPPPPLVKVIEDLPKNKLSSSDLKMKVTSGRVQQPAKSRESKMQTRILKQDLTGDFESKKNELPDGLNKKRLQILLKGYGEYPTKYRMFIWRSLLQLPENHTAFSTLIDKGTHVAFLNLQKKYPIKSRKLLRVLQRTLSALAHWSVIFSDTPYLPLLAFPFVKLFQNNQLICFEVIATLIINWCQHWFEYFPNPPINILSMIENVLAFHDKELLQHFIDHDITSQLYAWPLLETVFSEVLTREEWLKLFDNIFSNHPSFLLMTVVAYNICSRTPLLSCNLKDDFEFFFHHRNNLDINVVIRQVYHLMETTPTDIHPDSMLNVFVALTKGQYPVFNQYPKFIVDYQTQERERIRNDELDYLRERQTVEDMQAKVDQQRVEDEAWYQKQELLRKAEETRREMLLQEEEKMIQQRQRLAAVKRELKVKEMHLQDAARRRFLKLQQDQQEMELRRLDDEIGRKVYMRDREIAATARDLEMRQLELESQKRLYEKNLTENQEALAKEMRADADAYRRKVDLEEHMFHKLIEAGETQSQKTQKVIKENLAKAEQACLNTDWQIQSLHKQKCDDLQRNKCYQEVAKLLRENRRKEIEIINAMVEEEAKKWKEAEGKEFRLRSAKKASALSDASRKWFLKQEINAAVEHAENPCHKEEPRFQNEQDSSCLPRTSQLNDSSEMDPSTQISLNRRAVEWDTTGQNLIKKVRNLRQRLTARARHRCQTPHLLAA

SEQ ID NO: 18136 - protein, 609 aa, Homo sapiens
DYEVDDGIGVVPPVGYRSSARESKSTTLTVPEQQRTTHHRSRSVSPHRGNDQGKPRSRLPNVPLQRSLDEIHPTRRSRSPTRHHDASRSPVDHRTRDVDSQYLSEQDSELLMLPRAKRGRSAECLHTTRHSRKSERSSIQKQTRKGTASDAERMHRQRSPTQSPPADTSFSSRRGRQLPQVPVRSGSIEQEQEKYNSSTKASLVVEERTRQMKMKVHRFKQTTGSGSSQELDREQYSKYNIHKDQYRSCDNVSAKSSDSDVSDVSAISRTSSASRLSSTSFMSEQSERPRGRISSFTPKMQGRRMGTSGRSIMKSTSVSGEMYTLEHNDGSQSDTAVGTVGAGGKKRRSSLSAKVVAIVSRRSRSTSQLSQTESGHKKLKSTIQRSTETGMAAEMRKMVRQPSRESTDGSINSYSSEGNLIFPGVRLGADSQFSDFLDGLGPAQLVGRQTLATPAMGDIQIGMEDKKGQLEVEVIRARSLTQKPGSKSTPAPYVKVYLLENGACIAKKKTRIARKTLDPLYQQSLVFDESPQGKVLQVIVWGDYGRMDHKCFMGVAQILLEELDLSSMVIGWYKLFPPSSLVDPTLTPLTRRASQSSLESSTGPPCIRS

SEQ ID NO: 18137 - protein, 888 aa, Homo sapiens
KKAITCGEKEKQDLIKSLAMLKDGFRTDRGSHSDLWSSSSSLESSSFPLPKQYLDVSSQTDISGSFGINSNNQLAEKVRLRLRYEEAKRRIANLKIQLAKLDSEAWPGVLDSERDRLILINEKEELLKEMRFISPRKWTQGEVEQLEMARKRLEKDLQAARDTQSKALTERLKLNSKRNQLVRELEEATRQVATLHSQLKSLSSSMQSLSSGSSPGSLTSSRGSLVASSLDSSTSASFTDLYYDPFEQLDSELQSKVEFLLLEGATGFRPSGCITTIHEDEVAKTQKAEGGGRLQALRSLSGTPKSMTSLSPRSSLSSPSPPCSPLMADPLLAGDAFLNSLEFEDPELSATLCELSLGNSAQERYRLEEPGTEGKQLGQAVNTAQGCGLKVACVSAAVSDESVAGDSGVYEASVQRLGASEAAAFDSDESEAVGATRIQIALKYDEKNKQFAILIIQLSNLSALLQQQDQKVNIRVAVLPCSESTTCLFRTRPLDASDTLVFNEVFWVSMSYPALHQKTLRVDVCTTDRSHLEECLGGAQISLAEVCRSGERSTRWYNLLSYKYLKKQSRELKPVGVMAPASGPASTDAVSALLEQTAVELEKRQEGRSSTQTLEDSWRYEETSENEAVAEEEEEEVEEEEGEEDVFTEKASPDMDGYPALKVDKETNTETPAPSPTVVRPKDRRVGTPSQGPFLRGSTIIRSKTFSPGPQSQYVCRLNRSDSDSSTLSKKPPFVRNSLERRSVRMKRPSSVKSLRSERLIRTSLDLELDLQATRTWHSQLTQEISVLKELKEQLEQAKSHGEKELPQWLREDERFRLLLRMLEKRMDRAEHKGELQTDKMMRAAAKDVHRLRGQSCKEPPEVQSFREKMAFFTRPRMNIPALSADDV

SEQ ID NO: 18138 - protein, 228 aa, Homo sapiens
MFYAHFVLSKRGPLAKIWLAAHWDKKLTKAHVFECNLESSVESIISPKVKMALRTSGHLLLGVVRIYHRKAKYLLADCNEAFIKIKMAFRPGVVDLPEENREAAYNAITLPEEFHDFDQPLPDLDDIDVAQQFSLNQSRVEEITMREEVGNISILQENDFGDFGMDDREIMREGSAFEDDDMLVSTTTSNLLLESEQSTSNLNEKINHLEYEDQYKDDNFGEGNDGGI

SEQ ID NO: 18139 - protein, 297 aa, Homo sapiens
MEGKHKEELDTLKEEKENLQGLVTRQTYIIQELEKQLNRATTNNSVLQKQQLELMDTVHNLVNLCTKEVLLKGGKREEEKPFRDCADVYQAGFNKSGIYTIYINNMPEPKKVFCNMDVNGGGWTVIQHREDGSLDFQRGWKEYKMGFGNPSGEYWLGNEFIFAITSQRQYMLRIELMDWEGNRAYSQYDRFHIGNEKQNYRLYLKGHTGTAGKQSSLILHGADFSTKDADNDNCMCKCALMLTGGWWFDACGPSNLNGMFYTAGQNHGKLNGIKWHYFKGPSYSLRSTTMMIRPLDF

SEQ ID NO: 18140 - protein, 672 aa, Homo sapiens
MWRVLFLLSGLGGLRMDSNFDSLPVQITVPEKIRSIIKEGIESQASYKIVIEGKPYTVNLMQKNFLPHNFRVYSYSGTGIMKPLDQDFQNFCHYQGYIEGYPKSVVMVSTCTGLRGVLQFENVSYGIEPLESSVGFEHVIYQVKHKKADVSLYNEKDIESRDLSFKLQSVEPQQDFAKYIEMHVIVEKQLYNHMGSDTTVVAQKVFQLIGLTNAIFVSFNITIILSSLELWIDENKIATTGEANELLHTFLRWKTSYLVLRPHDVAFLLVYREKSNYVGATFQGKMCDANYAGGVVLHPRTISLESLAVILAQLLSLSMGITYDDINKCQCSGAVCIMNPEAIHFSGVKIFSNCSFEDFAHFISKQKSQCLHNQPRLDPFFKQQAVCGNAKLEAGEECDCGTEQDCALIGETCCDIATCRFKAGSNCAEGPCCENCLFMSKERMCRPSFEECDLPEYCNGSSASCPENHYVQTGHPCGLNQWICIDGVCMSGDKQCTDTFGKEVEFGPSECYSHLNSKTDVSGNCGISDSGYTQCEVCRNQRCVSSSYLGYDCTTDKCNDRGVCNNKKHCHCSASYLPPDCSVQSDLWPGGSIDSGNFPPVAIPARLPERRYIENIYHSKPMRWPFFLFIPFFIIFCVLIAIMVKVNFQRKKWRTEDYSSDEQPESESEPKG

SEQ ID NO: 18141 - protein, 130 aa, Homo sapiens
EDSDGRQDSPAGELPKTVQQPTESEPVTINIQDLLSCSNFAVQHRYLFEEDNLLRSTQKLSHSTKPSGSPLEEKHDQCKCENLIMFQNLANEEVRKLTQRYILFLHYASVWNAKNIIKTSHTLCRFYQLK

SEQ ID NO: 18142 - protein, 289 aa, Homo sapiens
MMRRTLENRNAQTKQLQTAVSNVEKHFGELCQIFAAYVRKTARLRDKADLLVNEINAYAATETPHLKLGLMNFADEFAKLQDYRQAEVERLEAKVVEPLKTYGTIVKMKRDDLKATLTARNREAKQLTQLERTRQRNPSDRHVISQAETELQRAAMDASRTSRHLEETINNFERQKMKDIKTIFSEFITIEMLFHGKALEVYTAAYQNIQNIDEDEDLEVFRNSLYAPDYSSRLDIVRANSKSPLQRSLSAKCVSGTGQVSTCRLRKDQQAEDDEDDELDVTEEENFLK

SEQ ID NO: 18143 - protein, 216 aa, Homo sapiens
MSREMQDVDLAEVKPLVEKGETITGLLQEFDVQEQDIETLHGSVHVTLCGTPKGNRPVILTYHDIGMNHKTCYNPLFNYEDMQEITQHFAVCHVDAPGQQDGAASFPAGYMYPSMDQLAEMLPGVLQQFGLKSIIGMGTGAGAYILTRFALNNPEMVEGLVLINVNPCAEGWMDWAASKPFDYQALVLDTVMCAVTSCSPSLDLVALKFLALPVPD

SEQ ID NO: 18144 - protein, 1083 aa, Homo sapiens
MNAPDEDETINVNYNIMASYTQTKDWFALAKQSQQTVSTFSLPCCVPYNKLKSPAISSVSENFIFDDGVHPRTKKDPSKTNKLISEFEEEEGEEEEVSVSLQDTPSQALLRVYLEKKQDVDESLTMHFSTCEEFLSSYIYFILRGAIQQIVGKPVGETPDYINFNNITKVSFDDCFESIHGKNFLSELVQTTKERSEEIEQTSLSSKNESAGPESRADWCISHRTYDIGNRKEFERFKKFIKGTLGERYWWLWMDIERLKVLKDPGRHQRHLEKMKKCYLVSNGDYYLSAEILSKFKLLDGSQWNEEHLRNIQSEVLKPLLLYWAPRFCVTHSASTKYASAELKFWHLRQAKPRKDIDPFPQMATLLPLRPKSCIPQIPEIQKEEFSLSQPPKSPNKSPEVKTATQKPWKRELLYPGSSKDDVIEKGSKYMSESSKVIHLTSFTDISECLKPQLDRRYAYTEEPRVKTVSDVGALGGSDMENLLQSLYVENRAGFFFTKFCEHSGNKLWKNSVYFWFDLQAYHQLFYQETLQPFKVCKQAQYLFATYVAPSATLDIGLQQEKKKEIYMKIQPPFEDLFDTAEEYILLLLLEPWTKMVKSDQIAYKKVELVEETRQLDSTYFRKLQALHKETFSKKAEDTTCEIGTGILSLSNVSKRTEYWDNVPAEYKHFKFSDLLNNKLEFEHFRQFLETHSSSMDLMCWTDIEQFRRITYRDRNQRKAKSIYIKNKYLNKKYFFGPNSPASLYQQNQVMHLSGGWGKILHEQLDAPVLVEIQKHVQNRLENVWLPLFLASEQFAARQKIKVQMKDIAEELLLQKAEKKIGVWKPVESKWISSSCKIIAFRKALLNPVTSRQFQRFVALKGDLLENGLLFWQEVQKYKDLCHSHCDESVIQKKITTIINCFINSSIPPALQIDIPVEQAQKIIEHRKELGPYVFREAQMTIFGVLFKFWPQFCEFRKNLTDENIMSVLERRQEYNKQKKKLAVLEDEKSGKDGIKQYANTSVPAIKTALLSDSFLGLQPYGRQPTWCYSKYIEALEQERILLKIQEELEKKLFAGLQPLTNFKASSSTMSLKKNMSAHSSQK

SEQ ID NO: 18145 - protein, 949 aa, Homo sapiens
KREHAKQHGMIRTEITGAEIAEEMEKERRLFQLQMCEYLIKVNEIKTKKGVDLLQNLIKYYHAQCNFFQDGLKTADKLKQYIEKLAADLYNIKQTQDEEKKQLTALRDLIKSSLQLDQKESRRDSQSRQGGYSMHQLQGNKEYGSEKKGYLLKKSDGIRKVWQRRKCSVKNGILTISHATSNRQPAKLNLLTCQVKPNAEDKKSFDLISHNRTYHFQAEDEQDYVAWISVLTNSKEEALTMAFRGEQSAGENSLEDLTKAIIEDVQRLPGNDICCDCGSSEPTWLSTNLGILTCIECSGIHREMGVHISRIQSLELDKLGTSELLLAKNVGNNSFNDIMEANLPSPSPKPTPSSDMTVRKEYITAKYVDHRFSRKTCSTSSAKLNELLEAIKSRDLLALIQVYAEGVELMEPLLEPGQELGETALHLAVRTADQTSLHLVDFLVQNCGNLDKQTALGNTVLHYCSMYSKPECLKLLLRSKPTVDIVNQAGETALDIAKRLKATQCEDLLSQAKSGKFNPHVHVEYEWNLRQEEIDESDDDLDDKPSPIKKERSPRPQSFCHSSSISPQDKLALPGFSTPRDKQRLSYGAFTNQIFVSTSTDSPTSPTTEAPPLPPRNAGKGPTGPPSTLPLSTQTSSGSSTLSKKRPPPPPPGHKRTLSDPPSPLPHGPPNKGAVPWGNDGGPSSSSKTTNKFEGLSQQSSTSSAKTALGPRVLPKLPQKVALRKTDHLSLDKATIPPEIFQKSSQLAELPQKPPPGDLPPKPTELAPKPQIGDLPPKPGELPPKPQLGDLPPKPQLSDLPPKPQMKDLPPKPQLGDLLAKSQTGDVSPKAQQPSEVTLKSHPLDLSPNVQSRDAIQKQASEDSNDLTPTLPETPVPLPRKINTGKNKVRRVKTIYDCQADNDDELTFIEGEVIIVTGEEDQEWWIGHIEGQPERKGVFPVSFVHILSD

SEQ ID NO: 18146 - protein, 604 aa, Homo sapiens
MNPSAPSYPMASLYVGDLHPDVTEAMLYEKFSPAGPILSIRVCRDMITRRSLGYAYVNFQQPADAERALDTMNFDVIKGKPVRIMWSQRDPSLRKSGVVCDENGSKGYGFVHFETQEAAERAIEKMNGMLLNDRKVFVGRFKSRKEREAELGARAKEFTNVYIKNFGEDMDDERLKDLFGKFGPALSVKVMTDESGKSKGFGFVSFERHEDAQKAVDEMNGKELNGKQIYVGRAQKKVERQTELKRKFEQMKQDRITRYQGVNLYVKNLDDGIDDERLRKEFSPFGTITSAKVMMEGGRSKGFGFVCFSSPEEATKAVTEMNGRIVATKPLYVALAQRKEERQAHLTNQYMQRMASVRAVPNPVINPYQPAPPSGYFMAAIPQTQNRAAYYPPSQIAQLRPSPRWTAQGARPHPFQNMPGAIRPAAPRPPFSTMRPASSQVPRVMSTQRVANTSTQTMGPRPAAAAAAATPAVRTVPQYKYAAGVRNPQQHLNAQPQVTMQQPAVHVQGQEPLTASMLASAPPQEQKQMLGERLFPLIQAMHPTLAGKITGMLLEIDNSELLHMLESPESLRSKVDEAVAVLQAHQAKEAAQKAVNSATGVPTV

SEQ ID NO: 18147 - protein, 361 aa, Homo sapiens
MALSAQQIPRWFNSVKLRSLINAAQLTKRFTRPARTLLHGFSAQPQISSDNCFLQWGFKTYRTSSLWNSSQSTSSSSQENNSAQSSLLPSMNEQSQKTQNISSFDSELFLEELDELPPLSPMQPISEEEAIQIIADPPLPPASFTLRDYVDHSETLQKLVLLGVDLSKIEKHPEAANLLLRLDFEKDIKQMLLFLKDVGIEDNQLGAFLTKNHAIFSEDLENLKTRVAYLHSKNFSKADVAQMVRKAPFLLNFSVERLDNRLGFFQKELELSVKKTRDLVVRLPRLLTGSLEPVKENMKVYRLELGFKHNEIQHMITRIPKMLTANKMKLTETFDFVHNVMSIPHHIIVKFPQFLHRKYRI

SEQ ID NO: 18148 - protein, 473 aa, Homo sapiens
MDAMKRGLCCVLLLCGAVFVSPSQEIHARFRRGARSYQVICRDEKTQMIYQQHQSWLRPVLRSNRVEYCWCNSGRAQCHSVPVKSCSEPRCFNGGTCQQALYFSDFVCQCPEGFAGKCCEIGNSDCYFGNGSAYRGTHSLTESGASCLPWNSMILIGKVYTAQNPSAQALGLGKHNYCRNPDGDAKPWCHVLKNRRLTWEYCDVPSCSTCGLRQYSQPQFRIKGGLFADIASHPWQAAIFAKHRRSPGERFLCGGILISSCWILSAAHCFQERFPPHHLTVILGRTYRVVPGEEEQKFEVEKYIVHKEFDDDTYDNDIALLQLKSDSSRCAQESSVVRTVCLPPADLQLPDWTECELSGYGKHEALSPFYSERLKEAHVRLYPSSRCTSQHLLNRTVTDNMLCAGDTRSGGPQANLHDACQGDSGGPLVCLNDGRMTLVGIISWGLGCGQKDVPGVYTKVTNYLDWIRDNMRP

SEQ ID NO: 18149 - protein, 445 aa, Homo sapiens
MNKGISSIPINLRVYSPHVLNLTLIDLPGITKVPVGDQPPDIEYQIREMIMQFITRENCLILAVTPANTDLANSDALKLAKEVDPQGLRTIGVITKLDLMDEGTDARDVLENKLLPLRRGYVGVVNRSQKDIDGKKDIKAAMLAERKFFLSHPAYRHIADRMGTPHLQKVLNQQLTNHIRDTLPNFRNKLQGQLLSIEHEVEAYKNFKPEDPTRKTKALLQMVQQFAVDFEKRIEGSGDQVDTLELSGGAKINRIFHERFPFEIVKMEFNEKELRREISYAIKNIHGIRTGLFTPDMAFEAIVKKQIVKLKGPSLKSVDLVIQELINTVKKCTKKLANFPRLCEETERIVANHIREREGKTKDQVLLLIDIQVSYINTNHEDFIGFANAQQRSSQVHKKTTVGNQVIRKGWLTISNIGIMKGGSKGYWFVLTAESLSWYKDDEEK

SEQ ID NO: 18150 - protein, 242 aa, Homo sapiens
MEEDGSTVLGLLESSAEKAPVSVSCGGESPLDGICLSESDKTAVLTLIREEIITKEIEANEWKKKYEETRQEVLEMRKIVAEYEKTIAQMIDEQRTSMTSQKSFQQLTMEKEQALADLNSVERSLSDLFRRYENLKGVLEGFKKNEEALKKCAQDYLARVKQEEQRYQALKIHAEEKLDKANEEIAQVRTKAKAESAALHAGLRKEQMKVESLERALQQKNQEIEELTKICDELIAKLGKTD

SEQ ID NO: 18151 - protein, 326 aa, Homo sapiens
MDSNLRDINESTPLAYALYCGHTACVKLLSQESRTEPTRPPPSQSSRPQKKERRFNVLNQIFCKNKKEEQRAHQKDPSRDRYREEDTSEVNDIITTFDSIVGTNCQEQPGDQVAMVEFKKKTSDNSKYLLPEKKPLARKGLPPIRTQSLPPITLGNNFLTASHRATSHAGLSSAPHHMAQRSQKSRSEQDLLNNRTGCQMLLDNPWKSDSNQVFSYKVWTVSSSDKLLDRLLSVRPGHQEVSVPPHLRHLHNPSSGQNFQHLSPNRHKIRDLPFTRNNLAPLPDQKFLSGEPLRTNRVLPAIPSQRRHSTAAEESEHSANPTSDEN

SEQ ID NO: 18152 - protein, 629 aa, Homo sapiens
MFRLWLLLAGLCGLLASRPGFQNSLLQIVIPEKIQTNTNDSSEIEYEQISYIIPIDEKLYTVHLKQRYFLADNFMIYLYNQGSMNTYSSDIQTQCYYQGNIEGYPDSMVTLSTCSGLRGILQFENVSYGIEPLESAVEFQHVLYKLKNEDNDIAIFIDRSLKEQPMDDNIFISEKSEPAVPDLFPLYLEMHIVVDKTLYDYWGSDSMIVTNKVIEIVGLANSMFTQFKVTIVLSSLELWSDENKISTVGEADELLQKFLEWKQSYLNLRPHDIAYLLIYMDYPRYLGAVFPGTMCITRYSAGVALQCGPASCCDFRTCVLKDGAKCYKGLCCKDCQILQSGVECRPKAHPECDIAENCNGTSPECGPDITLINGLSCKNNKFICYDGDCHDLDARCESVFGKGSRNAPFACYEEIQSQSDRFGNCGRDRNNKYVFCGWRNLICGRLVCTYPTRKPFHQENGDVIYAFVRDSVCITVDYKLPRTVPDPLAVKNGSQCDIGRVCVNRECVESRIIKASAHVCSQQCSGHGVCDSRNKCHCSPGYKPPNCQIRSKGFSIFPEEDMGSIMERASGKTENTWLLGFLIALPILIVTTAIVLARKQLKKWFAKEEEFPSSESKSQDSTQTQSSSN

SEQ ID NO: 18153 - protein, 84 aa, Homo sapiens
MQKATYYDSSAIYGGYPYQAANGFAYNANQQPYPASAALGADGEYHRPACSLQSPSSAGGHPKAHELSEACLRTLSAPPSQPPS

SEQ ID NO: 18154 - protein, 2774 aa, Homo sapiens
MDVKDRRHRSLTRGRCGKECRYTSSSLDSEDCRVPTQKSYSSSETLKAYDHDSRMHYGNRVTDLIHRESDEFPRQGTNFTLAELGICEPSPHRSGYCSDMGILHQGYSLSTGSDADSDTEGGMSPEHAIRLWGRGIKSRRSSGLSSRENSALTLTDSDNENKSDDENGRPIPPTSSPSLLPSAQLPSSHNPPPVSCQMPLLDSNTSHQIMDTNPDEEFSPNSYLLRACSGPQQASSSGPPNHHSQSTLRPPLPPPHNHTLSHHHSSANSLNRNSLTNRRSQIHAPAPAPNDLATTPESVQLQDSWVLNSNVPLETRHFLFKTSSGSTPLFSSSSPGYPLTSGTVYTPPPRLLPRNTFSRKAFKLKKPSKYCSWKCAALSAIAAALLLAILLAYFIAMHLLGLNWQLQPADGHTFNNGIRTGLPGNDDVATMPSGGKVPWSLKNSSIDSGEAEVGRRVTQEVPPGVFWRSQIHISQPQFLKFNISLGKDALFGVYIRRGLPPSHAQYDFMERLDGKEKWSVVESPRERRSIQTLVQNEAVFVQYLDVGLWHLAFYNDGKDKEMVSFNTVVLDSVQDCPRNCHGNGECVSGVCHCFPGFLGADCAKAACPVLCSGNGQYSKGTCQCYSGWKGAECDVPMNQCIDPSCGGHGSCIDGNCVCSAGYKGEHCEEVDCLDPTCSSHGVCVNGECLCSPGWGGLNCELARVQCPDQCSGHGTYLPDTGLCSCDPNWMGPDCSVEVCSVDCGTHGVCIGGACRCEEGWTGAACDQRVCHPRCIEHGTCKDGKCECREGWNGEHCTIGRQTAGTETDGCPDLCNGNGRCTLGQNSWQCVCQTGWRGPGCNVAMETSCADNKDNEGDGLVDCLDPDCCLQSACQNSLLCRGSRDPLDIIQQGQTDWPAVKSFYDRIKLLAGKDSTHIIPGENPFNSSLVSLIRGQVVTTDGTPLVGVNVSFVKYPKYGYTITRQDGTFDLIANGGASLTLHFERAPFMSQERTVWLPWNSFYAMDTLVMKTEENSIPSCDLSGFVRPDPIIISSPLSTFFSAAPGQNPIVPETQVLHEEIELPGSNVKLRYLSSRTAGYKSLLKITMTQSTVPLNLIRVHLMVAVEGHLFQKSFQASPNLAYTFIWDKTDAYGQRVYGLSDAVVSVGFEYETCPSLILWEKRTALLQGFELDPSNLGGWSLDKHHILNVKSGILHKGTGENQFLTQQPAIITSIMGNGRRRSISCPSCNGLAEGNKLLAPVALAVGIDGSLYVGDFNYIRRIFPSRNVTSILELRNKEFKHSNNPAHKYYLAVDPVSGSLYVSDTNSRRIYRVKSLSGTKDLAGNSEVVAGTGEQCLPFDEARCGDGGKAIDATLMSPRGIAVDKNGLMYFVDATMIRKVDQNGIISTLLGSNDLTAVRPLSCDSSMDVAQVRLEWPTDLAVNPMDNSLYVLENNVILRITENHQVSIIAGRPMHCQVPGIDYSLSKLAIHSALESASAIAISHTGVLYITETDEKKINRLRQVTTNGEICLLAGAASDCDCKNDVNCNCYSGDDAYATDAILNSPSSLAVAPDGTIYIADLGNIRIRAVSKNKPVLNAFNQYEAASPGEQELYVFNADGIHQYTVSLVTGEYLYNFTYSTDNDVTELIDNNGNSLKIRRDSSGMPRHLLMPDNQIITLTVGTNGGLKVVSTQNLELGLMTYDGNTGLLATKSDETGWTTFYDYDHEGRLTNVTRPTGVVTSLHREMEKSITIDIENSNRDDDVTVITNLSSVEASYTVVQDQVRNSYQLCNNGTLRVMYANGMGISFHSEPHVLAGTITPTIGRCNISLPMENGLNSIEWRLRKEQIKGKVTIFGRKLRVHGRNLLSIDYDRNIRTEKIYDDHRKFTLRIIYDQVGRPFLWLPSSGLAAVNVSYFFNGRLAGLQRGAMSERTDIDKQGRIVSRMFADGKVWSYSYLDKSMVLLLQSQRQYIFEYDSSDRLLAVTMPSVARHSMSTHTSIGYIRNIYNPPESNASVIFDYSDDGRILKTSFLGTGRQVFYKYGKLSKLSEIVYDSTAVTFGYDETTGVLKMVNLQSGGFSCTIRYRKIGPLVDKQIYRFSEEGMVNARFDYTYHDNSFRIASIKPVISETPLPVDLYRYDEISGKVEHFGKFGVIYYDINQIITTAVMTLSKHFDTHGRIKEVQYEMFRSLMYWMTVQYDSMGRVIKRELKLGPYANTTKYTYDYDGDGQLQSVAVNDRPTWRYSYDLNGNLHLLNPGNSVRLMPLRYDLRDRITRLGDVQYKIDDDGYLCQRGSDIFEYNSKGLLTRAYNKASGWSVQYRYDGVGRRASYKTNLGHHLQYFYSDLHNPTRITHVYNHSNSEITSLYYDLQGHLFAMESSSGEEYYVASDNTGTPLAVFSINGLMIKQLQYTAYGEIYYDSNPDFQMVIGFHGGLYDPLTKLVHFTQRDYDVLAGRWTSPDYTMWKNVGKEPAPFNLYMFKSNNPLSSELDLKNYVTDVKSWLVMFGFQLSNIIPGFPRAKMYFVPPPYELSESQASENGQLITGVQQTTERHNQAFMALEGQVITKKLHASIREKAGHWFATTTPIIGKGIMFAIKEGRVTTGVSSIASEDSRKVASVLNNAYYLDKMHYSIEGKDTHYFVKIGSADGDLVTLGTTIGRKVLESGVNVTVSQPTLLVNGRTRRFTNIEFQYSTLLLSIRYGLTPDTLDEEKARVLDQARQRALGTAWAKEQQKARDGREGSRLWTEGEKQQLLSTGRVQGYEGYYVLPVEQYPELADSSSNIQFLRQNEMGKR

SEQ ID NO: 18155 - protein, 184 aa, Homo sapiens
LDFFRVVENQPPATMPLNVSFTNRNYDLDYDSVQPYFYCDEEENFYQQQQQSELQPPAPSEDIWKKFELLPTPPLSPSRRSGLCSPSYVAVTPFSLRGDNDGGGGSFSTADQLEMVTELLGGDMVNQSFICDPDDETFIKNIIIQDCMWSGFSAAAKLVSEKLASYQAARKDSGSPNPARGHSV

SEQ ID NO: 18156 - protein, 564 aa, Homo sapiens
MPFTLHLRSRLPSAIRSLILQKKPNIRNTSSMAGELRPASLVVLPRSLAPAFERFCQVNTGPLPLLGQSEPEKWMLPPQGAISETRMGHPQFWKYEFGACTGSLASLEQYSEQLKDMVAFFLGCSFSLEEALEKAGLPRRDPAGHSQTTVPCVTHAGFCCPLVVTMRPIPKDKLEGLVRACCSLGELLGIKELSKPAYGDAMVCPPGEVPVFWPSPLTSLGAVSSCETPLAFASIPGCTVMTDLKDAKAPPGCLTPERIPEVHHISQDPLHYSIASVSASQKIRELESMIGIDPGNRGIGHLLCKDELLKASLSLSHARSVLITTGFPTHFNHEPPEETDGPPGAVALVAFLQALEKEVAIIVDQRAWNLHQKIVEDAVEQGVLKTQIPILTYQGGSVEAAQAFLCKNGDPQTPRFDHLVAIERAGRAADGNYYNARKMNIKHLVDPIDDLFLAAKKIPGISSTGVSNWGGYALACALYILYSCAVHSQYLRKAVGPSRAPGDQAWTQALPSVIKEEKMLGILVQHKVRSGVSGIVGMEVDGLPFHNTHAEMIQKLVDVTTAQV

SEQ ID NO: 18157 - protein, 1052 aa, Homo sapiens
MAAAYLDPNLNHTPNSSTKTHLGTGMERSPGAMERVLKVFHYFESNSEPTTWASIIRHGDATDVRGIIQKIVDSHKVKHVACYGFRLSHLRSEEVHWLHVDMGVSSVREKYELAHPPEEWKYELRIRYLPKGFLNQFTEDKPTLNFFYQQVKSDYMLEIADQVDQEIALKLGCLEIRRSYWEMRGNALEKKSNYEVLEKDVGLKRFFPKSLLDSVKAKTLRKLIQQTFRQFANLNREESILKFFEILSPVYRFDKECFKCALGSSWIISVELAIGPEEGISYLTDKGCNPTHLADFTQVQTIQYSNSEDKDRKGMLQLKIAGAPEPLTVTAPSLTIAENMADLIDGYCRLVNGTSQSFIIRPQKEGERALPSIPKLANSEKQGMRTHAVSVSETDDYAEIIDEEDTYTMPSTRDYEIQRERIELGRCIGEGQFGDVHQGIYMSPENPALAVAIKTCKNCTSDSVREKFLQEALTMRQFDHPHIVKLIGVITENPVWIIMELCTLGELRSFLQVRKYSLDLASLILYAYQLSTALAYLESKRFVHRDIAARNVLVSSNDCVKLGDFGLSRYMEDSTYYKASKGKLPIKWMAPESINFRRFTSASDVWMFGVCMWEILMHGVKPFQGVKNNDVIGRIENGERLPMPPNCPPTLYSLMTKCWAYDPSRRPRFTELKAQLSTILEEEKAQQEERMRMESRRQATVSWDSGGSDEAPPKPSRPGYPSPRSSEGFYPSPQHMVQTNHYQVSGYPGSHGITAMAGSIYPGQASLLDQTDSWNHRPQEIAMWQPNVEDSTVLDLRGIGQVLPTHLMEERLIRQQQEMEEDQRWLEKEERFLKPDVRLSRGSIDREDGSLQGPIGNQHIYQPVGKPDPAAPPKKPPRPGAPGHLGSLASLSSPADSYNEGVKLQPQEISPPPTANLDRSNDKVYENVTGLVKAVIEMSSKIQPAPPEEYVPMVKEVGLALRTLLATVDETIPLLPASTHREIEMAQKLLNSDLGELINKMKLAQQYVMTSLQQEYKKQMLTAAHALAVDAKNLLDVIDQARLKMLGQTRPH

SEQ ID NO: 18158 - protein, 498 aa, Homo sapiens
MEDVTCDRTEFLSNYLTNVDDITLVPGTLGRIRSKFSNNAKYDPKAIIANLTCKKPDQHFKPYLKQHLPKRLHYANNRRIEDIHLLVERRWHVARKPLDVYKKPSGKCFFQGDHGFDNKVNSMQTVFVGYGSTFKYKTKVPPFENIELYNVMCDLLGLKPAPNNGTHGSLNHLLRTNTFRPTMPEEVTRPNYPGIMYLQSDFDLGCTCDDKNKLDELNKRLHTKGSTEERHLLYGRPAVLYRTRYDILYHTDFESGYSEIFLMPLWTSYTVSKQAEVSSVPDHLTSCVRPDVRVSPSFSQNCLAYKNDKQMSYGFLFPPYLSSSPEAKYDAFLVTNMVPMYPAFKRVWNYFQRVLVKKYASERNGVNVISGPIFDYDYDGLHDTEDKIKQYVEGSSIPVPTHYYSIITSCLDFTQPADKCDGPLSVSSFILPHRPDNEESCNSSEDESKWVEELMKMHTARVRDIEHLTSLDFFRKTSRSYPEILTLKTYLHTYESEI

SEQ ID NO: 18159 - protein, 789 aa, Homo sapiens
MNIDVEFHIRHNYPWNKLPANVRQSLGNSQREYEKQVVLYSIRNQLRYRNNLVKHVKKDERRYYEELLKYSRDHLMLYPYHLSDIMVKGLRITPFSYYTGIMEDIMNSEKSYDSLPNFTAADCLRLLGIGRNQYIDLMNQCRSSKKFFRRKTARDLLPIKPVEIAIEAWWVVQAGYITEDDIKICTLPEKCAVDKIIDSGPQLSGSLDYNVVHSLYNKGFIYLDVPISDDSCIAVPPLEGFVMNRVQGDYFETLLYKIFVSIDEHTNVAELANVLEIDLSLVKNAVSMYCRLGFAHKKGQVINLDQLHSSWKNVPSVNRLKSTLDPQKMLLSWDGGESRSPVQEASSATDTDTNSQEDPADTASVSSLSLSTGHTKRIAFLFDSTLTAFLMMGNLSPNLKSHAVTMFEVGKLSDESLDSFLIELEKVQSTGEGEAQRYFDHALTLRNTILFLRHNKDLVAQTAQPDQPNYGFPLDLLRCESLLGLDPATCSRVLNKNYTLLVSMAPLTNEIRPVSSCTPQHIGPAIPEVSSVWFKLYIYHVTGQGPPSLLLSKGTRLRKLPDIFQSYDRLLITSWGHDPGVVPTSNVLTMLNDALTHSAVLIQGHGLHGIGETVHVPFPFDETELQGEFTRVNMGVHKALQILRNRVDLQHLCGYVTMLNASSQLADRKLSDASDERGEPDLASGSDVNGSTESFEMVIEEATIDSATKQTSGATTEADWVPLELCFGIPLFSSELNRKVCRKIAAHGLCRKESLQNLLHSSRKLSLQVLNFVHSFQVTKTKKSKWYLY

SEQ ID NO: 18160 - protein, 620 aa, Homo sapiens
MKVTSGRVQQPAKSRESKMQTRILKQDLTGDFESKKNELPDGLNKKRLQILLKGYGEYPTKYRMFIWRSLLQLPENHTAFSTLIDKGTHVAFLNLQKKYPIKSRKLLRVLQRTLSALAHWSVIFSDTPYLPLLAFPFVKLFQNNQLICFEVIATLIINWCQHWFEYFPNPPINILSMIENVLAFHDKELLQHFIDHDITSQLYAWPLLETVFSEVLTREEWLKLFDNIFSNHPSFLLMTVVAYNICSRTPLLSCNLKDDFETVEDMQAKVDQQRVEDEAWYQKQELLRKAEETRREMLLQEEEKMIQQRQRLAAVKRELKVKEMHLQDAARRRFLKLQQDQQEMELRRLDDEIGRKVYMRDREIAATARDLEMRQLELESQKRLYEKNLTENQEALAKEMRADADAYRRKVDLEEHMFHKLIEAGETQSQKTQKVIKENLAKAEQACLNTDWQIQSLHKQKCDDLQRNKCYQEVAKLLRENRRKEIEIINAMVEEEAKKWKEAEGKEFRLRSAKKASALSDASRKWFLKQEINAAVEHAENPCHKEEPRFQNEQDSSCLPRTSQLNDSSEMDPSTQISLNRRAVEWDTTGQNLIKKVRNLRQRLTARARHRCQTPHLLAA

SEQ ID NO: 18161 - protein, 1665 aa, Homo sapiens
METCDSPPISRQENGQSTSKLCGTTQLDNEVPEKVAGMEPDRENSSTDDNLKTDERKSEALLGFSVENAAATQVTSAKEIPCNECATSFPSLQKYMEHHCPNARLPVLKDDNESEISELEDSDVENLTGEIVYQPDGSAYIIEDSKESGQNAQTGANSKLFSTAMFLDSLASAGEKSDQSASAPMSFYPQIINTFHIASSLGKPFTADQAFPNTSALAGVGPVLHSFRVYDLRHKREKDYLTSDGSAKNSCVSKDVPNNVDLSKFDGCVSDGKRKPVLMCFLCKLSFGYIRSFVTHAVHDHRMTLNDEEQKLLSNKCVSAIIQGIGKDKEPLISFLEPKKSTSVYPHFSTTNLIGPDPTFRGLWSAFHVENGDSLPAGFAFLKGSASTSSSAEQPLGITQMPKAEVNLGGLSSLVVNTPITSVSLSHSSSESSKMSESKDQENNCERPKESNVLHPNGECPVKSEPTEPGDEDEEDAYSNELDDEEVLGELTDSIGNKDFPLLNQSISPLSSSVLKFIEKGTSSSSATVSDDTEKKKQTAAVRASGSVASNYGISGKDFADASASKDSATAAHPSEIARGDEDSSATPHQHGFTPSTPGTPGPGGDGSPGSGIECPKCDTVLGSSRSLGGHMTMMHSRNSCKTLKCPKCNWHYKYQQTLEAHMKEKHPEPGGSCVYCKTGQPHPRLARGESYTCGYKPFRCEVCNYSTTTKGNLSIHMQSDKHLNNVQNLQNGNGEQVFGHSAPAPNTSLSGCGTPSPSKPKQKPTWRCEVCDYETNVARNLRIHMTSEKHMHNMMLLQQNMKQIQHNLHLGLAPAEAELYQYYLAQNIGLTGMKLENPADPQLMINPFQLDPATAAALAPGLVNNELPPEIRLASGQLMGDDLSLLTAGELSPYISDPALKLFQCAVCNKFTSDSLEALSVHVSSERSLPEEEWRAVIGDIYQCKLCNYNTQLKANFQLHCKTDKHMQKYQLVAHIKEGGKSNEWRLKCIAIGNPVHLKCNACDYYTNSVDKLRLHTTNHRHEAALKLYKHLQKQEGAVNPESCYYYCAVCDYTTKVKLNLVQHVRSVKHQQTEGLRKLQLHQQGLAPEEDNLSEIFFVKDCPPNELETASLGARTCDDDLTEQQLRSTSEEQSEEAEGAIKPTAVAEDDEKDTSERDNSEGKNSNKDSGIITPEKELKVSVAGGTQPLLLAKEEDVATKRSKPTEDNKFCHEQFYQCPYCNYNSRDQSRIQMHVLSQHSVQPVICCPLCQDVLSNKMHLQLHLTHLHSVSPDCVEKLLMTVPVPDVMMPNSMLLPAAASEKSERDTPAAVTAEGSGKYSGESPMDDKSMAGLEDSKANVEVKNEEQKPTKEPLEVSEWNKNSSKDVKIPDTLQDQLNEQQKRQPLSVSDRHVYKYRCNHCSLAFKTMQKLQIHSQYHAIRAATMCNLCQRSFRTFQALKKHLEAGHPELSEAELQQLYASLPVNGELWAESETMSQDDHGLEQEMEREYEVDHEGKASPVGSDSSSIPDDMGSEPKRTLPFRKGPNFTMEKFLDPSRPYKCTVCKESFTQKNILLVHYNSVSHLHKLKKVLQEASSPVPQETNSNTDNKPYKCSICNVAYSQSSTLEIHMRSVLHQTKARAAKLEPSGHVAGGHSIAANVNSPGQGMLDSMSLAAVNSKDTHL

SEQ ID NO: 18162 - protein, 135 aa, Homo sapiens
MISVKRNTWRALSLVIGDCRKKGNFEYCQDRTEKHSTMPDSPVDVKTQSRLTPPTMPPPPTTQGAPRTSSFTPTTLTNGTSHSPTALNGAPSPPNGFSNGPSSSSSSSLANQQLPPACGARQLSKLKRFLTTLQQ

SEQ ID NO: 18163 - protein, 136 aa, Homo sapiens
SSHVETRAHAEERLLKKLFSGYNKWSRPVANISDVVLVRFGLSIAQLIDVDEKNQMMTTNVWVKQEWHDYKLRWDPADYENVTSIRIPSELIWRPDIVLYNNCRRALLGRSAFRHQTPSWPFWENSVDCRVPWRGC

SEQ ID NO: 18164 - protein, 674 aa, Homo sapiens
MKMAYNMTFFPNLMGHYDQSIAAVEMEHFLPLANLECSPNIETFLCKAFVPTCIEQIHVVPPCRKLCEKVYSDCKKLIDTFGIRWPEELECDRLQYCDETVPVTFDPHTEFLGPQKKTEQVQRDIGFWCPRHLKTSGGQGYKFLGIDQCAPPCPNMYFKSDELEFAKSFIGTVSIFCLCATLFTFLTFLIDVRRFRYPERPIIYYSVCYSIVSLMYFIGFLLGDSTACNKADEKLELGDTVVLGSQNKACTVLFMLLYFFTMAGTVWWVILTITWFLAAGRKWSCEAIEQKAVWFHAVAWGTPGFLTVMLLAMNKVEGDNISGVCFVGLYDLDASRYFVLLPLCLCVFVGLSLLLAGIISLNHVRQVIQHDGRNQEKLKKFMIRIGVFSGLYLVPLVTLLGCYVYEQVNRITWEITWVSDHCRQYHIPCPYQAKAKARPELALFMIKYLMTLIVGISAVFWVGSKKTCTEWAGFFKRNRKRDPISESRRVLQESCEFFLKHNSKVKHKKKHYKPSSHKLKVISKSMGTSTGATANHGTSAVAITSHDYLGQETLTEIQTSPETSMREVKADGASTPRLREQDCGEPASPAASISRLSGEQVDGKGQAGSVSESARSEGRISPKSDITDTGLAQSNNLQVPSSSEPSSLKGSTSLLVHPVSGVRKEQGGGCHSDT

SEQ ID NO: 18165 - protein, 156 aa, Homo sapiens
MISVKRNTWRALSLVIGDCRKKGNFEYCQDRTEKHSTMPDSPVDVKTQSRLTPPTMPPPPTTQGAPRTSSFTPTTLTNGTSHSPTALNGAPSPPNGFSNGPSSSSSSSLANQQLPPACGARQLSKLKRFLTTLQQFGNDISPEIGERVRTLVLGLV

SEQ ID NO: 18166 - protein, 1545 aa, Homo sapiens
MEEMRDSYLEEDVYQLQELRRELDRANKNCRILQYRLRKAEQKSLKVAETGQVDGELIRSLEQDLKVAKDVSVRLHHELKTVEEKRAKAEDENETLRQQMIEVEISKQALQNELERLKESSLKRRSTREMYKEKKTFNQDDSADLRCQLQFAKEEAFLMRKKMAKLGREKDELEQELQKYKSLYGDVDSPLPTGEAGGPPSTREAELKLRLKLVEEEANILGRKIVELEVENRGLKAEMEDMRGQQEREGPGRDHAPSIPTSPFGDSLESSTELRRHLQFVEEEAELLRRSISEIEDHNRQLTHELSKFKFEPPREPGWLGEGASPGAGGGAPLQEELKSARLQISELSGKVLKLQHENHALLSNIQRCDLAAHLGLRAPSPRDSDAESDAGKKESDGEESRLPQPKREGPVGGESDSEEMFEKTSGFGSGKPSEASEPCPTELLKAREDSEYLVTLKHEAQRLERTVERLITDTDSFLHDAGLRGGAPLPGPGLQGEEEQGEGDQQEPQLLGTINAKMKAFKKELQAFLEQVNRIGDGLSPLPHLTESSSFLSTVTSVSRDSPIGNLGKELGPDLQSRLKEQLEWQLGPARGDERESLRLRAARELHRRADGDTGSHGLGGQTCFSLEMEEEHLYALRWKELEMHSLALQNTLHERTWSDEKNLMQQELRSLKQNIFLFYVKLRWLLKHWRQGKQMEEEGEEFTEGEHPETLSRLGELGVQGGHQADGPDHDSDRGCGFPVGEHSPHSRVQIGDHSLRLQTADRGQPHKQVVENQQLFSAFKALLEDFRAELREDERARLRLQQQYASDKAAWDVEWAVLKCRLEQLEEKTENKLGELGSSAESKGALKKEREVHQKLLADSHSLVMDLRWQIHHSEKNWNREKVELLDRLDRDRQEWERQKKEFLWRIEQLQKENSPRRGGSFLCDQKDGNVRPFPHQGSLRMPRPVAMWPCADADSIPFEDRPLSKLKESDRCSASENLYLDALSLDDEPEEPPAHRPEREFRNRLPEEEENHKGNLQRAVSVSSMSEFQRLMDISPFLPEKGLPSTSSKEDVTPPLSPDDLKYIEEFNKSWDYTPNRGHNGGGPDLWADRTEVGRAGHEDSTEPFPDSSWYLTTSVTMTTDTMTSPEHCQKQPLRSHVLTEQSGLRVLHSPPAVRRVDSITAAGGEGPFPTSRARGSPGDTKGGPPEPMLSRWPCTSPRHSRDYVEGARRPLDSPLCTSLGFASPLHSLEMSKNLSDDMKEVAFSVRNAICSGPGELQVKDMACQTNGSRTMGTQTVQTISVGLQTEALRGSGVTSSPHKCLTPKAGGGATPVSSPSRSLRSRQVAPAIEKVQAKFERTCCSPKYGSPKLQRKPLPKADQPNNRTSPGMAQKGYSESAWARSTTTRESPVHTTINDGLSSLFNIIDHSPVVQDPFQKGLRAGSRSRSAEPRPELGPGQETGTNSRGRSPSPIGVGSEMCREEGGEGTPVKQDLSAPPGYTLTENVARILNKKLLEHALKEERRQAAHGPPGLHSDSHSLGDTAEPGPMENQTVLLTAPWGL

SEQ ID NO: 18167 - protein, 1703 aa, Homo sapiens
MSLLCVGVKKAKFDGAQEKFNTYVTLKVQNVKSTTIAVRGSQPSWEQDFMFEINRLDLGLTVEVWNKGLIWDTMVGTVWIPLRTIRQSNEEGPGEWLTLDSQVIMADSEICGTKDPTFHRILLDTRFELPLDIPEEEARYWAKKLEQLNAMRDQDEYSFQDEQDKPLPVPSNQCCNWNYFGWGEQHNDDPDSAVDDRDSDYRSETSNSIPPPYYTTSQPNASVHQYSVRPPPLGSRESYSDSMHSYEEFSEPQALSPTGSSRYASSGELSQGSSQLSEDFDPDEHSLQGSDMEDERDRDSYHSCHSSVSYHKDSPRWDQDEEELEEDLEDFLEEEELPEDEEELEEEEEEVPDDLGSYAQREDVAVAEPKDFKRISLPPAAPGKEDKAPVAPTEAPDMAKVAPKPATPDKVPAAEQIPEAEPPKDEESFRPREDEEGQEGQDSMSRAKANWLRAFNKVRMQLQEARGEGEMSKSLWFKGGPGGGLIIIDSMPDIRKRKPIPLVSDLAMSLVQSRKAGITSALASSTLNNEELKNHVYKKTLQALIYPISCTTPHNFEVWTATTPTYCYECEGLLWGIARQGMRCTECGVKCHEKCQDLLNADCLQRAAEKSSKHGAEDRTQNIIMVLKDRMKIRERNKPEIFELIQEIFAVTKTAHTQQMKAVKQSVLDGTSKWSAKISITVVCAQGLQAKDKTGSSDPYVTVQVGKTKKRTKTIYGNLNPVWEENFHFECHNSSDRIKVRVWDEDDDIKSRVKQRFKRESDDFLGQTIIEVRTLSGEMDVWYNLDKRTDKSAVSGAIRLHISVEIKGEEKVAPYHVQYTCLHENLFHFVTDVQNNGVVKIPDAKGDDAWKVYYDETAQEIVDEFAMRYGVESIYQAMTHFACLSSKYMCPGVPAVMSTLLANINAYYAHTTASTNVSASDRFAASNFGKERFVKLLDQLHNSLRIDLSMYRNNFPASSPERLQDLKSTVDLLTSITFFRMKVQELQSPPRASQVVKDCVKACLNSTYEYIFNNCHELYSREYQTDPAKKGEVLPEEQGPSIKNLDFWSKLITLIVSIIEEDKNSYTPCLNQFPQELNVGKISAEVMWNLFAQDMKYAMEEHDKHRLCKSADYMNLHFKVKWLYNEYVTELPAFKDRVPEYPAWFEPFVIQWLDENEEVSRDFLHGALERDKKDGFQQTSEHALFSCSVVDVFSQLNQSFEIIKKLECPDPQIVGHYMRRFAKTISNVLLQYADIISKDFASYCSKEKEKVPCILMNNTQQLRVQLEKMFEAMGGKELDAEASDILKELQVKLNNVLDELSRVFATSFQPHIEECVKQMGDILSQVKGTGNVPASACSSVAQDADNVLQPIMDLLDSNLTLFAKICEKTVLKRVLKELWKLVMNTMEKTIVLPPLTDQTMIGNLLRKHGKGLEKGRVKLPSHSDGTQMIFNAAKELGQLSKLKDHMVREEAKSLTPKQCAVVELALDTIKQYFHAGGVGLKKTFLEKSPDLQSLRYALSLYTQATDLLIKTFVQTQSAQGLGVEDPVGEVSVHVELFTHPGTGEHKVTVKVVAANDLKWQTSGIFRPFIEVNIIGPQLSDKKRKFATKSKNNSWAPKYNESFQFTLSADAGPECYELQVCVKDYCFAREDRTVGLAVLQLRELAQRGSAACWLPLGRRIHMDDTGLTVLRILSQRSNDEVAKEFVKLKSDTRSAEEGGAAPAP

SEQ ID NO: 18168 - protein, 195 aa, Homo sapiens
KDGGKAAQANVRIGDVVLSIDGINAQGMTHLEAQNKIKGCTGSLNMTLQRASAAPKPEPVPVQKPTVTSVCSETSQELAEGQRRGSQGDSKQQNGPPRKHIVERYTEFYHVPTHSDASKKRLIEDTEDWRPRTGTTQSRSFRILAQITGTEHLKESEADNTKKAKEKIPLHVFSPKYTKLRDWHHEVSARALNVQ

SEQ ID NO: 18169 - protein, 590 aa, Homo sapiens
MGKGRAGRVGTTALPPRLKEMKSQESAAGSKLVLRCETSSEYSSLRFKWFKNGNELNRKNKPQNIKIQKKPGKSELRINKASLADSGEYMCKVISKLGNDSASANITIVESNATSTSTTGTSHLVKCAEKEKTFCVNGGECFMVKDLSNPSRYLCKCPNEFTGDRCQNYVMASFYKHLGIEFMEAEELYQKRVLTITGICIALLVVGIMCVVAYCKTKKQRKKLHDRLRQSLRSERNNMMNIANGPHHPNPPPENVQLVNQYVSKNVISSEHIVEREAETSFSTSHYTSTAHHSTTVTQTPSHSWSNGHTESILSESHSVIVMSSVENSRHSSPTGGPRGRLNGTGGPRECNSFLRHARETPDSYRDSPHSERYVSAMTTPARMSPVDFHTPSSPKSPPSEMSPPVSSMTVSMPSMAVSPFMEEERPLLLVTPPRLREKKFDHHPQQFSSFHHNPAHDSNSLPASPLRIVEDEEYETTQEYEPAQEPVKKLANSRRAKRTKPNGHIANRLEVDSNTSSQSSNSESETEDERVGEDTPFLGIQNPLAASLEATPAFRLADSRTNPAGRFSTQEEIQARLSSVIANQDPIAV

SEQ ID NO: 18170 - protein, 100 aa, Homo sapiens
MNKDAQMRAAINQKLIETGERERLKELLRAKLIECGWKDQLKAHCKEVIKEKGLEHVTVDDLVAEITPKGRETGFAMLPRLVLSSRTQAILLPQPSRLLG

SEQ ID NO: 18171 - protein, 403 aa, Homo sapiens
MEKSQKINPFILHILQEVDEEIKKGLAAGITLNIAGNNRLVPVERVTGEDFWILSKILKNCLYINGLDVGYNLLCDVGAYYAAKLLQKQLNLIYLNLMFNDIGPEGGELIAKVLHKNRTLKYLRMTGNKIENKGGMFFAAMLQINSSLEKLDLGDCDLGMQSVIAFATVLTQNQAIKAINLNRPILYSEQEESTVHVGRMLKENHCLVALHMCKHDIKNSGIQQLCDALYLNSSLRYLDVSCNKITHDGMVYLADVLKSNTTLEVIDLSFNRIENAGANYLSETLTSHNRSLKALSVVSNNIEGEGLVALSQSMKTNLTFSHIYIWGNKFDEATCIAYSDLIQMGCLKPDNTDVEPFVVDGRVYLAEVSNGLKKHYYWTSTYGESYDHSSNAGFALVPVGQQP

SEQ ID NO: 18172 - protein, 591 aa, Homo sapiens
MITRRSLGYAYVNFQQPADAERALDTMNFDVIKGKPVRIMWSQRDPSLRKSGVGNIFIKNLDKSIDNKALYDTFSAFGNILSCKVVCDENGSKGYGFVHFETQEAAERAIEKMNGMLLNDRKVFVGRFKSRKEREAELGARAKEFTNVYIKNFGEDMDDERLKDLFGKFGPALSVKVMTDESGKSKGFGFVSFERHEDAQKAVDEMNGKELNGKQIYVGRAQKKVERQTELKRKFEQMKQDRITRYQGVNLYVKNLDDGIDDERLRKEFSPFGTITSAKVMMEGGRSKGFGFVCFSSPEEATKAVTEMNGRIVATKPLYVALAQRKEERQAHLTNQYMQRMASVRAVPNPVINPYQPAPPSGYFMAAIPQTQNRAAYYPPSQIAQLRPSPRWTAQGARPHPFQNMPGAIRPAAPRPPFSTMRPASSQVPRVMSTQRVANTSTQTMGPRPAAAAAAATPAVRTVPQYKYAAGVRNPQQHLNAQPQVTMQQPAVHVQGQEPLTASMLASAPPQEQKQMLGERLFPLIQAMHPTLAGKITGMLLEIDNSELLHMLESPESLRSKVDEAVAVLQAHQAKEAAQKAVNSATGVPTV

SEQ ID NO: 18173 - protein, 163 aa, Homo sapiens
NLWNFLAHTFIESAAERACWVLPGVQLRGQPHVRMLGLRARDRLDPTAVNILQQIIELGAETHDATALASVVAMAPGTVTVVKQVTEEEPSSNHTVMIQETVQQASVELAEQHHLVVSSDDVEGIETVTVYTQGGEASEFIVYVQEAMQPVEEQAVEQPAQEL

SEQ ID NO: 18174 - protein, 932 aa, Homo sapiens
MAPPQRHPQRSEQVLLLTLLGTLWGAAAAQIRYSIPEELEKGSFVGNIVKDLGLEPQELAEHGVRIVSRGRMQLFSLNPRNGSLVTAGRIDREELCAQSPRCLVSFNILVEDKLNLYPVEVEIVDINDNTPRFLKEELEVKILENAAPSSRFPLMEVYDPDVGMNSLQGFKLSGNSHFSVDVQSEAHGPKYPELVLEGTLDREGEAVYRLVLTAMDGGDPVRSSVAQILVTVLDVNDNTPMFTQPVYRVSVPENLPVGTPVLAVTATDQDEGVHGEVTYSFVKITEKISQIFCLNVLTGEISTSANLDYEDSSFYELGVEARDGPGLRDRAKVLITILDVNDNVPEVVVTSGSRTIAESAPPGTVIALFQVFDRDSGLNGLVTCSIPRSLPFELEKSVGNYYRLVTNAALDREEVFLYNITVTATDKGTPPLSTETIISLNVADTNDNPPTFPHSSYSVYVLENNPRGASIFSVNALDPDVDQNAQVSYSLAEDTLQGAPLSSYVSINSDTGILYALRSFDYEQLRDLQLWVTASDSGDPPLSSNVSLSLFVLDQNDNAPEILYPALPTDGSTGVELAPRSAEPGYLVTKVVAVDRDSGQNAWLSYRLLKASEPGLFSVGLHTGEVRTARALLDRDALKQSLVVAVQDHGQPPLSATVTLTVAVADRIPDILADLGSLEPSAKPNDSDLTLYLVVAVAAVSCVFLAFVIVLLALRLQRWHKSRLLQASGGGLASMPGSHFVGVEGVRAFLQTYSHEVSLTADSRKSHLIFPQPNYADTLINQESYEKSEPLLITQDLLETKGEPRQLQQAPPNTDWRFSQAQRPGTSGSQNGDDTGTWPNNQFDTEMLQAMILASASEAADGSSTLGGGAGTMGLSARYGPQFTLQHVPDYRQNVYIPGSNATLTNAAGKRDGKAPAGGNGNKKKSGKKEKK

SEQ ID NO: 18175 - protein, 225 aa, Homo sapiens
GSWEPVQCHAGTGHCWCVDEKGGFIPGSLTARSLQIPQCPTTCEKSRTSGLLSSWKQARSQENPSPKDLFVPACLETGEYARLQASGAGTWCVDPASGEELRPGSSSSAQSCRAEDGGFSPVQCDQAQGSCWCVMDSGEEVPGTRVTGGQPACESPRCPLPFNASEVVGGTILCETISGPTGSAMQQCQLLCRQGSWSVFPPGPLICSLESGRWESQLPQPRACQ

SEQ ID NO: 18176 - protein, 507 aa, Homo sapiens
MAGGEEAKRPPPRAPGDPLSSPSPTALPQGGSHTETEDRLFKHLFRGYNRWARPVPNTSDVVIVRFGLSIAQLIDVDEKNQMMTTNVWLKQEWSDYKLRWNPTDFGNITSLRVPSEMIWIPDIVLYNNADGEFAVTHMTKAHLFSTGTVHWVPPAIYKSSCSIDVTFFPFDQQNCKMKFGSWTYDKAKIDLEQMEQTVDLKDYWESGEWAIVNATGTYNSKKYDCCAEIYPDVTYAFVIRRLPLFYTINLIIPCLLISCLTVLVFYLPSDCGEKITLCISVLLSLTVFLLLITEIIPSTSLVIPLIGEYLLFTMIFVTLSIVITVFVLNVHHRSPSTHTMPHWVRGALLGCVPRWLLMNRPPPPVELCHPLRLKLSPSYHWLESNVDAEEREVVVEEEDRWACAGHVAPSVGTLCSHGHLHSGASGPKAEALLQEGELLLSPHMQKALEGVHYIADHLRSEDADSSVKEDWKYVAMVIDRIFLWLFIIVCFLGTIGLFLPPFLAGMI

SEQ ID NO: 18177 - protein, 719 aa, Homo sapiens
AEVAAKARDTGILIFAIGVGQVDFNTLKSIGSEPHEDHVFLVANFSQIETLTSVFQKKLCTAHMCSTLEHNCAHFCINIPGSYVCRCKQGYILNSDQTTCRTVDYCASENHGCEHECVNADGSYLCQCHEGFALNPDKKTCTKIDYCASSNHGCQHECVNTDDSYSCHCLKGFTLNPDKKTCRRINYCALNKPGCEHECVNMEESYYCRCHRGYTLDPNGKTCSRVDHCAQQDHGCEQLCLNTEDSFVCQCSEGFLINEDLKTCSRVDYCLLSDHGCEYSCVNMDRSFACQCPEGHVLRSDGKTCAKLDSCALGDHGCEHSCVSSEDSFVCQCFEGYILREDGKTCRRKDVCQAIDHGCEHICVNSDDSYTCECLEGFRLAEDGKRCRRKDVCKSTHHGCEHICVNNGNSYICKCSEGFVLAEDGRRCKKCTEGPIDLVFVIDGSKSLGEENFEVVKQFVTGIIDSLTISPKAARVGLLQYSTQVHTEFTLRNFNSAKDMKKAVAHMKYMGKGSMTGLALKHMFERSFTQGEGARPLSTRVPRAAIVFTDGRAQDDVSEWASKAKANGITMYAVGVGKAIEEELQEIASEPTNKHLFYAEDFSTMDEISEKLKKGICEALEDSDGRQDSPAGELPKTVQQPTVQHRYLFEEDNLLRSTQKLSHSTKPSGSPLEEKHDQCKCENLIMFQNLANEEVRKLTQRLEEMTQRMEALENRLRYR

SEQ ID NO: 18178 - protein, 200 aa, Homo sapiens
LTYEREEVLMNSLERLNGLPYLNKVVVVWNSPKLPSEDLLWPDIGVPIMVVRTEKNSLNNRFLPWNEIETEAILSIDDDAHLRHDEIMFGFRVWREARDRIVGFPGRYHAWDIPHQSWLYNSNYSCELSMVLTGAAFFHKVTSRWTFRCPGCPQALSHDDSHFHERHKCINFFVKVYGYMPLLYTQFRVDSVLFKTRLPH

SEQ ID NO: 18179 - protein, 752 aa, Homo sapiens
MAKRSRSEDEDDDLQYADHDYEVPQQKGLKKLWNRVKWTRDEDDKLKKLVEQHGTDDWTLIASHLQNRSDFQCQHRWQKVLNPELIKGPWTKEEDQRVIELVQKYGPKRWSLIAKHLKGRIGKQCRERWHNHLNPEVKKSSWTEEEDRIIYEAHKRLGNRWAEIAKLLPGRTDNSIKNHWNSTMRRKVEQEGYLQDGIKSERSSSKLQHKPCAAMDHMQTQNQFYIPVQIPGYQYVSPEGNCIEHVQPTSAFIQQPFIDEDPDKEKKIKELEMLLMSAENEVRRKRIPSQPGSFSSWSGSFLMDDNMSNTLNSLDEHTSEFYSMDENQPVSAQQNSPTKFLAVEANAVLSSLQTIPEFAETLELIESDPVAWSDVTSFDISDAAASPIKSTPVKLMRIQHNEGAMECQFNVSLVLEGKKNTCNGGNSEAVPLTSPNIAKFSTPPAILRKKRKMRVGHSPGSELRDGSLNDGGNMALKHTPLKTLPFSPSQFFNTCPGNEQLNIENPSFTSTPICGQKALITTPLHKETTPKDQKENVGFRTPTIRRSILGTTPRTPTPFKNALAAQEKKYGPLKIVSQPLAFLEEDIREVLKEETGTDLFLKEEDEPAYKSCKQENTASGKKVRKSLVLDNWEKEESGTQLLTEDISDMQSENRFTTSLLMIPLLEIHDNRCNLIPEKQDINSTNKTYTLTKKKPNPNTSKVVKLEKNLQSNCEWETVVYGKTEDQLIMTEQARRYLSTYTATSSTSRALIL

SEQ ID NO: 18180 - protein, 324 aa, Homo sapiens
MDLEKNYPTPRTSRTGHGGVNQLGGVFVNGRPLPDVVRQRIVELAHQGVRPCDISRQLRVSHGCVSKILGRYYETGSIKPGVIGGSKPKVATPKVVEKIAEYKRQNPTMFAWEIRDRLLAERVCDNDTVPSVSSINRIIRTKVQQPPNQPVPASSHSIVSTGSVTQVSSVSTDSAGSSYSISGILGITSPSADTNKRKRDEGIQESPVPNGHSLPGRDFLRKQMRGDLFTQQQLEVLDRVFERQHYSDIFTTTEPIKPEQGVSFPGVPTATLSIPRTTTPGGSPTRGCLAPPTIIALPPEEPPHLQPPLPMTVTDPWSQAGTKH

SEQ ID NO: 18181 - protein, 53 aa, Homo sapiens
MVVSKMNKDAQMRAAINQKLIETGERERLKELLRAKLIECGWKDQLKAHCKGN

SEQ ID NO: 18182 - protein, 1011 aa, Homo sapiens
MLLVIDQKIEGEVRERMLVSYYRYSAARSSADSNMDDICKLLRSTGYSSQPGAKRPSNYPESYFQRVPINESFISMVIGRLRSDDIYNQVSAYPLPEHRSTALANQAAMLYVILYFEPSILHTHQAKMREIVDKYFPDNWVISIYMGITVNLVDAWEPYKAAKTALNNTLDLSNVREQASRYATVSERVHAQVQQFLKEGYLREEMVLDNIPKLLNCLRDCNVAIRWLMLHTADSACDPNNKRLRQIKDQILTDSRYNPRILFQLLLDTAQFEFILKEMFKQMLSEKQTKWEHYKKEGSERMTELADVFSGVKPLTRVEKNENLQAWFREISKQILSLNYDDSTAAGRKTVQLIQALEEVQEFHQLESNLQVCQFLADTRKFLHQMIRTINIKEEVLITMQIVGDLSFAWQLIDSFTSIMQESIRVNPSMVTKLRATFLKLASALDLPLLRINQANSPDLLSVSQYYSGELVSYVRKVLQIIPESMFTSLLKIIKLQTHDIIEVPTRLDKDKLRDYAQLGPRYEVAKLTHAISIFTEGILMMKTTLVGIIKVDPKQLLEDGIRKELVKRVAFALHRGLIFNPRAKPSELMPKLKELGATMDGFHRSFEYIQDYVNIYGLKIWQEEVSRIINYNVEQECNNFLRTKIQDWQSMYQSTHIPIPKFTPVDESVTFIGRLCREILRITDPKMTCHIDQLNTWYDMKTHQEVTSSRLFSEIQTTLGTFGLNGLDRLLCFMIVKELQNFLSMFQKIILRDRTVQDTLKTLMNAVSPLKSIVANSNKIYFSAIAKTQKIWTAYLEAIMKVGQMQILRQQIANELNYSCRFDSKHLAAALENLNKALLADIEAHYQDPSLPYPKEDNTLLYEITAYLEAAGIHNPLNKIYITTKRLPYFPIVNFLFLIAQLPKLQYNKNLGMVCRKPTDPVDWPPLVLGLLTLLKQFHSRYTEQFLALIGQFICSTVEQCTSQKIPEIPADVVGALLFLEDYVRYTKLPRRVAEAHVPNFIFDEFRTVL

SEQ ID NO: 18183 - protein, 1121 aa, Homo sapiens
GANAQVVYSLPDSAEGHFSIDATTGVIRLEKPLQVRPQAPLELTVRASDLGTPIPLSTLGTVTVSVVGLEDYLPVFLNTEHSVQVPEDAPPGTEVLQLATLTRPGAEKTGYRVVSGNEQGRFRLDARTGILYVNASLDFETSPKYFLSIECSRKSSSSLSDVTTVMVNITDVNEHRPQFPQDPYSTRVLENALVGDVILTVSATDEDGPLNSDITYSLIGGNQLGHFTIHPKKGELQVAKALDREQASSYSLKLRATDSGQPPLHEDTDIAIQVADVNDNPPRFFQLNYSTTVQENSPIGSKVLQLILSDPDSPENGPPYSFRITKGNNGSAFRVTPDGWLVTAEGLSRRAQEWYQLQIQASDSGIPPLSSLTSVRVHVTEQSHYAPSALPLEIFITVGEDEFQGGMVGKIHATDRDPQDTLTYSLAEEETLGRHFSVGAPDGKIIAAQGLPRGHYSFNVTVSDGTFTTTAGVHVYVWHVGQEALQQAMWMGFYQLTPEELVSDHWRNLQRFLSHKLDIKRANIHLASLQPAEAVAGVDVLLVFEGHSGTFYEFQELASIITHSAKEMEHSVGVQMRSAMPMVPCQGPTCQGQICHNTVHLDPKVGPTYSTARLSILTPRHHLQRSCSCNGTATRFSGQSYVRYRAPAARNWHIHFYLKTLQPQAILLFTNETASVSLKGFEGCLDAVVVNEEALDLLAPGKTVAGLLETQALTQCCLHSDYCSQNTCLNGGKCSWTHGAGYVCKCPPQFSGKHCEQGRENCTFAPCLEGGTCILSPKGASCNCPHPYTGDRCEMEARGCSEGHCLVTPEIQRGDWGQQELLIITVAVAFIIISTVGLLFYCRRCKSHKPVAMEDPDLLARSVGVDTQAMPAIELNPLSASSCNNLNQPEPSKASVPNELVTFGPNSKQRPVVCSVPPRLPPAAVPSHSDNEPVIKRTWSSEEMVYPGGAMVWPPTYSRNERWEYPHSEVTQGPLPPSAHRHSTPVVMPEPNGLYGGFPFPLEMENKRAPLPPRYSNQNLEDLMPSRPPSPRERLVAPCLNEYTAISYYHSQFRQGGGGPCLADGGYKGVGMRLSRAGPSYAVCEVEGAPLAGQGQPRVPPNYEGSDMVESDYGSCEEVMF

SEQ ID NO: 18184 - protein, 639 aa, Homo sapiens
MGNREMEELIPLVNRLQDAFSALGQSCLLELPQIAVVGGQSAGKSSVLENFVGRDFLPRGSGIVTRRPLVLQLVTSKAEYAEFLHCKGKKFTDFDEVRLEIEAETDRVTGMNKGISSIPINLRVYSPHVLNLTLIDLPGITKVPVGDQPPDIEYQIREMIMQFITRENCLILAVTPANTDLANSDALKLAKEVDPQGLRTIGVITKLDLMDEGTDARDVLENKLLPLRRGYVGVVNRSQKDIDGKKDIKAAMLAERKFFLSHPAYRHIADRMGTPHLQKVLNQQLTNHIRDTLPNFRNKLQGQLLSIEHEVEAYKNFKPEDPTRKTKALLQMVQQFAVDFEKRIEGSGDQVDTLELSGGAKINRIFHERFPFEIVKMEFNEKELRREISYAIKNIHGIRTGLFTPDMAFEAIVKKQIVKLKGPSLKSVDLVIQELINTVKKCTKKLANFPRLCEETERIVANHIREREGKTKDQVLLLIDIQVSYINTNHEDFIGFANAQQRSSQVHKKTTVGNQVIRKGWLTISNIGIMKGGSKGYWFVLTAESLSWYKDDEEKEKKYMLPLDNLKVRDVEKSFMSSKHIFALFNTEQRNVYKDYRFLELACDSQEDVDSWKASLLRAGVYPDKSVVSWIYLLCKNYY

SEQ ID NO: 18185 - protein, 774 aa, Homo sapiens
SLSFRSDTDKPSSAAEVLTEASSCWTDTVECFSDYMTLWIPRSHVEGLRRWLARTLHLPGTWRSPDHLDSSLAKCGYFLHLASDGDFLFRVQYSACFVQKEKANYRLEIRIFQKGVMGLERSDRYIMKCPMLRSRLGQESVHCGPMFIQVSRPLPLWRDNRQTPWLLSLRGELVASLEDASLMGLYVDMNATTVTVQSPRQGLLQRWEVLNTSAELLPLWLVSGHHAYSLEAACPPVSFQPESEVLVHIPKQRLGLVKRGSYIEETLSLRFLRVHQSNIFMVTENKDFVVVSIPAAGVLQVQRCQEVGGTPGTQAFYRVDLSLEFAEMAAPVLWTVESFFQCVGSGTESPASTAALRTTPSPPSPGPETPPAGVPPAASSQKGLGPFLQTAKPARRGQTSASILPRVVQAQRGPQPPPGEAGIPGHPTPPATLPSEPVEGVQASPWRPRPVLPTHPALTLPVSSDASSPSPPAPRPERPESLLVSGPSVTLTEGLGTVRPEQDPAKSPGSPLLLRGLSSGDVAAPEPIMGEPGQASEEFQPLARPWRATLAAEELVSHRSPGEPQETCSGTEVERPRQTGPGLPREGARGHMDLSSSEPSQDIEGPGLSILPARDATFSTPSVRQPDPSAWLSSGPELTGMPRVRLAAPLAVLPMEPLPPEPVRPAALLTPEASSVGGPDQARYLESAPGWPVGQEEWGVAHTSSPPSTQTLSLWAPTGVLLPSLVELEYPFQAGRGASLQQELTEPTLALSAESHRPPELQDSVEGLSERPSR

SEQ ID NO: 18186 - protein, 96 aa, Homo sapiens
MNKDAQMRAAINQKLIETGERERLKELLRAKLIECGWKDQLKAHCKEVIKEKGLEHVTVDDLVAEITPKGRALVPDSVKKELLQRIRTFLAQHASL

SEQ ID NO: 18187 - protein, 309 aa, Homo sapiens
MVRLTLDLIARNSNLKPRKEETISQCLKKITHINFSDKNIDAIEDLSLCKNLSVLYLYDNCISQITNLNYATNLTHLYLQNNCISCIENLRSLKKLEKLYLGGNYIAVIEGLEGLGELRELHVENQRLPLGEKLLFDPRTLHSLAKSLCILNISNNNIDDITDLELLENLNQLIAVDNQLLHVKDLEFLLNKLMKLWKIDLNGNPVCLKPKYRDRLILVSKSLEFLDGKEIKNIERQFLMNWKASKDAKKISKKRSSKNEDASNSLISNFKTMHHIVPVYYPQVGKPKLAFFSEIQRYPVNANASPESS

SEQ ID NO: 18188 - protein, 210 aa, Homo sapiens
MPDSPVDVKTQSRLTPPTMPPPPTTQGAPRTSSFTPTTLTNGTSHSPTALNGAPSPPNGFSNGPSSSSSSSLANQQLPPACGARQLSKLKRFLTTLQQFGNDISPEIGERVRTLVLGLVNSTLTIEEFHSKLQEATNFPLRPFVIPFLKANLPLLQRELLHCARLAKQNPAQYLAQHEQLLLDASTTSPVDSSELLLDVNENGKRRTPDR

SEQ ID NO: 18189 - protein, 159 aa, Homo sapiens
MLRVPEPRPGEAETLAETEPERHLGSYLLDSENTSGALPRLPQTPKQPQKRSRAAFSHTQVIELERKFSHQKYLSAPERAHLAKNLKLTETQVKIWFQNRRYKTKRKQLSSELGDLEKHSSLPALKEEAFSRASLVSVYNSYPYYPYLYCVGSWSPAFW

SEQ ID NO: 18190 - protein, 350 aa, Homo sapiens
MARWIPTKRQKYGVAIYNYNASQDVELSLQIGDTVHILEMYEGWYRGYTLQNKSKKGIFPETYIHLKEATVEDLGQHETVIPGELPLVQELTSTLREWAVIWRKLYVNNKLTLFRQLQQMTYSLIEWRSQILSGTLPKDELAELKKKVTAKIDHGNRMLGLDLVVRDDNGNILDPDETSTIALFKAHEVASKRIEEKIQEEKSILQNLDLRGQSIFSTIHTYGLYVNFKNFVCNIGEDAELFMALYDPDQSTFISENYLIRWGSNGMPKEIEKLNNLQAVFTDLSSMDLIRPRVSLVCQIVRVGHMELKEGKKHTCGLRRPFGVAVMDITDIIHGKVDDEEKQHFIPFQQ

SEQ ID NO: 18191 - protein, 519 aa, Homo sapiens
MLQLMDSGITICLRNGAASVFKKKEWSTQGEENKQDSKLKKLSEDSLTKQPEEVFDVLEKLGEGSYGSVFKAIHKESGQVVAIKQVPVESDLQEIIKEISIMQQCDSPYVVKYYGSYFKNTDLWIVMEYCGAGSVSDIIRLRNKTLIEDEIATILKSTLKGLEYLHFMRKIHRDIKAGNILLNTEGHAKLADFGVAGQLTDTMAKRNTVIGTPFWMAPEVIQEIGYNCVADIWSLGITSIEMAEGKPPYADIHPMRAIFMIPTNPPPTFRKPELWSDDFTDFVKKCLVKNPEQRATATQLLQHPFIKNAKPVSILRDLITEAMEIKAKRHEEQQRELEEEEENSDEDELDSHTMVKTSVESVGTMRATSTMSEGAQTMIEHNSTMLESDLGTMVINSEDEEEEDGTMKRNATSPQVQRPSFMDYFDKQDFKNKSHENCNQNMHEPFPMSKNVFPDNWKVPQDGDFDFLKNLSLEELQMRLKALDPMMEREIEELRQRYTAKRQPILDAMDAKKRRQQNF

SEQ ID NO: 18192 - protein, 314 aa, Homo sapiens
MMDLRRYPLDEQNCTLEIESYGYTTDDIEFYWRGDDNAVTGVTKIELPQFSIVDYKLITKKVVFSTGSYPRLSLSFKLKRNIGYFILQTYMPSILITILSWVSFWINYDASAARVALGITTVLTMTTINTHLRETLPKIPYVKAIDMYLMGCFVFVFMALLEYALVNYIFFGRGPQRQKKAAEKAASANNEKMRLDVNKMDPHENILLSTLEIKNEMATSEAVMGLGDPRSTMLAYDASSIQYRKAGLPRHSFGRNALERHVAQKKSRLRRRASQLKITIPDLTDVNAIDRWSRIFFPVVFSFFNIVYWLYYVN

SEQ ID NO: 18193 - protein, 102 aa, Homo sapiens
MLFRFSAASSDNTENLIKVIEILISTEWNERQPAPALPPKPPKPTTVANNGMNNNMSLQDAEWYWGDISREEVNEKLRDTADGTFLVRDASTKMHGDYTLTL

SEQ ID NO: 18194 - protein, 81 aa, Homo sapiens
ELVVDKTKRKKRRELSEEQKQEIKDAFELFDTDKDEAIDYHELKVAMRALGFDVKKADVLKILKDYDREATGKITFEDFNE

SEQ ID NO: 18195 - protein, 445 aa, Homo sapiens
MLLFVEQVASKGTGLNPNAKVWQEIAPGNTDATPVTHGTESSWHEIAATSGAHPEGNAELSEDICKEYEVMYSSSCETTRNTTGIEESTDGMILGPEDLSYQIYDVSGESNSAVSTEDLKECLKKQLEFCFSRENLSKDLYLISQMDSDQFIPIWTVANMEEIKKLTTDPDLILEVLRSSPMVQVDEKGEKVRPSHKRCIVILREIPETTPIEEVKGLFKSENCPKVISCEFAHNSNWYITFQSDTDAQQAFKYLREEVKTFQGKPIMARIKAINTFFAKNGYRLMDSSIYSHPIQTQAQYASPVFMQPVYNPHQQYSVYSIVPQSWSPNPTPYFETPLAPFPNGSFVNGFNSPGSYKTNAAAMNMGRPFQKNRVKPQFRSSGGSEHSTEGSVSLGDGQLNRYSSRNFPAERHNPTVTGHQEQTYLQKETSTLQVEQNGDYGRGR

SEQ ID NO: 18196 - protein, 466 aa, Homo sapiens
MGWITEDLIRRNAEHNDCVIFSLEELSLHQQEIERLEHIDKWCRDLKILYLQNNLIGKIENVSKLKKLEYLNLALNNIEKIENLEGCEELAKLDLTVNFIGELSSIKNLQHNIHLKELFLMGNPCASFDHYREFVVATLPQLKWLDGKEIEPSERIKALQDYSVIEPQIREQEKDHCLKRAKLKEEAQRKHQEEDKNEDKRSNAGFDGRWYTDINATLSSLESKDHLQAPDTEEHNTKKLDNSEDDLEFWNKPCLFTPESRLETLRHMEKQRKKQEKLSEKKKKVKPPRTLITEDGKALNVNEPKIDFSLKDNEKQIILDLAVYRYMDTSLIDVDVQPTYVRVMIKGKPFQLVLPAEVKPDSSSAKRSQTTGHLVICMPKVGEVITGGQRAFKSMKTTSDRSREQTNTRSKHMEKLEVDPSKHSFPDVTNIVQEKKHTPRRRPEPKIIPSEEDPTFEDNPEVPPLI

SEQ ID NO: 18197 - protein, 752 aa, Homo sapiens
MKPAEHATMFLIVLGCLILAVLTTFKEYETVSGDWLLLLETFAIFIFGAEFALRIWAAGCCCRYKGWRGRLKFARKPLCMLDIFVLIASVPVVAVGNQGNVLATSLRSLRFLQILRMLRMDRRGGTWKLLGSAICAHSKELITAWYIGFLTLILSSFLVYLVEKDVPEVDAQGEEMKEEFETYADALWWGLITLATIGYGDKTPKTWEGRLIAATFSLIGVSFFALPAGILGSGLALKVQEQHRQKHFEKRRKPAAELIQAAWRYYATNPNRIDLVATWRFYESVVSFPFFRKEQLEAASSQKLGLLDRVRLSNPRGSNTKGKLFTPLNVDAIEESPSKEPKPVGLNNKERFRTAFRMKAYAFWQSSEDAGTGDPMAEDRGYGNDFPIEDMIPTLKAAIRAVRILQFRLYKKKFKETLRPYDVKDVIEQYSAGHLDMLSRIKYLQTRIDMIFTPGPPSTPKHKKSQKGSAFTFPSQQSPRNEPYVARPSTSEIEDQSMMGKFVKVERQVQDMGKKLDFLVDMHMQHMERLQVQVTEYYPTKGTSSPAEAEKKEDNRYSDLKTIICNYSETGPPEPPYSFHQVTIDKVSPYGFFAHDPVNLPRGGPSSGKVQATPPSSATTYVERPTVLPILTLLDSRVSCHSQADLQGPYSDRISPRQRRSITRDSDTPLSLMSVNHEELERSPSGFSISQDRDDYVFGPNGGSSWMREKRYLAEGETDTDTDPFTPSGSMPLSSTGDGISDSVWTPSNKPI

SEQ ID NO: 18198 - protein, 48 aa, Homo sapiens
PTINLQFKIQQLAISGLKVNRLDMYGEKYKPFKGIKYMTKAGKFQVRT

SEQ ID NO: 18199 - protein, 950 aa, Homo sapiens
MLFSWREDPGAQCLLLSLLLLAASEVGSGQLHYSVSEEAKHGTFVGRIAQDLGLELAELVPRLFRVASKRHGDLLEVNLQNGILFVNSRIDREELCGRSAECSIHLEVIVDRPLQVFHVEVEVKDINDNAPVFPMAVKNLFISESRQPGSRFSLEGASDADIGTNSLLTYSLDSTEYFTLDVKRNDEEIKSLGLVLKKNLNREDTPKHYLLITAIDGGKPELTGTTQLKITVLDVNDNAPAFERTIYKVRLLENAPNGTLVVTVNATDLDEGVNKDIAYSFNTDMSADILSKFHLDPVNGQISVKGNIDFEESKSYEIQVEATDKGNPPMSDHCTVLLEIVDINDNVPELVIQSLSLPVLEDSPLSTVIALISVSDRDSGVNGQVTCSLTPHVPFKLVSTFKNYYSLVLDSPLDRESVSAYELVVTARDGGSPSLWATASVSVEVADVNDNAPAFSQSEYTVFVKENNPPGCHIFTVSARDADAQENALVSYSLVERRVGERALSSYVSVHAESGKVYALQPLDHEELELLQFQVSARDAGVPPLGSNVTLQVFVLDENDNAPALLMPRVGGIGGAVSELVPRSVGAGHVVAKVRAVDADSGYNAWLSYELQPGTGGARIPFRVGLYTGEISTTRALDEVDAPRHRLLVLVKDHGEPSLTATATVLVSLVESGQAPKASSQASAGATGPEAALVDVNVYLIVAICAVSSLLVLTLLLYTALRCSAPPTEGDCGPGKPTLVCSSAVGSWSYSQQRQQRVCSGEGLPKTDLMAFSPSLPPCPISRDREEKQDVDVDLSAKPRQPNPDWRYSASLRAGMHSSVHLEEAGILRAGPGGPDQQWPTVSSATPEPEAGEVSPPVGAGVNSNSWTFKYGPGNPKQSGPGELPDKFIIPGSPAIISIRQEPTNSQIDKSDFITFGKKEETKKKKKKKKGNKTQEKKEKGNSTTDNSDQ

SEQ ID NO: 18200 - protein, 529 aa, Homo sapiens
MKQQALTEFEAYKHRVEDMQLCAEAQHVQRIVTMSREVEEIRRKFEEKLRSFGQLQVQFEKDKRLALEDLQAAHRREIQELLKSQQDHSASVNKGQEKAEELHRMEVESLNKMLEELRLERKKLIEDYEGKLNKAQSFYERELDTLKRSQLFTAESLQASKEKEADLRKEFQGQEAILRKTIGKLKTELQMVQDEAGSLLDKCQKLQTALAIAENNVQVLQKQLDDAKEGEMALLSKHKEVESELAAARERLQQQASDLVLKASHIGMLQATQMTQEVTIKDLESEKSRVNERLSQLEEERAFLRSKTQSLDEEQKQQILELEKKVNEAKRTQQEYYERELKNLQSRLEEEVTQLNEAHSKTLEELAWKHHMAIEAVHSNAIRDKKKLQMDLEEQHNKDKLNLEEDKNQLQQELENLKEVLEDKLNTANQEIGHLQDMVRKSEQGLGSAEGLIASLQDSQERLQNELDLTKDSLKETKDALLNVELLVAPGILGIRQHNFHLCLSSHLKRIPGILEQGLILLQFDIILT

SEQ ID NO: 18201 - protein, 931 aa, Homo sapiens
MASPPRGWGCGELLLPFMLLGTLCEPGSGQIRYSMPEELDKGSFVGNIAKDLGLEPQELAERGVRIVSRGRTQLFALNPRSGSLVTAGRIDREELCAQSPLCVVNFNILVENKMKIYGVEVEIIDINDNFPRFRDEELKVKVNENAAAGTRLVLPFARDADVGVNSLRSYQLSSNLHFSLDVVSGTDGQKYPELVLEQPLDREKETVHDLLLTALDGGDPVLSGTTHIRVTVLDANDNAPLFTPSEYSVSVPENIPVGTRLLMLTATDPDEGINGKLTYSFRNEEEKISETFQLDSNLGEISTLQSLDYEESRFYLMEVVAQDGGALVASAKVVVTVQDVNDNAPEVILTSLTSSISEDCLPGTVIALFSVHDGDSGENGEIACSIPRNLPFKLEKSVDNYYHLLTTRDLDREETSDYNITLTVMDHGTPPLSTESHIPLKVADVNDNPPNFPQASYSTSVTENNPRGVSIFSVTAHDPDSGDNARVTYSLAEDTFQGAPLSSYVSINSDTGVLYALRSFDYEQLRDLQLWVTASDSGNPPLSSNVSLSLFVLDQNDNTPEILYPALPTDGSTGVELAPRSAEPGYLVTKVVAVDKDSGQNAWLSYRLLKASEPGLFAVGLHTGEVRTARALLDRDALKQSLVVAVEDHGQPPLSATFTVTVAVADRIPDILADLGSIKTPIDPEDLDLTLYLVVAVAAVSCVFLAFVIVLLVLRLRRWHKSRLLQAEGSRLAGVPASHFVGVDGVRAFLQTYSHEVSLTADSRKSHLIFPQPNYADTLLSEESCEKSEPLLMSDKVDANKEERRVQQAPPNTDWRFSQAQRPGTSGSQNGDDTGTWPNNQFDTEMLQAMILASASEAADGSSTLGGGAGTMGLSARYGPQFTLQHVPDYRQNVYIPGSNATLTNAAGKRDGKAPAGGNGNKKKSGKKEKK

SEQ ID NO: 18202 - protein, 392 aa, Homo sapiens
MEKKECPEKSSSSEEELPRRDSGSSRNIDASKLIRLQGSRKLLVDNSIRELQYTKTGIFFQAEACVTNDTVYRELPCVSETLCDISHFFQEDDETEAEPLLFRAVPECQLSGGDIPSVSEEQESSEGQDSGDICSEENQIVSSYASKVCFEIEEDYKNRQFLGPEGNVDVELIDKSTNRYSVWFPTAGWYLWSATGLGFLVRDEVTVTIAFGSWSQHLALDLQHHEQWLVGGPLFDVTAEPEEAVAEIHLPHFISLQAGEVDVSWFLVAHFKNEGMVLEHPARVEPFYAVLESPSFSLMGILLRIASGTRLSIPITSNTLIYYHPHPEDIKFHLYLVPSDALLTKAIDDEEDRFHGVRLQTSPPMEPLNFGSSYIVSNSANLKVMPKWISSL

SEQ ID NO: 18203 - protein, 452 aa, Homo sapiens
MNKMALASFMKGRTVIGTPDEETMDIELPKKYHEMVGVIFSDTFSYRLKFNWGYRIPVIKEHSEYTEHCWAMHGEIFCYLAKYWLKGFVAFQAAINAAIIEVTTNHSVMEELTSVIGINMKIPPFISKGEIMNEWFHFTCLVSFSSFIYFASLNVARERGKFKKLMTVMGLRESAFWLSWGLTYICFIFIMSIFMALVITSIPIVFHTGFMVIFTLYSLYGLSLIALAFLMSVLIRKPMLAGLAGFLFTVFWGCLGFTVLYRQLPLSLGWVLSLLSPFAFTAGMAQITHLDNYLSGVIFPDPSGDSYKMIATFFILAFDTLFYLIFTLYFERVLPDKDGHGDSPLFFLKSSFWSKHQNTHHEIFENEINPEHSSDDSFEPVSPEFHGKEAIRIRNVIKEYNGKTGKVEALQGSEERLCPAAHRLRCGERLCPAAHHLGCEERPCPAATPSGN

SEQ ID NO: 18204 - protein, 582 aa, Homo sapiens
NNLQQPTWGAALTAFARLLQPAYRDGIRAPRGLGLPVGSRQPLPPPRLVATVWARAAAVTPDHSYTRMLMHWGWFLEHDLDHTVPALSTARFSDGRPCSSVCTNDPPCFPMNTRHADPRGTHAPCMLFARSSPACASGRPSATVDSVYAREQINQQTAYIDGSNVYGSSERESQALRDPSVPRGLLKTGFPWPPSGKPLLPFSTGPPTECARQEQESPCFLAGDHRANEHLALAAMHTLWFREHNRMATELSALNPHWEGNTVYQEARKIVGAELQHITYSHWLPKVLGDPGTRMLRGYRGYNPNVNAGIINSFATAAFRFGHTLINPILYRLNATLGEISEGHLPFHKALFSPSRIIKEGGIDPVLRGLFGVAAKWRAPSYLLSPELTQRLFSAAYSAAVDSAATIIQRGRDHGIPPYVDFRVFCNLTSVKNFEDLQNEIKDSEIRQKLRKLYGSPGDIDLWPALMVEDLIPGTRVGPTLMCLFVTQFQRLRDGDRFWYENPGVFTPAQLTQLKQASLSRVLCDNGDSIQQVQADVFVKAEYPQDYLNCSEIPKVDLRVWQDCCADKQAGGTPEAGRVYRC

SEQ ID NO: 18205 - protein, 111 aa, Homo sapiens
MSLALRSELVVDKTKRKKRRELSEEQKQEIKDAFELFDTDKDEAIDYHELKVAMRALGFDVKKADVLKILKDYDREATGKITFEDFNEVGVYFNSLCNQQLLGNCLINITF

SEQ ID NO: 18206 - protein, 1090 aa, Homo sapiens
MGANVHARDDGGLIPLHNACSFGHAEVVSLLLCQGADPNARDNWNYTPLHEAAIKGKIDVCIVLLQHGADPNIRNTDGKSALDLADPSAKAVLTGEYKKDELLEAARSGNEEKLMALLTPLNVNCHASDGRKSTPLHLAAGYNRVRIVQLLLQHGADVHAKDKGGLVPLHNACSYGHYEVTELLLKHGACVNAMDLWQFTPLHEAASKNRVEVCSLLLSHGADPTLVNCHGKSAVDMAPTPELRERLTYEFKGHSLLQAAREADLAKVKKTLALEIINFKQPQSHETALHCAVASLHPKRKQVTELLLRKGANVNEKNKDFMTPLHVAAERAHNDVMEVLHKHGAKMNALDTLGQTALHRAALAGHLQTCRLLLSYGSDPSIISLQGFTAAQMGNEAVQQILSESTPIRTSDVDYRLLEASKAGDLETVKQLCSSQNVNCRDLEGRHSTPLHFAAGYNRVSVVEYLLHHGADVHAKDKGGLVPLHNACSYGHYEVAELLVRHGASVNVADLWKFTPLHEAAAKGKYEICKLLLKHGADPTKKNRDGNTPLDLVKEGDTDIQDLLRGDAALLDAAKKGCLARVQKLCTPENINCRDTQGRNSTPLHLAAGYNNLEVAEYLLEHGADVNAQDKGGLIPLHNAASYGHVDIAALLIKYNTCVNATDKWAFTPLHEAAQKGRTQLCALLLAHGADPTMKNQEGQTPLDLATADDIRALLIDAMPPEALPTCFKPQATVVSASLISPASTPSCLSAASSIDNLTGPLAELAVGGASNAGDGAAGTERKEGEVAGLDMNISQFLKSLGLEHLRDIFETEQITLDVLADMGHEELKEIGINAYGHRHKLIKGVERLLGGQQGTNPYLTFHCVNQGTILLDLAPEDKEYQSVEEEMQSTIREHRDGGNAGGIFNRYNVIRIQKVVNKKLRERFCHRQKEVSEENHNHHNERMLFHGSPFINAIIHKGFDERHAYIGGMFGAGIYFAENSSKSNQYVYGIGGGTGCPTHKDRSCYICHRQMLFCRVTLGKSFLQFSTMKMAHAPPGHHSVIGRPSVNGLAYAEYVIYRGEQAYPEYLITYQIMKPEAPSQTATAAEQKT

SEQ ID NO: 18207 - protein, 583 aa, Homo sapiens
MEATRLRQKAEELVKDNELLPPPSPSLGSFDPLAELTGKDSNVTASPTAPACPSDKPAPVQKPPSSGTSSEFEVVTPEEQNSPESSSHANAMALGPLPREDGNLMLHLQRLETTLSVCAEEPDHGQLFTHLGRMALEFNRLASKVHKNEQRTSILQTLCEQLRKENEALKAKLDKGLEQRDQAAERLREENLELKKLLMSNGNKEGASGRPGSPKMEGTGKKAVAGQQQASVTAGKVPEVVALGAAEKKVKMLEQQRSELLEVNKQWDQHFRSMKQQYEQKITELRQKLADLQKQVTDLEAEREQKQRDFDRKLLLAKSKIEMEETDKEQLTAEAKELRQKVKYLQDQLSPLTRQREYQEKEIQRLNKALEEALSIQTPPSSPPTAFGSPEGAGALLRKQELVTQNELLKQQVKIFEEDFQRERSDRERMNEEKEELKKQVEKLQAQVTLSNAQLKAFKDEEKAREALRQQKRKAKASGERYHVEPHPEHLCGAYPYAYPPMPAMVPHHGFEDWSQIRYPPPPMAMEHPPPLPNSRLFHLPEYTWRLPCGGVRNPNQSSQVMDPPTARPTEPESPKNDREGPQ

SEQ ID NO: 18208 - protein, 679 aa, Homo sapiens
MWPRLPGAGLAPQLRRQDQRLHFTGQMSHGLQMAGPQETVLALPLREGVQAAATVPILLYNLEDGLSDHPLDQGPRCPARRPCSPASAPAPTSPKKPKIQAPGETFPTDWSPPPVEFLNPRVLQASREAPAQRWVGVVGPQGLRRLAGELPEELEQEHLDLDPKRGLALPEKLFWNTSGLSQQAAAPEFSWGGSGSYFNNLDYLLQEKREQALEQERERLLLQECLNLNSLDLDEEEVPLTPEHRMLVEKYSVSLQTIPPVHPGETVFLPRCHPLPCILDSSLLKPRSHLEGLFLSSPPAQQLSFLRSGLLNILYLHMPDCPVSLLQWLFQLLTWPPETSLGAFGLLWDLIVDGIFLQPDEDKHLWCPSLQEVREAFHSLGAHSPALYPLGPFWHGGRVLPGEAGLNENEEQDAPQEIALDISLGHIYKFLALCAQAQPGAYTDENLMGLIELLCRTSLDVGLRLLPKVDLQQLLLLLLENIREWPGKLQELCCTLSWVSDHHHNLLALVQFFPDMTSRSRRLRSQLSLVVIARMLGQQEMLPLWQEKTQLSSLSRLLGLMRPSSLRQYLDSVPLPPCQEQQPKASAELDHKACYLCHSLLMLAGVVVSCQDITPDQWGELQLLCMQLDRHISTQIRESPQAMHRTMLKDLATQTYIRWQELLTHCQPQAQYFSPWKDI

SEQ ID NO: 18209 - protein, 1129 aa, Homo sapiens
MRSSASRLSSFSSRDSLWNRMPDQISVSEFIAETTEDYNSPTTSSFTTRLHNCRNTVTLLEEALDQDRTALQKVKKSVKAIYNSGQDHVQNEENYAQVLDKFGSNFLSRDNPDLGTAFVKFSTLTKELSTLLKNLLQGLSHNVIFTLDSLLKGDLKGVKGDLKKPFDKAWKDYETKFTKIEKEKREHAKQHGMIRTEITGAEIAEEMEKERRLFQLQMCEYLIKVNEIKTKKGVDLLQNLIKYYHAQCNFFQDGLKTADKLKQYIEKLAADLYNIKQTQDEEKKQLTALRDLIKSSLQLDQKEDSQSRQGGYSMHQLQGNKEYGSEKKGYLLKKSDGIRKVWQRRKCSVKNGILTISHATSNRQPAKLNLLTCQVKPNAEDKKSFDLISHNRTYHFQAEDEQDYVAWISVLTNSKEEALTMAFRGEQSAGENSLEDLTKAIIEDVQRLPGNDICCDCGSSEPTWLSTNLGILTCIECSGIHREMGVHISRIQSLELDKLGTSELLLAKNVGNNSFNDIMEANLPSPSPKPTPSSDMTVRKEYITAKYVDHRFSRKTCSTSSAKLNELLEAIKSRDLLALIQVYAEGVELMEPLLEPGQELGETALHLAVRTADQTSLHLVDFLVQNCGNLDKQTALGNTVLHYCSMYSKPECLKLLLRSKPTVDIVNQAGETALDIAKRLKATQCEDLLSQAKSGKFNPHVHVEYEWNLRQEEIDESDDDLDDKPSPIKKERSPRPQSFCHSSSISPQDKLALPGFSTPRDKQRLSYGAFTNQIFVSTSTDSPTSPTTEAPPLPPRNAGKGPTGPPSTLPLSTQTSSGSSTLSKKRPPPPPPGHKRTLSDPPSPLPHGPPNKGAVPWGNDGGPSSSSKTTNKFEGLSQQSSTSSAKTALGPRVLPKLPQKVALRKTDHLSLDKATIPPEIFQKSSQLAELPQKPPPGDLPPKPTELAPKPQIGDLPPKPGELPPKPQLGDLPPKPQLSDLPPKPQMKDLPPKPQLGDLLAKSQTGDVSPKAQQPSEVTLKSHPLDLSPNVQSRDAIQKQASEDSNDLTPTLPETPVPLPRKINTGKNKVRRVKTIYDCQADNDDELTFIEGEVIIVTGEEDQEWWIGHIEGQPERKGVFPVSFVHILSD

SEQ ID NO: 18210 - protein, 182 aa, Homo sapiens
MFLLLALLTELGRLQAHEGSEGIFLHVTVPRKIKSNDSEVSERKMIYIITIDGQPYTLHLGKQSFLPQNFLVYTYNETGSLHSVSPYFMMHCHYQGYAAEFPNSFVTLSICSGLRGFLQFENISYGIEPVESSARFEHIIYQMKNNDPNVSILAVNYSHIWQKDQPYKVPLNSQVTVIILML

SEQ ID NO: 18211 - protein, 730 aa, Homo sapiens
QPVKSFPTMARITGPPERDDPYPVLFRYLHSHHFLELVTLLLSIPVTSAHPGVLQATKDVLKFLAQSQKGLLFFMSEYEATNLLIRALCHFYDQDEEEGLQSDGVIDDAFALWLQDSTQTLQCITELFSHFQRCTASEETDHSDLLGTLHNLYLITFNPVGRSAVGHVFSLEKNLQSLITLMEYYSKEALGDSKSKKSVAYNYACILILVVVQSSSDVQMLEQHAASLLKLCKADENNAKLQELGKWLEPLKNLRFEINCIPNLIEYVKQNIDNLMTPEGVGLTTALRVLCNVACPPPPVEGQQKDLKWNLAVIQLFSAEGMDTFIRVLQKLNSILTQPWRLHVNMGTTLHRVTTISMARCTLTLLKTMLTELLRGGSFEFKDMRVPSALVTLHMLLCSIPLSGRLDSDEQKIQNDIIDILLTFTQGVNEKLTISEETLANNTWSLMLKEVLSSILKVPEGFFSGLILLSELLPLPLPMQTTQVIEPHDISVALNTRKLWSMHLHVQAKLLQEIVRSFSGTTCQPIQHMLRRICVQLCDLASPTALLIMRTVLDLIVEDLQSTSEDKEKQYTSQTTRLLALLDALASHKACKLAILHLINGTIKGDERYAEIFQDLLALVRSPGDSVIRQQCVEYVTSILQSLCDQDIALILPSSSEGSISELEQLSNSLPNKELMTSICDCLLATLANSESSYNCLLTCVRTMMFLAEHDYGLFHLKRDAVEMIMVSWK

SEQ ID NO: 18212 - protein, 163 aa, Homo sapiens
ADTLKERYQKIGDTKRATPIEVLCENFPEEMATYLRYVRRLDFFEKPDYDYLRKLFTDLFDRKGYMFDYEYDWIGKQLPTPVGAVQQDPALSSNREAHQHRDKMQQSKNQVVSSTNGELNTDDPTAGRSNAPITAPTEVEVMDETKCCCFFKRRKRKTIQRHK

SEQ ID NO: 18213 - protein, 117 aa, Homo sapiens
MVMEKPSPLLVGREFVRQYYTLLNQAPDMLHRFYGKNSSYVHGGLDSNGKPADAVYGQKEIHRKVMSQNFTNCHTKIRHVDAHATLNDGVVVQVMGLLSNNNQALRRFMQTFVLAPE

SEQ ID NO: 18214 - protein, 1016 aa, Homo sapiens
YDRYLASSKIMAAAYLDPNLNHTPNSSTKTHLGTGMERSPGAMERVLKVFHYFESNSEPTTWASIIRHGDATDVRGIIQKIVDSHKVKHVACYGFRLSHLRSEEVHWLHVDMGVSSVREKYELAHPPEEWKYELRIRYLPKGFLNQFTEDKPTLNFFYQQVKSDYMLEIADQVDQEIALKLGCLEIRRSYWEMRGNALEKKSNYEVLEKDVGLKRFFPKSLLDSVKAKTLRKLIQQTFRQFANLNREESILKFFEILSPVYRFDKECFKCALGSSWIISVELAIGPEEGISYLTDKGCNPTHLADFTQVQTIQYSNSEDKDRKGMLQLKIAGAPEPLTVTAPSLTIAENMADLIDGYCRLVNGTSQSFIIRPQKEGERALPSIPKLANSEKQGMRTHAVSVSETDDYAEIIDEEDTYTMPSTRDYEIQRERIELGRCIGEGQFGDVHQGIYMSPENPALAVAIKTCKNCTSDSVREKFLQEALTMRQFDHPHIVKLIGVITENPVWIIMELCTLGELRSFLQVRKYSLDLASLILYAYQLSTALAYLESKRFVHRDIAARNVLVSSNDCVKLGDFGLSRYMEDSTYYKASKGKLPIKWMAPESINFRRFTSASDVWMFGVCMWEILMHGVKPFQGVKNNDVIGRIENGERLPMPPNCPPTLYSLMTKCWAYDPSRRPRFTELKAQLSTILEEEKAQQEERMRMESRRQATVSWDSGGSDEAPPKPSRPGYPSPRSSEGFYPSPQHMVQTNHYQDSTVLDLRGIGQVLPTHLMEERLIRQQQEMEEDQRWLEKEERFLKPDVRLSRGSIDREDGSLQGPIGNQHIYQPVGKPDPAAPPKKPPRPGAPGHLGSLASLSSPADSYNEGVKLQPQEISPPPTANLDRSNDKVYENVTGLVKAVIEMSSKIQPAPPEEYVPMVKEVGLALRTLLATVDETIPLLPASTHREIEMAQKLLNSDLGELINKMKLAQQYVMTSLQQEYKKQMLTAAHALAVDAKNLLDVIDQARLKMLGQTRPH

SEQ ID NO: 18215 - protein, 998 aa, Homo sapiens
METRAAENTAIFMCKCCNLFSPNQSELLSHVSEKHMEEGVNVDEIIIPLRPLSTPEPPNSSKTGDEFLVMKRKRGRPKGSTKKSSTEEELAENIVSPTEDSPLAPEEGNSLPPSSLECSKCCRKFSNTRQLRKHICIIVLNLGEEEGEAGNESDLELEKKCKEDDREKASKRPRSQKTEKVQKISGKEARQLSGAKKPIISVVLTAHEAIPGATKIVPVEAGPPETGATNSETTSADLVPRRGYQEYAIQQTPYEQPMKSSRLGPTQLKIFTCEYCNKVFKFKHSLQAHLRIHTNEKPYKCPQCSYASAIKANLNVHLRKHTGEKFACDYCSFTCLSKGHLKVHIERVHKKIKQHCRFCKKKYSDVKNLIKHIRDAHDPQDKKVKEALDELCLMTREGKRQLLYDCHICERKFKNELDRDRHMLVHGDKWPFACELCGHGATKYQALELHVRKHPFVYVCAVCRKKFVSSIRLRTHIKEVHGAAQEALVFTSSINQSFCLLEPGGDIQQEALGDQLQLVEEEFALQGVNALKEEACPGDTQLEEGRKEPEAPGEMPAPAVHLASPQAESTALPPCELETTVVSSSDLHSQEVVSDDFLLKNDTSSAEAHAAPEKPPDMQHRSSVQTQGEVITLLLSKAQSAGSDQESHGAQSPLGEGQNMAVLSAGDPDPSRCLRSNPAEASDLLPPVAGGGDTITHQPDSCKAAPEHRSGITAFMKVLNSLQKKQMNTSLCERIRKVYGDLECEYCGKLFWYQVHFDMHVRTHTREHLYYCSQCHYSSITKNCLKRHVIQKHSNILLKCPTDGCDYSTPDKYKLQAHLKVHTALDKRSYSCPVCEKSFSEDRLIKSHIKTNHPEVSMSTISEVLGRRVQLKGLIGKRAMKCPYCDFYFMKNGSDLQRHIWAHEGVKPFKCSLCEYATRSKSNLKAHMNRHSTEKTHLCDMCGKKFKSKGTLKSHKLLHTADGKQFKCTVCDYTAAQKPQLLRHMEQHVSFKKRSIAL

SEQ ID NO: 18216 - protein, 352 aa, Homo sapiens
MASRKEGTGSTATSSSSTAGAAGKGKGKGGSGDSAVKQVQIDGLVVLKIIKHYQEEGQGTEVVQGVLLGLVVEDRLEITNCFPFPQHTEDDADFDEVQYQMEMMRSLRHVNIDHLHVGWYQSTYYGSFVTRALLDSQFSYQHAIEESVVLIYDPIKTAQGSLSLKAYRLTPKLMEVCKEKDFSPEALKKANITFEYMFEEVPIVIKNSHLINVLMWELEKKSAVADKHELLSLASSNHLGKNLQLLMDRVDEMSQDIVKYNTYMRNTSKQQQQKHQYQQRRQQENMQRQSRGEPPLPEEDLSKLFKPPQPPARMDSLLIAGQINTYCQNIKEFTAQNLGKLFMAQALQEYNN

SEQ ID NO: 18217 - protein, 443 aa, Homo sapiens
MISAEDCEFIQRFEMKRSPEEKQEMLQTEGSQCAKTFINLMTHICKEQTVQYILTMVDDMLQENHQRVSIFFDYARCSKNTAWPYFLPMLNRQDPFTVHMAARIIAKLAAWGKELMEGSDLNYYFNWIKTQLSSQKLRGSGVAVETGTVSSSDSSQYVQCVAGCLQLMLRVNEYRFAWVEADGVNCIMGVLSNKCGFQLQYQMIFSIWLLAFSPQMCEHLRRYNIIPVLSDILQESVKEKVTRIILAAFRNFLEKSTERETRQEYALAMIQCKVLKQLENLEQQKYDDEDISEDIKFLLEKLGESVQDLSSFDEYSSELKSGRLEWSPVHKSEKFWRENAVRLNEKNYELLKILTKLLEVSDDPQVLAVAAHDVGEYVRHYPRGKRVIEQLGGKQLVMNHMHHEDQQVRYNALLAVQKLMVHNWEYLGKQLQSEQPQTAAARS

SEQ ID NO: 18218 - protein, 308 aa, Homo sapiens
MFQTKLRNETWEDLPKMSCTTEIQAAFILSSFVTFFSGLIILLIFRLIWRSVKKWQIIKGTGIILELFTSGTIARSHVRSLHFQGQFRDHIEMLLSAQTFVGQVLVILVFVLSIGSLIIYFINSADPVGSCSSYEDKTIPIDLVFNAFFSFYFGLRFMAADDKIKFWLEMNSIVDIFTIPPTFISYYLKSNWLGLRFLRALRLLELPQILQILRAIKTSNSVKFSKLLSIILSTWFTAAGFIHLVENSGDPWLKGRNSQNISYFESIYLVMATTSTVGFGDVVAKTSLGRTFIMFFTLGSLVKNIFNI

SEQ ID NO: 18219 - protein, 1475 aa, Homo sapiens
MSSAVGPRGPRPPTVPPPMQELPDLSHLTEEERNIIMAVMDRQKEEEEKEEAMLKCVVRDMAKPAACKTPRNAENQPHQPSPRLHQQFESYKEQVRKIGEEARRYQGEHKDDAPTCGICHKTKFADGCGHLCSYCRTKFCARCGGRVSLRSNNEDKVVMWVCNLCRKQQEILTKSGAWFFGSGPQQTSQDGTLSDTATGAGSEVPREKKARLQERSRSQTPLSTAAASSQDAAPPSAPPDRSKGAEPSQQALGPEQKQASSRSRSEPPRERKKTPGLSEQNGKGALKSERKRVPKTSAQPVEGAVEERERKERRESRRLEKGRSQDYPDTPEKRDEGKAADEEKQRKEEDYQTRYRSDPNLARYPVKPPPEEQQMRMHARVSRARHERRHSDVALPRTEAGAALPEGKAGKRAPAAARASPPDSPRAYSAERTAETRAPGAKQLTNHSPPAPRHGPVPAEAPELKAQEPLRKQSRLDPSSAVLMRKAKREKVETMLRNDSLSSDQSESVRPSPPKPHRSKRGGKKRQMSVSSSEEEGVSTPEYTSCEDVELESESVSEKGDLDYYWLDPATWHSRETSPISSHPVTWQPSKEGDRLIGRVILNKRTTMPKDSGALLGLKVVGGKMTDLGRLGAFITKVKKGSLADVVGHLRAGDEVLEWNGKPLPGATNEEVYNIILESKSEPQVEIIVSRPIGDIPRIPESSHPPLESSSSSFESQKMERPSISVISPTSPGALKDAPQVLPGQLSVKLWYDKVGHQLIVNVLQATDLPARVDGRPRNPYVKMYFLPDRSDKSKRRTKTVKKILEPKWNQTFVYSHVHRRDFRERMLEITVWDQPRVQEEESEFLGEILIELETALLDDEPHWYKLQTHDESSLPLPQPSPFMPRRHIHGESSSKKLQRSQRISDSDISDYEVDDGIGVVPPGYRSSARESKSTTLTVPEQQRTTHHRSRSVSPHRGNDQGKPRSRLPNVPLQRSLDEIHPTRRSRSPTRHHDASRSPVDHRTRDVDSQYLSEQDSELLMLPRAKRGRSAECLHTTRMHRQRSPTQSPPADTSFSSRRGRQLPQVPVRSGSIEQASLVVEERTRQMKMKVHRFKQTTGSGSSQELDREQYSKYNIHKDQYRSCDNVSAKSSDSDVSDVSAISRTSSASRLSSTSFMSEQSERPRGRIRRMGTSGRSIMKSTSVSGEMYTLEHNDGSQSDTAVGTVGAGGKKRRSSLSAKVVAIVSRRSRSTSQLSQTESGHKKLKSTIQRSTETGMAAEMRKMVRQPSRESTDGSINSYSSEGNLIFPGVRLGADSQFSDFLDGLGPAQLVGRQTLATPAMGDIQIGMEDKKGQLEVEVIRARSLTQKPGSKSTPAPYVKVYLLENGACIAKKKTRIARKTLDPLYQQSLVFDESPQGKVLQVIVWGDYGRMDHKCFMGVAQILLEELDLSSMVIGWYKLFPPSSLVDPTLTPLTRRASQSSLESSTGPPCIRS

SEQ ID NO: 18220 - protein, 108 aa, Homo sapiens
MSRRRISCKDLGHADCQGWLYKKKEKGSFLSNKWKKFWVILKGSSLYWYSNQMAEKADGFVNLPDFTVERASECKKKHAFKISHPQIKTFYFAAENVQEMNVWLNKLG

SEQ ID NO: 18221 - protein, 491 aa, Homo sapiens
MVARPLHSTEGQPESLGKMFSVQLSLGEQTWESEGSSIKKAQQAVANKALTESTLPKPVQKPPKSNVNNNPGSITPTVELNGLAMKRGEPAIYRPLDPKPFPNYRANYNFRGMYNQRYHCPVPKIFYVQLTVGNNEFFGEGKTRQAARHNAAMKALQALQNEPIPERSPQNGESGKDVDDDKDANKSEISLVFEIALKRNMPVSFEVIKESGPPHMKSFVTRVSVGEFSAEGEGNSKKLSKKRAATTVLQELKKLPPLPVVEKPKLFFKKRPKTIVKAGPEYGQGMNPISRLAQIQQAKKEKEPDYVLLSERGMPRRREFVMQVKVGNEVATGTGPNKKIAKKNAAEAMLLQLGYKASTNLQDQLEKTGENKGWSGPKPGFPEPTNNTPKGILHLSPDVYQEMEASRHKVISGTTLGYLSPKDMNQPSSSFFSISPTSNSSATIARELLMNGTSSTAEAIGLKGSSPTPPCSPVQPSKQLEYLARIQGFQV

SEQ ID NO: 18222 - protein, 937 aa, Homo sapiens
MEKMLAGCFLLILGQIVLLPAEARERSRGRSISRGRHARTHPQTALLESSCENKRADLVFIIDSSRSVNTHDYAKVKEFIVDILQFLDIGPDVTRVGLLQYGSTVKNEFSLKTFKRKSEVERAVKRMRHLSTGTMTGLAIQYALNIAFSEAEGARPLRENVPRVIMIVTDGRPQDSVAEVAAKARDTGILIFAIGVGQVDFNTLKSIGSEPHEDHVFLVANFSQIETLTSVFQKKLCTAHMCSTLEHNCAHFCINIPGSYVCRCKQGYILNSDQTTCRIQDLCAMEDHNCEQLCVNVPGSFVCQCYSGYALAEDGKRCVAVDYCASENHGCEHECVNADGSYLCQCHEGFALNPDKKTCTKIDYCASSNHGCQHECVNTDDSYSCHCLKGFTLNPDKKTCRRINYCALNKPGCEHECVNMEESYYCRCHRGYTLDPNGKTCSRVDHCAQQDHGCEQLCLNTEDSFVCQCSEGFLINEDLKTCSRVDYCLLSDHGCEYSCVNMDRSFACQCPEGHVLRSDGKTCAKLDSCALGDHGCEHSCVSSEDSFVCQCFEGYILREDGKTCRRKDVCQAIDHGCEHICVNSDDSYTCECLEGFRLAEDGKRCRRKDVCKSTHHGCEHICVNNGNSYICKCSEGFVLAEDGRRCKKCTEGPIDLVFVIDGSKSLGEENFEVVKQFVTGIIDSLTISPKAARVGLLQYSTQVHTEFTLRNFNSAKDMKKAVAHMKYMGKGSMTGLALKHMFERSFTQGEGARPLSTRVPRAAIVFTDGRAQDDVSEWASKAKANGITMYAVGVGKAIEEELQEIASEPTNKHLFYAEDFSTMDEISEKLKKGICEALEDSDGRQDSPAGELPKTVQQPTVQHRYLFEEDNLLRSTQKLSHSTKPSGSPLEEKHDQCKCENLIMFQNLANEEVRKLTQRLEEMTQRMEALENRLRYR

SEQ ID NO: 18223 - protein, 359 aa, Homo sapiens
MILANVFCLFFFLGEEFYEASPYEPVTSRLSDIFRLASIFSGTGADPVVSAKSNHCLDAAKACNLNDNCKKLRSSYISICNREISPTERCNRRKCHKALRQFFDRVPSEYTYRMLFCSCQDQACAERRRQTILPSCSYEDKEKPNCLDLRGVCRTDHLCRSRLADFHANCRASYQTVTSCPADNYQACLGSYAGMIGFDMTPNYVDSSPTGIVVSPWCSCRGSGNMEEECEKFLRDFTENPCLRNAIQAFGNGTDVNVSPKGPSFQATQAPRVEKTPSLPDDLSDSTSLGTSVITTCTSVQEQGLKANNSKELSMCFTELTTNIIPGSNKVIKPNSGPSRARPSAALTVLSVLMLKLAL

SEQ ID NO: 18224 - protein, 196 aa, Homo sapiens
MTREFLVMKRKRGRPKGSTKKSSTEEELAENIVSPTEDSPLAPEEGNSLPPSSLECSKCCRKFSNTRQLRKHICIIVLNLGEEEGEAGNESDLELEKKCKEDDREKASKRPRSQKTEKVQKISGKEARQLSGAKKPIISVVLTAHEAIPGATKIVPVEAGPPETGATNSETTSADLVPRRGYQEYAIQQTPYEQPM

SEQ ID NO: 18225 - protein, 101 aa, Homo sapiens
MVVSKMNKDAQMRAAINQKLIETGERERLKELLRAKLIECGWKDQLKAHCKEVIKEKGLEHVTVDDLVAEITPKGRALVPDSVKKELLQRIRTFLAQHASL

SEQ ID NO: 18226 - protein, 932 aa, Homo sapiens
MAAQPRGGDYRGFFLLSILLGTPWEAWAGRILYSVSEETDKGSFVGDIAKDLGLEPRELAERGVRIISRGRTQLFALNQRSGSLVTAGRIDREEICAQSARCLVNFNILMEDKMNLYPIDVEIIDINDNVPRFLTEEINVKIMENTAPGVRFPLSEAGDPDVGTNSLQSYQLSPNRHFSLAVQSGDDETKYPELVLERVLDREEERVHHLVLTASDGGDPPRSSTAHIQVTVVDVNDHTPVFSLPQYQVTVPENVPVGTRLLTVHAIDLDEGVNGEVTYSFRKITPKLPKMFHLNSLTGEISTLEGLDYEETAFYEMEVQAQDGPGSLTKAKVLITVLDVNDNAPEVTMTSLSSSIPEDTPLGTVIALFYLQDRDSGKNGEVTCTIPENLPFKLEKSIDNYYRLVTTKNLDRETLSLYNITLKATDGGTPPLSRETHIFMQVADTNDNPPTFPHSSYSVYIAENNPRGASIFLVTAQDHDSEDNAQITYSLAEDTIQGAPVSSYVSINSDTGVLYALQSFDYEQLRELQLRVTAHDSGDPPLSSNMSLSLFVLDQNDNPPEILYPALPTDGSTGMELAPRSAEPGYLVTKVVAVDKDSGQNAWLSYLLLKASEPGLFAVGLYTGEVRTARALLDRDALKQSLVVAVQDHGQPPLSATVTLTVAVADSIPEVLADLGSLEPSDGPYNYDLTLYLVVAVATVSCVFLAFVLVLLALRLRRWHKSRLLQASEGGLANVPTSHFVGMDGVQAFLQTYSHEVSLTADSRKSHLIFPQPNYVDMLISQESCEKNDSLLTSVDFQECKENLPSIQQAPPNTDWRFSQAQRPGTSGSQNGDDTGTWPNNQFDTEMLQAMILASASEAADGSSTLGGGAGTMGLSARYGPQFTLQHVPDYRQNVYIPGSNATLTNAAGKRDGKAPAGGNGNKKKSGKKEKK

SEQ ID NO: 18227 - protein, 196 aa, Homo sapiens
MLPSVQEASGKLVFSAGRREHLRRGPRCEEISEMGTGKLKAQEINFAWVTTRTLRFAFTKILRPVATLDEVVSFSRWRTVREHGKPTRDPASCGAVSYGNREEAWFEDPAPVQLIVQFLEQASKPSVNEQNQVQPPPDNKRNRILKLLALKVAAHLKWDLDILEKSLSVPVLNMLLNELLCISKVPPGTKHVDMDL

SEQ ID NO: 18228 - protein, 513 aa, Homo sapiens
MMMPVVDPVVREKQLQQELLLIQQQQQIQKQLLIAEFQKQHENLTRQHQAQLQEHIKELLAIKQQQELLEKEQKLEQQRQEQEVERHRREQQLPPLRGKDRGRERAVASTEVKQKLQEFLLSKSATKDTPTNGKNHSVSRHPKLWAAHHTSLDQSSPPLSGTSPSYKYTLPGAQDAKDDFPLRKTESSVSSSSPGSGPSSPNNGPTGSVTENETSVLPPTPHAEQMVSQQRILIHEDSMNLLSLYTSPSLPNITLGLPAVPSQLNASNSLKEKQKCETQTLRQGVPLPGQYGGSIPASSSHPHVTLEGKPPNSSHQALLQHLLLKEQMRQQKLLVAGGVPLHPQSPLATKERISPGIRGTHKLPRHRPLNRTQSAPLPQSTLAQLVIQQQHQQFLEKQKQYQQQIHMNKLLSKSIEQLKQPGSHLEEAEEELQGDQAMQEDRAPSSGNSTRSDSSACVDDTLGQVGAVKVKEEPVDSDEDAQIQEMESGEQAAFMQQVIGKDLAPGFVIKVII

SEQ ID NO: 18229 - protein, 784 aa, Homo sapiens
METKVHLFCQAEENIDLLDDGSNSFATDLSSGTINHKKYIKFSKTIEKEISPEIRSLSPEYKKIFETSIIFCGEEKSSDFSGEKKVGRKSLQVQQHSKRTEIIPPFLKLSKEKVTRKENSLCKLPNQYSVHKTSSPLCTSSAITREKEMLSNLYMTLYDEVTHGYLHSKELSGNHMVDIGDIIFTLNELQEQYEDVSITEGSPLNEITSDRKLSSVAGCYLKYKKKNSLSSKLPEPSISKKLNKKSNQYYSKIMENDDLESKRPKNTWQIRKFLGGVGSSNVGVQEPYSKNGINFKKHSEKGEIHDSKSKPQSLKSSTSLSKSLDKSDISSIPKLQKPAVRKHSSLQKQVSSTEKTAISTLENFCEAISKLQENYIAAEELQSILPSTGINLLDEEFQKIVTDTSRNENGMVELDDFVNALAKERSFPECNALPGVIKAIDKIKDKNVDYEDLNTCLQNFGIYLSKPEFKKITELTEAGETKKVNFKEFIDTMMSNTECFSEKLVLPDAIETLDDLRKETMSVSDLWNTLSSLNSNLKKDEFLAALELVTVDEGDKVQFEEFAKVVRNMRDAARLEELQEVVLAADLLEGDMIAGKNLEDFLRNVGIKSPKEEVEKILQSDFVSEDNMVNIKDCMRALRDTQKFSNYIDFRKEASNLKLPKVNEIKEAANILSHVDNGKIGIPDLEHALKCLNVNLTEEDFNEALNCCNVSDNMEVDLKDFLMKMKESPHFQKSKATQILLATTQILQNDLVDVSDLKTLLMDKDLHTANAILTVMLRHVPEHG

SEQ ID NO: 18230 - protein, 386 aa, Homo sapiens
MLSSFPVVLLETMSHYTDEPRFTIEQIDLLQRLRRTGMTKHEILHALETLDRLDQEHSDKFGRRSSYGGSSYGNSTNNVPASSSTATASTQTQHSGMSPSPSNSYDTSPQPCTTNQNGRENNERLSTSNGKMSPTRYHANSMGQRSYSFEASEEDLDVDDKVEELMRRDSSVIKEEIKAFLANRRISQAVVAQVTGISQSRISHWLLQQGSDLSEQKKRAFYRWYQLEKTNPGATLSMRPAPIPIEDPEWRQTPPPVSATSGTFRLRRGSRFTWRKECLAVMESYFNENQYPDEAKREEIANACNAVIQKPGKKLSDLERVTSLKVYNWFANRRKEIKRRANIAAILESHGIDVQSPGGHSNSDDVDGNDYSEQTDRMQAEVVAQE

SEQ ID NO: 18231 - protein, 668 aa, Homo sapiens
MVAERTHKAAATGARGPGELGAPGTVALVAARAERGARLPSPGSCGLLTLALCSLALSLLAHFRTAELQARVLRLEAERGEQQMETAILGRVNQLLDEKWKLHSRRRREAPKTSPGCNCPPGPPGPTGRPGLPGDKGAIGMPGRVGSPGDAGLSIIGPRGPPGQPGTRGFPGFPGPIGLDGKPGHPGPKGDMGLTGPPGQPGPQGQKGEKGQCGEYPHRECLSSMPAALRSSQIIALKGEQSQASIQGPPGPPGPPGPSGPLGHPGLPGPMGPPGLPGPPGPKGDPGIQGYHGRKGERGMPGMPGKHGAKGAPGIAVAGMKGEPGIPGTKGEKGAEGSPGLPGLLGQKGEKGDAGNSIGGGRGEPGPPGLPGPPGPKGEAGVDGQVGPPGQPGDKGERGAAGEQGPDGPKGSKGEPGKGEMVDYNGNINEALQEIRTLALMGPPGLPGQIGPPGAPGIPGQKGEIGLPGPPGHDGEKGPRGKPGDMGPPGPQGPPGKDGPPGVKGENGHPGSPGEKGEKGETGQAGSPVPGLPGPEGPPGPPGLQGVPGPKGEAGLDGAKGEKGFQGEKGDRGPLGLPGTPGPIGVPGPAGPKGERGSKGDPGMTGPTGAAGLPGLHGPPGDKGNRGERGKKGSRGPKGDKGDQGAPGLDAPCPLGEDGLPVQGCWNK

SEQ ID NO: 18232 - protein, 280 aa, Homo sapiens
MTGKTQTSNVTNKNDPKSINSRVFIGNLNTAIVKKVDIEAIFSKYGKIVGCSVHKGYAFVQYMSERHARAAVAGENARVIAGQPLDINMAGEPKPYRPKPGNKRPLSALYSGYVFDYDYYRDDFYNRLFDYHGRVPPPPRAVIPLKRPRVAVTTTRRGKGVFSMKGGSRSTASGSTGSKLKSDELQTIKKELTQIKTKIDSLLGRLEKIEKQQKAEAEAQKKQLEESLVLIQEECVSEIADHSTEEPAEGGPDADGEEMTDGIEEDFDEDGGHELFLQIK

SEQ ID NO: 18233 - protein, 120 aa, Homo sapiens
MISVKRNTWRALSLVIGDCRKKGNFEYCQDRTEKHSTMPDSPVDVKTQSRLTPPTMPPPPTTQGAPRTSSFTPTTLTNGTSHSPTALNGAPSPPNGFSNGPSSSSSSSLANQQLPPACGA

SEQ ID NO: 18234 - protein, 581 aa, Homo sapiens
MSGQTLTDRIAAAQYSVTGSAVARAVCKATTHEVMGPKKKHLDYLIQATNETNVNIPQMADTLFERATNSSWVVVFKALVTTHHLMVHGNERFIQYLASRNTLFNLSNFLDKSGSHGYDMSTFIRRYSRYLNEKAFSYRQMAFDFARVKKGADGVMRTMAPEKLLKSMPILQGQIDALLEFDVHPNELTNGVINAAFMLLFKDLIKLFACYNDGVINLLEKFFEMKKGQCKDALEIYKRFLTRMTRVSEFLKVAEQVGIDKGDIPDLTQAPSSLMETLEQHLNTLEGKKPGNKSGAPSPLSKSSPATTVTSPNSTPAKTIDTSPPVDLFATASAAVPVSTSKPSSDLLDLQPDFSSGGAAAAAAPAPPPPAGGATAWGDLFESTPEVAAAPKPDAAPSIDLFSTDAFSSPPQGASPVPESSLTADLLSVDAFAAPSPATTASPAKVDSSGVIDLFGDAFGSSASEPQPASQAASSSSASADLLAGFGGSFMAPSPSPVTPAQNNLLQPNFEAAFGTTPSTSSSSSFDPSVFDGLGDLLMPTMAPAGQPAPVSMVPPSPAMAASKALGSDLDSSLASLVGNL

SEQ ID NO: 18235 - protein, 436 aa, Homo sapiens
MPMSSLPAAILSHMTAINNVPPPPLHSIPNLKKSKHINYGQLNALCHIRGQHSRSMSNILSAHDTFMKQYPKVFLHQKPRLPKLFKQEEQRELNEGKEESQHQQPDDSNNIAVHVQRAHGGHILYRPKRATEKFEEFLAILKKLPIHRTPYEHKTVWKFLKTIPDLTFQLNDKHLKTLSKTVFSETWLKGSTVVANDGFYVILKGLARPQTNVYKNLIEGSDSPDSFISQSFHSFIWSEEFKNSTLAEMYLPSYDSMLSKWSTFGTLEVMPQNESETQMFSVVTEDDCEILKIPAKGYAKIKEEKIKLENMQKLKLIRMCPYYEEWPTLSIYELIALLKWKKFPPGHVIVESGNIISFVGYINSGCCNIYRSIIGFVKLRSNKVKRSQKLVYMGKLKEKESFGEISVLLQVPFTCTIITKKEVEMAIIEDKDLFVA

SEQ ID NO: 18236 - protein, 780 aa, Homo sapiens
MNVRIFYSVSQSPHSLLSLLFYCAILESRISATMPLFKLPAEEKQIDDAMRNFAEKVFASEVKDEGGRQEISPFDVDEICPISHHEMQAHIFHLETLSTSTEARRKKRFQGRKTVNLSIPLSETSSTKLSHIDEYISSSPTYQTVPDFQRVQITGDYASGVTVEDFEIVCKGLYRALCIREKYMQKSFQRFPKTPSKYLRNIDGEAWVANESFYPVFTPPVKKGEDPFRTDNLPENLGYHLKMKDGVVYVYPNEAAVSKDEPKPLPYPNLDTFLDDMNFLLALIAQGPVKTYTHRRLKFLSSKFQVHQMLNEMDELKELKNNPHRDFYNCRKVDTHIHAAACMNQKHLLRFIKKSYQIDADRVVYSTKEKNLTLKELFAKLKMHPYDLTVDSLDVHAGRQTFQRFDKFNDKYNPVGASELRDLYLKTDNYINGEYFATIIKEVGADLVEAKYQHAEPRLSIYGRSPDEWSKLSSWFVCNRIHCPNMTWMIQVPRIYDVFRSKNFLPHFGKMLENIFMPVFEATINPQADPELSVFLKHITGFDSVDDESKHSGHMFSSKSPKPQEWTLEKNPSYTYYAYYMYANIMVLNSLRKERGMNTFLFRPHCGEAGALTHLMTAFMIADDISHGLNLKKSPVLQYLFFLAQIPIAMSPLSNNSLFLEYAKNPFLDFLQKGLMISLSTDDPMQFHFTKEPLMEEYAIAAQVFKLSTCDMCEVARNSVLQCGISHEEKVKFLGDNYLEEGPAGNDIRRTNVAQIRMAYRYETWCYELNLIAEGLKSTE

SEQ ID NO: 18237 - protein, 217 aa, Homo sapiens
MLQGLLPVSLLLSVAVSAIKELPGVKKYEVVYPIRLHPLHKREAKEPEQQEQFETELKYKMTINGKIAVLYLKKNKNLLAPGYTETYYNSTGKEITTSPQIMDDCYYQGHILNEKVSDASISTCRGLRGYFSQGDQRYFIEPLSPIHRDGQEHALFKYNPDEKNYDSTCGMDGVLWAHDLQQNIALPATKLVKLKDRKVQEHEKYIEYYLVLDNGEF

SEQ ID NO: 18238 - protein, 451 aa, Homo sapiens
EPSSVAWSEARSRALELPSDREVLHPFVRRHALHRNSLEGGHTESNTSLPSGIQASLTSISSLPFEEDEREVALTKLTKSVSAPHISSPEEAAEDADTKQQDGGFAEPSDMHSKSQGSPGSCSQLCGDSGTDAGADHPLVEIVLDADNQQGPGYIDIPKGKGKQFDAQGHCLPDGRTENTPGVETKGLNLKIPRVIALENPRTRSLHRALEETPKGMPKDLNVGQQALSNSGISEVEGLSQHQVPELSCTSAADAINRNSTGQQSQSGSPCIMDDTAFNRGVNAFPEAKHKAGTVCPTVTHSVHSQVLKNQELKAGTSIMGSHLTSAETFTLDSLKAVEVVNLSVSCTATCLPFSSVPKETPARAGFSSKQTLFPITHQPLGSFGVVSTHSSTLDEEVSERMFRGRGRKFGRWNSPGCLCPWPGWEQCRPPAGKDFHRTGAPWRKTGLPNV

SEQ ID NO: 18239 - protein, 582 aa, Homo sapiens
MVAERTHKAAATGARGPGELGAPGTVALVAARAERGARLPSPGSCGLLTLALCSLALSLLAHFRTAELQARVLRLEAERGEQQMETAILGRVNQLLDEKWKLHSRRRREAPKTSPGCNCPPGPPGPTGRPGLPGDKGAIGMPGRVGVKGQPGEKGSPGDAGLSIIGPRGPPGQPGTRGFPGFPGPIGLDGKPGHPGPKGDMGLTGPPGQPGPQGQKGEKGQCGEYPHRECLSSMPAALRSSQIIALKLLPLLNSVRLAPPPVIKRRTFQGEQSQASIQGPPGPPGPPGPSGPLGHPGLPGPMGPPGLPGPPGPKGDPGIQGYHGRKGERGMPGMPGKHGAKGAPGIAVAGMKGEPGIPGTKGEKGAEGSPGLPGLLGQKGEKGDAGNSIGGGRGEPGPPGLPGPPGPKGEAGVDGQVGPPGQPGDKGERGAAGEQGPDGPKGSKGEPGKGEMVDYNGNINEALQEIRTLALMGPPGLPGQIGPPGAPGIPGQKGEIGLPGPPGHDGEKGPRGKPGDMGPPGPQGPPGKDGPPGVKGENGHPGSPGEKGEKGETGQAGSPGLDGPTGERRTWWPEQTQSGRIA

SEQ ID NO: 18240 - protein, 876 aa, Homo sapiens
MDERFRYESDFDRRLSRVYTNDRMHRNKRGNMPPMEHDGDVIEQSNIRISSAENKSAPDNETSKSANQDTCSPFAGMLFGGEDRELIQRRKEKYRLELLEQMAEQQRNKRREKDLELRVAASGAQDPEKSPDRLKQFSVAPRHFEEMIPPERPRIAFQTPLPPLSAPSVPPIPSVHPVPSQNEDLRSGLSSALGEMVSPRIAPLPPPPLLPPLATNYRTPYDDAYYFYGSRNTFDPSLAYYGSGMMGVQPAAYVSAPVTHQLAQPVVNTVGQNELKITSDQVINSGLIFEDKPKPSKQSLQSYQEALQQQIREREERRKKEREEKEEYEAKLEAEMRTYNPWGKGGGGAPLRDAKGNLISHMQTQSSPFARGNVFGEPPTELQIKQQELYKNFLRFQIEEKKQREEAERERLRIAEEKEERRLAEQRARIQQEYEEEQEKKREKEEEQRLKNEEHIRLAEERQKEAERKKKEEEEKYNLQLQHYCERDNLIGEETKHMRQPSPIVPALQNKIASKLQRPPSVDSIIRSFIHESSMSRAQSPPVPARKNQLRAEEEKKNVIMELSEMRKQLRSEERRLQERLLHMDSDDEIPIRKKERNPMDIFDMARHRLQAPVRRQSPKGLDAATFQNVHDFNELKDRDSETRVDLKFMYLDPPRDHHTLEIQQQALLREQQKRLNRIKMQEGAKVDLDAIPSAKVREQRMPRDDTSDFLKNSLLESDSAFIGAYGETYPAIEDDVLPPPSQLPSARERRRNKWKGLDIDSSRPNVAPDGLSLKSISSVNVDELRVRNEERMRRLNEFHNKPINTDDESSLVDPDDIMKHIGDDGSNSVATEPWLRPGTSETLKRFMAEQLNQEQQQIPGKPGTFTWQGLSTAHG

SEQ ID NO: 18241 - protein, 389 aa, Homo sapiens
MDSSAAPTNASNCTDALAYSSCSPAPSPGSWVNLSHLDGNLSDPCGPNRTDLGGRDSLCPPTGSPSMITAITIMALYSIVCVVGLFGNFLVMYVIVRYTKMKTATNIYIFNLALADALATSTLPFQSVNYLMGTWPFGTILCKIVISIDYYNMFTSIFTLCTMSVDRYIAVCHPVKALDFRTPRNAKIINVCNWILSSAIGLPVMFMATTKYRQGSIDCTLTFSHPTWYWENLLKICVFIFAFIMPVLIITVCYGLMILRLKSVRMLSGSKEKDRNLRRITRMVLVVVAVFIVCWTPIHIYVIIKALVTIPETTFQTVSWHFCIALGYTNSCLNPVLYAFLDENFKRCFREFCIPTSSNIEQQNSTRIRQNTRDHPSTANTVDRTNHQS

SEQ ID NO: 18242 - protein, 361 aa, Homo sapiens
MHGDYTLTLRKGGNNKLIKIFHRDGKYGFSDPLTFSSVVELINHYRNESLAQYNPKLDVKLLYPVSKYQQDQVVKEDNIEAVGKKLHEYNTQFQEKSREYDRLYEEYTRTSQEIQMKRTAIEAFNETIKIFEEQCQTQERYSKEYIEKFKREGNEKEIQRIMHNYDKLKSRISEIIDSRRRLEEDLKKQAAEYREIDKRMNSIKPDLIQLRKTRDQYLMWLTQKGVRQKKLNEWLGNENTEDQYSLVEDDEDLPHHDEKTWNVGSSNRNKAENLLRGKRDGTFLVRESSKQGCYACSVVVDGEVKHCVINKTATGYGFAEPYNLYSSLKELVLHYQHTSLVQHNDSLNVTLAYPVYAQQRR

SEQ ID NO: 18243 - protein, 1481 aa, Homo sapiens
MSSAVGPRGPRPPTVPPPMQELPDLSHLTEEERNIIMAVMDRQKEEEEKEEAMLKCVVRDMAKPAACKTPRNAENQPHQPSPRLHQQFESYKEQVRKIGEEARRYQGEHKDDAPTCGICHKTKFADGCGHLCSYCRTKFCARCGGRVSLRSNNEDKVVMWVCNLCRKQQEILTKSGAWFFGSGPQQTSQDGTLSDTATGAGSEVPREKKARLQERSRSQTPLSTAAASSQDAAPPSAPPDRSKGAEPSQQALGPEQKQASSRSRSEPPRERKKTPGLSEQNGKGALKSERKRVPKTSAQPVEGAVEERERKERRESRRLEKGRSQDYPDTPEKRDEGKAADEEKQRKEEDYQTRYRSDPNLARYPVKPPPEEQQMRMHARVSRARHERRHSDVALPRTEAGAALPEGKAGKRAPAAARASPPDSPRAYSAERTAETRAPGAKQLTNHSPPAPRHGPVPAEAPELKAQEPLRKQSRLDPSSAVLMRKAKREKVETMLRNDSLSSDQSESVRPSPPKPHRSKRGGKKRQMSVSSSEEEGVSTPEYTSCEDVELESESVSEKGDLDYYWLDPATWHSRETSPISSHPVTWQPSKEGDRLIGRVILNKRTTMPKDSGALLGLKVVGGKMTDLGRLGAFITKVKKGSLADVVGHLRAGDEVLEWNGKPLPGATNEEVYNIILESKSEPQVEIIVSRPIGDIPRIPESSHPPLESSSSSFESQKMERPSISVISPTSPGALKDAPQVLPGQLSVKLWYDKVGHQLIVNVLQATDLPARVDGRPRNPYVKMYFLPDRSDKSKRRTKTVKKILEPKWNQTFVYSHVHRRDFRERMLEITVWDQPRVQEEESEFLGEILIELETALLDDEPHWYKLQTHDESSLPLPQPSPFMPRRHIHGESSSKKLQRSQRISDSDISDYEVDDGIGVVPPVGYRSSARESKSTTLTVPEQQRTTHHRSRSVSPHRGNDQGKPRSRLPNVPLQRSLDEIHPTRRSRSPTRHHDASRSPVDHRTRDVDSQYLSEQDSELLMLPRAKRGRSAECLHTTSELQPFLDRARSASTNCLRPDTSLHSPERERMHRQRSPTQSPPADTSFSSRRGRQLPQVPVRSGSIEQASLVVEERTRQMKMKVHRFKQTTGSGSSQELDREQYSKYNIHKDQYRSCDNVSAKSSDSDVSDVSAISRTSSASRLSSTSFMSEQSERPRGRISSFTPKMQGRRMGTSGRSIMKSTSVSGEMYTLEHNDGSQSDTAVGTVGAGGKKRRSSLSAKVVAIVSRRSRSTSQLSQTESGHKKLKSTIQRSTETGMAAEMRKMVRQPSRESTDGSINSYSSEGNLIFPGVRLGADSQFSDFLDGLGPAQLVGRQTLATPAMAPYVKVYLLENGACIAKKKTRIARKTLDPLYQQSLVFDESPQGKVLQVIVWGDYGRMDHKCFMGVAQILLEELDLSSMVIGWYKLFPPSSLVDPTLTPLTRRASQSSLESSTGPPCIRS

SEQ ID NO: 18244 - protein, 443 aa, Homo sapiens
MLSSFPVVLLETMSHYTDEPRFTIEQIDLLQRLRRTGMTKHEILHALETLDRLDQEHSDKFGRRSSYGGSSYGNSTNNVPASSSTATASTQTQHSGMSPSPSNSYDTSPQPCTTNQNGRENNERLSTSNGKMSPTRYHANSMGQRSYSFEASEEDLDVDDKVEELMRRDSSVIKEEIKAFLANRRISQAVVAQVTGISQSRISHWLLQQGSDLSEQKKRAFYRWYQLEKTNPGATLSMRPAPIPIEDPEWRQTPPPVSATSGTFRLRRGSRFTWRKECLAVMESYFNENQYPDEAKREEIANACNAVIQKPGKKLSDLERVTSLKVYNWFANRRKEIKRRANIAAILESHGIDVQSPGGHSNSDDVDGNDYSEQDTWQVRNGEEEEGRSSEGGREAEKDDSTSHSDHQDPISLAVEMAAVNHTILALARQGANEIKTEALDDD

SEQ ID NO: 18245 - protein, 501 aa, Homo sapiens
FFDLRKEFKKCCPGSPDIDKLDVATMTEYLNFEKSSSVSRYGASQVEDMGNIILAMISEPYNHRFSDPERVNYKFESGTCSKMELIDDNTVVRARGLPWQSSDQDIARFFKGLNIAKGGAALCLNAQGRRNGEALVRFVSEEHRDLALQRHKHHMGTRYIEVYKATGEDFLKIAGGTSNEVAQFLSKENQVIVRMRGLPFTATAEEVVAFFGQHCPITGGKEGILFVTYPDGRPTGDAFVLFACEEYAQNALRKHKDLLGKRYIELFRSTAAEVQQVLNRFSSAPLIPLPTPPIIPVLPQQFVPPTNVRDCIRLRGLPYAATIEDILDFLGEFATDIRTHGVHMVLNHQGRPSGDAFIQMKSADRAFMAAQKCHKKNMKDRYVEVFQCSAEEMNFVLMGGTLNRNGLSPPPCKLPCLSPPSYTFPAPAAVIPTEAAIYQPSVILNPRALQPSTAYYPAGTQLFMNYTAYYPSMQPRMDLYTQMTRPGLYPKNGFVFKGPSS

SEQ ID NO: 18246 - protein, 420 aa, Homo sapiens
MSERKEGRGKGKGKKKERGSGKKPESAAGSQSPALPPRLKEMKSQESAAGSKLVLRCETSSEYSSLRFKWFKNGNELNRKNKPQNIKIQKKPGKSELRINKASLADSGEYMCKVISKLGNDSASANITIVESNEIITGMPASTEGAYVSSESPIRISVSTEGANTSSSTSTSTTGTSHLVKCAEKEKTFCVNGGECFMVKDLSNPSRYLCKCPNEFTGDRCQNYVMASFYKAEELYQKRVLTITGICIALLVVGIMCVVAYCKTKKQRKKLHDRLRQSLRSERNNMMNIANGPHHPNPPPENVQLVNQYVSKNVISSEHIVEREAETSFSTSHYTSTAHHSTTVTQTPSHSWSNGHTESILSESHSVIVMSSVENSRHSSPTGGPRGRLNGTGGPRECNSFLRHARETPDSYRDSPHSER

SEQ ID NO: 18247 - protein, 117 aa, Homo sapiens
MLFRFSAASSDNTENLIKVIEILISTEWNERQPAPALPPKPPKPTTVANNGMNNNMSLQDAEWYWGDISREEVNEKLRDTADGTFLVRDASTKMHGDYTLTLRKGGNNKLIKIFHRD

SEQ ID NO: 18248 - protein, 304 aa, Homo sapiens
MSKRRRLKQGEPIMTGKTQTSNVTNKNDPKSINSRVFIGNLNTAIVKKVDIEAIFSKYGKIVGCSVHKGYAFVQYMSERHARAAVAGENARVIAGQPLDINMAGEPKPYRPKPGNKRPLSALYRLESKEPFLSVGGYVFDYDYYRDDFYNRLFDYHGRVPPPPRAVIPLKRPRVAVTTTRRGKGVFSMKGGSRSTASGSTGSKLKSDELQTIKKELTQIKTKIDSLLGRLEKIEKQQKAEAEAQKKQLEESLVLIQEECVSEIADHSTEEPAEGGPDADGEEMTDGIEEDFDEDGGHELFLQIK

SEQ ID NO: 18249 - protein, 581 aa, Homo sapiens
MPFTLHLRSRLPSAIRSLILQKKPNIRNTSSMAGELRPASLVVLPRSLAPAFERFCQVNTGPLPLLGQSEPEKWMLPPQGAISETRMGHPQFWKYEFGACTGSLASLEQYSEQLKDMVAFFLGCSFSLEEALEKAGLPRRDPAGHSQAGAYKTTVPCVTHAGFCCPLVVTMRPIPKDKLEGLVRACCSLGGEQGQPVHMGDPELLGIKELSKPAYGDAMVCPPGEVPVFWPSPLTSLGAVSSCETPLAFASIPGCTVMTDLKDAKAPPGCLTPERIPEVHHISQDPLHYSIASVSASQKIRELESMIGIDPGNRGIGHLLCKDELLKASLSLSHARSVLITTGFPTHFNHEPPEETDGPPGAVALVAFLQALEKEVAIIVDQRAWNLHQKIVEDAVEQGVLKTQIPILTYQGGSVEAAQAFLCKNGDPQTPRFDHLVAIERAGRAADGNYYNARKMNIKHLVDPIDDLFLAAKKIPGISSTGVSNWGGYALACALYILYSCAVHSQYLRKAVGPSRAPGDQAWTQALPSVIKEEKMLGILVQHKVRSGVSGIVGMEVDGLPFHNTHAEMIQKLVDVTTAQV

SEQ ID NO: 18250 - protein, 296 aa, Homo sapiens
MQPISEEEAIQIIADPPLPPASFTLRDYVDHSETLQKLVLLGVDLSKIEKHPEAANLLLRLDFEKDIKQMLLFLKDVGIEDNQLGAFLTKNHAIFSEDLENLKTRVAYLHSKNFSKADVAQMVRKAPFLLNFSVERLDNRLGFFQKELELSVKKTRDLVVRLPRLLTGSLEPVKENMKVYRLELGFKHNEIQHMITRIPKMLTANKMKLTETFDFVHNVMSIPHHIIVKFPQVFNTRLFKVKERHLFLTYLGRAQYDPAKPNYISLDKLVSIPDEIFCEEIAKASVQDFEKFLKTL

SEQ ID NO: 18251 - protein, 181 aa, Homo sapiens
AAAASISEHPQKATTELPLLRAALKETLRKGAESTGSPIQLRTLSMDAPTSRLYPVGLFLERVASSDLVLQNYHIPAGTLVRVFLYSLGRNPALFPRPERYNPQRWLDIRGSGRNFYHVPFGFGMRQCLGRRLAEAEMLLLLHHVLKHLQVETLTQEDIKMVYSFILRPSMFPLLTFRAIN

SEQ ID NO: 18252 - protein, 946 aa, Homo sapiens
MSGMGENTSDPSRAETRKRKECPDQLGPSPKRNTEKRNREQENKYIEELAELIFANFNDIDNFNFKPDKCAILKETVKQIRQIKEQEKAAAANIDEVQKSDVSSTGQGVIDKDALGPMMLEALDGFFFVVNLEGNVVFVSENVTQYLRYNQEELMNKSVYSILHVGDHTEFVKNLLPKSIVNGGSWSGEPPRRNSHTFNCRMLVKPLPDSEEEGHDNQEAHQKYETMQCFAVSQPKSIKEEGEDLQSCLICVARRVPMKERPVLPSSESFTTRQDLQGKITSLDTSTMRAAMKPGWEDLVRRCIQKFHAQHEGESVSYAKRHHHEVLRQGLAFSQIYRFSLSDGTLVAAQTKSKLIRSQTTNEPQLVISLHMLHREQNVCVMNPDLTGQTMGKPLNPISSNSPAHQALCSGNPGQDMTLSSNINFPINGPKEQMGMPMGRFGGSGGMNHVSGMQATTPQGSNYALKMNSPSQSSPGMNPGQPTSMLSPRHRMSPGVAGSPRIPPSQFSPAGSLHSPVGVCSSTGNSHSYTNSSLNALQALSEGHGVSLGSSLASPDLKMGNLQNSPVNMNPPPLSKMGSLDSKDCFGLYGEPSEGTTGQAESSCHPGEQKETNDPNLPPAVSSERADGQSRLHDSKGQTKLLQLLTTKSDQMEPSPLASSLSDTNKDSTGSLPGSGSTHGTSLKEKHKILHRLLQDSSSPVDLAKLTAEATGKDLSQESSSTAPGSEVTIKQEPVSPKKKENALLRYLLDKDDTKDIGLPEITPKLERLDSKTDPASNTKLIAMKTEKEEMSFEPGDQPGSELDNLEEILDDLQNSQLPQLFPDTRPGAPAGSVDKQAIINDLMQLTAENSPVTPVGAQKTALRISQSRMIGNSASRPTMPSGEWAPQSSAVRVTCAATTSAMNRPVQGGMIRNPAASIPMRPSSQPGQRQTLQSQVMNIGKGHLN

SEQ ID NO: 18253 - protein, 407 aa, Homo sapiens
MFSVFEEITRIVVKEMDAGGDMIAVRSLVDADRFRCFHLVGEKRTFFGCRHYTTGLTLMDILDTDGDKWLDELDSGLQGQKAEFQILDNVDSTGELIVRLPKEITISGSFQGFHHQKIKISENRISQQYLATLENRKLKRELPFSFRSINTRENLYLVTETLETVKEETLKSDRQYKFWSQISQGHLSYKHKGQREVTIPPNRVLSYRVKQLVFPNKETMNIHFRGKTKSFPEGKSLGSEDSRNMKEKLEDMESVLKDLTEEKRKDVLNSLAKCLGKEDIRQDLEQRVSEVLISGELHMEDPDKPLLSSLFNAAGVLVEARAKAILDFLDALLELSEEQQFVAEALEKGTLPLLKDQVKSVMEQNWDELASSPPDMDYDPEARILCALYVVVSILLELAEGPTSVSS

SEQ ID NO: 18254 - protein, 610 aa, Homo sapiens
MVAERTHKAAATGARGPGELGAPGTVALVAARAERGARLPSPGSCGLLTLALCSLALSLLAHFRTAELQARVLRLEAERGEQQMETAILGRVNQLLDEKWKLHSRRRREAPKTSPGCNCPPGPPGPTGRPGLPGQPGTRGFPGFPGPIGLDGKPGHPGPKGDMGLTGPPGQPGPQGQKGEKGQCGEYPHRECLSSMPAALRSSQIIALKGEQSQASIQGPPGPPGPPGPSGPLGHPGLPGPMGPPGLPGPPGPKGDPGIQGYHGRKGERGMPGMPGKHGAKGAPGIAVAGMKGEPGIPGTKGEKGAEGSPGLPGLLGQKGEKGDAGNSIGGGRGEPGPPGLPGPPGPKGEAGVDGQVGPPGQPGDKGERGAAGEQGPDGPKGSKGEPGKGEMVDYNGNINEALQEIRTLALMGPPGLPGQIGPPGAPGIPGQKGEIGLPGPPGHDGEKGPRGKPGDMGPPGPQGPPGKDGPPGVKGENGHPGSPGEKGEKGETGQAGSPVPGLPGPEGPPGPPGLQGVPGPKGEAGLDGAKGEKGFQGEKGDRGPLGLPGTPGPIGVPGPAGPKGERGSKGDPGMTGPTGAAGLPGLHGPPGDKGNRGEDGLPVQGCWNK

SEQ ID NO: 18255 - protein, 1039 aa, Homo sapiens
IKHGVMVDATTRMGYTPLHVASHYGNIKLVKFLLQHQADVNAKTKLGYSPLHQAAQQGHTDIVTLLLKNGASPNEVSSDGTTPLAIAKRLGYISVTDVLKVVTDETSFVLVSDKHRMSFPETVDEILDVSEDEGTAHITIMGEELISFKAERRDSRDVDEEKELLDFVPKLDQVVESPAIPRIPCAMPETVVIRSEEQEQASKEYDEDSLIPSSPATETSDNISPVASPVHTGFLVSFMVDARGGSMRGSRHNGLRVVIPPRTCAAPTRITCRLVKPQKLSTPPPLAEEEGLASRIIALGPTGAQFLSPVIVEIPHFASHGRGDRELVVLRSENGSVWKEHRSRYGESYLDQILNGMDEELGSLEELEKKRVCRIITTDFPLYFVIMSRLCQDYDTIGPEGGSLKSKLVPLVQATFPENAVTKRVKLALQAQPVPDELVTKLLGNQATFSPIVTVEPRRRKFHRPIGLRIPLPPSWTDNPRDSGEGDTTSLRLLCSVIGGTDQAQWEDITGTTKLVYANECANFTTNVSARFWLSDCPRTAEAVNFATLLYKELTAVPYMAKFVIFAKMNDPREGRLRCYCMTDDKVDKTLEQHENFVEVARSRDIEVLEGMSLFAELSGNLVPVKKAAQQRSFHFQSFRENRLAMPVKVRDSSREPGGSLSFLRKAMKYEDTQHILCHLNITMPPCAKGSGAEDRRRTPTPLALRYSILSESTPGSLSGTEQAEMKMAVISEHLGLSWAELARELQFSVEDINRIRVENPNSLLEQSVALLNLWVIREGQNANMENLYTALQSIDRGEIVNMLEGSGRQSRNLKPDRRHTDRDYSLSPSQMNGHQRGQARITHSPTVSQVTERSQDRLQDWDADGSIVSYLQDAAQGSWQEEVTQGPHSFQGTSTMTEGLEPGGSQEYEKVLVSVSEHTWTEQPEAESSQADRDRRQQGQEEQVQEAKNTFTQVVQGNEFQNIPGEQVTEEQFTDEQGNIVTKKIIRKVVRQIDLSSADAAQEHEEVELRGSGLQPDLIEGRKGAQIVKRASLKRGKQ

SEQ ID NO: 18256 - protein, 702 aa, Homo sapiens
MWGRLWPLLLSILTATAVPGPSLRRPSRELDATPRMTIPYEELSGTRHFKGQAQNYSTLLLEEASARLLVGARGALFSLSANDIGDGAHKEIHWEASPEMQSKCHQKGKNNQTECFNHVRFLQRLNSTHLYACGTHAFQPLCAAIDAEAFTLPTSFEEGKEKCPYDPARGFTGLIIDGGLYTATRYEFRSIPDIRRSRHPHSLRTEETPMHWLNDAEFVFSVLVRESKASAVGDDDKVYYFFTERATEEGSGSFTQSRSSHRVARVARVCKGDLGGKKILQKKWTSFLKARLICHIPLYETLRGVCSLDAETSSRTHFYAAFTLSTQWKTLEASAICRYDLAEIQAVFAGPYMEYQDGSRRWGRYEGGVPEPRPGSCITDSLRSQGYNSSQDLPSLVLDFVKLHPLMARPVVPTRGRPLLLKRNIRYTHLTGTPVTTPAGPTYDLLFLGTADGWIHKAVVLGSGMHIIEETQVFRESQSVENLVISLLQHSLYVGAPSGVIQLPLSSCSRYRSCYDCILARDPYCGWDPGTHACAAATTIANRSQGSRTALIQDIERGNRGCESSRDTGRALQVHMGSMSPPSAWPCVLDGPETRQDLCQPPKPCVHSHAHMEECLSAGLQCPHPHLLLVHSCFIPASGLGVPSQLPHPIWSSSPAPCGDLFVKSLGTGQPGEVRLHHSPPLPSCVALVNQPPHSPWSFSRV

SEQ ID NO: 18257 - protein, 825 aa, Homo sapiens
MYSGAGPALAPPAPPPPIQGYAFKPPPRPDFGTSGRTIKLQANFFEMDIPKIDIYHYELDIKPEKCPRRVNREIVEHMVQHFKTQIFGDRKPVFDGRKNLYTAMPLPIGRDKVELEVTLPGEGKDRIFKVSIKWVSCVSLQALHDALSGRLPSVPFETIQALDVVMRHLPSMRYTPVGRSFFTASEGCSNPLGGGREVWFGFHQSVRPSLWKMMLNIDVSATAFYKAQPVIEFVCEVLDFKSIEEQQKPLTDSQRVKFTKEIKGLKVEITHCGQMKRKYRVCNVTRRPASHQTFPLQQESGQTVECTVAQYFKDRHKLVLRYPHLPCLQVGQEQKHTYLPLEVCNIVAGQRCIKKLTDNQTSTMIRATARSAPDRQEEISKLMRSASFNTDPYVREFGIMVKDEMTDVTGRVLQPPSILYGGRNKAIATPVQGVWDMRNKQFHTGIEIKVWAIACFAPQRQCTEVHLKSFTEQLRKISRDAGMPIQGQPCFCKYAQGADSVEPMFRHLKNTYAGLQLVVVILPGKTPVYAEVKRVGDTVLGMATQCVQMKNVQRTTPQTLSNLCLKINVKLGGVNNILLPQGRPPVFQQPVIFLGADVTHPPAGDGKKPSIAAVVGSMDAHPNRYCATVRVQQHRQEIIQDLAAMVRELLIQFYKSTRFKPTRIIFYRDGVSEGQFQQVLHHELLAIREACIKLEKDYQPGITFIVVQKRHHTRLFCTDKNERGTSRPSHYHVLWDDNRFSSDELQILTYQLCHTYVRCTRSVSIPAPAYYAHLVAFRARYHLVDKEHDSAEGSHTSGQSNGRDHQALAKAVQVHQDTLRTMYFA

SEQ ID NO: 18258 - protein, 169 aa, Homo sapiens
MISVKRNTWRALSLVIGDCRKKGNFEYCQDRTEKHSTMPDSPVDVKTQSRLTPPTMPPPPTTQGAPRTSSFTPTTLTNGTSHSPTALNGAPSPPNGFSNGPSSSSSSSLANQQLPPACGARQLSKLKRFLTTLQQFGNDISPEIGERVRTLVLGLVNSTLTIEEFHSKL

SEQ ID NO: 18259 - protein, 134 aa, Homo sapiens
MKSHPRKKAKWEKEKHEDGVKWRQLEHKGPYFAPPYEPLPDGVRFFYEGRPVRLSVAAEEVATFYGRMLDHEYTTKEVFRKNFFNDWRKEMAVEEREVIKSLDKCDFTEIHRYFVDKAAARKVLSREEKQKLKE

SEQ ID NO: 18260 - protein, 915 aa, Homo sapiens
MEKMLAGCFLLILGQIVLLPAEARERSRGRSISRGRHARTHPQTALLESSCENKRADLVFIIDSSRSVNTHDYAKVKEFIVDILQFLDIGPDVTRVGLLQYGSTVKNEFSLKTFKRKSEVERAVKRMRHLSTGTMTGLAIQYALNIAFSEAEGARPLRENVPRVIMIVTDGRPQDSVAEVAAKARDTGILIFAIGVGQVDFNTLKSIGSEPHEDHVFLVANFSQIETLTSVFQKKLCTAHMCSTLEHNCAHFCINIPGSYVCRCKQGYILNSDQTTCRIQDLCAMEDHNCEQLCVNVPGSFVCQCYSGYALAEDGKRCVAVDYCASENHGCEHECVNADGSYLCQCHEGFALNPDKKTCTRINYCALNKPGCEHECVNMEESYYCRCHRGYTLDPNGKTCSRVDHCAQQDHGCEQLCLNTEDSFVCQCSEGFLINEDLKTCSRVDYCLLSDHGCEYSCVNMDRSFACQCPEGHVLRSDGKTCAKLDSCALGDHGCEHSCVSSEDSFVCQCFEGYILREDGKTCRRKDVCQAIDHGCEHICVNSDDSYTCECLEGFRLAEDGKRCRRKDVCKSTHHGCEHICVNNGNSYICKCSEGFVLAEDGRRCKKCTEGPIDLVFVIDGSKSLGEENFEVVKQFVTGIIDSLTISPKAARVGLLQYSTQVHTEFTLRNFNSAKDMKKAVAHMKYMGKGSMTGLALKHMFERSFTQGEGARPLSTRVPRAAIVFTDGRAQDDVSEWASKAKANGITMYAVGVGKAIEEELQEIASEPTNKHLFYAEDFSTMDEISEKLKKGICEALEDSDGRQDSPAGELPKTVQQPTESEPVTINIQDLLSCSNFAVQHRYLFEEDNLLRSTQKLSHSTKPSGSPLEEKHDQCKCENLIMFQNLANEEVRKLTQRLEEMTQRMEALENRLRYR

SEQ ID NO: 18261 - protein, 453 aa, Homo sapiens
LDFFRVVENQPPATMPLNVSFTNRNYDLDYDSVQPYFYCDEEENFYQQQQQSELQPPAPSEDIWKKFELLPTPPLSPSRRSGLCSPSYVAVTPFSLRGDNDGGGGSFSTADQLEMVTELLGGDMVNQSFICDPDDETFIKNIIIQDCMWSGFSAAAKLVSEKLASYQAARKDSGSPNPARGHSVCSTSSLYLQDLSAAASECIDPSVVFPYPLNDSSSPKSCASQDSSAFSPSSDSLLSSTESSPQGSPEPLVLHEETPPTTSSDSEEEQEDEEEIDVVSVEKRQAPGKRSESGSPSAGGHSKPPHSPLVLKRCHVSTHQHNYAAPPSTRKDYPAAKRVKLDSVRVLRQISNNRKCTSPRSSDTEENVKRRTHNVLERQRRNELKRSFFALRDQIPELENNEKAPKVVILKKATAYILSVQAEEQKLISEEDLLRKRREQLKHKLEQLRNSCA

SEQ ID NO: 18262 - protein, 492 aa, Homo sapiens
MAAGERSWCLCKLLRFFYSLFFPGLIVCGTLCVCLVIVLWGIRLLLQRKKKLVSTSKNGKNQMVIAFFHPYCNAGGGGERVLWCALRALQKKYPEAVYVVYTGDVNVNGQQILEGAFRRFNIRLIHPVQFVFLRKRYLVEDSLYPHFTLLGQSLGSIFLGWEALMQCVPDVYIDSMGYAFTLPLFKYIGGCQVGSYVHYPTISTDMLSVVKNQNIGFNNAAFITRNPFLSKVKLIYYYLFAFIYGLVGSCSDVVMVNSSWTLNHILSLWKVGNCTNIVYPPCDVQTFLDIPLHEKKMTPGHLLVSVGQFRPEKNHPLQIRAFAKLLNKKMVESPPSLKLVLIGGCRNKDDELRVNQLRRLSEDLGVQEYVEFKINIPFDELKNYLSEATIGLHTMWNEHFGIGVVECMAAGTIILAHNSGGPKLDIVVPHEGDITGFLAESEEDYAETIAHILSMSAEKRLQIRKSARASVSRFSDQEFEVTFLSSVEKLFK

SEQ ID NO: 18263 - protein, 128 aa, Homo sapiens
MTKKTRDLRRQLRKAVMDHVSDSFLETNVPLLVLIEAAKNGNEKEVKEYAQVFREHANKLIEVANLACSISNNEEGVKLVRMSASQLEALCPQVINAALALAAKPQSKLAQENMDLFKEQWEKQVRVL

SEQ ID NO: 18264 - protein, 575 aa, Homo sapiens
MFGIQDTLGRGPTLKEKSLGAEMDSVRSWVRNVGVVDANVAAQSGVALSRAHFEKQPPSNLRKSNFFHFVLALYDRQGQPVEIERTAFVDFVENDKEQGNEKTNNGTHYKLQLLYSNGVRTEQDLYVRLIDSVTKQPIAYEGQNKNPEMCRVLLTHEVMCSRCCEKKSCGNRNETPSDPVIIDRFFLKFFLKCNQNCLKTAGNPRDMRRFQVVLSTTVNVDGHVLAVSDNMFVHNNSKHGRRARRLDPSEATPCIKAISPSEGWTTGGAMVIIIGDNFFDGLQVVFGTMLVWSELITPHAIRVQTPPRHIPGVVEVTLSYKSKQFCKGAPGRFIYTALNEPTIDYGFQRLQKVIPRHPGDPERLAKEMLLKRAADLVEALYGTPHNNQDIILKRAADIAEALYSVPRNPSQLPALSSSPAHSGMMGINSYGSQLGVSISESTQGNNQGYIRNTSSISPRGYSSSSTPQQSNYSTSSNSMNGYSNVPMANLGVPGSPGFLNGSPTGSPYGIMSSSPTVGSSSTSSILPFSSSVFPAVKQKSAFAPVIRPQGSPSPACSSGNGNGFRAMTGLVVPPM

SEQ ID NO: 18265 - protein, 590 aa, Homo sapiens
MHLARLVGSCSLLLLLGALSGWAASDDPIEKVIEGINRGLSNAEREVGKALDGINSGITHAGREVEKVFNGLSNMGSHTGKELDKGVQGLNHGMDKVAHEINHGIGQAGKEAEKLGHGVNNAAGQVGKEADKLIHHGVHHGANQAGSEAGKFGQGVDNAAGQAGNEAGRFGQGVHHAAGQAGNEAGRFGQGVHHAAGQAGNEAGRFGQGAHHGLSEGWKETEKFGQGIHHAAGQVGKEAEKFGQGAHHAAGQAGNEAGRFGQGVHHGLSEGWKETEKFGQGVHHTAGQVGKEAEKFGQGAHHAAGQAGNEAGRFGQGAHHAAGQAGNEAGRFGQGVHHGLSEGWKETEKFGQGVHHAASQFGKETEKLGHGVHHGVNEAWKEAEKFGQGVHHAASQVGKEEDRVVQGLHHGVSQAGREAGQFGHDIHHTAGQAGKEGDIAVHGVQPGVHEAGKEAGQFGQGVHHTLEQAGKEADKAVQGFHTGVHQAGKEAEKLGQGVNHAADQAGKEVEKLGQGAHHAAGQAGKELQNAHNGVNQASKEANQLLNGNHQSGSSSHQGGATTTPLASGASVNTPFINLPALWRSVANIMP

SEQ ID NO: 18266 - protein, 279 aa, Homo sapiens
MSEETVPEAASPPPPQGQPYFDRFSEDDPEYMRLRNRAADLRQDFNLMEQKKRVTMILQSPSFREELEGLIQEQMKKGNNSSNIWALRQIADFMASTSHAVFPTSSMNVSMMTPINDLHTADSLNLAKGERLMRCKISSVYRLLDLYGWAQLSDTYVTLRVSKEQDHFLISPKGVSCSEVTASSLIKEVLEMRNKIREQNRQDVKSAGPQSQLLASVIAEKSRSPSTESQLMSKGDEDTKDDSEETVPNPFSQLTDQELEEYKKEVERKKLELDETGQE

SEQ ID NO: 18267 - protein, 150 aa, Homo sapiens
MAAPSRLLIRGGRVVNDDFSEVADVLVEDGVVRALGHDLLPPGGAPAGLRVLDAAGKLVLPGGIDTHTHMQFPFMGSRSIDDFHQGTKVKEEMKILVQDKGVNSFKMFMAYKDLYMVTDLELYEAFSRCKEIGAIAQVHAENGDLIAEGA

SEQ ID NO: 18268 - protein, 162 aa, Homo sapiens
MVQARTGFCKKQQELWQRRKEAAEALGTRKVSVLLATSHSGARPAVSTMDSSAAPTNASNCTDALAYSSCSPAPSPGSWVNLSHLDGNLSDPCGPNRTDLGGRDSLCPPTGSPSMITAITIMALYSIVCVVGLFGNFLVMYVIVRYTKMKTATNIYIFNLAL

SEQ ID NO: 18269 - protein, 798 aa, Homo sapiens
MADRGCPLEAAPLPAEVRESLAELELELSEGDITQKGYEKKRAKLLARYIPLIQGIDPSLQAENRIPGPSQTTAAAPKQQKSRPTASRDERFRSDVHTEAVQAALAKYKERKMPMPSKRRSVLVHSSVETYTPPDTSSASEDEGSLRRPGRLTSTPLQSHSSVEPWLDRVIQGSSTSSSASSTSSHPGGRPTTAPSAAATPGAAATTALAGLEAHTHIGVPVNSRVSSKIQQLLNTLKRPKRPPLKEFFVDDFEELLEVQQPDPNQPKPEGSETSVLRGEPLTAGVPRPPSLLATLQRWGTTQPKSPCLTALDTTGKAVYTLTYGKLWSRSLKLAYTLLNKLTSKNEPLLKPGDRVALVFPNSDPVMFMVAFYGCLLAELVPVPIEVPLTRKDAGSQQVGFLLGSCGVFLALTTDACQKGLPKAQTGEVAAFKGWPPLSWLVIDGKHLAKPPKDWHPLAQDTGTGTAYIEYKTSKEGSTVGVTVSHASLLAQCRALTQACGYSEAETLTNVLDFKRDAGLWHGVLTSVMNRMHVVSVPYALMKANPLSWIQKVCFYKARAALVKSRDMHWSLLAQRGQRDVSLSSLRMLIVADGANPWSISSCDAFLNVFQSRGLRPEVICPCASSPEALTVAIRRPPDLGGPPPRKAVLSMNGLSYGVIRVDTEEKLSVLTVQDVGQVMPGANVCVVKLEGTPYLCKTDEVGEICVSSSATGTAYYGLLGITKNVFEAVPVTTGGAPIFDRPFTRTGLLGFIGPDNLVFIVGKLDGLMVTGVRRHNADDVVATALAVEPMKFVYRGR

SEQ ID NO: 18270 - protein, 803 aa, Homo sapiens
MGIQGLLQFIKEASEPIHVRKYKGQVVAVDTYCWLHKGAIACAEKLAKGEPTDRYVGFCMKFVNMLLSHGIKPILVFDGCTLPSKKEVERSRRERRQANLLKGKQLLREGKVSEARECFTRSINITHAMAHKVIKAARSQGVDCLVAPYEADAQLAYLNKAGIVQAIITEDSDLLAFGCKKVILKMDQFGNGLEIDQARLGMCRQLGDVFTEEKFRYMCILSGCDYLSSLRGIGLAKACKVLRLANNPDIVKVIKKIGHYLKMNITVPEDYINGFIRANNTFLYQLVFDPIKRKLIPLNAYEDDVDPETLSYAGQYVDDSIALQIALGNKDINTFEQIDDYNPDTAMPAHSRSHSWDDKTCQKSANVSSIWHRNYSPRPESGTVSDAPQLKENPSTVGVERVISTKGLNLPRKSSIVKRPRSAELSEDDLLSQYSLSFTKKTKKNSSEGNKSLSFSEVFVPDLVNGPTNKKSVSTPPRTRNKFATFLQRKNEESGAVVVPGTRSRFFCSSDSTDCVSNKVSIQPLDETAVTDKENNLHESEYGDQEGKRLVDTDVARNSSDDIPNNHIPGDHIPDKATVFTDEESYSFESSKFTRTISPPTLGTLRSCFSWSGGLGDFSRTPSPSPSTALQQFRRKSDSPTSLPENNMSDVSQLKSEESSDDESHPLREEACSSQSQESGEFSLQSSNASKLSQCSSKDSDSEESDCNIKLLDSQSDQTSKLRLSHFSKKDTPLRNKVPGLYKSSSADSLSTTKIKPLGPARASGLSKKPASIQKRKHHNAENKPGLQIKLNELWKNFGFKKF

SEQ ID NO: 18271 - protein, 501 aa, Homo sapiens
MDTQAGSVDEENGRQLGEVELQCGICTKWFTADTFGIDTSSCLPFMTNYSFHCNVCHHSGNTYFLRKQANLKEMCLSALANLTWQSRTQDEHPKTMFSKDKDIIPFIDKYWECMTTRQRPGKMTWPNNIVKTMSKERDVFLVKEHPDPGSKDPEEDYPKFGLLDQDLSNIGPAYDNQKQSSAVSTSGNLNGGIAAGSSGKGRGAKRKQQDGGTTGTTKKARSDPLFSAQRLPPHGYPLEHPFNKDGYRYILAEPDPHAPDPEKLELDCWAGKPIPGDLYRACLYERVLLALHDRAPQLKISDDRLTVVGEKGYSMVRASHGVRKGAWYFEITVDEMPPDTAARLGWSQPLGNLQAPLGYDKFSYSWRSKKGTKFHQSIGKHYSSGYGQGDVLGFYINLPEDTETAKSLPDTYKDKALIKFKSYLYFEEKDFVDKAEKSLKQTPHSEVSINFGPCFKYPPKDLTYRPMSDMGWGAVVEHTLADVLYHVETEVDGRRSPPWEP

SEQ ID NO: 18272 - protein, 155 aa, Homo sapiens
MDVGSKEVLMESPPVLEMSIGAPEAQQRLALSEHLVTTATFSIGSTGLVVYDYQQLLIAYKPAPGTCCYIMKIAPESIPSLEALTRKVHNFQGQWKPQRERKRPGQRVFCSFCRRARSCFCPHRRDKPWRNGSLGRGWEWAEVAPRGPGTPATTE

SEQ ID NO: 18273 - protein, 555 aa, Homo sapiens
MTLRAAVFDLDGVLALPAVFGVLGRTEEALALPRGLLNDAFQKGGPEGATTRLMKGEITLSQWIPLMEENCRKCSETAKVCLPKNFSIKEIFDKAISARKINRPMLQAALMLRKKGFTTAILTNTWLDDRAERDGLAQLMCELKMHFDFLIESCQVGMVKPEPQIYKFLLDTLKASPSEVVFLDDIGANLKPARDLGMVTILVQDTDTALKELEKVTGIQLLNTPAPLPTSCNPSDMSHGYVTVKPRVRLHFVELGSGPAVCLCHGFPESWYSWRYQIPALAQAGYRVLAMDMKGYGESSAPPEIEEYCMEVLCKEMVTFLDKLGLSQAVFIGHDWGGMLVWYMALFYPERVRAVASLNTPFIPANPNMSPLESIKANPVFDYQLYFQEPGVAEAELEQNLSRTFKSLFRASDESVLSMHKVCEAGGLFVNSPEEPSLSRMVTEEEIQFYVQQFKKSGFRGPLNWYRNMERNWKWACKSLGRKILIPALMVTAEKDFVLVPQMSQHMEDWIPHLKRGHIEDCGHWTQMDKPTEVNQILIKWLDSDARNPPVVSKM

SEQ ID NO: 18274 - protein, 1001 aa, Homo sapiens
MQDIAFLSGGRGKDNAWIITFPENCNFRCIPEEVIAKVLTYLTSIARQNGSDSRFTIILDRRLDTWSSLKISLQKISASFPGNLHLVLVLRPTSFLQRTFTDIGFWFSQEDFMLKLPVVMLSSVSDLLTYIDDKQLTPELGGTLQYCHSEWIIFRNAIENFALTVKEMAQMLQSFGTELAETELPDDIPSIEEILAIRAERYHLLKNDITAVTKEGKILLTNLEVPDTEGAVSSRLECHRQISGDWQTINKLLTQVHDMETAFDGFWEKHQLKMEQYLQLWKFEQDFQQLVTEVEFLLNQQAELADVTGTIAQVKQKIKKLENLDENSQELLSKAQFVILHGHKLAANHHYALDLICQRCNELRYLSDILVNEIKAKRIQLSRTFKMHKLLQQARQCCDEGECLLANQEIDKFQSKEDAQKALQDIENFLEMALPFINYEPETLQYEFDVILSPELKVQMKTIQLKLENIRSIFENQQAGFRNLADKHVRPIQFVVPTPENLVTSGTPFFSSKQVGVGYSFFQACKLFSKGKKTWRQNQSNLKIEVVPDCQEKRSSGPSSSLDNGNSLDVLKNHVLNELIQTERVYVRELYTVLLGYRAEMDNPEMFDLMPPLLRNKKDILFGNMAEIYEFHNDIFLSSLENCAHAPERVGPCFLERKDDFQMYAKYCQNKPRSETIWRKYSECAFFQECQRKLKHRLRLDSYLLKPVQRITKYQLLLKELLKYSKDCEGSALLKKALDAMLDLLKSVNDSMHQIAINGYIGNLNELGKMIMQGGFSVWIGHKKGATKMKDLARFKPMQRHLFLYEKAIVFCKRRVESGEGSDRYPSYSFKHCWKMDEVGITEYVKGDNRKFEIWYGEKEEVYIVQASNVDVKMTWLKEIRNILLKQQELLTVKKRKQQDQLTERDKFQISLQQNDEKQQGAFISTEETELEHTSTVVEVCEAIASVQAEANTVWTEASQSAEISEEPAEWSSNYFYPTYDENEEENRPLMRPVSEMALLY

SEQ ID NO: 18275 - protein, 409 aa, Homo sapiens
MSRRRISCKDLGHADCQGWLYKKKEKGSFLSNKWKKFWVILKGSSLYWYSNQMAEKADGFVNLPDFTVERASECKKKHAFKISHPQIKTFYFAAENVQEMNVWLNKLGSAVIHQESTTKDEECYSESEQEDPEIAAETPPPPHASQTQSLTAQQASSSSPSLSGTSYSFSSLENTVKTPSSFPSSLSKERQSLPDTVNSLSAAEDEGQPITFAVQVHSPVPSEAGIHKALENSFVTSESGFLNSLSSDDTSSLSSNHDHLTVPDKPAGSKIMDKEETKVSEDDEMEKLYKSLEQASLSPLGDRRPSTKKELRKSFVKRCKNPSINEKLHKIRTLNSTLKCKEHDLAMINQLLDDPKLTARKYREWKVMNTLLIQDIYQQQRASPAPDDTDDTPQELKKSPSSPSVENSI

SEQ ID NO: 18276 - protein, 718 aa, Homo sapiens
MISTKEKNKIPKDSMTLLPCFYFVELPIVASSIVSLYFLELTDLFKPAKVGFQCYDRTLSMPYVETNEELIPLLMLLSLAFAAPAASIMVAEGMLYCLQSRLWGRAGGPAGAEGSINAGGCNFNSFLRRTVRFVGVHVFGLCATALVTDVIQLATGYHTPFFLTVCKPNYTLLGTSCEVNPYITQDICSGHDIHAILSARKTFPSQHATLSAFAAVYVSMYFNSVISDTTKLLKPILVFAFAIAAGVCGLTQITQYRSHPVDVYAGFLIGAGIAAYLACHAVGNFQAPPAEKPAAPAPAKDALRALTQRGHDSVYQQNKSVSTDELGPPGRLEGAPRPVAREKTSLGSLKRASVDVDLLAPRSPMAKENMVTFSHTLPRASAPSLDDPARRHMTIHVPLDASRSKQLISEWKQKSLEGRGLGLPDDASPGHLRAPAEPMAEEEEEEEDEEEEEEEEEEEDEGPAPPSLYPTVQARPGLGPRVILPPRAGPPPLVHIPEEGAQTGAGLSPKSGAGVRAKWLMMAEKSGAAVANPPRLLQVIAMSKAPGAPGPKAAETASSSSASSDSSQYRSPSDRDSASIVTIDAHAPHHPVVHLSAGGAPWEWKAAGGGAKAEADGGYELGDLARGFRGGAKPPGVSPGSSVSDVDQEEPRFGAVATVNLATGEGLPPLGAADGALGPGSRESTLRRHAGGLGLAEREAEAEAEGYFRKMQARRFPD

SEQ ID NO: 18277 - protein, 489 aa, Homo sapiens
MEENCRKCSETAKVCLPKNFSIKEIFDKAISARKINRPMLQAALMLRKKGFTTAILTNTWLDDRAERDGLAQLMCELKMHFDFLIESCQVGMVKPEPQIYKFLLDTLKASPSEVVFLDDIGANLKPARDLGMVTILVQDTDTALKELEKVTGIQLLNTPAPLPTSCNPSDMSHGYVTVKPRVRLHFVELGSGPAVCLCHGFPESWYSWRYQIPALAQAGYRVLAMDMKGYGESSAPPEIEEYCMEVLCKEMVTFLDKLGLSQAVFIGHDWGGMLVWYMALFYPERVRAVASLNTPFIPANPNMSPLESIKANPVFDYQLYFQEPGVAEAELEQNLSRTFKSLFRASDESVLSMHKVCEAGGLFVNSPEEPSLSRMVTEEEIQFYVQQFKKSGFRGPLNWYRNMERNWKWACKSLGRKILIPALMVTAEKDFVLVPQMSQHMEDWIPHLKRGHIEDCGHWTQMDKPTEVNQILIKWLDSDARNPPVVSKM

SEQ ID NO: 18278 - protein, 453 aa, Homo sapiens
LEQPTDPVARDGPLSQTSSKPDPSQWESPSFNPFGSHSVLQNSPPLSSEGSYHFDPDNFDESMDPFKPTTTLTSSDFCSPTGNHVNEILESPKKAKSRLITTTEQVKFLCFLLSGCKVKKHETQSLALDACSRDEGAVISQISDISNRDGHATDEEKLASTSCGQKSAGAEVKGEPEEDLEYFECSNVPVSTINHAFSSSEAGIEKETCQKMEEDGSTVLGLLESSAEKAPVSVSCGGESPLDGICLSESDKTAVLTLIREEIITKEIEANEWKKKYEETRQEVLEMRKIVAEYEKTIAQMIDEQRTSMTSQKSFQQLTMEKEQALADLNSVERSLSDLFRRYENLKGVLEGFKKNEEALKKCAQDYLARVKQEEQRYQALKIHAEEKLDKANEEIAQVRTKAKAESAALHAGLRKEQMKVESLERALQQKNQEIEELTKICDELIAKLGKTD

SEQ ID NO: 18279 - protein, 197 aa, Homo sapiens
MEELTEVITAAEFHPNSCNTFVYSSSKGTIRLCDMRASALCDRHSKLFEEPEDPSNRSFFSEIISSISDVKFSHSGRYMMTRDYLSVKIWDLNMENRPVETYQVHEYLRSKLCSLYENDCIFDKFECCWNGSDSVVMTGSYNNFFRMFDRNTKRDITLEASRENNKPRTVLKPRKVCASGKRKKDEISVDSLDFNKK

SEQ ID NO: 18280 - protein, 1523 aa, Homo sapiens
MAPGWAGVGAAVRARLALALALASVLSGPPAVACPTKCTCSAASVDCHGLGLRAVPRGIPRNAERLDLDRNNITRITKMDFAGLKNLRVLHLEDNQVSVIERGAFQDLKQLERLRLNKNKLQVLPELLFQSTPKLTRLDLSENQIQGIPRKAFRGITDVKNLQLDNNHISCIEDGAFRALRDLEILTLNNNNISRILVTSFNHMPKIRTLRLHSNHLYCDCHLAWLSDWLRQRRTVGQFTLCMAPVHLRGFNVADVQKKEYVCPAPHSEPPSCNANSISCPSPCTCSNNIVDCRGKGLMEIPANLPEGIVEIRLEQNSIKAIPAGAFTQYKKLKRIDISKNQISDIAPDAFQGLKSLTSLVLYGNKITEIVKGLFDGLVSLQLLLLNANKINCLRVNTFQDLQNLNLLSLYDNKLQTISKGLFAPLQSIQTLHLAQNPFVCDCHLKWLADYLQDNPIETSGARCSSPRRLANKRISQIKSKKFRCSGSEDYRSRFSSECFMDLVCPEKCRCEGTIVDCSNQKLVRIPSHLPEYVTDLRLNDNEVSVLEATGIFKKLPNLRKINLSNNKIKEVREGAFDGAASVQELMLTGNQLETVHGRVFRGLSGLKTLMLRSNLIGCVSNDTFAGLSSVRLLSLYDNRITTITPGAFTTLVSLSTINLLSNPFNCNCHLAWLGKWLRKRRIVSGNPRCQKPFFLKEIPIQDVAIQDFTCDGNEESSCQLSPRCPEQCTCMETVVRCSNKGLRALPRGMPKDVTELYLEGNHLTAVPRELSALRHLTLIDLSNNSISMLTNYTFSNMSHLSTLILSYNRLRCIPVHAFNGLRSLRVLTLHGNDISSVPEGSFNDLTSLSHLALGTNPLHCDCSLRWLSEWVKAGYKEPGIARCSSPEPMADRLLLTTPTHRFQCKGPVDINIVAKCNACLSSPCKNNGTCTQDPVELYRCACPYSYKGKDCTVPINTCIQNPCQHGGTCHLSDSHKDGFSCSCPLGFEGQRCEINPDDCEDNDCENNATCVDGINNYVCICPPNYTGELCDEVIDHCVPELNLCQHEAKCIPLDKGFSCECVPGYSGKLCETDNDDCVAHKCRHGAQCVDTINGYTCTCPQGFSGPFCEHPPPMVLLQTSPCDQYECQNGAQCIVVQQEPTCRCPPGFAGPRCEKLITVNFVGKDSYVELASAKVRPQANISLQVATDKDNGILLYKGDNDPLALELYQGHVRLVYDSLSSPPTTVYSVETVNDGQFHSVELVTLNQTLNLVVDKGTPKSLGKLQKQPAVGINSPLYLGGIPTSTGLSALRQGTDRPLGGFHGCIHEVRINNELQDFKALPPQSLGVSPGCKSCTVCKHGLCRSVEKDSVVCECRPGWTGPLCDQEARDPCLGHRCHHGKCVATGTSYMCKCAEGYGGDLCDNKNDSANACSAFKCHHGQCHISDQGEPYCLCQPGFSGEHCQQENPCLGQVVREVIRRQKGYASCATASKVPIMECRGGCGPQCCQPTRSKRRKYVFQCTDGSSFVEEVERHLECGCLACS

SEQ ID NO: 18281 - protein, 995 aa, Homo sapiens
MSAEAADREAATSSRPCTPPQTCWFEFLLEESLLEKHLRKPCPDPAPVQLIVQFLEQASKPSVNEQNQVQPPPDNKRNRILKLLALKVAAHLKWDLDILEKSLSVPVLNMLLNELLCISKVPPGTKHVDMDLATLPPTTAMAVLLYNRWAIRTIVQSSFPVKQAKPGPPQLSVMNQMQQEKELTENILKVLKEQAADSILVLEAALKLNKDLYVHTMRTLDLLAMEPGMVNGETESSTAGLKVKTEEMQCQVCYDLGAAYFQQGSTNSAVYENAREKFFRTKELIAEIGSLSLHCTIDEKRLAGYCQACDVLVPSSDSTSQQLTPYSQVHICLRSGNYQEVIQIFIEDNLTLSLPVQFRQSVLRELFKKAQQGNEALDEICFKVCACNTVRDILEGRTISVQFNQLFLRPNKEKIDFLLEVCSRSVNLEKASESLKGNMAAFLKNVCLGLEDLQYVFMISSHELFITLLKDEERKLLVDQMRKRSPRVNLCIKPVTSFYDIPASASVNIGQLEHQLILSVDPWRIRQILIELHGMTSERQFWTVSNKWEVPSVYSGVILGIKDNLTRDLVYILMAKGLHCSTVKDFSHAKQLFAACLELVTEFSPKLRQVMLNEMLLLDIHTHEAGTGQAGERPPSDLISRVRGYLEMRLPDIPLRQVIAEECVAFMLNWRENEYLTLQVPAFLLQSNPYVKLGQLLAATCKELPGPKESRRTAKDLWEVVVQICSVSSQHKRGNDGRVSLIKQRESTLGIMYRSELLSFIKKLREPLVLTIILSLFVKLHNVREDIVNDITAEHISIWPSSIPNLQSVDFEAVAITVKELVRYTLSINPNNHSWLIIQADIYFATNQYSAALHYYLQAGAVCSDFFNKAVPPDVYTDQVIKRMIKCCSLLNCHTQVAILCQFLREIDYKTAFKSLQEQNSHDAMDSYYDYIWDVTILEYLTYLHHKRGETDKRQIAIKAIGQTELNASNPEEVLQLAAQRRKKKFLQAMAKLYF

SEQ ID NO: 18282 - protein, 340 aa, Homo sapiens
MNKMALASFMKGRTVIGTPDEETMDIELPKKYHEMVGVIFSDTFSYRLKFNWGYRIPVIKEHSEYTEHCWAMHGEIFCYLAKYWLKGFVAFQAAINAAIIEVTTNHSVMEELTSVIGINMKIPPFISKGEIMNEWFHFTCLVSFSSFIYFASLNVARERGKFKKLMTVMGLRESAFWLSWGLTYICFIFIMSIFMALVITSIPIVFHTGFMVIFTLYSLYGLSLIALAFLMSVLIRKPMLAGLAGFLFTVFWGCLGFTVLYRQLPLSLGWVLSLLSPFAFTAGMAQITHLDNYLSGVIFPDPSGDSYKMIATFFILAFDTLFYLIFTLYFERVLPESEML

SEQ ID NO: 18283 - protein, 339 aa, Homo sapiens
MHSLESSLIDIMRAENDTIKGRLNYSYPGSDSSLLINGQSSLFPMEDGFLDDGRGDQPLHSGLGSPHCFSHQNGERVERYSRKVFVGGLPPDIDEDEITASFRRFGPLIVDWPHKAESKSYFPPKGYAFLLFQDESSVQALIDACIEEDGKLYLCVSSPTIKDKPVQIRPWNLSDSDFVMDGSQPLDPRKTIFVGGVPRPLRAVELAMIMDRLYGGVCYAGIDTDPELKYPKGAGRVAFSNQQSYIAAISARFVQLQHGEIDKRVEVKPYVLDDQLCDECQGARCGGKFAPFFCANVTCLQYYCEYCWAAIHSRAGREFHKPLVKEGGDRPRHISFRWN

SEQ ID NO: 18284 - protein, 60 aa, Homo sapiens
MPSVTQRLRDPDINPCLSESDASTRCLDENNYDRERCSTYFLRYKNCRRFWVSLDWLALC

SEQ ID NO: 18285 - protein, 557 aa, Homo sapiens [sequence omitted]

SEQ ID NO: 18286 - protein, 1037 aa, Homo sapiens
YSAERTAETRAPGAKQLTNHSPPAPRHGPVPAEAPELKAQEPLRKQSRLDPSSAVLMRKAKREKVETMLRNDSLSSDQSESVRPSPPKPHRSKRGGKKRQMSVSSSEEEGVSTPEYTSCEDVELESESVSEKGDLDYYWLDPATWHSRETSPISSHPVTWQPSKEGDRLIGRVILNKRTTMPKDSGALLGLKVVGGKMTDLGRLGAFITKVKKGSLADVVGHLRAGDEVLEWNGKPLPGATNEEVYNIILESKSEPQVEIIVSRPIGDIPRIPESSHPPLESSSSSFESQKMERPSISVISPTSPGALKDAPQVLPGQLSVKLWYDKVGHQLIVNVLQATDLPARVDGRPRNPYVKMYFLPDRSDKSKRRTKTVKKILEPKWNQTFVYSHVHRRDFRERMLEITVWDQPRVQEEESEFLGEILIELETALLDDEPHWYKLQTHDESSLPLPQPSPFMPRRHIHGESSSKKLQRSQRISDSDISDYEVDDGIGVVPPVGYRSSARESKSTTLTVPEQQRTTHHRSRSVSPHRGNDQGKPRSRLPNVPLQRSLDEIHPTRRSRSPTRHHDASRSPVDHRTRDVDSQYLSEQDRMHRQRSPTQSPPADTSFSSRRGRQLPQVPVRSGSIEQASLVVEERTRQMKMKVHRFKQTTGSGSSQELDREQYSKYNIHKDQYRSCDNVSAKSSDSDVSDVSAISRTSSASRLSSTSFMSEQSERPRGRISSFTPKMQGRRMGTSGRSIMKSTSVSGEMYTLEHNDGSQSDTAVGTVGAGGKKRRSSLSAKVVAIVSRRSRSTSQLSQTESGHKKLKSTIQRSTETGMAAEMRKMVRQPSRESTDGSINSYSSEGNLIFPGVRLGADSQFSDFLDGLGPAQLVGRQTLATPAMGDIQIGMEDKKGQLEVEVIRARSLTQKPGSKSTPAPYVKVYLLENGACIAKKKTRIARKTLDPLYQQSLVFDESPQGKVLQVIVWGDYGRMDHKCFMGVAQILLEELDLSSMVIGWYKLFPPSSLVDPTLTPLTRRASQSSLESSTGPPCIRS

SEQ ID NO: 18287 - protein, 153 aa, Homo sapiens
MSLALRSELVVDKTKRKKRRELSEEQKQEIKDAFELFDTDKDEAIDYHELKVAMRALGFDVKKADVLKILKDYDREATGKITFEDFNEVVTDWILERDPHEEILKAFKLFDDDDSVLKNILLLPIWSRCLSLNREFFSEVNQEEFIAIMTGDI

SEQ ID NO: 18288 - protein, 105 aa, Homo sapiens
MTKKTRDLRRQLRKAVMDHVSDSFLETNVPLLVLIEAAKNGNEKEVKEYAQVFREHANKLIEVANLACSISNNEEGVKLVRMSASQLEALCPQVINAALALAAKP

SEQ ID NO: 18289 - protein, 180 aa, Homo sapiens
SIGSEPHEDHVFLVANFSQIETLTSVFQKKLCIQDLCAMEDHNCEQLCVNVPGSFVCQCYSGYALAEDGKRCVAVDYCASENHGCEHECVNADGSYLCQCHEGFALNPDKKTCTKIDYCASSNHGCQHECVNTDDSYSCHCLKGFTLNPDKKTCRRINYCALNKPGCEHECVNMEESYYC

SEQ ID NO: 18290 - protein, 516 aa, Homo sapiens
MVNFVNMIYKTLNIHVTLVGIEIWTHEDKIELYSNIETTLLRFSFWQEKILKTRKDFDHVVLLSGKWLYSHVQGISYPGGMCLPYYSTSIIKDLLPDTNIIANRMAHQLGHNLGMQHDEFPCTCPSGKCVMDSDGSIPALKFSKCSQNQYHQYLKDYKPTCMLNIPFPYNFHDFQFCGNKKLDEGEECDCGPAQECTNPCCDAHTCVLKPGFTCAEGECCESCQIKKAGSICRPAKDECDFPEMCTGHSPACPKDQFRVNGFPCKNSEGYCFMGKCPTREDQCSELFDDEAIESHDICYKMNTKGNKFGYCKNKENRFLPCEEKDVRCGKIYCTGGELSSLLGEDKTYHLKDPQKNATVKCKTIFLYHDSTDIGLVASGTKCGEGMVCNNGECLNMEKVYISTNCPSQCNENPVDGHGLQCHCEEGQAPVACEETLHVTNITILVVVLVLVIVGIGVLILLVRYRKCIKLKQVQSPPTETLGVENKGYFGDEQQIRTEPILPEIHFLNHLLYGRHQ

SEQ ID NO: 18291 - protein, 1371 aa, Homo sapiens
MSSAVGPRGPRPPTVPPPMQELPDLSHLTEEERNIIMAVMDRQKEEEEKEEAMLKCVVRDMAKPAACKTPRNAENQPHQPSPRLHQQFESYKEQVRKIGEEARRYQGEHKDDAPTCGICHKTKFADGCGHLCSYCRTKFCARCGGRVSLRSNNEDKVVMWVCNLCRKQQEILTKSGAWFFGSGPQQTSQDGTLSDTATGAGSEVPREKKARLQERSRSQTPLSTAAASSQDAAPPSAPPDRSKGAEPSQQALGPEQKQASSRSRSEPPRERKKTPGLSEQNGKGALKSERKRVPKTSAQPVEGAVEERERKERRESRRLEKGRSQDYPDTPEKRDEGKAADEEKQRKEEDYQTRYRSDPNLARYPVKPPPEEQQMRMHARVSRARHERRHSDVALPRTEAGAALPEGKAGKRAPAAARASPPDSPRAYSAERTAETRAPGAKQLTNHSPPAPRHGPVPAEAPELKAQEPLRKQSRLDPSSAVLMRKAKREKVETMLRNDSLSSDQSESVRPSPPKPHRSKRGGKKRQMSVSSSEEEGVSTPEYTSCEDVELESESVSEKGDLDYYWLDPATWHSRETSPISSHPVTWQPSKEGDRLIGRVILNKRTTMPKDSGALLGLKVVGGKMTDLGRLGAFITKVKKGSLADVVGHLRAGDEVLEWNGKPLPGATNEEVYNIILESKSEPQVEIIVSRPIGDIPRIPESSHPPLESSSSSFESQKMERPSISVISPTSPGALKDAPQVLPGQLSVKLWYDKVGHQLIVNVLQATDLPARVDGRPRNPYVKMYFLPDRSDKSKRRTKTVKKILEPKWNQTFVYSHVHRRDFRERMLEITVWDQPRVQEEESEFLGEILIELETALLDDEPHWYKLQTHDESSLPLPQPSPFMPRRHIHGESSSKKLQRSQRISDSDISDYEVDDGIGVVPPVGYRSSARESKSTTLTVPEQQRTTHHRSRSVSPHRGNDQGKPRSRLPNVPLQRSLDEIHPTRRSRSPTRHHDASRSPVDHRTRDVDSQYLSEQDSELLMLPRAKRGRSAECLHTTSELQPFLDRARSASTNCLRPDTSLHSPERERGRWSPSLDRRRPPSPRIQIQHASPENDRMHRQRSPTQSPPADTSFSSRRGRQLPQVPVRSGSIEQESGHKKLKSTIQRSTETGMAAEMRKMVRQPSRESTDGSINSYSSEGNLIFPGVRLGADSQFSDFLDGLGPAQLVGRQTLATPAMGDIQIGMEDKKGQLEVEVIRARSLTQKPGSKSTPAPYVKVYLLENGACIAKKKTRIARKTLDPLYQQSLVFDESPQGKVLQVIVWGDYGRMDHKCFMGVAQILLEELDLSSMVIGWYKLFPPSSLVDPTLTPLTRRASQSSLESSTGPPCIRS

SEQ ID NO: 18292 - protein, 156 aa, Homo sapiens
MSLALRSELVVDKTKRKKRRELSEEQKQEIKDAFELFDTDKDEAIDYHELKVAMRALGFDVKKADVLKILKDYDREATGKITFEDFNEVVTDWILERDPHEEILKAFKLFDDDDSGKISLRNLRRVARELGENMSDEELRAMIEEFDKDGDGESKF

SEQ ID NO: 18293 - protein, 324 aa, Homo sapiens
MVFLSGNASDSSNCTQPPAPVNISKAILLGVILGGLILFGVLGNILVILSVACHRHLHSVTHYYIVNLAVADLLLTSTVLPFSAIFEVLGYWAFGRVFCNIWAAVDVLCCTASIMGLCIISIDRYIGVSYPLRYPTIVTQRRGLMALLCVWALSLVISIGPLFGWRQPAPEDETICQINEEPGYVLFSALGSFYLPLAIILVMYCRVYVVAKRESRGLKSGLKTDKSDSEQVTLRIHRKNAPAGGSGMASAKTKTHFSVRLLKFSREKKAAKTLGIVVGCFVLCWLPFFLVMPIGTYILKYDVLFWRKGLSVCTRLRERKEIKN

SEQ ID NO: 18294 - protein, 460 aa, Homo sapiens
MAKPAQGAKYRGSIHDFPGFDPNQDAEALYTAMKGFGSDKEAILDIITSRSNRQRQEVCQSYKSLYGKDLIADLNELDMLDIREIFRTKYEKSLYSMIKNDTSGEYKKTLLKLSGGDDDAAGQFFPEAAQVAYQMWELSAVARVELKGTVRPANDFNPDADAKALRKAMKGLGTDEDTIIDIITHRSNVQRQQIRQTFKSHFGRDLMTDLKSEISGDLARLILGLMMPPAHYDAKQLKKAMEGAGTDEKALIEILATRTNAEIRAINEAYKEDYHKSLEDALSSDTSGHFRRILISLATGHREEGGENLDQAREDAQEIADTPSGDKTSLETRFMTILCTRSYPHLRRVFQEFIKMTNYDVEHTIKKEMSGDVRDAFVAIVQSVKNKPLFFADKLYKSMKGAGTDEKTLTRIMVSRSEIDLLNIRREFIEKYDKSLHQAIEGDTSGDFLKALLALCGGED

SEQ ID NO: 18295 - protein, 901 aa, Homo sapiens
MLPGLTTELFSPVDLNQVIVNGNQSLSSQKHWLFKHLFSAQQANLWCLSRCVQEHSFCQLAEITESASLYFTCTLYPEAQVCDDIMESNAQGCRLILPQMPKALFRKKVILEDKVKNFYTRLPFQKLMGISIRNKVPMSEKSISNGFFECERRCDADPCCTGFGFLNVSQLKGGEVTCLTLNSLGIQMCSEENGGAWRILDCGSPDIEVHTYPFGWYQKPMSLDSWQSLALSSVVVDPSIRHFDVAHVSTAATSNFSAVRDLCLSECSQHEACLITTLQTQPGAVRCMFYADTQSCTHSLQGQNCRLLLREEATHIYRKPGISLLSYEASVPSVPISTHGRLLGRSQAIQVGTSWKQVDQFLGVPYAAPPLAERRFQAPEPLNWTGSWDASKPRASCWQPGTRTSTSPGVSEDCLYLNVFIPQNVAPNASVLVFFHNTMDREESEGWPAIDGSFLAAVGNLIVVTASYRVGVFGFLSSGSGEVSGNWGLLDQVAALTWVQTHIRGFGGDPRRVSLAADRGGADVASIHLLTARATNSQLFRRAVLMGGSALSPAAVISHERAQQQAIALAKEVSCPMSSSQEVVSCLRQKPANVLNDAQTKLLAVSGPFHYWGPVIDGHFLREPPARALKRSLWVEVDLLIGSSQDDGLINRAKAVKQFEESRGRTSSKTAFYQALQNSLGGEDSDARVEAAATWYYSLEHSTDDYASFSRALENATRDYFIICPIIDMASAWAKRARGNVFMYHAPENYGHGSLELLADVQFALGLPFYPAYEGQFSLEEKSLSLKIMQYFSHFIRSGNPNYPYEFSRKVPTFATPWPDFVPRAGGENYKEFSELLPNRQGLKKADCSFWSKYISSLKTSADGAKGGQSAESEEEELTAGSGLREDLLSLQEPGSKTYSK

SEQ ID NO: 18296 - protein, 488 aa, Homo sapiens
MAYSQGGGKKKVCYYYDGDIGNYYYGQGHPMKPHRIRMTHNLLLNYGLYRKMEIYRPHKATAEEMTKYHSDEYIKFLRSIRPDNMSEYSKQMQRFNVGEDCPVFDGLFEFCQLSTGGSVAGAVKLNRQQTDMAVNWAGGLHHAKKSEASGFCYVNDIVLAILELLKYHQRVLYIDIDIHHGDGVEEAFYTTDRVMTVSFHKYGEYFPGTGDLRDIGAGKGKYYAVNFPMRDGIDDESYGQIFKPIISKVMEMYQPSAVVLQCGADSLSGDRLGCFNLTVKGHAKCVEVVKTFNLPLLMLGGGGYTIRNVARCWTYETAVALDCEIPNELPYNDYFEYFGPDFKLHISPSNMTNQNTPEYMEKIKQRLFENLRMLPHAPGVQMQAIPEDAVHEDSGDEDGEDPDKRISIRASDKRIACDEEFSDSEDEGEGGRRNVADHKKGAKKARIEEDKKETEDKKTDVKEEDKSKDNSGEKTDTKGTKSEQLSNP

SEQ ID NO: 18297 - protein, 1056 aa, Homo sapiens
MATPGMSWQQHYYGGSAAKFAPSPATAQLAGHSMDYSQEMHLKMSKKIAQLTKVIYALNTKNDEHESAIQALKDAHEEEIQQILAETREKILQYKSKVTEELDLRRKIQVLESSLEDHIKMKQQALTEFEAYKHRVEDMQLCAEAQHVQRIVTMSREVEEIRRKFEEKLRSFGQLQVQFEKDKRLALEDLQAAHRREIQELLKSQQDHSASVNKGQEKAEELHRMEVESLNKMLEELRLERKKLIEDYEGKLNKAQSFYERELDTLKRSQLFTAESLQASKEKEADLRKEFQGQEAILRKTIGKLKTELQMVQDEAGSLLDKCQKLQTALAIAENNVQVLQKQLDDAKEGEMALLSKHKEVESELAAARERLQQQASDLVLKASHIGMLQATQMTQEVTIKDLESEKSRVNERLSQLEEERAFLRSKTQSLDEEQKQQILELEKKVNEAKRTQQEYYERELKNLQSRLEEEVTQLNEAHSKTLEELAWKHHMAIEAVHSNAIRDKKKLQMDLEEQHNKDKLNLEEDKNQLQQELENLKEVLEDKLNTANQEIGHLQDMVRKSEQGLGSAEGLIASLQDSQERLQNELDLTKDSLKETKDALLNVEGELEQERQQHEETIAAMKEEEKLKVDKMAHDLEIKWTENLRQECSKLREELRLQHEEDKKSAMSQLLQLKDREKNAARDSWQKKVEDLLNQISLLKQNLEIQLSQSQTSLQQLQAQFTQERQRLTQELEELEEQHQQRHKSLKEAHVLAFQTMEEEKEKEQRALENHLQQKHSAELQSLKDAHRESMEGFRIEMEQELQTLRFELEDEGKAMLASLRSELNHQHAAAIDLLRHNHHQELAAAKMELERSIDISRRQSKEHICRITDLQEELRHREHHISELDKEVQHLHENISALTKELEFKGKEILRIRSESNQQIRLEEMEEKYLMRESKPEDIQMITELKAMLTERDQIIKKLIQKKKNDKSPTNRFVSVPNLSALESGGVGNGHPNRLDPIPNSPVHDIEFNSSKPLPQPVPPKGPKTFLSPAQSEASPVASPDPQRQEWFARYFTF

SEQ ID NO: 18298 - protein, 371 aa, Homo sapiens
MDKLDANVSSEEGFGSVEKVVLLTFLSTVILMAILGNLLVMVAVCWDRQLRKIKTNYFIVSLAFADLLVSVLVMPFGAIELVQDIWIYGEVFCLVRTSLDVLLTTASIFHLCCISLDRYYAICCQPLVYRNKMTPLRIALMLGGCWVIPTFISFLPIMQGWNNIGIIDLIEKRKFNQNSNSTYCVFMVNKPYAITCSVVAFYIPFLLMVLAYYRIYVTAKEHAHQIQMLQRAGASSESRPQSADQHSTHRMRTETKAAKTLCIIMGCFCLCWAPFFVTNIVDPFIDYTVPGQVWTAFLWLGYINSGLNPFLYAFLNKSFRRAFLIILCCDDERYRRPSILGQTVPCSTTTINGSTHVLRAVRGNRNSTSSA

SEQ ID NO: 18299 - protein, 232 aa, Homo sapiens
MNFLLSWVHWSLALLLYLHHAKWSQAAPMAEGGGQNHHEVVKFMDVYQRSYCHPIETLVDIFQEYPDEIEYIFKPSCVPLMRCGGCCNDEGLECVPTEESNITMQIMRIKPHQGQHIGEMSFLQHNKCECRPKKDRARQEKKSVRGKGKGQKRKRKKSRYKSWSVYVGARCCLMPWSLPGPHPCGPCSERRKHLFVQDPQTCKCSCKNTDSRCKARQLELNERTCRCDKPRR

SEQ ID NO: 18300 - protein, 153 aa, Homo sapiens
MVMEKPSPLLVGREFVRQYYTLLNQAPDMLHRFYGKNSSYVHGGLDSNGKPADAVYGQKEIHRKVMSQNFTNCHTKIRHVDAHATLNDGVVVQVMGLLSNNNQALRRFMQTFVLAPEVHLALFLAQSLFLNQLFLQGGLVLFSYTYERTTSLC

SEQ ID NO: 18301 - protein, 389 aa, Homo sapiens
MKNLLTEKCISSHNFHQKVIKQRMEKKVDSRYFKDGAVKKPYSAKTLSNKKSSASFGIRRELPSTSHLVQYRGTHTCTRQGRLRELRIRCVARKFLYLWIRMTFGRVFPSKARFYYEQRLLRKVFEEWKEEWWVFQHEWKLCVRADCHYRYYLYNLMFQTWKTYVRQQQEMRNKYIRAEVHDAKQKMRQAWKSWLIYVVVRRTKLQMQTTALEFRQRIILRVWWSTWRQRLGQVRVSRALHASALKHRALSLQVQAWSQWREQLLYVQKEKQKVVSAVKHHQHWQKRRFLKAWLEYLQVRRVKRQQNAATGQSGWSFPAESPACCLPHMEQTLAMAPPGKCPQCKSNTFPQGDIREASIFSLEAEDVSASRKPPGRENGHPSRRATASV

SEQ ID NO: 18302 - protein, 1342 aa, Homo sapiens
MSSAVGPRGPRPPTVPPPMQELPDLSHLTEEERNIIMAVMDRQKEEEEKEEAMLKCVVRDMAKPAACKTPRNAENQPHQPSPRLHQQFESYKEQVRKIGEEARRYQGEHKDDAPTCGICHKTKFADGCGHLCSYCRTKFCARCGGRVSLRSNNEDKVVMWVCNLCRKQQEILTKSGAWFFGSGPQQTSQDGTLSDTATGAGSEVPREKKARLQERSRSQTPLSTAAASSQDAAPPSAPPDRSKGAEPSQQALGPEQKQASSRSRSEPPRERKKTPGLSEQNGKGALKSERKRVPKTSAQPVEGAVEERERKERRESRRLEKGRSQDYPDTPEKRDEGKAADEEKQRKEEDYQTRYRSDPNLARYPVKPPPEEQQMRMHARVSRARHERRHSDVALPRTEAGAALPEGKAGKRAPAAARASPPDSPRAYSAERTAETRAPGAKQLTNHSPPAPRHGPVPAEAPELKAQEPLRKQSRLDPSSAVLMRKAKREKVETMLRNDSLSSDQSESVRPSPPKPHRSKRGGKKRQMSVSSSEEEGVSTPEYTSCEDVELESESVSEKGDLDYYWLDPATWHSRETSPISSHPVTWQPSKEGDRLIGRVILNKRTTMPKDSGALLGLKVVGGKMTDLGRLGAFITKVKKGSLADVVGHLRAGDEVLEWNGKPLPGATNEEVYNIILESKSEPQVEIIVSRPIGDIPRIPESSHPPLESSSSSFESQKMERPSISVISPTSPGALKDAPQVLPGQLSVKLWYDKVGHQLIVNVLQATDLPARVDGRPRNPYVKMYFLPDRSDKSKRRTKTVKKILEPKWNQTFVYSHVHRRDFRERMLEITVWDQPRVQEEESEFLGEILIELETALLDDEPHWYKLQTHDESSLPLPQPSPFMPRRHIHGESSSKKLQRSQRISDSDISDYEVDDGIGVVPPGYRSSARESKSTTLTVPEQQRTTHHRSRSVSPHRGNDQGKPRSRLPNVPLQRSLDEIHPTRRSRSPTRHHDASRSPVDHRTRDVDSQYLSEQDSELLMLPRAKRGRSAECLHTTSELQPFLDRARSASTNCLRPDTSLHSPERERMHRQRSPTQSPPADTSFSSRRGRQLPQVPVRSGSIEQESGHKKLKSTIQRSTETGMAAEMRKMVRQPSRESTDGSINSYSSEGNLIFPGVRLGADSQFSDFLDGLGPAQLVGRQTLATPAMGDIQIGMEDKKGQLEVEVIRARSLTQKPGSKSTPAPYVKVYLLENGACIAKKKTRIARKTLDPLYQQSLVFDESPQGKVLQVIVWGDYGRMDHKCFMGVAQILLEELDLSSMVIGWYKLFPPSSLVDPTLTPLTRRASQSSLESSTGPPCIRS

SEQ ID NO: 18303 - protein, 403 aa, Homo sapiens [sequence omitted]

SEQ ID NO: 18304 - protein, 720 aa, Homo sapiens
MHARNPHSPFQRQHMMDCYLSAQQDTGTMQAVIGQDPMIAGQVSKPLLSVRSEMNAELRGEDKAATSDSELNEPLLAPVESNDSEDTPSKLFGARGNPALSDPGTPDQHQASQTHPPFPVGPQPLLTAQQLASAVAGVMPGGPPALNQPILIPFNMAGQLGGQQGLVLTLPTANLTNIQGLVAAAAAGGIMTLPLQNLQATSSLNSQLQQLQLQLQQQQQQQQQQPPPSTNQHPQPAPQAPSQSQQQPLQPTPPQQPPPASQQPPAPTSQLQQAPQPQQHQPHSHSQNQNQPSPTQQSSSPPQKPSQSPGHGLPSPLTPPNPLQLVNNPLASQAAAAAAAMSSIASSQAFGNALSSLQGVTGQLVTNAQGQIIGTIPLMPNPGPSSQAASGTQGLQVQPITPQLLTNAQGQIIATVIGNQILPVINTQGITLSPIKPGQQLHQPSQTSVGQAASQGNLLHLAHSQASMSQSPVRQASSSSSSSSSSSALSVGQLVSNPQTAAGEVDGVNLEEIREFAKAFKIRRLSLGLTQTQVGQALSATEGPAYSQSAICRHTILRSHFFLPQEAQENTIASSLTAKLNPGLLYPARFEKLDITPKSAQKIKPVLERWMAEAEARHRAGMQNLTEFIGSEPSKKRKRRTSFTPQALEILNAHFEKNTHPSGQEMTEIAEKLNYDREVVRVWFCNKRQALKNTIKRLKQHEPATAVPLEPLTDSLEENS

SEQ ID NO: 18305 - protein, 641 aa, Homo sapiens
MKGFGSDKEAILDIITSRSNRQRQEVCQSYKSLYGKDLIADLKYELTGKFERLIVGLMRPPAYCDAKEIKDAISGIGTDEKCLIEILASRTNEQMHQLVAAYKDAYERDLEADIIGDTSGHFQKMLVVLLQGTREEDDVVSEDLVQQDVQDLYEAGELKWGTDEAQFIYILGNRSKQHLRLVFDEYLKTTGKPIEASIRGELSGDFEKLMLAVVKCIRSTPEYFAERLFKAMKGLGTRDNTLIRIMVSRSELDMLDIREIFRTKYEKSLYSMIKNDTSGEYKKTLLKLSGGDDDAAGQFFPEAAQVAYQMWELSAVARVELKGTVRPANDFNPDADAKALRKAMKGLGTDEDTIIDIITHRSNVQRQQIRQTFKSHFGRDLMTDLKSEISGDLARLILGLMMPPAHYDAKQLKKAMEGAGTDEKALIEILATRTNAEIRAINEAYKEDYHKSLEDALSSDTSGHFRRILISLATGHREEGGENLDQAREDAQVAAEILEIADTPSGDKTSLETRFMTILCTRSYPHLRRVFQEFIKMTNYDVEHTIKKEMSGDVRDAFVAIVQSVKNKPLFFADKLYKSMKGAGTDEKTLTRIMVSRSEIDLLNIRREFIEKYDKSLHQAIEGDTSGDFLKALLALCGGED

SEQ ID NO: 18306 - protein, 1223 aa, Homo sapiens
QEQAGSLACVPCPVGRTTISAGAFSQTHCVTDCQRNEAGLQCDQNGQYRASQKDRGSGKAFCVDGEGRRLPWWETEAPLEDSQCLMMQKFEKVPESKVIFDANAPVAVRSKVPDSEFPVMQCLTDCTEDEACSFFTVSTTEPEISCDFYAWTSDNVACMTSDQKRDALGNSKATSFGSLRCQVKVRSHGQDSPAVYLKKGAIICGLLSSPSVLLCNVKDWMDPSEAWANATCPGVTYDQESHQVILRLGDQEFIKSLTPLEGTQDTFTNFQQVYLWKDSDMGSRPESMGCRKDTVPRPASPTEAGLTTELFSPVDLNQVIVNGNQSLSSQKHWLFKHLFSAQQANLWCLSRCVQEHSFCQLAEITESASLYFTCTLYPEAQVCDDIMESNAQGCRLILPQMPKALFRKKVILEDKVKNFYTRLPFQKLMGISIRNKVPMSEKSISNGFFECERRCDADPCCTGFGFLNVSQLKGGEVTCLTLNSLGIQMCSEENGGAWRILDCGSPDIEVHTYPFGWYQKPIAQNNAPSFCPLVVLPSLTEKVSLDSWQSLALSSVVVDPSIRHFDVAHVSTAATSNFSAVRDLCLSECSQHEACLITTLQTQPGAVRCMFYADTQSCTHSLQGQNCRLLLREEATHIYRKPGISLLSYEASVPSVPISTHGRLLGRSQAIQVGTSWKQVDQFLGVPYAAPPLAERRFQAPEPLNWTGSWDASKPRASCWQPGTRTSTSPGVSEDCLYLNVFIPQNVAPNASVLVFFHNTMDREESEGWPAIDGSFLAAVGNLIVVTASYRVGVFGFLSSGSGEVSGNWGLLDQVAALTWVQTHIRGFGGDPRRVSLAADRGGADVASIHLLTARATNSQLFRRAVLMGGSALSPAAVISHERAQQQAIALAKEVSCPMSSSQEVVSCLRQKPANVLNDAQTKLLAVSGPFHYWGPVIDGHFLREPPARALKRSLWVEVDLLIGSSQDDGLINRAKAVKQFEESRGRTSSKTAFYQALQNSLGGEDSDARVEAAATWYYSLEHSTDDYASFSRALENATRDYFIICPIIDMASAWAKRARGNVFMYHAPENYGHGSLELLADVQFALGLPFYPAYEGQFSLEEKSLSLKIMQYFSHFIRSGNPNYPYEFSRKVPTFATPWPDFVPRAGGENYKEFSELLPNRQGLKKADCSFWSKYISSLKTSADGAKGGQSAESEEEELTAGSGLREDLLSLQEPGSKTYSK

SEQ ID NO: 18307 - protein, 124 aa, Homo sapiens
MFYAHFVLSKRGPLAKIWLAAHWDKKLTKAHVFECNLESSVESIISPKVKMALRTSGHLLLGVVRIYHRKAKYLLADCNEAFIKIKMAFRPGVVDLPEENREAAYNAITLPEEFHDFDQPLPDL

SEQ ID NO: 18308 - protein, 443 aa, Homo sapiens
MASSLPWLCIILWLENALGKLEVEGNFYSENVSRILDNLLEGYDNRLRPGFGGAVTEVKTDIYVTSFGPVSDVEMTWTDERLKFGGPTEILSLNNLMVSKIWTPDTFFRNGKKSIAHNMTTPNKLFRIMQNGTILYTMRLTINADCPMRLVNFPMDGHACPLKFGSYAYPKSEIIYTWKKGPLYSVEVPEESSSLLQYDLIGQTVSSETIKSNTGEYVIMTVYFHLQRKMGYFMIQIYTPCIMTVILSQVSFWINKESVPARTVFGITTVLTMTTLSISARHSLPKVSYATAMDWFIAVCFAFVFSALIEFAAVNYFTNLQTQKAKRKAQFAAPPTVTISKATEPLEAEIVLHPDSKYHLKKRITSLSLPIVSSSEANKVLTRAPILQSTPVTPPPLSPAFGGTSKIDQYSRILFPVAFAGFNLVYWVVYLSKDTMEVSSSVE

SEQ ID NO: 18309 - protein, 929 aa, Homo sapiens
MSSRRKRAPPVRVDEEKRQQLHWNMHEDRRNEPIIISDDDEQPCPGEDVEKQKKEPMSICDKGILVESSFSGEMLEDLGWLQKKRRIKLYQKPEGNHIIKVGIYLLEAGLAKLDFLSDANSRMKKFNQLMKKVMEKLHNSIIPDVLEEDEDDPESEPEGQDIDELYHFVKQTHQQETQSIQVDVQHPALIPVLRPYQREAVNWMLQQECFRSSPATESALHFLWREIVTSEGLKLYYNPYTGCIIREYPNSGPQLLGGILADEMGLGKTVEVLALILTHTRQDVKQDALTLPEGKVVNYFIPSHYFGGKLKKTEIQNIEFEPKEKVQCPPTRVMILTAVKEMNGKKGVSILSIYKYVSSIYRYDVQRNRSLLKRMLKCLIFEGLVKQIKGHGFSGTFTLGKNYKEEDICDKTKKQAVGSPRKIQKETRKSGNKDTDSEYLPSDTSDDDDDPYYYYYKSRRNRSKLRKKLVPSTKKGKSQPFINPDSQGHCPATSDSGITDVAMSKSTCISEFNQEHETEDCAESLNHADSDVPPSNTMSPFNTSDYRFECICGELDQIDRKPRVQCLKCHLWQHAKCVNYDEKNLKIKPFYCPHCLVAMEPVSTRATLIISPSSICHQWVDEINRHVRSSSLRVLVYQGVKKDGFLQPHFLAEQDIVIITYDVLRSELNYVDIPHSNSEDGRRLRNQKRYMAIPSPLVAVEWWRICLDEAQMVECPTVKAAEMAQRLSGINRWCISGTPVQRGLEDLFGLVVFLGIEPYCVKHWWVRLLYRPYCKKNPQHLYSFIAKILWRSAKKDVIDQIQIPPQTEEIHWLHFSPVERHFYHRQHEVCCQDVVVKLRKISDWALKLSSLDRRTVTSILYPLLRLRQACCHPQAVRGEFLPLQKSTMTMEELLTSLQKKCGTECEEAHRQLVCALNGLAGIHIIKGRR

SEQ ID NO: 18310 - protein, 411 aa, Homo sapiens
MNIDIASIDMVSEVNMDYTLTMYFQQAWRDKRLSYNVIPLNLTLDNRVADQLWVPDTYFLNDKKSFVHGVTVKNRMIRLHPDGTVLYGLRITTTAACMMDLRRYPLDEQNCTLEIESYGYTTDDIEFYWRGDDNAVTGVTKIELPQFSIVDYKLITKKVVFSTGSYPRLSLSFKLKRNIGYFILQTYMPSILITILSWVSFWINYDASAARVALGITTVLTMTTINTHLRETLPKIPYVKAIDMYLMGCFVFVFMALLEYALVNYIFFGRGPQRQKKAAEKAASANNEKMRLDVNKMDPHENILLSTLEIKNEMATSEAVMGLGDPRSTMLAYDASSIQYRKAGLPRHSFGRNALERHVAQKKSRLRRRASQLKITIPDLTDVNAIDRWSRIFFPVVFSFFNIVYWLYYVN

SEQ ID NO: 18311 - protein, 395 aa, Homo sapiens
MSVTKSTEGPQGAVAIKLDLMSPPESAKKLENKDSTFLDESPSESAGLKKTKGITVFQALIHLVKGNMGTGILGLPLAVKNAGILMGPLSLLVMGFIACHCMHILVKCAQRFCKRLNKPFMDYGDTVMHGLEANPNAWLQNHAHWGRHIVSFFLIITQLGFCCVYIVFLADNLKQVVEAVNSTTNNCYSNETVILTPTMDSRLYMLSFLPFLVLLVLIRNLRILTIFSMLANISMLVSLVIIIQYITQEIPDPSRLPLVASWKTYPLFFGTAIFSFESIGVVLPLENKMKNARHFPAILSLGMSIVTSLYIGMAALGYLRFGDDIKASISLNLPNCWLYQSVKLLYIAGILCTYALQFYVPAEIIIPFAISRVSTRWALPLDLSIRLVMVCLTCE

SEQ ID NO: 18312 - protein, 149 aa, Homo sapiens
EISKLEERVYNVSAEIMAMKEEQVHLEQEIKGEVKVLNNITNDLRLKDWEHSQTLRNITLIQGPPGPPGEKGDRGPTGESGPRGFPGPIGPPGLKGDRGAIGFPGSRGLPGYAGRPGNSGPKGQKGEKGSGNTLKSRNLTTRKVFAISK

SEQ ID NO: 18313 - protein, 541 aa, Homo sapiens
MQQVLDNLGSLPSATGAAELDLIFLRGIMESPIVRSLAKAHERLEETKLEAVRDNNLELVQEILRDLAQLAEQSSTAAELAHILQEPHFQSLLETHDSVASKTYETPPPSPGLDPTFSNQPVPPDAVRMVGIRKTAGEHLGVTFRVEGGELVIARILHGGMVAQQGLLHVGDIIKEVNGQPVGSDPRALQELLRNASGSVILKILPSYQEPHLPRQVFVKCHFDYDPARDSLIPCKEAGLRFNAGDLLQIVNQDDANWWQACHVEGGSAGLIPSQLLEEKRKAFVKRDLELTPNSGTLCGSLSGKKKKRMMYLTTKNAEFDRHELLIYEEVARMPPFRRKTLVLIGAQGVGRRSLKNKLIMWDPDRYGTTVPYTSRRPKDSEREGQGYSFVSRGEMEADVRAGRYLEHGEYEGNLYGTRIDSIRGVVAAGKVCVLDVNPQAVKVLRTAEFVPYVVFIEAPDFETLRAMNRAALESGISTKQLTEADLRRTVEESSRIQRGYGHYFDLCLVNSNLERTFRELQTAMEKLRTEPQWVPVSWVY

SEQ ID NO: 18314 - protein, 977 aa, Homo sapiens
PTQHFNEERYSPAPRSMKGLSGSRTQPPLCSGHTCGLAPPEDCEHLHHGPDARPPYLLSPADSCPGGRHRCSPRSSVHSECVMMPVVLGDHVSSSTFPRMHYSSHYDTRDDCAVAHAGAKINRIPANLLDQFEKQLPLHRDGFHTLQYQRTSAAAEQRSESPGRIRHLVHSVQKLFTKSHSLEGSSKSNANGTKADGRADDHHHAHHAKHSKRSKSKERKPEGKPRPGMSSWWSSDDNLDSDSTYRTPSVLNRHHLGPVAHCYPDALQSPFGDLSLKTSKSNNDVKCSACEGLALTPDAKYLKRSSWSTLTVSQAKEAYRKSSLNLDKPLLHQDAKPALRPCHYLQVPQDEWGGYPTGGKDEEIPCRRMRSGSYIKAMGDEESGESDSSPKTSPKSAILPEPLLKSIGQRPLGEHQTQTYLQAASDVPVGHSLDPAANYNSPKFRSRNQSYMRAVSTLSQASCVSQVSEAEINGQFESVCESVFSEVESQAMDALDLPGCFRTRSHSYLRAIQAGYSQDDECIPMMTPSDITSTIRSTAAVSYTNYKKTPPPVPPRTTSKPLISVTAQSSTESTQDAYQDSRAQRMSPWPQDSRGLYNSTDSLDSNKAMNLALETAAAQRHLPESQSSSVRTSDKAILVSKAEELLKSRCSSIGIQVETATDSDTESRGLREYHSVGVQVEDEKRHGRFKRSNSVTAAVQADLELEGFPGHITTEDKGLQFGSSFQRHSEPSTPTQYSAVRTVRTQGLFSYREDYRTQVDTSTLPPPDPWLEPAIDTVETGRMSPCRRDGSWFLKLLHAETKRMEGWCKEMEREAEENDLSEEILGKIRSAVGSAQLLMSQKFQQFYWLCQQNMDPSAMPRPTSQDLAGYWDMLQLSIEDVSMKFDELQRLRLNDWKMMESPERKEERKVPPPIPKKPPKGKFPITREKSLDLPDRQRQEARRRLMAAKRAASFRQNSASERADSIEIYIPEAQTRL

SEQ ID NO: 18315 - protein, 54 aa, Homo sapiens
MQKATYYDSSAIYGGYPYQAANGFAYNANQQPYPASAALGADGEYHRPACSLQS

SEQ ID NO: 18316 - protein, 186 aa, Homo sapiens
MDSSAAPTNASNCTDALAYSSCSPAPSPGSWVNLSHLDGNLSDPCGPNRTDLGGRDSLCPPTGSPSMITAITIMALYSIVCVVGLFGNFLVMYVIVRFHRLYTNILSSNLVLGKPAEDLCFHLRLHYASAHHYRVLWTDDLAPQECPHALWLQRKGQESSKDHQDGAGGGGCVHRLLDSHSHLRHH

SEQ ID NO: 18317 - protein, 808 aa, Homo sapiens
MASSIRRGRGAWTRLLSLLLLAAWEVGSGQLRYSVPEEAKHGTFVGRIAQDLGLELEELVPRLFRVASKRHGDLLEVNLQNGILFVNSRIDREELCGRSAECSIHVEVIVDRPLQVFHVEVEVKDINDNPPIFPMTVKTIRFPESRLLDSRFPLEGASDADIGVNALLSYKLSSSEFFFLDIQANDELSESLSLVLGKSLDREETAEVNLLLVATDGGKPELTGTVQILIKVLDVNDNEPTFAQSVYKVKLLENTANGTLVVKLNASDADEGPNSEIVYSLGSDVSSTIQTKFTIDPISGEIRTKGKLDYEEAKSYEIQVTATDKGTPSMSGHCKISLKLVDINDNTPEVSITSLSLPISENASLGTVIALITVSDRDSGTNGHVTCSLTPHVPFKLVSTFKNYYSLVLDSALDRESVSAYELVVTARDGGSPSLWATTSVSIEVADVNDNAPAFAQPEYTVFVKENNPPGCHIFTVSAWDADAQENALVSYSLVERRVGERALSSYVSVHAESGKVYALQPLDHEEVELLQFQVSARDAGVPPLGSNVTLQVFVLDENDNAPALLAPRAGTAAGAVSELVPWSVGAGHVVAKVRAVDADSGYNAWLSYELQLGTGSARIPFRVGLYTGEISTTRALDEADSPRHRLLVLVKDHGEPALTATATVLVSLVESGQAPKASSRAWVGAAGSEATLVDVNVYLIIAICAVSSLLVLTVLLYTALRCSVPPTEGARAPGKPTLVCSSAVGSWSYSQQRRQRVCSGEDPPKTDLMAFSPSLSQGPDSAEEKQLSESEYVGKIWNFNLQIQLAS

SEQ ID NO: 18318 - protein, 322 aa, Homo sapiens
RGQGPEPAPGGGVEGVGARGVALKLFVQLLGCSRFGGAVVRAGEAEPSGAARSASSGREEPQPEEGEEEEEKEEERGPQWRLGARKPGSWTGEAAVCADSAPAARAPQALARASGRGGRVARRGAEESGPPHSPSRRGSASRAGPGRASETMNFLLSWVHWSLALLLYLHHAKWSQAAPMAEGGGQNHHEVVKFMDVYQRSYCHPIETLVDIFQEYPDEIEYIFKPSCVPLMRCGGCCNDEGLECVPTEESNITMQIMRIKPHQGQHIGEMSFLQHNKCECRPKKDRARQEKKSVRGKGKGQKRKRKKSRYKSWSVCDKPRR

SEQ ID NO: 18319 - protein, 1045 aa, Homo sapiens
MLESNKDSAKLDAMKRIVGMIAKGKNASELFPAVVKNVASKNIEIKKLVYVYLVRYAEEQQDLALLSISTFQRALKDPNQLIRASALRVLSSIRVPIIVPIMMLAIKEASADLSPYVRKNAAHAIQKLYSLDPEQKEMLIEVIEKLLKDKSTLVAGSVVMAFEEVCPDRIDLIHKNYRKLCNLLVDVEEWGQVVIIHMLTRYARTQFVSPWKEGDELEDNGKNFYESDDDQKEKTDKKKKPYTMDPDHRLLIRNTKPLLQSRNAAVVMAVAQLYWHISPKSEAGIISKSLVRLLRSNREVQYIVLQNIATMSIQRKGMFEPYLKSFYVRSTDPTMIKTLKLEILTNLANEANISTLLREFQTYVKSQDKQFAAATIQTIGRCATNILEVTDTCLNGLVCLLSNRDEIVVAESVVVIKKLLQMQPAQHGEIIKHMAKLLDSITVPVARASILWLIGENCERVPKIAPDVLRKMAKSFTSEDDLVKLQILNLGAKLYLTNSKQTKLLTQYILNLGKYDQNYDIRDRTRFIRQLIVPNVKSGALSKYAKKIFLAQKPAPLLESPFKDRDHFQLGTLSHTLNIKATGYLELSNWPEVAPDPSVRNVEVIELAKEWTPAGKAKQENSAKKFYSESEEEEDSSDSSSDSESESGSESGEQGESGEEGDSNEDSSEDSSSEQDSESGRESGLENKRTAKRNSKAKGKSDSEDGEKENEKSKTSDSSNDESSSIEDSSSDSESESEPESESESRRVTKEKEKKTKQDRTPLTKDVSLLDLDDFNPVSTPVALPTPALSPSLMADLEGLHLSTSSSVISVSTPAFVPTKTHVLLHRMSGKGLAAHYFFPRQPCIFGDKMVSIQITLNNTTDRKIENIHIGEKKLPIGMKMHVFNPIDSLEPEGSITVSMGIDFCDSTQTASFQLCTKDDCFNVNIQPPVGELLLPVAMSEKDFKKEQGVLTGMNETSAVIIAAPQNFTPSVIFQKVVNVANVGAVPSGQDNIHRFAAKTVHSGSLMLVTVELKEGSTAQLIINTEKTVIGSVLLRELKPVLSQG

SEQ ID NO: 18320 - protein, 753 aa, Homo sapiens
AENMADLIDGYCRLVNGTSQSFIIRPQKEGERALPSIPKLANSEKQGMRTHAVSVSGVSHCQHKVKKARRFLPLVFCSHDPPSTDEISGDETDDYAEIIDEEDTYTMPSTRDYEIQRERIELGRCIGEGQFGDVHQGIYMSPENPALAVAIKTCKNCTSDSVREKFLQEALTMRQFDHPHIVKLIGVITENPVWIIMELCTLGELRSFLQVRKYSLDLASLILYAYQLSTALAYLESKRFVHRDIAARNVLVSSNDCVKLGDFGLSRYMEDSTYYKASKGKLPIKWMAPESINFRRFTSASDVWMFGVCMWEILMHGVKPFQGVKNNDVIGRIENGERLPMPPNCPPTLYSLMTKCWAYDPSRRPRFTELKAQLSTILEEEKAQQEERMRMESRRQATVSWDSGGSDEAPPKPSRPGYPSPRSSEGFYPSPQHMVQTNHYQVSGYPGSHGITAMAGSIYPGQASLLDQTDSWNHRPQEIAMWQPNVEDSTVLDLRGIGQVLPTHLMEERLIRQQQEMEEDQRWLEKEERFLKPDVRLSRGSIDREDGSLQGPIGNQHIYQPVGKPDPAAPPKKPPRPGAPGHLGSLASLSSPADSYNEGVKPWRLQPQEISPPPTANLDRSNDKVYENVTGLVKAVIEMSSKIQPAPPEEYVPMVKEVGLALRTLLATVDETIPLLPASTHREIEMAQKLLNSDLGELINKMKLAQQYVMTSLQQEYKKQMLTAAHALAVDAKNLLDVIDQARLKMLGQTRPH

SEQ ID NO: 18321 - protein, 288 aa, Homo sapiens
MITAKPGKTPIQVLHEYGMKTKNIPVYECERSDVQIHVPTFTFRVTVGDITCTGEGTSKKLAKHRAAEAAINILKANASICFAVPDPLMPDPSKQPKNQLNPIGSLQELAIHHGWRLPEYTLSQEGGPAHKREYTTICRLESFMETGKGASKKQAKRNAAEKFLAKFSNISPENHISLTNVVGHSLGCTWHSLRNSPGEKINLLKRSLLSIPNTDYIQLLSEIAKEQGFNITYLDIDELSANGQYQCLAELSTSPITVCHGSGISCGNAQSDAAHNALQYLKIIAERK

SEQ ID NO: 18322 - protein, 815 aa, Homo sapiens
MVKLANPLYTEWILEAIKKVKKQKQRPSEERICNAVSSSHGLDRKTVLEQLELSVKDGTILKVSNKGLNSYKDPDNPGRIALPKPRNHGKLDNKQNVDWNKLIKRAVEGLAESGGSTLKSIERFLKGQKDVSALFGGSAASGFHQQLRLAIKRAIGHGRLLKDGPLYRLNTKATNVDGKESCESLSCLPPVSLLPHEKDKPVAEPIPICSFCLGTKEQNREKKPEELISCADCGNSGHPSCLKFSPELTVRVKALRWQCIECKTCSSCRDQGKNADNMLFCDSCDRGFHMECCDPPLTRMPKGMWICQICRPRKKGRKLLQKKAAQIKRRYTNPIGRPKNRLKKQNTVSKGPFSKVRTGPGRGRKRKITLSSQSASSSSEEGYLERIDGLDFCRDSNVSLKFNKKTKGLIDGLTKFFTPSPDGRKARGEVVDYSEQYRIRKRGNRKSSTSDWPTDNQDGWDGKQENEERLFGSQEIMTEKDMELFRDIQEQALQKVGVTGPPDPQVRCPSVIEFGKYEIHTWYSSPYPQEYSRLPKLYLCEFCLKYMKSRTILQQHMKKCGWFHPPANEIYRKNNISVFEVDGNVSTIYCQNLCLLAKLFLDHKTLYYDVEPFLFYVLTQNDVKGCHLVGYFSKEKHCQQKYNVSCIMILPQYQRKGYGRFLIDFSYLLSKREGQAGSPEKPLSDLGRLSYMAYWKSVILECLYHQNDKQISIKKLSKLTGICPQDITSTLHHLRMLDFRSDQFVIIRREKLIQDHMAKLQLNLRPVDVDPECLRWTPVIVSNSVVSEEEEEEAEEGENEEPQCQERELEISVRA

SEQ ID NO: 18323 - protein, 1212 aa, Homo sapiens
MTQTLPYHLSLLNVLFPGPCSRHFKFRRGKCAQPAWRKVSAPSQDLLITKVMWAMESGHLLWALLFMQSLWPQLTDGATRVYYLGIRDVQWNYAPKGRNVITNQPLDSDIVASSFLKSDKNRIGGTYKKTIYKEYKDDSYTDEVAQPAWLGFLGPVLQAEVGDVILIHLKNFATRPYTIHPHGVFYEKDSEGSLYPDGSSGPLKADDSVPPGGSHIYNWTIPEGHAPTDADPACLTWIYHSHVDAPRDIATGLIGPLITCKRGALDGNSPPQRQDVDHDFFLLFSVVDENLSWHLNENIATYCSDPASVDKEDETFQESNRMHAINGFVFGNLPELNMCAQKRVAWHLFGMGNEIDVHTAFFHGQMLTTRGHHTDVANIFPATFVTAEMVPWEPGTWLISCQVNSHFRDGMQALYKVKSCSMAPPVDLLTGKVRQYFIEAHEIQWDYGPMGHDGSTGKNLREPGSISDKFFQKSSSRIGGTYWKVRYEAFQDETFQEKMHLEEDRHLGILGPVIRAEVGDTIQVVFYNRASQPFSMQPHGVFYEKDYEGTVYNDGSSYPGLVAKPFEKVTYRWTVPPHAGPTAQDPACLTWMYFSAADPIRDTNSGLVGPLLVCRAGALGADGKQKGVDKEFFLLFTVLDENKSWYSNANQAAAMLDFRLLSEDIEGFQDSNRMHAINGFLFSNLPRLDMCKGDTVAWHLLGLGTETDVHGVMFQGNTVQLQGMRKGAAMLFPHTFVMAIMQPDNLGTFEIYCQAGSHREAGMRAIYNVSQCPGHQATPRQRYQAARIYYIMAEEVEWDYCPDRSWEREWHNQSEKDSYGYIFLSNKDGLLGSRYKKAVFREYTDGTFRIPRPRTGPEEHLGILGPLIKGEVGDILTVVFKNNASRPYSVHAHGVLESTTVWPLAAEPGEVVTYQWNIPERSGPGPNDSACVSWIYYSAVDPIKDMYSGLVGPLAICQKGILEPHGGRSDMDREFALLFLIFDENKSWYLEENVATHGSQDPGSINLQDETFLESNKMHAINGKLYANLRGLTMYQGERVAWYMLAMGQDVDLHTIHFHAESFLYRNGENYRADVVDLFPGTFEVVEMVASNPGTWLMHCHVTDHVHAGMETLFTVFSRTEHLSPLTVITKETEKAVPPRDIEEGNVKMLGMQIPIKNVEMLASVLVAISVTLLLVVLALGGVVWYQHRQRKLRRNRRSILDDSFKLLSFKQ

SEQ ID NO: 18324 - protein, 943 aa, Homo sapiens
MFLTYMETVTKELVSWMRGHESSVFSISVHASGKYAITTSSDTAQLWDLDTFQRKRKLNIRQSVGIQKVFFLPLSNTILSCFKDNSIFAWECDTLFCKYQLPAPPESSSILYKVFAVTRDGRILAAGGKSNHLHLWCLEARQLFRIIQMPTKVRAIRHLEFLPDSFDAGSNQVLGVLSQDGIMRFINMQTCKLLFEIGSLDEGISSSAISPHGRYIASIMENGSLNIYSVQALTQEINKPPPPLVKVIEDLPKNKLSSSDLKMKVTSGRVQQPAKSRESKMQTRILKQDLTGDFESKKNELPDGLNKKRLQILLKGYGEYPTKYSTLIDKGTHVAFLNLQKKYPIKSRKLLRVLQRTLSALAHWSVIFSDTPYLPLLAFPFVKLFQNNQLICFEVIATLIINWCQHWFEYFPNPPINILSMIENVLAFHDKELLQHFIDHDITSQLYAWPLLETVFSEVLTREEWLKLFDNIFSNHPSFLLMTVVAYNICSRTPLLSCNLKDDFEFFFHHRNNLDINVVIRQVYHLMETTPTDIHPDSMLNVFVALTKGQYPVFNQYPKFIVDYQTQERERIRNDELDYLRERQTVEDMQAKVDQQRVEDEAWYQKQELLRKAEETRREMLLQEEEKMIQQRQRLAAVKRELKVKEMHLQDAARRRFLKLQQDQQEMELRRLDDEIGRKVYMRDREIAATARDLEMRQLELESQKRLYEKNLTENQEALAKEMRADADAYRRKVDLEEHMFHKLIEAGETQSQKTQKVIKENLAKAEQACLNTDWQIQSLHKQKCDDLQRNKCYQEVAKLLRENRRKEIEIINAMVEEEAKKWKEAEGKEFRLRSAKKASALSDASRKWFLKQEINAAVEHAENPCHKEEPRFQNEQDSSCLPRTSQLNDSSEMDPSTQISLNRRAVEWDTTGQNLIKKVRNLRQRLTARARHRCQTPHLLAA

SEQ ID NO: 18325 - protein, 982 aa, Homo sapiens
MEEGGEGLRASLEFDGEALPCHPQEQQGVQPLTGCHSGLDSVTEGPKDVREAPSQSHLKEQSLQPIDSLISALKATEARIISGTLQATKVLDQDAVSSFSVQQVEKELDTASRKTQRVNKTLPAGQKNLPEIPLSAEVTTEESFYLSIQKDLTALLTGDTQAEISQIMNNGRKGAVCVQEPSCPLASLGSSAVTCHSAGSVGFLKEQRSALGREHPGGCDRSSSMGRPGRVKHVEFQGVEILWTGGDKRETQHPIDFETSLQRTASPDSKESSKVPRHLISSAGLCNSSSLTENVWDESWKAPSERPGTSSGTFSPVRLDESGEDEVFLQENKQHLEKTPKPERDRERISEQEEHVKGEDEDILGPGYTEDSTDVYSSQFETILDNTSLYYSAESLETLYSEPDSYFSFEMPLTPMIQQRIKEGGQFLERTSGGGHQDILSVSADGGIVMGYSSGVTNGLNDASDSIYTKGTPEIAFWGSNAGVKTTRLEAHSEMGSTEILEKETPENLSNGTSSNVEAAKRLAKRLYQLDRFKRSDVAKHLGKNNEFSKLVAEEYLKFFDFTGMTLDQSLRYFFKAFSLVGETQERERVLIHFSNRYFYCNPDTIASQDGVHCLTCAIMLLNTDLHGHNIGKKMTCQEFIANLQGVNEGVDFSKDLLKALYNSIKNEKLEWAVDDEEKKKSPSESTEEKANGTHPKTISRIGSTTNPFLDIPHDPNAAVYKSGFLARKIHADMDGKKTPRGKRGWKTFYAVLKGTVLYLQKDEYKPEKALSEEDLKNAVSVHHALASKATDYEKKPNVFKLKTADWRVLLFQTQSPEEMQGWINKINCVAAVFSAPPFPAAIGSQKKFSRPLLPATTTKLSQEEQLKSHESKLKQITTELAEHRSYPPDKKVKAKDVDEYKLKDHYLEFEKTRYEMYVSILKEGGKELLSNDESEAAGLKKSHSSPSLNPDTSPITAKVKRNVSERKDHRPETPSIKQKVT

SEQ ID NO: 18326 - protein, 976 aa, Homo sapiens
MDSLASLVLCGVSLLLSASFLPATLTMTVDKGDNVNISFKKVLIKEEDAVIYKNGSFIHSVPRHEVPDILEVHLPHAQPQDAGVYSARYIGGNLFTSAFTRLIVRRCEAQKWGPECNHLCTACMNNGVCHEDTGECICPPGFMGRTCEKACELHTFGRTCKERCSGQEGCKSYVFCLPDPYGCSCATGWKGLQCNEGIQRMTPKIVDLPDHIEVNSGKFNPICKASGWPLPTNEEMTLVKPDGTVLHPKDFNHTDHFSVAIFTIHRILPPDSGVWVCSVNTVAGMVEKPFNISVKVLPKPLNAPNVIDTGHNFAVINISSEPYFGDGPIKSKKLLYKPVNHYEAWQHIQVTNEIVTLNYLEPRTEYELCVQLVRRGEGGEGHPGPVRRFTTASIGLPPPRGLNLLPKSQTTLNLTWQPIFPSSEDDFYVEVERRSVQKSDQQNIKVPGNLTSVLLNNLHPREQYVVRARVNTKAQGEWSEDLTAWTLSDILPPQPENIKISNITHSSAVISWTILDGYSISSITIRYKVQGKNEDQHVDVKIKNATITQYQLKGLEPETAYQVDIFAENNIGSSNPAFSHELVTLPESQAPADLGGGKMLLIAILGSAGMTCLTVLLAFLIILQLKRANVQRRMAQAFQNREEPAVQFNSGTLALNRKVKNNPDPTIYPVLDWNDIKFQDVIGEGNFGQVLKARIKKDGLRMDAAIKRMKEYASKDDHRDFAGELEVLCKLGHHPNIINLLGACEHRGYLYLAIEYAPHGNLLDFLRKSRVLETDPAFAIANSTASTLSSQQLLHFAADVARGMDYLSQKQFIHRDLAARNILVGENYVAKIADFGLSRGQEVYVKKTMGRLPVRWMAIESLNYSVYTTNSDVWSYGVLLWEIVSLGGTPYCGMTCAELYEKLPQGYRLEKPLNCDDEVYDLMRQCWREKPYERPSFAQILVSLNRMLEERKTYVNTTLYEKFTYAGIDCSAEEAA

SEQ ID NO: 18327 - protein, 517 aa, Homo sapiens
DIDQLSGRDFCHSKKMTGSNTEEIDSRIRDAGNDSASTAPRSTEESLSEDVFTESELSPIREELVSSDELRQDKSSGASSESVQTVNQAEVESLTVKSESTGTPGHLRSDTEHSTNEVGTLCHKTDLNNLEMAIKEDQIADNFQGISGPKEDSTSIKGNSDQDSFLHENSLHQEESQKENMPCGETAEFKQKQSVNKGKQGKEQNQDSQTEAEELRKLWKTHTMQQTKQQRENIQQVSQKEAKHKITSADGHIESSALLKEKQRHRLHKFLCLRVGKPMRKTFVSQASATMQQYAQRDKKHEYWFAVPQERTDHLYAFFIQWSPEIYAEDTGEYTREPGFIVVKKIEESETIEDSSNQAAAREWELTKHLPPRTIGYPWTLVYGTGKHGTSLKTLYRTMTGLDTPVLMVIKDSDGQVFGALASEPLKVSDGFYGTGETFVFTFCPEFEVFKWTGDNMFFIKGDMDSLAFGGGGGEFALWLDGDLYHGRSHSCKTFGNRTLSKKEDFFIQDIEIWAFE

SEQ ID NO: 18328 - protein, 61 aa, Homo sapiens
MLPSKKTVRMPSVTQRLRDPDINPCLSESDASTRCLDENNYDRERCSTYFLRYKNCRRFWP

SEQ ID NO: 18329 - protein, 3565 aa, Homo sapiens
MTAWRRFQSLLLLLGLLVLCARLLTAAKGQNCGGLVQGPNGTIESPGFPHGYPNYANCTWIIITGERNRIQLSFHTFALEEDFDILSVYDGQPQQGNLKVRLSGFQLPSSIVSTGSILTLWFTTDFAVSAQGFKALYEVLPSHTCGNPGEILKGVLHGTRFNIGDKIRYSCLPGYILEGHAILTCIVSPGNGASWDFPAPFCRAEGACGGTLRGTSSSISSPHFPSEYENNADCTWTILAEPGDTIALVFTDFQLEEGYDFLEISGTEAPSIWLTGMNLPSPVISSKNWLRLHFTSDSNHRRKGFNAQFQVKKAIELKSRGVKMLPSKDGSHKNSVLSQGGVALVSDMCPDPGIPENGRRAGSDFSRVGANVQFSCEDNYVLQGSKSITCQRVTETLAAWSDHRPICRARTCGSNLRGPSGVITSPNYPVQYEDNAHCVWVITTTDPDKVIKLAFEEFELERGYDTLTVGDAGKVGDTRSVLYVLTGSSVPDLIVSMSNQMWLHLQSDDSIGSPGFKAVYQEIEKGGCGDPGIPAYGKRTGSSFLHGDTLTFECPAAFELVGERVITCQQNNQWSGNKPSCVFSCFFNFTASSGIILSPNYPEEYGNNMNCVWLIISEPGSRIHLIFNDFDVEPQFDFLAVKDDGISDITVLGTFSGNEVPSQLASSGHIVRLEFQSDHSTTGRGFNITYTTFGQNECHDPGIPINGRRFGDRFLLGSSVSFHCDDGFVKTQGSESITCILQDGNVVWSSTVPRCEAPCGGHLTASSGVILPPGWPGYYKDSLHCEWIIEAKPGHSIKITFDRFQTEVNYDTLEVRDGPASSSPLIGEYHGTQAPQFLISTGNFMYLLFTTDNSRSSIGFLIHYESVTLESDSCLDPGIPVNGHRHGGDFGIRSTVTFSCDPGYTLSDDEPLVCERNHQWNHALPSCDALCGGYIQGKSGTVLSPGFPDFYPNSLNCTWTIEVSHGKGVQMIFHTFHLESSHDYLLITEDGSFSEPVARLTGSVLPHTIKAGLFGNFTAQLRFISDFSISYEGFNITFSEYDLEPCDDPGVPAFSRRIGFHFGVGDSLTFSCFLGYRLEGATKLTCLGGGRRVWSAPLPRCVAECGASVKGNEGTLLSPNFPSNYDNNHECIYKIETEAGKGIHLRTRSFQLFEGDTLKVYDGKDSSSRPLGTFTKNELLGLILNSTSNHLWLEFNTNGSDTDQGFQLTYTSFDLVKCEDPGIPNYGYRIRDEGHFTDTVVLYSCNPGYAMHGSNTLTCLSGDRRVWDKPLPSCIAECGGQIHAATSGRILSPGYPAPYDNNLHCTWIIEADPGKTISLHFIVFDTEMAHDILKVWDGPVDSDILLKEWSGSALPEDIHSTFNSLTLQFDSDFFISKSGFSIQFSTSIAATCNDPGMPQNGTRYGDSREAGDTVTFQCDPGYQLQGQAKITCVQLNNRFFWQPDPPTCIAACGGNLTGPAGVILSPNYPQPYPPGKECDWRVKVNPDFVIALIFKSFNMEPSYDFLHIYEGEDSNSPLIGSYQGSQAPERIESSGNSLFLAFRSDASVGLSGFAIEFKEKPREACFDPGNIMNGTRVGTDFKLGSTITYQCDSGYKILDPSSITCVIGADGKPSWDQVLPSCNAPCGGQYTGSEGVVLSPNYPHNYTAGQICLYSITVPKEFVVFGQFAYFQTALNDLAELFDGTHAQARLLSSLSGSHSGETLPLATSNQILLRFSAKSGASARGFHFVYQAVPRTSDTQCSSVPEPRYGRRIGSEFSAGSIVRFECNPGYLLQGSTALHCQSVPNALAQWNDTIPSCVVPCSGNFTQRRGTILSPGYPEPYGNNLNCIWKIIVTEGSGIQIQVISFATEQNWDSLEIHDGGDVTAPRLGSFSGTTVPALLNSTSNQLYLHFQSDISVAAAGFHLEYKTVGLAACQEPALPSNSIKIGDRYMVNDVLSFQCEPGYTLQGRSHISCMPGTVRRWNYPSPLCIATCGGTLSTLGGVILSPGFPGSYPNNLDCTWRISLPIGYGAHIQFLNFSTEANHDFLEIQNGPYHTSPMIGQFSGTDLPAALLSTTHETLIHFYSDHSQNRQGFKLAYQAYELQNCPDPPPFQNGYMINSDYSVGQSVSFECYPGYILIGHPVLTCQHGINRNWNYPFPRCDAPCGYNVTSQNGTIYSPGFPDEYPILKDCIWLITVPPGHGVYINFTLLQTEAVNDYIAVWDGPDQNSPQLGVFSGNTALETAYSSTNQVLLKFHSDFSNGGFFVLNFHAFQLKKCQPPPAVPQAEMLTEDDDFEIGDFVKYQCHPGYTLVGTDILTCKLSSQLQFEGSLPTCEAQCPANEVRTGSSGVILSPGYPGNYFNSQTCSWSIKVEPNYNITIFVDTFQSEKQFDALEVFDGSSGQSPLLVVLSGNHTEQSNFTSRSNQLYLRWSTDHATSKKGFKIRYAAPYCSLTHPLKNGGILNRTAGAVGSKVHYFCKPGYRMVGHSNATCRRNPLGMYQWDSLTPLCQAVSCGIPESPGNGSFTGNEFTLDSKVVYECHEGFKLESSQQATAVCQEDGLWSNKGKPPTCKPVACPSIEAQLSEHVIWRLVSGSLNEYGAQVLLSCSPGYYLEGWRLLRCQANGTWNIGDERPSCRVISCGSLSFPPNGNKIGTLTVYGATAIFTCNTGYTLVGSHVRECLANGLWSGSETRCLAGHCGSPDPIVNGHISGDGFSYRDTVVYQCNPGFRLVGTSVRICLQDHKWSGQTPVCVPITCGHPGNPAHGFTNGSEFNLNDVVNFTCNTGYLLQGVSRAQCRSNGQWSSPLPTCRVVNCSDPGFVENAIRHGQQNFPESFEYGMSILYHCKKGFYLLGSSALTCMANGLWDRSLPKCLAISCGHPGVPANAVLTGELFTYGAVVHYSCRGSESLIGNDTRVCQEDSHWSGALPHCTGNNPGFCGDPGTPAHGSRLGDDFKTKSLLRFSCEMGHQLRGSPERTCLLNGSWSGLQPVCEAVSCGNPGTPTNGMIVSSDGILFSSSVIYACWEGYKTSGLMTRHCTANGTWTGTAPDCTIISCGDPGTLANGIQFGTDFTFNKTVSYQCNPGYVMEAVTSATIRCTKDGRWNPSKPVCKAVLCPQPPPVQNGTVEGSDFRWGSSISYSCMDGYQLSHSAILSCEGRGVWKGEIPQCLPVFCGDPGIPAEGRLSGKSFTYKSEVFFQCKSPFILVGSSRRVCQADGTWSGIQPTCIDPAHNTCPDPGTPHFGIQNSSRGYEVGSTVFFRCRKGYHIQGSTTRTCLANLTWSGIQTECIPHACRQPETPAHADVRAIDLPTFGYTLVYTCHPGFFLAGGSEHRTCKADMKWTGKSPVCKSKGVREVNETVTKTPVPSDVFFVNSLWKGYYEYLGKRQPATLTVDWFNATSSKVNATFSEASPVELKLTGIYKKEEAHLLLKAFQIKGQADIFVSKFENDNWGLDGYVSSGLERGGFTFQGDIHGKDFGKFKLERQDPLNPDQDSSSHYHGTSSGSVAAAILVPFFALILSGFAFYLYKHRTRPKVQYNGYAGHENSNGQASFENPMYDTNLKPTEAKAVRFDTTLNTVCTVV

SEQ ID NO: 18330 - protein, 106 aa, Homo sapiens
MVMEKPSPLLVGREFVRQYYTLLNQAPDMLHRFYGKNSSYVHGGLDSNGKPADAVYGQKEIHRKVMSQNFTNCHTKIRHVDAHATLNDGVVVQVMGLLSNNNQALR

SEQ ID NO: 18331 - protein, 298 aa, Homo sapiens
MEGKHKEELDTLKEEKENLQGLVTRQTYIIQELEKQLNRATTNNSVLQKQQLELMDTVHNLVNLCTKEGVLLKGGKREEEKPFRDCADVYQAGFNKSGIYTIYINNMPEPKKVFCNMDVNGGGWTVIQHREDGSLDFQRGWKEYKMGFGNPSGEYWLGNEFIFAITSQRQYMLRIELMDWEGNRAYSQYDRFHIGNEKQNYRLYLKGHTGTAGKQSSLILHGADFSTKDADNDNCMCKCALMLTGGWWFDACGPSNLNGMFYTAGQNHGKLNGIKWHYFKGPSYSLRSTTMMIRPLDF

SEQ ID NO: 18332 - protein, 680 aa, Homo sapiens
MAEVVFSKKKKKKKKNNMAAKEKLEAVLNVALRVPSIMLLDVLYRWDVSSFFQQIQRSSLSNNPLFQYKYLALNMHYVGYILSVVLLTLPRQHLVQLYLYFLTALLLYAGHQISRDYVRSELEFAYEGPMYLEPLSMNRFTTALIGQLVVCTLCSCVMKTKQIWLFSAHMLPLLARLCLVPLETIVIINKFAMIFTGLEVLYFLGSNLLVPYNLAKSAYRELVQVVEVYGLLALGMSLWNQLVVPVLFMVFWLVLFALQIYSYFSTRDQPASRERLLFLFLTSIAECCSTPYSLLGLVFTVSFVALGVLTLCKFYLQGYRAFMNDPAMNRGMTEGVTLLILAVQTGLIELQVVHRAFLLSIILFIVVASILQSMLEIADPIVLALGASRDKSLWKHFRAVSLCLFLLVFPAYMAYMICQFFHMDFWLLIIISSSILTSLQVLGTLFIYVLFMVEEFRKEPVENMDDVIYYVNGTYRLLEFLVALCVVAYGVSETIFGEWTVMGSMIIFIHSYYNVWLRAQLGWKSFLLRRDAVNKIKSLPIATKEQLEKHNDICAICYQDMKSAVITPCSHFFHAGCLKKWLYVQETCPLCHCHLKNSSQLPGLGTEPVLQPHAGAEQNVMFQEGTEPPGQEHTPGTRIQEGSRDNNEYIARRPDNQEGAFDPKEYPHSAKDEAHPVESA

SEQ ID NO: 18333 - protein, 404 aa, Homo sapiens
MPPFLITLFLFHSCCLRANGHLREGMTLLKTEFALHLYQSVAACRNETNFVISPAGVSLPLEILQFGAEGSTGQQLADALGYTVHDKRVKDFLHAVYATLPTSSQGTEMELACSLFVQVGTPLSPCFVEHVSWWANSSLEPADLSEPNSTAIQTSEGASRETAGGGPSEGPGGWPWEQVSAAFAQLVLVSTMSFQGTWRKRFSSTDTQILPFTCAYGLVLQVPMMHQTTEVNYGQFQDTAGHQVGVLELPYLGSAVSLFLVLPRDKDTPLSHIEPHLTASTIHLWTTSLRRARMDVFLPRFRIQNQFNLKSILNSWGVTDLFDPLKANLKGISGQDGFYVSEAIHKAKIEVLEEGTKASGATALLLLKRSRIPIFKADRPFIYFLREPNTGFVFSIGRVSNPLD

SEQ ID NO: 18334 - protein, 364 aa, Homo sapiens
MDAEAEDKTLRTRSKGTEVPMDSLIQELSVAYDCSMAKKRTAEDQALGVPVNKRKSLLMKPRHYSPKADCQEDRSDRTEDDGPLETHGHSTAEEIMIKPMDESLLSTAQENSSRKEDRYSCYQELMVKSLMHLGKFEKNVSVQTVSENLNDSGIQSLKAESDEADECFLIHSDDGRDKIDDSQPPFCSSDDNESNSESAENGWDSGSNFSEETKPPRVPKYVLTDHKKDLLEVPEIKTEGDKFIPCENRCDSETERKDPQNALAEPLDGNAQPSFPDVEEEDSESLAVMTEEGSDLEKAKGNLSLLEQAIALQAERGCVFHNTYKELDRFLLEHLAGERRQTKVIDMGGRQIFNNKHYPPIKLC

SEQ ID NO: 18335 - protein, 562 aa, Homo sapiens
MAAPILKDVVAYVEVWSSNGTENYSKTFTTQLVDMGAKVSKTFNKQVTHVIFKDGYQSTWDKAQKRGVKLVSVLWVEKCRTAGAHIDESLFPAANMNEHLSSLIKKKRKCMQPKDFNFKTPENDKRFQKKFEKMAKELQRQKTNLASQMIQQSHDNPSNSLCEAPLNISRDTLCSDEYFAGGLHSSFDDLCGNSGCGNQERKLEGSINDIKSDVCISSLVLKANNIHSSPSFTHLDKSSPQKFLSNLSKEEINLQRNIAGKVVTPDQKQAAGMSQETFEEKYRLSPTLSSTKGHLLIHSRPRSSSVKRKRVSHGSHSPPKEKCKRKRSTRRSIMPRLQLCRSEDRLQHVAGPALEALSCGESSYDDYFSPDNLKERYSENLPPESQLPSSPAQLSCRSLSKKERTSIFEMSDFSCVGKKTRTVDITNFTAKTISSPRKTGNGEGRATSSCVTSAPEEALRCCRQAGKEDACPEGNGFSYTIEDPALPKGHDDDLTPLEGSLEEMKEAVGLKSTQNKGTTSKISNSSEGEAQSEHEPCFIVDCNMETSTEEKENLPGGYSGSM

SEQ ID NO: 18336 - protein, 731 aa, Homo sapiens
MALPRLTGALRSFSNVTKQDNYNEEVADLKIKRSKLHEQVLDLGLTWKKIIKFLNEKLEKSKMQSINEDLKDILHAAKQIVGTDNGREAIESGAAFLFMTFHLKDSVGHKETKAIKQMFGPFPSSSATAACNATNRIISHFSQDDLTALVQMTEKEHGDRVFFGKNLAFSFDMHDLDHFDELPINGETQKTISLDYKKFLNEHLQEACTPELKPVEKTNGSFLWCEVEKYLNSTLKEMTEVPRVEDLCCTLYDMLASIKSGDELQDELFELLGPEGLELIEKLLQNRITIVDRFLNSSNDHRFQALQDNCKKILGENAKPNYGCQVTIQSEQEKQLMKQYRREEKRIARREKKAGEDLEVSEGLMCFDPKELRIQREQALLNARSVPILSRQRDADVEKIHYPHVYDSQAEAMKTSAFIAGAKMILPEGIQRENNKLYEEVRIPYSEPMPLSFEEKPVYIQDLDEIGQLAFKGMKRLNRIQSIVFETAYNTNENMLICAPTGAGKTNIAMLTVLHEIRQHFQQGVIKKNEFKIVYVAPMKALAAEMTDYFSRRLEPLGIIVKELTGDMQLSKSEILRTQMLVTTPEKWDVVTRKSVGDVALSQIVRLLILDEVHLLHEDRGPVLESIVARTLRQVESTQSMIRILGLSATLPNYLDVATFLHVNPYIGLFFFDGRFRPVPLGQTFLGIKCANKMQQLNNMDEVCYENVLKQVKAGHQVHLFYLLLHLFICF

SEQ ID NO: 18337 - protein, 329 aa, Homo sapiens
MDRYLLLVIWGEGKFPSAASREAEHGPEVSSGEGTENQPDFTAANVYHLLKRSISASINPEDSTFPACSVGGIPGSKKWFFAVQAIYGFYQFCSSDWQEIHFDTEKDKIEDVLQTNIEECLGAVECFEEEDSNSRESLSLADLYEEAAENLHQLSDKLPAPGRAMVDIILLLSDKDPPKLKDYLPTVGALKHLREWYSAKITIAGNHCEINCQKIAEYLSANVVSLEDLRNVIDSKELWRGKIQIWERKFGFEISFPEFCLKGVTLKNFSTSNLNTDFLAKKIIPSKDKNILPKVFHYYGPALEFVQMIKLSDLPSCYMSDIEFEFTED

SEQ ID NO: 18338 - protein, 319 aa, Homo sapiens
MDLEKNYPTPRTSRTGHGGVNQLGGVFVNGRPLPDVVRQRIVELAHQGVRPCDISRQLRVSHGCVSKILGRYYETGSIKPGVIGGSKPKVATPKVVEKIAEYKRQNPTMFAWEIRDRLLAERVCDNDTVPSVSSINRIIRTKVQQPPNQPVPASSHSIGIQESPVPNGHSLPGRDFLRKQMRGDLFTQQQLEVLDRVFERQHYSDIFTTTEPIKPEQTTEYSAMASLAGGLDDMKANLASPTPADIGSSVPGPQSYPIVTGRDLASTTLPGYPPHVPPAGQGSYSAPTLTGMVPGSPYYYSAAARGAAPPAAATAYDRH

SEQ ID NO: 18339 - protein, 182 aa, Homo sapiens
MQAWRKGPDGPQKTSSDSMSRLMDSDMDYERPNVETIKCVVVGDNAVGKTRLICARACNATLTQYQLLATHVPTVWAIDQYRVCQEVLERSRDVVDDVSVSLRLWDTFGDHHKDRRFAYGRSDVVVLCFSIANPNSLHHVKTMWYPEIKHFCPRAPVILVGCQLDLRYADLEAVNRARRPLA

SEQ ID NO: 18340 - protein, 427 aa, Homo sapiens
MVFLSGNASDSSNCTQPPAPVNISKAILLGVILGGLILFGVLGNILVILSVACHRHLHSVTHYYIVNLAVADLLLTSTVLPFSAIFEVLGYWAFGRVFCNIWAAVDVLCCTASIMGLCIISIDRYIGVSYPLRYPTIVTQRRGLMALLCVWALSLVISIGPLFGWRQPAPEDETICQINEEPGYVLFSALGSFYLPLAIILVMYCRVYVVAKRESRGLKSGLKTDKSDSEQVTLRIHRKNAPAGGSGMASAKTKTHFSVRLLKFSREKKAAKTLGIVVGCFVLCWLPFFLVMPIGSFFPDFKPSETVFKIVFWLGYLNSCINPIIYPCSSQEFKKAFQNVLRIQCLCRKQSSKHALGYTLHPPSQAVEGQHKDMVRIPVGSRETFYRISKTDGVCEWKFFSSMPRGSARITVSKDQSSCTTARSSGF

SEQ ID NO: 18341 - protein, 691 aa, Homo sapiens
MQSNMVRKKNPPLRNVASEGEGQILEPIGTESKVSGKNKEFSADQMSENTDQSDAAELNHKEEHSLHVQDPSSSSKKDLKSAVLSEKAGFNYESPSKGGNFPSFPHDEVTDRNMLAFSSPAAGGVCEPLKSPQRAEADDPQDMACTPSGDSLETKEDQKMSPKATEETGQAQSGQANCQGLSPVSVASKNPQVPSDGGVRLNKSKTDLLVNDNPDPAPLSPELQDFKCNICGYGYYGNDPTDLIKHFRKYHLGLHNRTRQDAELDSKILALHNMVQFSHSKDFQKVNRSVFSGVLQDINSSRPVLLNGTYDVQVTSGGTFIGIGRKTPDCQGNTKYFRCKFCNFTYMGNSSTELEQHFLQTHPNKIKASLPSSEVAKPSEKNSNKSIPALQSSDSGDLGKWQDKITVKAGDDTPVGYSVPIKPLDSSRQNDVLLFHYESVHESQASDVKQEANHLQGSDGQQSVKESKEHSCTKCDFITQVEEEISRHYRRAHSCYKCRQCSFTAADTQSLLEHFNTVHCQEQDITTANGEEDGHAISTIKEEPKIDFRVYNLLTPDSKMGEPVSESVVKREKLEEKDGLKEKVWTESSSDDLRNVTWRGADILRGSPSYTQASLGLLTPVSGTQEQTKTLRDSPNVEAAHLARPIYGLAVETKGFLQGAPAGGEKSGALPQQYPASGENKSKDESQSLLR

SEQ ID NO: 18342 - protein, 209 aa, Homo sapiens
MNFLLSWVHWSLALLLYLHHAKWSQAAPMAEGGGQNHHEVVKFMDVYQRSYCHPIETLVDIFQEYPDEIEYIFKPSCVPLMRCGGCCNDEGLECVPTEESNITMQIMRIKPHQGQHIGEMSFLQHNKCECRPKKDRARQEKKSVRGKGKGQKRKRKKSRPCGPCSERRKHLFVQDPQTCKCSCKNTDSRCKARQLELNERTCRCDKPRR

SEQ ID NO: 18343 - protein, 284 aa, Homo sapiens
PQLLPLLKHTTSYLHEVFEFYEEILTCRYPYSCFKTVFIDEAYVEVAAYASMSIFRSDEWVLKGISGYIYGLWMKKTFGVNEYRHWIKEELDKIVAYELKTGGVLLHPIFGGGKEKDNPASHLHFSIKHPHTLSWEYYSMFQCKAHLVMRLIENRISMEFMLQVFNKLLSLASTASSQKFQSHMWSQMLVSTSGFLKSISNVSGKDIQPLIKQWVDQSGVVKFYGSFAFNRKRNVLELEIKQDYTSPGTQKYVGPLKVTVQELDGSFNHTLQIEENSLKHDIPC

SEQ ID NO: 18344 - protein, 911 aa, Homo sapiens
MAEKAPPGLNRKTSRSTLSLPPEPVDIIRSKTCSRRVKINVGGLNHEVLWRTLDRLPRTRLGKLRDCNTHESLLEVCDDYNLNENEYFFDRHPGAFTSILNFYRTGKLHMMEEMCALSFGQELDYWGIDEIYLESCCQARYHQKKEQMNEELRREAETMREREGEEFDNTCCPDKRKKLWDLLEKPNSSVAAKILAIVSILFIVLSTIALSLNTLPELQETDEFGQLNDNRQLAHVEAVCIAWFTMEYLLRFLSSPNKWKFFKGPLNVIDLLAILPYYVTIFLTESNKSVLQFQNVRRVVQIFRIMRILRILKLARHSTGLQSLGFTLRRSYNELGLLILFLAMGIMIFSSLVFFAEKDEDATKFTSIPASFWWATITMTTVGYGDIYPKTLLGKIVGGLCCIAGVLVIALPIPIIVNNFSEFYKEQKRQEKAIKRREALERAKRNGSIVSMNLKDAFARSMELIDVAVEKAGESANTKDSADDNHLSPSRWKWARKALSETSSNKSFENKYQEVSQKDSHEQLNNTSSSSPQHLSAQKLEMLYNEITKTQPHSHPNPDCQEKPERPSAYEEEIEMEEVVCPQEQLAVAQTEVIVDMKSTSSIDSFTSCATDFTETERSPLPPPSASHLQMKFPTDLPGTEEHQRARGPPFLTLSREKGPAARDGTLEYAPVDITVNLDASGSQCGLHSPLQSDNATDSPKSSLKGSNPLKSRSLKVNFKENRGSAPQTPPSTARPLPVTTADFSLTTPQHISTILLEETPSQGDRPLLGTEVSAPCQGPSKGLSPRFPKQKLFPFSSRERRSFTEIDTGDDEDFLELPGAREEKQVDSSPNCFADKPSDGRDPLREEGSVGSSSPQDTGHNCRQDIYHAVSEVKKDSSQEGCKMENHLFAPEIHSNPGDTGYCPTRETSM

SEQ ID NO: 18345 - protein, 3590 aa, Homo sapiens
METCDSPPISRQENGQSTSKLCGTTQLDNEVPEKVAGMEPDRENSSTDDNLKTDERKSEALLGFSVENAAATQVTSAKEIPCNECATSFPSLQKYMEHHCPNARLPVLKDDNESEISELEDSDVENLTGEIVYQPDGSAYIIEDSKESGQNAQTGANSKLFSTAMFLDSLASAGEKSDQSASAPMSFYPQIINTFHIASSLGKPFTADQAFPNTSALAGVGPVLHSFRVYDLRHKREKDYLTSDGSAKNSCVSKDVPNNVDLSKFDGCVSDGKRKPVLMCFLCKLSFGYIRSFVTHAVHDHRMTLNDEEQKLLSNKCVSAIIQGIGKDKEPLISFLEPKKSTSVYPHFSTTNLIGPDPTFRGLWSAFHVENGDSLPAGFAFLKGSASTSSSAEQPLGITQMPKAEVNLGGLSSLVVNTPITSVSLSHSSSESSKMSESKDQENNCERPKESNVLHPNGECPVKSEPTEPGDEDEEDAYSNELDDEEVLGELTDSIGNKDFPLLNQSISPLSSSVLKFIEKGTSSSSATVSDDTEKKKQTAAVRASGSVASNYGISGKDFADASASKDSATAAHPSEIARGDEDSSATPHQHGFTPSTPGTPGPGGDGSPGSGIECPKCDTVLGSSRSLGGHMTMMHSRNSCKTLKCPKCNWHYKYQQTLEAHMKEKHPEPGGSCVYCKTGQPHPRLARGESYTCGYKPFRCEVCNYSTTTKGNLSIHMQSDKHLNNVQNLQNGNGEQVFGHSAPAPNTSLSGCGTPSPSKPKQKPTWRCEVCDYETNVARNLRIHMTSEKHMHNMMLLQQNMKQIQHNLHLGLAPAEAELYQYYLAQNIGLTGMKLENPADPQLMINPFQLDPATAAALAPGLGELSPYISDPALKLFQCAVCNKFTSDSLEALSVHVSSERSLPEEEWRAVIGDIYQCKLCNYNTQLKANFQLHCKTDKHMQKYQLVAHIKEGGKSNEWRLKCIAIGNPVHLKCNACDYYTNSVDKLRLHTTNHRHEAALKLYKHLQKQEGAVNPESCYYYCAVCDYTTKVKLNLVQHVRSVKHQQTEGLRKLQLHQQGLAPEEDNLSEIFFVKDCPPNELETASLGARTCDDDLTEQQLRSTSEEQSEEAEGAIKPTAVAEDDEKDTSERDNSEGKNSNKDSGIITPEKELKVSVAGGTQPLLLAKEEDVATKRSKPTEDNKFCHEQFYQCPYCNYNSRDQSRIQMHVLSQHSVQPVICCPLCQDVLSNKMHLQLHLTHLHSVSPDCVEKLLMTVPVPDVMMPNSMLLPAAASEKSERDTPAAVTAEGSGKYSGESPMDDKSMAGLEDSKANVEVKNEEQKPTKEPLEVSEWNKNSSKDVKIPDTLQDQLNEQQKRQPLSVSDRHVYKYRCNHCSLAFKTMQKLQIHSQYHAIRAATMCNLCQRSFRTFQALKKHLEAGHPELSEAELQQLYASLPVNGELWAESETMSQDDHGLEQEMEREYEVDHEGKASPVGSDSSSIPDDMGSEPKRTLPFRKGPNFTMEKFLDPSRPYKCTVCKESFTQKNILLVHYNSVSHLHKLKKVLQEASSPVPQETNSNTDNKPYKCSICNVAYSQSSTLEIHMRSVLHQTKARAAKLEPSGHVAGGHSIAANVNSPGQGMLDSMSLAAVNSKDTHLDAKELNKKQTPDLISAQPAHHPPQSPAQIQMQLQHELQQQAAFFQPQFLNPAFLPHFPMTPEALLQFQQPQFLFPFYIPGTEFSLGPDLGLPGSATFGMPGMTGMAGSLLEDLKQQIQTQHHVGQTQLQILQQQAQQYQATQPQLQPQKQQQQPPPPQQQQQQQASKLLKQEQSNIVSADCQIMKDVPSYKEAEDISEKPEKPKQEFISEGEGLKEGKDTKKQKSLEPSIPPPRIASGARGNAAKALLENFGFELVIQYNENRQKVQKKGKSGEGENTDKLECGTCGKLFSNVLILKSHQEHVHGQFFPYAALEKFARQYREAYDKLYPISPSSPETPPPPPPPPPLPPAPPQPSSMGPVKIPNTVSTPLQAPPPTPPPPPPPPPPPPPPPPPPPPSAPPQVQLPVSLDLPLFPSIMMQPVQHPALPPQLALQLPQMDALSADLTQLCQQQLGLDPNFLRHSQFKRPRTRITDDQLKILRAYFDINNSPSEEQIQEMAEKSGLSQKVIKHWFRNTLFKERQRNKDSPYNFSNPPITVLEDIRIDPQPTSLEHYKSDASFSKRSSRTRFTDYQLRVLQDFFDTNAYPKDDEIEQLSTVLNLPTRVIVVWFQNARQKARKSYENQAETKDNEKRELTNERYIRTSNMQYQCKKCNVVFPRIFDLITHQKKQCYKDEDDDAQDESQTEDSMDATDQVVYKHCTVSGQTDAAKNAAAPAASSGSGTSTPLIPSPKPEPEKTSPKPEYPAEKPKQSDPSPPSQGTKPALPLASTSSDPPQASTAQPQPQPQPPKQPQLIGRPPSASQTPVPSSPLQISMTSLQNSLPPQLLQYQCDQCTVAFPTLELWQEHQHMHFLAAQNQFLHSPFLERPMDMPYMIFDPNNPLMTGQLLGSSLTQMPPQASSSHTTAPTTVAASLKRKLDDKEDNNCSEKEGGNSGEDQHRDKRLRTTITPEQLEILYEKYLLDSNPTRKMLDHIAREVGLKKRVVQVWFQNTRARERKGQFRAVGPAQSHKRCPFCRALFKAKSALESHIRSRHWNEGKQAGYSLPPSPLISTEDGGESPQKYIYFDYPSLPLTKIDLSSENELASTVSTPVSKTAELSPKNLLSPSSFKAECSEDVENLNAPPAEAGYDQNKTDFDETSSINTAISDATTGDEGNTEMESTTGSSGDVKPALSPKEPKTLDTLPKPATTPTTEVCDDKFLFSLTSPSIHFNDKDGDHDQSFYITDDPDDNADRSETSSIADPSSPNPFGSSNPFKSKSNDRPGHKRFRTQMSNLQLKVLKACFSDYRTPTMQECEMLGNEIGLPKRVVQVWFQNARAKEKKFKINIGKPFMINQGGTEGTKPECTLCGVKYSARLSIRDHIFSKQHISKVRETVGSQLDREKDYLAPTTVRQLMAQQELDRIKKASDVLGLTVQQPGMMDSSSLHGISLPTAYPGLPGLPPVLLPGMNGPSSLPGFPQNSNTLTPPGAGMLGFPTSATSSPALSLSSAPTKPLLQTPPPPPPPPPPPPSSSLSGQQTEQQNKESEKKQTKPNKVKKIKEEELEATKPEKHPKKEEKISSALSVLGKVVGETHVDPIQLQALQNAIAGDPASFIGGQFLPYFIPGFASYFTPQLPGTVQGGYFPPVCGMESLFPYGPTMPQTLAGLSPGALLQQYQQYQQNLQESLQKQQKQQQEQQQKPVQAKTSKVESDQPQNSNDASETKEDKSTATESTKEEPQLESKSADFSDTYVVPFVKYEFICRKCQMMFTDEDAAVNHQKSFCYFGQPLIDPQETVLRVPVSKYQCLACDVAISGNEALSQHLQSSLHKEKTIKQAMRNAKEHVRLLPHSVCSPNPNTTSTSQSAASSNNTYPHLSCFSMKSWPNILFQASARRAASPPSSPPSLSLPSTVTSSLCSTSGVQTSLPTESCSDESDSELSQKLEDLDNSLEVKAKPASGLDGNFNSIRMDMFSV

SEQ ID NO: 18346 - protein, 375 aa, Homo sapiens
MYSSSCETTRNTTGIEESTDGMILGPEDLSYQIYDVSGESNSAVSTEDLKECLKKQLEFCFSRENLSKDLYLISQMDSDQFIPIWTVANMEEIKKLTTDPDLILEVLRSSPMVQVDEKGEKVRPSHKRCIVILREIPETTPIEEVKGLFKSENCPKVISCEFAHNSNWYITFQSDTDAQQAFKYLREEVKTFQGKPIMARIKAINTFFAKNGYRLMDSSIYSHPIQTQAQYASPVFMQPVYNPHQQYSVYSIVPQSWSPNPTPYFETPLAPFPNGSFVNGFNSPGSYKTNAAAMNMGRPFQKNRVKPQFRSSGGSEHSTEGSVSLGDGQLNRYSSRNFPAERHNPTVTGHQEQTYLQKETSTLQVEQNGDYGRGR

SEQ ID NO: 18347 - protein, 378 aa, Homo sapiens
MDKLDANVSSEEGFGSVEKVVLLTFLSTVILMAILGNLLVMVAVCWDRQLRKIKTNYFIVSLAFADLLVSVLVMPFGAIELVQDIWIYGEVFCLVRTSLDVLLTTASIFHLCCISLDRYYAICCQPLVYRNKMTPLRIALMLGGCWVIPTFISFLPIMQGWNNIGIIDLIEKRKFNQNSNSTYCVFMVNKPYAITCSVVAFYIPFLLMVLAYYRIYVTAKEHAHQIQMLQRAGASSESRPQSADQHSTHRMRTETKAAKTLCIIMGCFCLCWAPFFVTNIVDPFIDYTVPGQVWTAFLWLGYINSGLNPFLYAFLNKSFRRAFLIILCCDDERYRRPSILGQTVPCSTTTINGSTHVLSGCSPVSSFLLLFCNRPVPV

SEQ ID NO: 18348 - protein, 430 aa, Homo sapiens
MPPRRSIVEVKVLDVQKRRVPNKHYVYIIRVTWSSGSTEAIYRRYSKFFDLQMQMLDKFPMEGGQKDPKQRIIPFLPGKILFRRSHIRDVAVKRLIPIDEYCKALIQLPPYISQCDEVLQFFETRPEDLNPPKEEHIGKKKSGGDQTSVDPMVLEQYVVVANYQKQESSEISLSVGQVVDIIEKNESGWWFVSTAEEQGWVPATCLEGQDGVQDEFSLQPEEEEKYTVIYPYTARDQDEMNLERGAVVEVIQKNLEGWWKIRYQGKEGWAPASYLKKNSGEPLPPKPGPGSPSHPGALDLDGVSRQQNAVGREKELLSSQRDGRFEGRPVPDGDAKQRSPKMRQRPPPRRDMTIPRGLNLPKPPIPPQVEEEYYTIAEFQTTIPDGISFQAGLKVEDHKNVHLESPVEVPLRRIKMRTALGKHVAASMEM

SEQ ID NO: 18349 - protein, 824 aa, Homo sapiens
GNSWHEILKCISQLELAQLIGTGVKPRYISGTVRGREGSLTGTKDQAPDEFVGLGLVGGNVDWKQIASIQESIGETSSQSVVVAVDRIFTGSTRLDGNAIVDFVRWLCAVSMDELLSTTHPRMFSLQKIVEISYYNMGRIRLQWSRIWEVIGDHFNKVGCNPNEDVAIFAVDSLRQLSMKFLEKGELANFRFQKDFLRPFEHIMKRNRSPTIRDMVVRCIAQMVNSQAANIRSGWKNIFSVFHLAASDQDESIVELAFQTTGHIVTLVFEKHFPATIDSFQDAVKCLSEFACNAAFPDTSMEAIRLIRHCAKYVSDRPQAFKEYTSDDMNVAPEDRVWVRGWFPILFELSCIINRCKLDVRTRGLTVMFEIMKTYGHTYEKHWWQDLFRIVFRIFDNMKLPEQQTEKAEWMTTTCNHALYAICDVFTQYLEVLSDVLLDDIFAQLYWCVQQDNEQLARSGTNCLENVVILNGEKFTLEIWDKTCNCTLDIFKTTIPHALLTWRPNSGETAPPPPSPVSEKPLDTISQKSVDIHDSIQPRSVDNRPQAPLVSASAVNEEVSKIKSTAKFPEQKLFAALLIKCVVQLELIQTIDNIVFFPATSKKEDAENLAAAQRDAVDFDVRVDTQDQGMYRFLTSQQLFKLLDCLLESHRFAKAFNSNNEQRTALWKAGFKGKSKPNLLKQETSSLACGLRILFRMYMDESRVSAWEEVQQRLLNVCSEALSYFLTLTSESHREAWTNLLLLFLTKVLKISDNRVSMRLRIQPHISSPIRIGMRGPRAAVQELSEMNQAVPRLHCCLCKATSGLAVSSSVLAFLPPYPALFTN

SEQ ID NO: 18350 - protein, 174 aa, Homo sapiens
QDAASIPPFEPPGPGSYENLSTGTRESKPDALAGRQEASADCQDVISMTANRLSAVIQAFYMCCSCQMPPGMTSPRFIEFVCKHDEVLKCFVNRNPKIIFDHFHFLLECPELMSRFMHIIKAQPFKDRCEWFYEHLHSGQPDSDMVHRPVNENDILLVHRGVAVKLCQKQIVQS

SEQ ID NO: 18351 - protein, 1427 aa, Homo sapiens
MLESYVTPILMSYVNRYIKNLKPSDLQLSLWGGDVVLSKLELKLDVLEQELKLPFTFLSGHIHELRIHVPWTKLGSEPVVITINTMECILKLKDGIQDDHESCGSNSTNRSTAESTKSSIKPRRMQQAAPTDPDLPPGYVQSLIRRVVNNVNIVINNLILKYVEDDIVLSVNITSAECYTVGELWDRAFMDISATDLVLRKVINFSDCTVCLDKRNASGKIEFYQDPLLYKCSFRTRLHFTYENLNSKMPSVIKIHTLVESLKLSITDQQLPMFIRIMQLGIALYYGEIGNFKEGEIEDLTCHNKDMLGNITGSEDETRIDMQYPAQHKGQELYSQQDEEQPQGWVSWAWSFVPAIVSYDDGEEDFVGNDPASTMHQQKAQTLKDPIVSIGFYCTKATVTFKLTEMQVESSYYSPQKVKSKEVLCWEQEGTTVEALMMGEPFFDCQIGFVGCRAMCLKGIMGVKDFEENMNRSETEACFFICGDNLSTKGFTYLTNSLFDYRSPENNGTRAEFILDSTHHKETYTEIAGMQRFGAFYMDYLYTMENTSGKGSTNQQDFSSGKSEDLGTVQEKSTKSLVIGPLDFRLDSSAVHRILKMIVCALEHEYEPYSRLKSDIKDENETILNPEEVALLEEYIPTRHTSVTLLKCTCTISMAEFNLLDHLLPVIMGEKNSSNFMNTTNFQSLRPLPSIRILVDKINLEHSVPMYAEQLVHVVSSLTQPSDNLLHYCYVHCYLKIFGFQAGLTSLDCSGSYCLPVPVIPSFSTALYGKLLKLPTCWTKRSQIAITEGIFELPNLTIQATRAQTLLLQAIYQSWSHLGNVSSSAVIEALINEIFLSIGVKSKNPLPTLEGSIQNVELKYCSTSLVKCASGTMGSIKICAKAPVDSGKEKLIPLLQGPSDTKDLHSTKWLNESRKPESLLAPDLMAFTIQVPQYIDYCHNSGAVLLCSIQGLAVNIDPILYTWLIYQPQKRTSRHMQQQPVVAVPLVMPVCRRKEDEVSIGSAPLAKQQSYQASEYASSPVKTKTVTESRPLSVPVKAMLNISESCRSPEERMKEFIGIVWNAVKHLTLQLEVQSCCVFIPNDSLPSPSTIVSGDIPGTVRSWYHGQTSMPGTLVLCLPQIKIISAGHKYMEPLQEIPFVIPRPILEEGDAFPWTISLHNFSIYTLLGKQVTLCLVEPMGCTSTLAVTSQKLLATGPDTRHSFVVCLHVDLESLEIKCSNPQVQLFYELTDIMNKVWNKIQKRGNLNLSPTSPETMAGPVPTSPVRSSIGTAPPDTSTCSPSADIGTTTEGDSIQAGEESPFSDSVTLEQTTSNIGGTSGRVSLWMQWVLPKITIKLFAPDPENKGTEVCMVSELEDLSASIDVQDVYTKVKCKIESFNIDHYRSRPGEGWQSGHFEGVFLQCKEKSVPWGRVLVFGAMWRCLPFLY

SEQ ID NO: 18352 - protein, 1227 aa, Homo sapiens
MTTHVTLEDALSNVDLLEELPLPDQQPCIEPPPSSIMYQANFDTNFEDRNAFVTGIARYIEQATVHSSMVKCNEQPNRVEIYEKTVEVLEPEVTKLMKFMYFQRKAIERFCSEVKRLCHAERRKDFVSEAYLLTLGKFINMFAVLDELKNMKCSVKNDHSAYKRAAQFLRKMADPQSIQESQNLSMFLANHNRITQCLHQQLEVIPGYEELLADIVNICVDYYENKMYLTPSEKHMLLKVMGFGLYLMDGNVSNIYKLDAKKRINLSKIDKFFKQLQVVPLFGDMQIELARYIKTSAHYEENKSKWTCTQSSISPQYNICEQMVQIRDDHIRFISELARYSNSEVVTGSGLDSQKSDEEYRELFDLALRGLQLLSKWSAHVMEVYSWKLVHPTDKFCNKDCPGTAEEYERATRYNYTSEEKFAFVEVIAMIKGLQVLMGRMESVFNQAIRNTIYAALQDFAQVTLREPLRQAVRKKKNVLISVLQAIRKTICDWEGGREPPNDPCLRGEKDPKGGFDIKVPRRAVGPSSTQLYMVRTMLESLIADKSGSKKTLRSSLDGPIVLAIEDFHKQSFFFTHLLNISEALQQCCDLSQLWFREFFLELTMGRRIQFPIEMSMPWILTDHILETKEPSMMEYVLYPLDLYNDSAYYALTKFKKQFLYDEIEAEVNLCFDQFVYKLADQIFAYYKAMAGSVLLDKRFRAECKNYGVIIPYPPSNRYETLLKQRHVQLLGRSIDLNRLITQRISAAMYKSLDQAISRFESEDLTSIVELEWLLEINRLTHRLLCKHMTLDSFDAMFREANHNVSAPYGRITLHVFWELNFDFLPNYCYNGSTNRFVRTAIPFTQEPQRDKPANVQPYYLYGSKPLNIAYSHIYSSYRNFVGPPHFKTICRLLGYQGIAVVMEELLKIVKSLLQGTILQYVKTLIEVMPKICRLPRHEYGSPGILEFFHHQLKDIIEYAELKTDVFQSLREVGNAILFCLLIEQALSQEEVCDLLHAAPFQNILPRVYIKEGERLEVRMKRLEAKYAPLHLVPLIERLGTPQQIAIAREGDLLTKERLCCGLSMFEVILTRIRSYLQDPIWRGPPPTNGVMHVDECVEFHRLWSAMQFVYCIPVGTNEFTAEQCFGDGLNWAGCSIIVLLGQQRRFDLFDFCYHLLKVQRQDGKDEIIKNVPLKKMADRIRKYQILNNEVFAILNKYMKSVETDSSTVEHVRCFQPPIHQSLATTC

SEQ ID NO: 18353 - protein, 511 aa, Homo sapiens
MANPKEKTAMCLVNELARFNRVQPQYKLLNERGPAHSKMFSVQLSLGEQTWESEGSSIKKAQQAVANKALTESTLPKPVQKPPKSNVNNNPGSITPTVELNGLAMKRGEPAIYRPLDPKPFPNYRANYNFRGMYNQRYHCPVPKIFYVQLTVGNNEFFGEGKTRQAARHNAAMKALQALQNEPIPERSPQNGESGKDVDDDKDANKSEISLVFEIALKRNMPVSFEVIKESGPPHMKSFVTRVSVGEFSAEGEGNSKKLSKKRAATTVLQELKKLPPLPVVEKPKLFFKKRPKTIVKAGPEYGQGMNPISRLAQIQQAKKEKEPDYVLLSERGMPRRREFVMQVKVGNEVATGTGPNKKIAKKNAAEAMLLQLGYKASTNLQDQLEKTGENKGWSGPKPGFPEPTNNTPKGILHLSPDVYQEMEASRHKVISGTTLGYLSPKDMNQPSSSFFSISPTSNSSATIARELLMNGTSSTAEAIGLKGSSPTPPCSPVQPSKQLEYLARIQGFQV

SEQ ID NO: 18354 - protein, 291 aa, Homo sapiens
MKTATNIYIFNLALADALVTTTMPFQSTVYLMNSWPFGDVLCKIVISIDYYNMFTSIFTLTMMSVDRYIAVCHPVKALDFRTPLKAKIINICIWLLSSSVGISAIVLGGTKVREDVDVIECSLQFPDDDYSWWDLFMKICVFIFAFVIPVLIIIVCYTLMILRLKSVRLLSGSREKDRNLRRITRLVLVVVAVFVVCWTPIHIFILVEALGSTSHSTAALSSYYFCIALGYTNSSLNPILYAFLDENFKRCFRDFCFPLKMRMERQSTSRVRNTVQDPAYLRDIDGMNKPV

SEQ ID NO: 18355 - protein, 97 aa, Homo sapiens
KLFWYQVHFDMHVRTHTREHLYYCSQCHYSSITKNCLKRHVIQKHSNILLKCPTDGCDYSTPDKYKLQAHLKVHTALVFGGGSCNTMNECLFLQILI

SEQ ID NO: 18356 - protein, 1291 aa, Homo sapiens
MSSAVGPRGPRPPTVPPPMQELPDLSHLTEEERNIIMAVMDRQKEEEEKEEAMLKCVVRDMAKPAACKTPRNAENQPHQPSPRLHQQFESYKEQVRKIGEEARRYQGEHKDDAPTCGICHKTKFADGCGHLCSYCRTKFCARCGGRVSLRSNNEDKVVMWVCNLCRKQQEILTKSGAWFFGSGPQQTSQDGTLSDTATGAGSEVPREKKARLQERSRSQTPLSTAAASSQDAAPPSAPPDRSKGAEPSQQALGPEQKQASSRSRSEPPRERKKTPGLSEQNGKGALKSERKRVPKTSAQPVEGAVEERERKERRESRRLEKGRSQDYPDTPEKRDEGKAADEEKQRKEEDYQTRYRSDPNLARYPVKPPPEEQQMRMHARVSRARHERRHSDVALPRTEAGAALPEGKAGKRAPAAARASPPDSPRAYSAERTAETRAPGAKQLTNHSPPAPRHGPVPAEAPELKAQEPLRKQSRLDPSSAVLMRKAKREKVETMLRNDSLSSDQSESVRPSPPKPHRSKRGGKKRQMSVSSSEEEGVSTPEYTSCEDVELESESVSEKGDLDYYWLDPATWHSRETSPISSHPVTWQPSKEGDRLIGRVILNKRTTMPKDSGALLGLKVVGGKMTDLGRLGAFITKVKKGSLADVVGHLRAGDEVLEWNGKPLPGATNEEVYNIILESKSEPQVEIIVSRPIGDIPRIPESSHPPLESSSSSFESQKMERPSISVISPTSPGALKDAPQVLPGQLSVKLWYDKVGHQLIVNVLQATDLPARVDGRPRNPYVKMYFLPDRSDKSKRRTKTVKKILEPKWNQTFVYSHVHRRDFRERMLEITVWDQPRVQEEESEFLGEILIELETALLDDEPHWYKLQTHDESSLPLPQPSPFMPRRHIHGESSSKKLQRSQRISDSDISDYEVDDGIGVVPPGYRSSARESKSTTLTVPEQQRTTHHRSRSVSPHRGNDQGKPRSRLPNVPLQRSLDEIHPTRRSRSPTRHHDASRSPVDHRTRDVDSQYLSEQDRMHRQRSPTQSPPADTSFSSRRGRQLPQVPVRSGSIEQESGHKKLKSTIQRSTETGMAAEMRKMVRQPSRESTDGSINSYSSEGNLIFPGVRLGADSQFSDFLDGLGPAQLVGRQTLATPAMGDIQIGMEDKKGQLEVEVIRARSLTQKPGSKSTPAPYVKVYLLENGACIAKKKTRIARKTLDPLYQQSLVFDESPQGKVLQVIVWGDYGRMDHKCFMGVAQILLEELDLSSMVIGWYKLFPPSSLVDPTLTPLTRRASQSSLESSTGPPCIRS

SEQ ID NO: 18357 - protein, 307 aa, Homo sapiens
MSQQDAVAALSERLLVAAYKGQTENVVQLINKGARVAVTKHGRTPLHLAANKGHLPVVQILLKAGCDLDVQDDGDQTALHRATVVGNTEIIAALIHEGCALDRQDKDGNTALHEASWHGFSQSAKLLIKAGANVLAKNKAGNTALHLACQNSHSQSTRVLLLAGSRADLKNNAGDTCLHVAARYNHLSIIRLLLTAFCSVHEKNQAGDTALHVAAALNHKKVAKILLEAGADTTIVNNAGQTPLETARYHNNPEVALLLTKAPQVGFTALSMVLIMRDYKVVGTPGCNLLKPLQTNLNMECNQAVEV

SEQ ID NO: 18358 - protein, 693 aa, Homo sapiens
MHRDRISPSNSPTWSLQVFSKKKKKKKKNNMAAKEKLEAVLNVALRVPSIMLLDVLYRWDVSSFFQQIQRSSLSNNPLFQYKYLALNMHYVGYILSVVLLTLPRQHLVQLYLYFLTALLLYAGHQISRDYVRSELEFAYEGPMYLEPLSMNRFTTALIGQLVVCTLCSCVMKTKQIWLFSAHMLPLLARLCLVPLETIVIINKFAMIFTGLEVLYFLGSNLLVPYNLAKSAYRELVQVVEVYGLLALGMSLWNQLVVPVLFMVFWLVLFALQIYSYFSTRDQPASRERLLFLFLTSIAECCSTPYSLLGLVFTVSFVALGVLTLCKFYLQGYRAFMNDPAMNRGMTEGVTLLILAVQTGLIELQVVHRAFLLSIILFIVVASILQSMLEIADPIVLALGASRDKSLWKHFRAVSLCLFLLVFPAYMAYMICQFFHMDFWLLIIISSSILTSLQVLGTLFIYVLFMVEEFRKEPVENMDDVIYYVNGTYRLLEFLVALCVVAYGVSETIFGEWTVMGSMIIFIHSYYNVWLRAQLGWKSFLLRRDAVNKIKSLPIATKEQLEKHNDICAICYQDMKSAVITPCSHFFHAGCLKKWLYVQETCPLCHCHLKNSSQLPGLGTEPVLQPHAGAEQNVMFQEGTEPPGQEHTPGTRIQEGSRDNNEYIARRPDNQEGAFDPKEYPHSAKDEAHPVESA

SEQ ID NO: 18359 - protein, 581 aa, Homo sapiens
MTEGSMGVTLEASAEADLKAGNSCPELVPSRRSKLRKPKPVPLRKKAIGGEFSDTNAAVEGTPLPKASYHFSPEELDENTSPLLGDARFQKSPPDLKETPGTLSSDTNDSGVELGEESRSSPLKLEFDFTEDTGNIEARKALPRKLGRKLGSTLTPKIQKDGISKSAGLEQPTDPVARDGPLSQTSSKPDPSQWESPSFNPFGSHSVLQNSPPLSSEGSYHFDPDNFDESMDPFKPTTTLTSSDFCSPTGNHVNEILESPKKAKSRLITSGCKVKKHETQSLALDACSRDEGAVISQISDISNRDGHATDEEKLASTSCGQKSAGAEVKGIEKETCQKMEEDGSTVLGLLESSAEKAPVSVSCGGESPLDGICLSESDKTAVLTLIREEIITKEIEANEWKKKYEETRQEVLEMRKIVAEYEKTIAQMIEDEQRTSMTSQKSFQQLTMEKEQALADLNSVERSLSDLFRRYENLKGVLEGFKKNEEALKKCAQDYLARVKQEEQRYQALKIHAEEKLDKANEEIAQVRTKAKAESAALHAGLRKEQMKVESLERALQQKNQEIEELTKICDELIAKLGKTD

SEQ ID NO: 18360 - protein, 610 aa, Homo sapiens
MAAPILKDVVAYVEVWSSNGTENYSKTFTTQLVDMGAKVSKTFNKQVTHVIFKDGYQSTWDKAQKRGVKLVSVLWVEKCRTAGAHIDESLFPAANMNEHLSSLIKKKRKCMQPKDFNFKTPENDKRFQKKFEKMAKELQRQKTNLDDDVPILLFESNGSLIYTPTIEINSRHHSAMEKRLQEMKEKRENLSPTSSQMIQQSHDNPSNSLCEAPLNISRDTLCSDEYFAGGLHSSFDDLCGNSGCGNQERKLEGSINDIKSDVCISSLVLKANNIHSSPSFTHLDKSSPQKFLSNLSKEEINLQRNIAGKVVTPDQKQAAGMSQETFEEKYRLSPTLSSTKGHLLIHSRPRSSSVKRKRVSHGSHSPPKEKCKRKRSTRRSIMPRLQLCRSEDRLQHVAGPALEALSCGESSYDDYFSPDNLKERYSENLPPESQLPSSPAQLSCRSLSKKERTSIFEMSDFSCVGKKTRTVDITNFTAKTISSPRKTGNGEGRATSSCVTSAPEEALRCCRQAGKEDACPEGNGFSYTIEDPALPKGHDDDLTPLEGSLEEMKEAVGLKSTQNKGTTSKISNSSEGEAQSEHEPCFIVDCNMETSTEEKENLPGGYSGSM

SEQ ID NO: 18361 - protein, 149 aa, Homo sapiens
LLLFCLCAFLSLSWYAALSGQKGDVVDVYQREFLALRDRLHAAEQESLKRSKELNLVLDEIKRAVSERQALRDGDGNRTWGRLTGPPIEAVERLTPARAAPAHRLPSPATPAGQGEQSAARGARGPGPHRSVGGDGHPERAARGALVPD

SEQ ID NO: 18362 - protein, 613 aa, Homo sapiens
YLIEPEKIQEMFPLLNMNKVLAGLYNPGDGHIDPYSLTMALAAGARKCGALLKYPAPVTSLKARSDGTWDVETPQGSMRANRIVNAAGFWAREVGKMIGLEHPLIPVQHQYVVTSTISEVKALKRELPVLRDLEGSYYLRQERDGLLFGPYESQEKMKVQDSWVTNGVPPGFGKELFESDLDRIMEHIKAAMEMVPVLKKADIINVVNGPITYSPDILPMVGPHQGVRNYWVAIGFGYGIIHAGGVGKYLSDWILHGEPPFDLIELDPNRYGKWTTTQYTEAKARESYGFNNIVGYPKEERFAGRPTQRVSGLYQRLESKCSMGFHAGWEQPHWFYKPGQDTQYRPSFRRTNWFEPVGSEYKQVMQRVAVTDLSPFGKFNIKGQDSIRLLDHLFANVIPKVGFTNISHMLTPKGRVYAELTVSHQSPGEFLLITGSGSELHDLRWIEEEAVKGGYDVEIKNITDELGVLGVAGPQARKVLQKLTSEDLSDDVFKFLQTKSLKVSNIPVTAIRISYTGELGWELYHRREDSVALYDAIMNAGQEEGIDNFGTYAMNALRLEKAFRAWGLEMNCDTNPLEAGLEYFVKLNKDQNSCFAHFKEENGWVSRWAIRPY

SEQ ID NO: 18363 - protein, 206 aa, Homo sapiens
NMQKLKLIRMCPYYEEWPTLSIYELIALLKWKKFPPGHVIVESGNIISFVGYINSGCCNIYRSIIGFVKLRSNKVKRSQKLVYMGKLKEKESFGEISVLLQVPFTCTIITKKEVEMAIIEDKDLFELDPVTKQLMLQTAKPTFGHLTDEDVKNEYLKKEQQKEWKDFKDKTVKNSLYYKGIIPGFGKWDHYCTSIPRNLKDTLVNY

SEQ ID NO: 18364 - protein, 468 aa, Homo sapiens
MAKLYMVSDASGSMRVTVVAEENPFSMAMLLSEECFILDHGAAKQIFVWKGKDANPQERKAAMKTAEEFLQQMNYSKNTQIQVLPEGGETPIFKQFFKDWRDKDQSDGFGKVYVTEKVAQIKQIPFDASKLHSSPQMAAQHNMVDDGSGKVEIWRVENNGRIQVDQNSYGEFYGGDCYIILYTYPRGQIIYTWQGANATRDELTTSAFLTVQLDRSLGGQAVQIRVSQGKEPVHLLSLFKDKPLIIYKNGTSKKGGQAPAPPTRLFQVRRNLASITRIVEVDVDANSLNSNDVFVLKLPQNSGYIWVGKGASQEEEKGAEYVASVLKCKTLRIQEGEEPEEFWNSLGGKKDYQTSPLLETQAEDHPPRLYGCSNKTGRFVIEEIPGEFTQDDLAEDDVMLLDAWEQIFIWIGKDANEVEKKESLKSAKMYLETDPSGRDKRTPIVIIKQGHEPPTFTGWFLGWDSSKW

SEQ ID NO: 18365 - protein, 1143 aa, Homo sapiens
MHSSSYSYRSSDSVFSNTTSTRTSLDSNENLLLVHCGPTLINSCISFGSESFDGHRLEMLQQIANRVQRDSVICEDKLILAGNALQSDSKRLESGVQFQNEAEIAGYILECENLLRQHVIDVQILIDGKYYQADQLVQRVAKLRDEIMALRNECSSVYSKGRILTTEQTKLMISGITQSLNSGFAQTLHPSLTSGLTQSLTPSLTSSSMTSGLSSGMTSRLTPSVTPAYTPGFPSGLVPNFSSGVEPNSLQTLKLMQIRKPLLKSSLLDQNLTEEEINMKFVQDLLNWVDEMQVQLDRTEWGSDLPSVESHLENHKNVHRAIEEFESSLKEAKISEIQMTAPLKLTYAEKLHRLESQYAKLLNTSRNQERHLDTLHNFVSRATNELIWLNEKEEEEVAYDWSERNTNIARKKDYHAELMRELDQKEENIKSVQEIAEQLLLENHPARLTIEAYRAAMQTQWSWILQLCQCVEQHIKENTAYFEFFNDAKEATDYLRNLKDAIQRKYSCDRSSSIHKLEDLVQESMEEKEELLQYKSTIANLMGKAKTIIQLKPRNSDCPLKTSIPIKAICDYRQIEITIYKDDECVLANNSHRAKWKVISPTGNEAMVPSVCFTVPPPNKEAVDLANRIEQQYQNVLTLWHESHINMKSVVSWHYLINEIDRIRASNVASIKTMLPGEHQQVLSNLQSRFEDFLEDSQESQVFSGSDITQLEKEVNVCKQYYQELLKSAEREEQEESVYNLYISEVRNIRLRLENCEDRLIRQIRTPLERDDLHESVFRITEQEKLKKELERLKDDLGTITNKCEEFFSQAAASSSVPTLRSELNVVLQNMNQVYSMSSTYIDKLKTVNLVLKNTQAAEALVKLYETKLCEEEAVIADKNNIENLISTLKQWRSEVDEKRQVFHALEDELQKAKAISDEMFKTYKERDLDFDWHKEKADQLVERWQNVHVQIDNRLRDLEGIGKSLKYYRDTYHPLDDWIQQVETTQRKIQENQPENSKTLATQLNQQKMLVSEIEMKQSKMDECQKYAEQYSATVKDYELQTMTYRAMVDSQQKSPVKRRRMQSSADLIIQEFMDLRTRYTALVTLMTQYIKFAGDSLKRLEEEEVIINSEHPVNIKELEMSSNYSVVWESKTCFMINLCGR

SEQ ID NO: 18366 - protein, 325 aa, Homo sapiens
MAMNYNAKDEVDGGPPCAPGGTAKTRRPDNTAFKQQRLPAWQPILTAGTVLPIFFIIGLIFIPIGIGIFVTSNNIREIEGNVFMYYGLSNFYQNHRRYVKSRDDSQLNGDSSALLNPSKECEPYRRNEDKPIAPCGAIANSMFNDTLELFLIGNDSYPIPIALKKKGIAWWTDKNVKFRNPPGGDNLEERFKGTTKPVNWLKPVYMLDSDPDNNGFINEDFIVWMRTAALPTFRKLYRLIERKSDLHPTLPAGRYSLNVTYNYPVHYFDGRKRMILSTISWMGGKNPFLGIAYIAVGSISFLLGVVLLVINHKYRNSSNTADITI

SEQ ID NO: 18367 - protein, 318 aa, Homo sapiens
MSFNLQSSKKLFIFLGKSLFSLLEAMIFALLPKPRKNVAGEIVLITGAGSGLGRLLALQFARLGSVLVLWDINKEGNEETCKMAREAGATRVHAYTCDCSQKEGVYRVADQVKKEVGDVSILINNAGIVTGKKFLDCPDELMEKSFDVNFKAHLWTYKAFLPAMIANDHGHLVCISSSAGLSGVNGLADYCASKFAAFGFAESVFVETFVQKQKGIKTTIVCPFFIKTGMFEGCTTGCPSLLPILEPKYAVEKIVEAILQEKMYLYMPKLLYFMMFLKRLHLAQDGSECLTEAMWDRAKDPGQAIRNSGLRSHYSLSL

SEQ ID NO: 18368 - protein, 1368 aa, Homo sapiens
MRPPGFLSRAPSLNRAERGIWSCSMDQREPLPPAPAENEMKYDTNNNEEEEGEQFDFDSGDEIPEADRQAPSAPETGGAGASEAPAPTGGEDGAGAETTPVAEPTKLVLPMKVNPYSVIDITPFQEDQPPTPVPSAEEENVGLHVPCGYLVPVPCGYAVPSNLPLLLPAYSSPVIICATSLDEEAETPEVTEDRQPNSLSSEEPPTSEDQVGREDSALARWAADPANTAWMENPEEAIYDDVPRENSDSEPDEMIYDDVENGDEGGNSSLEYGWSSSEFESYEEQSDSECKNGIPRSFLRSNHKKQLSHDLTRLKEHYEKKMRDLMASTVGVVEIQQLRQKHELKMQKLVKAAKDGTKDGLERTRAAVKRGRSFIRTKSLIAQDHRSSLEEEQNLFIDVDCKHPEAILTPMPEGLSQQQVVRRYILGSVVDSEKNYVDALKRILEQYEKPLSEMEPKVLSERKLKTVFYRVKEILQCHSLFQIALASRVSEWDSVEMIGDVFVASFSKSMVLDAYSEYVNNFSTAVAVLKKTCATKPAFLEFLKEQEASPDRTTLYSLMMKPIQRFPQFILLLQDMLKNTSKGHPDRLPLQMALTELETLAEKLNERKRDADQRCEVKQIAKAINERYLNKLLSSGSRYLIRSDDMIETVYNDRGEIVKTKERRVFMLNDVLMCATVSSRPSHDSRVMSSQRYLLKWSVPLGHVDAIEYGSSAGTGEHSRHLAVHPPESLAVVANAKPNKVYMGPGQLYQDLQNLLHDLNVIGQITQLIGNLKGNYQNLNQSVAHDWTSGLQRLILKKEDEIRAADCCRIQLQLPGKQDKSGRPTFFTAVFNTFTPAIKESWVNSLQMAKLALEEENHMGWFCVEDDGNHIKKEKHPLLVGHMPVMVAKQQEFKIECAAYNPEPYLNNESQPDSFSTAHGFLWIGSCTHQMGQIAIVSFQNSTPKVIECFNVESRILCMLYVPVEEKRREPGAPPDPETPAVRASDVPTICVGTEEGSISIYKSSQGSKKVRLQHFFTPEKSTVMSLACTSQSLYAGLVNGAVASYARAPDGSWDSEPQKVIKLGVLPVRSLLMMEDTLWAASGGQVFIISVETHAVEGQLEAHQEEGMVISHMAVSGVGIWIAFTSGSTLRLFHTETLKHLQDINIATPVHNMLPGHQRLSVTSLLVCHGLLMVGTSLGVLVALPVPRLQGIPKVTGRGMVSYHAHNSPVKFIVLATALHEKDKDKSRDSLAPGPEPQDEDQKDALPSGGAGSSLSQGDPDAAIWLGDSLGSMTQKSDLSSSSGSLSLSHGSSSLEHRSEDSTIYDLLKDPVSLRSKARRAKKAKASSALVVCGGQGHRRVHRKARQPHQEELAPTVMVWQIPLLNI

SEQ ID NO: 18369 - protein, 503 aa, Homo sapiens
MFCQRKDTGQKKTLDKKDGRRMSFQKPKGTIEYTVESRDSLNSIALKFDTTPNELVQLNKLFSRAVVTGQVLYVPDPEYVSSVESSPSLSPVSPLSPTSSEAEFDKTTNPDVHPTEATPSSTFTGIRPARVVSSTSEEEEAFTEKFLKINCKYITSGKGTVSGVLLVTPNNIMFDPHKNDPLVQENGCEEYGIMCPMEEVMSAAMYKEILDSKIKESLPIDIDQLSGRDFCHSKKMTGSNTEEIDSRIRDAGNDSASTAPRSTEESLSEDVFTESELSPIREELVSSDELRQDKSSGASSESVQTVNQAEVESLTVKSESTGTPGHLRSDTEHSTNEVGTLCHKTDLNNLEMAIKEDQIADNFQGISGPKEDSTSIKGNSDQDSFLHENSLHQEESQKENMPCGETAEFKQKQSVNKGKQGKEQNQDSQTEAEELRKLWKTHTMQQTKQQRENIQQVSQKEAKHKITSADGHIESKCYRVNEVSSSNCMVSPSFLTDSKAAVP

SEQ ID NO: 18370 - protein, 504 aa, Homo sapiens
SSGKVTSEYTDGSQQRLVGEKETQALTPVSDGMEVPNDSALQEFFCLSHDESNSEPHSQSSYRHKEMGQNLRETVSYCLIDDECPLMVPAFDKSEAQVLNPEHKVTETEDTQMVSKGKDLGTQNHTSELILSSPPGQKVGSSFGLTWDANDMVISTDKTMCMSTPVLEPTKVTFSVSPIEATEKCKKVEKGNRGLKNIPDSKEAPVNLCKPSLGKSTIKTNTPIGCKVRKTEIISYPRPNFKNVKAKVMSRAVLQPKDAALSKVTPRPQQTSASSPSSVNSRQQTVLSRTPRSDLNADKKAEILINKTHKQQFNKLITSQAVHVTTHSKNASHRVPRTTSAVKSNQEDVDKASSSNSACETGSVSALFQKIKGILPVKMESAECLEMTYVPNIDRISPEKKGEKENGTSMEKQELKQEIMNETFEYGSLFLGSASKTTTTSGRNISKPDSCGLRQIAAPKAKVGPPVSCLRRNSDNRNPSADRAVSPQRIRRVSSSVLPKAAFS

SEQ ID NO: 18371 - protein, 488 aa, Homo sapiens
DCGEEEECNNPCCNASNCTLRPGAECAHGSCCHQCKLLAPGTLCREQARQCDLPEFCTGKSPHCPTNFYQMDGTPCEGGQAYCYNGMCLTYQEQCQQLWGPGARPAPDLCFEKVNVAGDTFGNCGKDMNGEHRKCNMRDAKCGKIQCQSSEARPLESNAVPIDTTIIMNGRQIQCRGTHVYRGPEEEGDMLDPGLVMTGTKCGYNHICFEGQCRNTSFFETEGCGKKCNGHGVCNNNQNCHCLPGWAPPFCNTPGHGGSIDSGPMPPESVGPVVAGVLVAILVLAVLMLMYYCCRQNNKLGQLKPSALPSKLRQQFSCPFRVSQNSGTGHANPTFKLQTPQGKRKVINTPEILRKPSQPPPRPPPDYLRGGSPPAPLPAHLSRAARNSPGPGSQIERTESSRRPPPSRPIPPAPNCIVSQDFSRPRPPQKALPANPVPGRRSLPRPGGASPLRPPGAGPQQSRPLAALAPKRVWKTCNLKTGDQFQSQ

SEQ ID NO: 18372 - protein, 1479 aa, Homo sapiens
MSSGNASYRCSMSSSADFSDEDDFSQKSGSASPAPGDTLPWNLPKHERSKRKIQGGSVLDPAERAVLRIADERDKVQKKTFTKWINQHLMKVRKHVNDLYEDLRDGHNLISLLEVLSGDTLPREKGRMRFHRLQNVQIALDYLKRRQVKLVNIRNDDITDGNPKLTLGLIWTIILHFQISDIHVTGESEDMSAKERLLLWTQQATEGYAGIRCENFTTCWRDGKLFNAIIHKYRPDLIDMNTVAVQSNLANLEHAFYVAEKIGVIRLLDPEDVDVSSPDEKSVITYVSSLYDAFPKVPEGGEGIGANDVEVKWIEYQNMVNYLIQWIRHHVTTMSERTFPNNPVELKALYNQYLQFKETEIPPKETEKSKIKRLYKLLEIWIEFGRIKLLQGYHPNDIEKEWGKLIIAMLEREKALRPEVERLEMLQQIANRVQRDSVICEDKLILAGNALQSDSKRLESGVQFQNEAEIAGYILECENLLRQHVIDVQILIDGKYYQADQLVQRVAKLRDEIMALRNECSSVYSKGRILTTEQTKLMISGITQSLNSGFAQTLHPSLTSGLTQSLTPSLTSSSMTSGLSSGMTSRLTPSVTPAYTPGFPSGLVPNFSSGVEPNSLQTLKLMQIRKPLLKSSLLDQNLTEEEINMKFVQDLLNWVDEMQVQLDRTEWGSDLPSVESHLENHKNVHRAIEEFESSLKEAKISEIQMTAPLKLTYAEKLHRLESQYAKLLNTSRNQERHLDTLHNFVSRATNELIWLNEKEEEEVAYDWSERNTNIARKKDYHAELMRELDQKEENIKSVQEIAEQLLLENHPARLTIEAYRAAMQTQWSWILQLCQCVEQHIKENTAYFEFFNDAKEATDYLRNLKDAIQRKYSCDRSSSIHKLEDLVQESMEEKEELLQYKSTIANLMGKAKTIIQLKPRNSDCPLKTSIPIKAICDYRQIEITIYKDDECVLANNSHRAKWKVISPTGNEAMVPSVCFTVPPPNKEAVDLANRIEQQYQNVLTLWHESHINMKSVVSWHYLINEIDRIRASNVASIKTMLPGEHQQVLSNLQSRFEDFLEDSQESQVFSGSDITQLEKEVNVCKQYYQELLKSAEREEQEESVYNLYISEVRNIRLRLENCEDRLIRQIRTPLERDDLHESVFRITEQEKLKKELERLKDDLGTITNKCEEFFSQAAASSSVPTLRSELNVVLQNMNQVYSMSSTYIDKLKTVNLVLKNTQAAEALVKLYETKLCEEEAVIADKNNIENLISTLKQWRSEVDEKRQVFHALEDELQKAKAISDEMFKTYKERDLDFDWHKEKADQLVERWQNVHVQIDNRLRDLEGIGKSLKYYRDTYHPLDDWIQQVETTQRKIQENQPENSKTLATQLNQQKMLVSEIEMKQSKMDECQKYAEQYSATVKDYELQTMTYRAMVDSQQKSPVKRRRMQSSADLIIQEFMDLRTRYTALVTLMTQYIKFAGDSLKRLEEEEKSLEEEK

SEQ ID NO: 18373 - protein, 1318 aa, Homo sapiens
MDRQCSERPYSCTPTGRVSSAVSQNSRISPPVSTSMKDSSCMKVHQDSARRDRWSHPTTILLHKSQSSQATLMLQEHRMFMGEAYSAATGFKMLQDMNSADPFHLKYIIKKIKNMAHGSPKLVMETIHDYFIDNPEISSRHKFRLFQTLEMVIGASDVLEETWEKTFTRLALENMTKATELEDIYQDAASNMLVAICRHSWRVVAQHLETELLTGVFPHRSLLYVMGVLSSSEELFSQEDKACWEEQLIQMAIKSVPFLSTDVWSKELLWTLTTPSWTQQEQSPEKAFLFTYYGLILQAEKNGATVRRHLQALLETSHQWPKQREGMALTLGLAATRHLDDVWAVLDQFGRSRPIRWSLPSSSPKNSEDLRWKWASSTILLAYGQVAAKARAHILPWVDNIVSRMVFYFHYSSWDETLKQSFLTATLMLMGAVSRSEGAHSYEFFQTSELLQCLMVLMEKEPQDTLCTRSRQQAMHIASSLCKLRPPIDLERKSQLLSTCFRSVFALPLLDALEKHTCLFLEPPNIQLWPVARERAGWTHQGWGPRAVLHCSEHLQSLYSRTMEALDFMLQSLIMQNPTADELHFLLSHLYIWLASEKAHERQRAVHSCMILLKFLNHNGYLDPKEDFKRIGQLVGILGMLCQDPDRATQRCSLEGASHLYQLLMCHKTGEALQAESQAPKELSQAHSDGAPLWNSRDQKATPLGPQEMAKNHIFQLCSFQVIKDIMQQLTLAELSDLIWTAIDGLGSTSPFRVQAASEMLLTAVQEHGAKLEIVSSMAQAIRLRLCSVHIPQAKEKTLHAITLLARSHTCELVATFLNISIPLDSHTFQLWRALGAGQPTSHLVLTTLLACLQERPLPTGASDSSPCPKEKTYLRLLAAMNMLHELQFAREFKQAVQEGYPKLFLALLTQMHYVLELNLPSEPUPKQQAQEAAVPSPQSCSTSLEALKSLLSTTGHWHDFAHLELQGSWELFTTIHTYPKGVGLLARAMVQNHCRQIPAVLRQLLPSLQSPQERERKVAILILTKFLYSPVLLEVLPKQAALTVLAQGLHDPSPEVRVLSLQGLSNILFHPDKGSLLQGQLRPLLDGFFQSSDQVIVCIMGTVSDTLHRLGAQGTGSQSLGVAISTRSFFNDERDGIRAAAMALFGDLVAAMADRELSGLRTQVHQSMVPLLLHLKDQCPAVATQAKFTFYRCAVLLRWRLLHTLFCTLAWERGLSARHFLWTCLMTRSQEEFSIHLSQALSYLHSHSCHIKTWVTLFIGHTICYHPQAVFQMLNAVDTNLLFRTFEHLRSDPEPSIREFATSQLSFLQKVSARPKQ

SEQ ID NO: 18374 - protein, 307 aa, Homo sapiens
MDLEKNYPTPRTSRTGHGGVNQLGGVFVNGRPLPDVVRQRIVELAHQGVRPCDISRQLRVSHGCVSKILGRYYETGSIKPGVIGGSKPKVATPKVVEKIAEYKRQNPTMFAWEIRDRLLAERVCDNDTVPSVSSINRIIRTKVQQPPNQPVPASSHSIVSTGSVTQVSSVSTDSAGSSYSISGILGITSPSADTNKRKRDEGIQESPVPNGHSLPGRDFLRKQMRGDLFTQQQLEVLDRVFERQHYSDIFTTTEPIKPEQWCPVLMRQYLVQPQAVLFQAVTWRARPSPGTLHTSPPLDRAATQHRR

SEQ ID NO: 18375 - protein, 116 aa, Homo sapiens
MNNFILLEEQLIKKSQQKRRTSPSNFKVRFFVLTKASLAYFEDRHGKKRTLKGSIELSRIKCVEIVKSDISIPCHYKYPFQVVHDNYLLYVFAPDRESRQRWVLALKEEKGSRYVA

SEQ ID NO: 18376 - protein, 137 aa, Homo sapiens
MHGDYTLTLRKGGNNKLIKIFHRDGKYGFSDPLTFSSVVELINHYRNESLAQYNPKLDVKLLYPVSKYQQDQVVKEDNIEAVGKKLHEYNTQFQEKSREYDRLYEEYTRTSQEIQMKRTAIEAFNETIKIFEEQCQT

SEQ ID NO: 18377 - protein, 489 aa, Homo sapiens
MGSAFLDLTQLELNRPTDVTLTLKDPHYPDHDLGIILLSVILTPKEGESRDVTMLMRKSWKRSSKELSENEVVGSYFSVKSLFWRTCGRPALPVLGFCRAELQNPYCKNVQFQTQSLRLSDLHRKSHLWRGIVSITLIEGRDLKAMDSNGLSDPYVKFRLGHQKYKSKIMPKTLNPQWREQFDFHLYEERGGVIDITAWDKDAGKRDDFIGRCQVDLSALSREQTHKLELQLEEGEGHLVLLVTLTASATVSISDLSVNSLEDQKEREEILKRYSPLRIFHNLKDVGFLQVKVIRAEGLMAADVTGKSDPFCVVELNNDRLLTHTVYKNLNPEWNKVFTFNIKDIHSVLEVTVYDEDRDRSADFLGKVAIPLLSIQNGEQKAYVLKNKQLTGPTKGVIYLEIDVIFNAVKASLRTLIPKEQKYIEEENRLSKQLLLRNFIRMKRCVMVLVNAAYYVNSCFDWDSPPRSLAAFVLFLFVVWNFELYMIPL

SEQ ID NO: 18378 - protein, 931 aa, Homo sapiens
MKIQKKLTGCSRLMLLCLSLELLLEAGAGNIHYSVPEETDKGSFVGNIAKDLGLQPQELADGGVRIVSRGRMPLFALNPRSGSLITARRIDREELCAQSMPCLVSFNILVEDKMKLFPVEVEIIDINDNTPQFQLEELEFKMNEITTPGTRVSLPFGQDLDVGMNSLQSYQLSSNPHFSLDVQQGADGPQHPEMVLQSPLDREEEAVHHLILTASDGGEPVRSGTLRIYIQVVDANDNPPAFTQAQYHINVPENVPLGTQLLMVNATDPDEGANGEVTYSFHNVDHRVAQIFRLDSYTGEISNKEPLDFEEYKMYSMEVQAQDGAGLMAKVKVLIKVLDVNDNAPEVTITSVTTAVPENFPPGTIIALISVHDQDSGDNGYTTCFIPGNLPFKLEKLVDNYYRLVTERTLDRELISGYNITITAIDQGTPALSTETHISLLVTDINDNSPVFHQDSYSAYIPENNPRGASIFSVRAHDLDSNENAQITYSLIEDTIQGAPLSAYLSINSDTGVLYALRSFDYEQFRDMQLKVMARDSGDPPLSSNVSLSLFLLDQNDNAPEILYPALPTDGSTGVELAPLSAEPGYLVTKVVAVDRDSGQNAWLSYRLLKASEPGLFSVGLHTGEVRTARALLDRDALKQSLVVAVQDHGQPPLSATVTLTVAVADRISDILADLGSLEPSAKPNDSDLTLYLVVAAAAVSCVFLAFVIVLLAHRLRRWHKSRLLQASGGGLASMPGSHFVGVDGVRAFLQTYSHEVSLTADSRKSHLIFPQPNYADTLISQESCEKKGFLSAPQSLLEDKKEPFSQQAPPNTDWRFSQAQRPGTSGSQNGDDTGTWPNNQFDTEMLQAMILASASEAADGSSTLGGGAGTMGLSARYGPQFTLQHVPDYRQNVYIPGSNATLTNAAGKRDGKAPAGGNGNKKKSGKKEKK

SEQ ID NO: 18379 - protein, 157 aa, Homo sapiens
MSRRRISCKDLGHADCQGWLYKKKEKGSFLSNKWKKFWVILKGSSLYWYSNQMAEKADGFVNLPDFTVERASECKKKHAFKISHPQIKTFYFAAENVQEMNVWLNKLGSAVIHQESTTKDEECYSESEQEDPEIAAETPPPPHASQTQSLTAQQASS

SEQ ID NO: 18380 - protein, 229 aa, Homo sapiens
MISVKRNTWRALSLVIGDCRKKGNFEYCQDRTEKHSTMPDSPVDVKTQSRLTPPTMPPPPTTQGAPRTSSFTPTTLTNGTSHSPTALNGAPSPPNGFSNGPSSSSSSSLANQQLPPACGARQLSKLKRFLTTLQQFGNDISPEIGERVRTLVLGLVNSTLTIEEFHSKLQEATNFPLRPFVIPFLKANLPLLQRELLHCARLAKQNPAQYLAQHEQLLLDASTTSPVDS

SEQ ID NO: 18381 - protein, 2016 aa, Homo sapiens
MATGGGPFEDGMNDQDLPNWSNENVDDRLNNMDWGAQQKKANRSSEKNKKKFGVESDKRVTNDISPESSPGVGRRRTKTPHTFPHSRYMSQMSVPEQAELEKLKQRINFSDLDQRSIGSDSQGRATAANNKRQLSENRKPFNFLPMQINTNKSKDASTNPPNRETIGSAQCKELFASALSNDLLQNCQVSEEDGRGEPAMESSQIVSRLVQIRDYITKASSMREDLVEKNERSANVERLTHLIDHLKEQEKSYMKFLKKILARDPQQEPMEEIENLKKQHDLLKRMLQQQEQLRALQGRQAALLALQHKAEQAIAVMDDSVVAETAGSLSGVSITSELNEELNDLIQRFHNQLRDSQPPAVPDNRRQAESLSLTREVSQSRKPSASERLPDEKVELFSKMRVLQEKKQKMDKLLGELHTLRDQHLNNSSSSPQRSVDQRSTSAPSASVGLAPVVNGESNSLTSSVPYPTASLVSQNESENEGHLNPSEKLQKLNEVRKRLNELRELVHYYEQTSDMMTDAVNENRKDEETEESEYDSEHENSEPVTNIRNPQVASTWNEVNSHSNAQCVSNNRDGRTVNSNCEINNRSAANIRALNMPPSLDCRYNREGEQEIHVAQGEDDEEEEEEAEEEGVSGASLSSHRSSLVDEHPEDAEFEQKINRLMAAKQKLRQLQDLVAMVQDDDAAQGVISASASNLDDFYPAEEDTKQNSNNTRGNANKTQKDTGVNEKAREKFYEAKLQQQQRELKQLQEERKKLIDIQEKIQALQTACPDLQLSAASVGNCPTKKYMPAVTSTPTVNQHETSTSKSVFEPEDSSIVDNELWSEMRRHEMLREELRQRRKQLEALMAEHQRRQGLAETASPVAVSLRSDGSENLCTPQQSRTEKTMATWGGSTQCALDEEGDEDGYLSEGIVRTDEEEEEEQDASSNDNFSVCPSNSVNHNSYNGKETKNRWKNNCPFSADENYRPLAKTRQQNISMQRQENLRWVSELSYVEEKEQWQEQINQLKKQLDFSVSICQTLMQDQQTLSCLLQTLLTGPYSVMPSNVASPQVHFIMHQLNQCYTQLTWQQNNVQRLKQMLNELMRQQNQHPEKPGGKERGSSASHPPSPSLFCPFSFPTQPVNLFNIPGFTNFSSFAPGMNFSPLFPSNFGDFSQNISTPSEQQQPLAQNSSGKTEYMAFPKPFESSSSIGAEKPRNKKLPEEEVESSRTPWLYEQEGEVEKPFIKTGFSVSVEKSTSSNRKNQLDTNGRRRQFDEESLESFSSMPDPVDPTTVTKTFKTRKASAQASLASKDKTPKSKSKKRNSTQLKSRVKNIRYESASMSSTCEPCKSRNRHSAQTEEPVQAKVFSRKNHEQLEKIIKCNRSTEISSETGSDFSMFEALRDTIYSEVATLISQNESRPHFLIELFHELQLLNTDYLRQRALYALQDIVSRHISESHEKGENVKSVNSGTWIASNSELTPSESLATTDDETFEKNFERETHKISEQNDADNASVLSVSSNFEPFATDDLGNTVIHLDQALARMREYERMKTEAESNSNMRCTCRIIEDGDGAGAETPVIENRSSQQPVSEVSTIPCPRIDTQQLDRQIKAIMKEVIPFLKEHMDEVCSSQLLTSVRRMVLTLTQQNDESKEFVKFFHKQLGSILQDSLAKFAGRKLKDCGEDLLVEISEVLFNELAFFKLMQDLDNNSITVKQRCKRKIEATGVIQSCAKEAKRILEDHGSPAGEIDDEDKDKDETETVKQTQTSEVYDGPKNVRSDISDQEEDEESEGCPVSINLSKAETQALTNYGSGEDENEDEEMEEFEEGPVDVQTSLQANTEATEENEHDEQVLQRDFKKTAESKNVPLEREATSKNDQNNCPVKPCYLNILEDEQPLNSAAHKESPPTVDSTQQPNPLPLRLPEMEPLVPRVKEVKSAQETPESSLAGSPDTESPVLVNDYEAESGNISQKSDEEDFVKVEDLPLKLTIYSEADLRKKMVEEEQKNHLSGEICEMQTEELAGNSETLKEPETVGAQSI

SEQ ID NO: 18382 - protein, 531 aa, Homo sapiens
MLQITEWRFLARDEGESAVAEDPTWGEDEEPSACTTDSWAQGSVPVLHASTSEGLENFQGEVHSSGASPDSSAIAPALPFPTSHCPSAFPQDPGGVDRIPLGRSWMGRGSQEQMESWEPSPQLRVTSAPPPTSELFQEAGPGGPVEEADGQSRGLSSAGSLSASFQLSVEEAPADDADPSLDPYLVASPQASTGRGHPLGFHLSLEDLYCCMPQLDAAGDRLELRSEGVPCIASGVLVSYPSVGGATRPSASCQQQRAGHSDVRLSAHHHRMRRKAAVKRLDPARLPCHWVRPLAEVLVPDSQTRPLEAYRGRQRGEKTKARAEPQALGPGTRVSPAAFFPLRPGIPFRDLDSGPALLFPTLNLGLSSPSLESKLPLPNSRIRFLTTHPVLPDVARSRSPKLWPSVRWPSGWEGKAELLGELWAGRTRVPPQGLELADREGQDPGRWPRTTPPVLEATSQVMWKPVLLPEALKLAPGVSMWNRSTQVLLSSGVPEQEDKEGFRRHLPQGAWISPLSLTMLGPFCSQIYSKE

SEQ ID NO: 18383 - protein, 572 aa, Homo sapiens
MEGRGPYRIYDPGGSVPSGEASAAFERLVKENSRLKEKMQGIKMLGELLEESQMEATRLRQKAEELVKDNELLPPPSPSLGSFDPLAELTGKDSNVTASPTAPACPSDKPAPVQKPPSSGTSSEFEVVTPEEQNSPESSSHANAMALGPLPREDGNLMLHLQRLETTLSVCAEEPDHGQLFTHLGRMALEFNRLASKVHKNEQRTSILQTLCEQLRKENEALKAKLDKGLEQRDQAAERLREENLELKKLLMSNGNKEGASGRPGSPKMEGTGKKAVAGQQQASVTAGKVPEVVALGAAEKKVKMLEQQRSELLEVNKQWDQHFRSMKQQYEQKITELRQKLADLQKQVTDLEAEREQKQRDFDRKLLLAKSKIEMEETDKEQLTAEAKELRQKVKYLQDQLSPLTRQREYQEKEIQRLNKALEEALSIQTPPSSPPTAFGSPEGAGALLRKQELVTQNELLKQQVKIFEEDFQRERSDRERMNEEKEELKKQVEKLQAQVTLSNAQLKAFKDEEKAREALRQQKRKAKPEYTWRLPCGGVRNPNQSSQVMDPPTARPTEPESPKNDREGPQ

SEQ ID NO: 18384 - protein, 473 aa, Homo sapiens
MFSVQLSLGEQTWESEGSSIKKAQQAVANKALTESTLPKPVQKPPKSNVNNNPGSITPTVELNGLAMKRGEPAIYRPLDPKPFPNYRANYNFRGMYNQRYHCPVPKIFYVQLTVGNNEFFGEGKTRQAARHNAAMKALQALQNEPIPERSPQNGESGKDVDDDKDANKSEISLVFEIALKRNMPVSFEVIKESGPPHMKSFVTRVSVGEFSAEGEGNSKKLSKKRAATTVLQELKKLPPLPVVEKPKLFFKKRPKTIVKAGPEYGQGMNPISRLAQIQQAKKEKEPDYVLLSERGMPRRREFVMQVKVGNEVATGTGPNKKIAKKNAAEAMLLQLGYKASTNLQDQLEKTGENKGWSGPKPGFPEPTNNTPKGILHLSPDVYQEMEASRHKVISGTTLGYLSPKDMNQPSSSFFSISPTSNSSATIARELLMNGTSSTAEAIGLKGSSPTPPCSPVQPSKQLEYLARIQGFQV

SEQ ID NO: 18385 - protein, 119 aa, Homo sapiens
MTKKTRDLRRQLRKAVMDHVSDSFLETNVPLLVLIEAAKNGNEKEVKEYAQVFREHANKLIEVANLACSISNNEEGVKLVRMSASQLEALCPQVINAALALAAKPQSKLAQENMDLFKE

SEQ ID NO: 18386 - protein, 480 aa, Homo sapiens
MDFRTACEETKTGICLLQDGNQEPFKVRLHLAKDILMIQEQDVICVSGEPFYSGERTVTIRRQTVGGFGLSIKGGAEHNIPVVVSKISKEQRAELSGLLFIGDAILQINGINVRKCRHEEVVQVLRNAGEEVTLTVSFLKRAPAFLKLPLNEDCACAPSDQSSGTSSPLCDSGLHLNYHPNNTDTLSCSSWPTSPGLRWEKRWCDLRLIPLLHSRFSQYVPGTDLSRQNAFQVIAVDGVCTGIIQCLSAEDCVDWLQAIATNISNLTKHNIKKINRNFPVNQQIVYMGWCEAREQDPLQDRVYSPTFLALRGSCLYKFLAPPVTTWDWTRAEKTFSVYEIMCKILKDSDLLDRRKQCFTVQSESGEDLYFSVELESDLAQWERAFQTATFLEVERIQCKTYACVLESHLMGLTIDFSTGFICFDAATKELEFSNLFAVLHCIHSFFAAKVACLDPLFLGNQATASTAASSATTSKAKYTT

SEQ ID NO: 18387 - protein, 1275 aa, Homo sapiens
MLWRTERLYKPYVFFFKYTYAWVLLLPLLLTDNINVFLKACEQIGLKEAQLFHPGDLQDLSNRVTVKQEETDRRVKNVLITLYWLGRKAQSNPYYNGPHLNLKAFENLLGQALTKALEDSSFLKRSGRDSGYGDIWCPERGEFLAPPRHHKREDSFESLDSLGSRSLTSCSSDITLRGGREGFESDTDSEFTFKMQDYNKDDMSYRRISAVEPKTALPFNRFLPNKSRQPSYVPAPLRKKKPDKHEDNRRSWASPVYTEADGTFSRSKSMSDVSAEDVQNLRQLRYEEMQKIKSQLKEQDQKWQDDLAKWKDRRKSYTSDLQKKKEEREEIEKQALEKSKRSSKTFKEMLQDRESQNQKSTVPSRRRMYSFDDVLEEGKRPPTMTVSEASYQSERVEEKGATYPSEIPKEDSTTFAKREDRVTTEIQLPSQSPVEEQSPASLSSLRSRSTQMESTRVSASLPRSYRKTDTVRLTSVVTPRPFGSQTRGISSLPRSYTMDDAWKYNGDVEDIKRTPNNVVSTPAPSPDASQLASSLSSQKEVAATEEDVTRLPSPTSPFSSLSQDQAATSKATLSSTSGLDLMSESGEGEISPQREVSRSQDQFSDMRISINQTPGKSLDFGFTIKWDIPGIFVASVEAGSPAEFSQLQVDDEIIAINNTKFSYNDSKEWEEAMAKAQETGHLVMDVRRYGKADWGKDQPSLPFIRHKTLNLTSMATKIIGSPETKWIDATSGIYNSEKSSNLSVTTDFSESLQSSNIESKEINGIHDESNAFESKASESISLKNLKRRSQFFEQGSSDSVVPDLPVPTISAPSRWVWDQEEERKRQERWQKEQDRLLQEKYQREQEKLREEWQRAKQEAERENSKYLDEELMVLSSNSMSLTTREPSLATWEATWSEGSKSSDREGTRAGEEERRQPQEEVVHEDQGKKPQDQLVIERERKWEQQLQEEQEQKRLQAEAEEQKRPAEEQKRQAEIERETSVRIYQYRRPVDSYDIPKTEEASSGFLPGDRNKSRSTTELDDYSTNKNGNNKYLDQIGNMTSSQRRSKKEQVPSGAELERQQILQEMRKRTPLHNDNSWIRQRSASVNKEPVSLPGIMRRGESLDNLDSPRSNSWRQPPWLNQPTGFYASSSVQDFSRPPPQLVSTSNRAYMRNPSSSVPPPSAGSVKTSTTGVATTQSPTPRSHSPSASQSGSQLRNRSVSGKRICSYCNNILGKGAAMIIESLGLCYHLHCFKCVACECDLGGSSSGAEVRIRNHQLYCNDCYLRFKSGRPTAM

SEQ ID NO: 18388 - protein, 91 aa, Homo sapiens
MAEPGHSHHLSARVRGRTERRIPRLWRLLLWAGTAFQVTQGTGPELHACKESEYHYEYTACDSTGSRWRVAVPHTPGLCTSLPDPIKGTEC

SEQ ID NO: 18389 - protein, 243 aa, Homo sapiens
MRPLLVLLLLGLAAGSPPLDDNKIPSLCPGHPGLPGTPGHHGSQGLPGRDGRDGRDGAPGAPGEKGEGGRPGLPGPRGDPGPRGEAGPAGPTGPAGECSVPPRSAFSAKRSESRVPPPSDAPLPFDRVLVNEQGHYDAVTGKFTCQVPGVYYFAVHATVYRASLQFDLVKNGESIASFFQFFGGWPKPASLSGGAMVRLEPEDQVWVQVGVGDYIGIYASIKTDSTFSGFLVYSDWHSSPVFA

SEQ ID NO: 18390 - protein, 674 aa, Homo sapiens
MTSTGKDGGAQHAQYVGPYRLEKTLGKGQTGLVKLGVHCVTCQKVAIKIVNREKLSESVLMKVEREIAILKLIEHPHVLKLHDVYENKKYLYLVLEHVSGGELFDYLVKKGRLTPKEARKFFRQIISALDFCHSHSICHRDLKPENLLLDEKNNIRIADFGMASLQVGDSLLETSCGSPHYACPEVIRGEKYDGRKADVWSCGVILFALLVGALPFDDDNLRQLLEKVKRGVFHMPHFIPPDCQSLLRGMIEVDAARRLTLEHIQKHIWYIGGKNEPEPEQPIPRKVQIRSLPSLEDIDPDVLDSMHSLGCFRDRNKLLQDLLSEEENQEKMIYFLLLDRKERYPSQEDEDLPPRNEIDPPRKRVDSPMLNRHGKRRPERKSMEVLSVTDGGSPVPARRAIEMAQHGQRSRSISGASSGLSTSPLSSPRVTPHPSPRGSPLPTPKGTPVHTPKESPAGTPNPTPPSSPSVGGVPWRARLNSIKNSFLGSPRFHRRKLQVPTPEEMSNLTPESSPELAKKSWFGNFISLEKEEQIFVVIKDKPLSSIKADIVHAFLSIPSLSHSVISQTSFRAEYKATGGPAVFQKPVKFQVDITYTEGGEAQKENGIYSVTFTLLSGPSRRFKRVVETIQAQLLSTHDPPAAQHLSEPPPPAPGLSWGAGLKGQKVATSYESSL

SEQ ID NO: 18391 - protein, 187 aa, Homo sapiens
MSEMAELSELYEESSDLQMDVMPGEGDLPQMEVGSGSRELSLRPSRSGAQQLEEEGPMEEEEAQPMAAPEGKRSLANGPNAGEQPGQVAGADFESEDEGEEFDDWEDDYDYPEEEQLSGAGYRVSAALEEADKMFLRTREPALDGGFQMHYEKTPFDQLAFIEELFSLMVVNRLTEELGCDEIIDRE

SEQ ID NO: 18392 - protein, 571 aa, Homo sapiens
MVTPSPPGNHSLSLEAPRLHTASDLLGNHSLGLPLITALVGSRDRRGRVFSPVPVPLPTNPTTQHPTRQKLPSTLSGHRVCQAHGEPVLGLCPLLPLFCCPPHPPDPWSLERPRFCLLSKEEGKSFGFHLQQELGRAGHVVCRVDPGTSAQRQGLQEGDRILAVNNDVVEHEDYAVVVRRIRASSPRVLLTVLARHAHDVARAQLGEDAHLCPTLGPGVRPRLCHIVKDEGGFGFSVTHGNQGPFWLVLSTGGAAERAGVPPGARLLEVNGVSVEKFTHNQLTRKLWQSGQQVTLLVAGPEVEEQCRQLGLPLAAPLAEGWALPTKPRCLHLEKGPQGFGFLLREEKGLDGRPGQFLWEVDPGLPAKKAGMQAGDRLVAVAGESVEGLGHEETVSRIQGQGSCVSLTVVDPEADRFFSMVRLSPLLFLENTEAPASPRGSSSASLVETEDPSLEDTSVPSVPLGSRQCFLYPGPGGSYGFRLSCVASGPRLFISQVTPGGSAARAGLQVGDVILEVNGYPVGGQNDLERLQQLPEAEPPLCLKLAARSLRGLEAWIPPGAAEDWALASDLL

SEQ ID NO: 18393 - protein, 336 aa, Homo sapiens
MGAVSCRQGQHTQQGEHTRVAVPHKQGGNIRGPWARGWKSLWTGLGTIRSDLEELWELRGHHYLHQESLKPAPVLVEKPLPEWPVPQFINLFLPEFPIRPIRGQQQLKILGLVAKGSFGTVLKVLDCTQKAVFAVKVVPKVKVLQRDTVRQCKEEVSIQVCTESWKGLWEELGHRWQKEEMALKHMQAELQQQQAVLAKEVRDLKETLEFADQENQVAHLELGQVECQLKTTLEVLRERSLQCENLKDTVENLTAKLASTIADNQEQDLEKTRQYSQKLGLLTEQLQSLTLFLQTKLKEKTEQETLLLSTACPPTQEHPLPNDRTFLGSILTAVAD

SEQ ID NO: 18394 - protein, 1224 aa, Homo sapiens
MPVVWPTLLDLSRDECKRILRKLELEAYAGVISALRAQGDLTKEKKDLLGELSKVLSISTERHRAEVRRAVNDERLTTIAHNMSGPNSSSEWSIEGRRLVPLMPRLVPQTAFTVTANAVANAAIQHNASLPVPAETGSKEVVVCYSYTSTTSTPTSTPVPSGSIATVKSPRPASPASNVVVLPSGSTVYVKSVSCSDEDEKPRKRRRTNSSSSSPVVLKEVPKAVVPVSKTITVPVSGSPKMSNIMQSIANSLPPHMSPVKITFTKPSTQTTNTTTQKVIIVTTSPSSTFVPNILSKSHNYAAVTKLVPTSVIASTTQKPPVVITASQSSLVSNSSSGSSSSTPSPIPNTVAVTAVVSSTPSVVMSTVAQGVKIITQQVQPSKILPKPVTATLPTSSNSPIMVVSSNGAIMTTKLVTTPTGTQATYTRPTVSPSIGRMAATPGAATYVKTTSGSIITVVPKSLATLGGKIISSNIVSGTTTKITTIPMTSKPNVIVVQKTTGKGTTIQGLPGKNVVTTLLNAGGEKTIQTVPTGAKPAILTATRPITKMIVTQPKGIGSTVQPAAKIIPTKIVYGQQGKTQVLIKPKPVTFQATVVSEQTRQLVTETLQQASRVAEAGNSSIQEGKEEPQNYTDSSSSSTESSQSSQDSQPVVHVIASRRQDWSEHEIAMETSPTIIYQDVSSESQSATSTIKALLELQQTTVKEKLESKPRQPTIDLSQMAVPIQMTQEKRHSPESPSIAVVESELVAEYITTVSHRSQPQQPSQPQRTLLQHVAQSQTATQTSVVVKSIPASSPGAITHIMQQALSSHTAFTKHSEELGTEEGEVEEMDTLDPQTGLFYRSALTQSQSAKQQKLSQPPLEQTQLQVKTLQCFQTKQKQTIHLQADQLQHKLPQMPQLSIRHQKLTPLQQEQAQPKPDVQHTQHPMVAKDRQLPTLMAQPPQTVVQVLAVKTTQQLPKLQQAPNQPKIYVQPQTPQSQMSLPASSEKQTASQVEQPIITQGSSVTKITFEGRQPPTVTKITGGSSVPKLTSPVTSISPIQASEKTAVSDILKMSLMEAQIDTNVEHMIVDPPKKALATSMLTGEAGSLPSTHMVVAGMANSTPQQQKCRESCSSPSTVGSSLTTRKIDPPAVPATGQFMRIQNVGQKKAEESPAEIIIQAIPQYAIPCHSSSNVVVEPSGLLELNNFTSQQLDDEETAMEQDIDSSTEDGTEPSPSQSSAERS

SEQ ID NO: 18395 - protein, 277 aa, Homo sapiens
MQAEAADWFSSMVRGGRPGRPRRGCRAGENRGFPGPPAPQPARPPSPPPAALSLCPPQPFQKHVYYPLASGPEGPDVAVAAAAAGAASMACAPPSAASGPLPFFQFRPRLESVDWRRLSAIDVDKVAGAVDVLTLQENIMNITFCKLEDEKCPHCQSGVDPVLLKLIRLAQFTIEYLLHSQEFLTSQLHTLEERLRLSHCDGEQSKKLLTKQAGEIKTLKEECKRRKKMISTQQLMIEAKANYYQCHFCDKAFMNQAFLQSHIQRRHTEENSHFGHL

SEQ ID NO: 18396 - protein, 1668 aa, Homo sapiens
MGKPLSRPDCLRRNPSCLGKGEEEDGYIEDCYVPQRSIYDTMRINEQIDQGSKLNQTSKSTMEKMEGSTISSNGTLGAASNVFESRAPEGKKLDERIIFDALKLSSDVQKSAPVPPRRRPNAERKDNVNRRSWKSFMPPNFPEFAERIEASLSEVSEAGASNPSLQEKKESSSALTESSGHLDHREPQSESVTLEHVSKSIGIPEVQDFKNLSGDCQDFRFQQHSANPPHEFQPVESEAVATSGNTDVMQESRFSSATWPRATKSLAKGGFSEKQHPLGDTACTVEMPPLSPCLSEELLDPELHVLITPSLREKTESELKFEEDERWIMMEAEGEWEEEKLSDREKTFLMADEKNSLADIFEEREQANTAVVEDGSDCLAAVLRTFGHLSLGQICCPDDPQPAKDQLATVPKDIPLDCDCVLTGEDILGEVANRTAQGLEGLVSDSACTVGTIDAEQLSDTDSVQMFLELEKECLCEEGVTPLVELQNQISSEGLAASQDAENLLVISHFSGAALEKEQHLGLLHVRAKDYDTRLDCGYFNTLDSSQVPNAVELIAHVDIMRDTSTVSKEECEKVPFSPRTAEFKSRQPADLDSLEKLDPGGLLNSDHRVSHEEKLSGFIASELAKDNGSLSQGDCSQTEGNGEECIERVTFSFAFNHELTDVTSGPEVEVLYESNLLTDEIHLESGNVTVNQENNSLTSMGNVVTCELSVEKVCDEDGEAKELDYQATLLEDQAPAHFHRNFPEQVFQDLQRKSPESEILSLHLLVEELRLNPDGVETVNDTKPELNVASSEGGEMERRDSDSFLNIFPEKQVTKAGNTEPVLEEWIPVLQRPSRTAAVPTVKDALDAALPSPEEGTSIAAVPAPEGTAVVAALVPFPHEDILVASIVSLEEEDVTAAAVSAPERATVPAVTVSVPEGTAAVAAVSSPEETAPAVAAAITQEGMSAVAGFSPEWAALAITVPITEEDGTPEGPVTPATTVHAPEEPDTAAVRVSTPEEPASPAAAVPTPEEPTSPAAAVPTPEEPTSPAAAVPPPEEPTSPAAAVPTPEEPTSPAAAVPTPEEPTSPAAAVPTPEEPTSPAAAVPTPEEPTSPAAAVPTPEEPTSPAAAVPTPEEPASPAAAVPTPEEPASPAAAVPTPEEPAFPAPAVPTPEESASAAVAVPTPEESASPAAAVPTPAESASFAAVVATLEEPTSPAASVPTPAAMVATLEEFTSPAASVPTSEEPASLAAAVSNPEEPTSPAAAVPTLEEPTSSAAAVLTPEELSSPAASVPTPEEPASPAAAVSNLEEPASPAAAVPTPEVAAIPAASVPTPEVPAIPAAAVPPMEEVSPIGVPFLGVSAHTDSVPISEEGTPVLEEASSTGMWIKEDLDSLVFGIKEVTSTVLHGKVPLAATAGLNSDEMFQKEQVDPLQMKLQQVNGLGQGLIQSAGKDCDVQGLEHDMEEINARWNTLNKKVAQRIAQLQEALLHCGKFQDALEPLLSWLADTEELIANQKPPSAEYKVVKAQIQEQKLLQRLLDDRKATVDMLQAEGGRIAQSAELADREKITGQLESLESRWTELLSKAAARQKQLEDILVLAKQFHETAEPISDFLSVTEKKLANSEPVGTQTAKIQQQIIRHKALEEDIENHATDVHQAVKIGQSLSSLTSPAEQGVLSEKIDSLQA

SEQ ID NO: 18397 - protein, 580 aa, Homo sapiens
MGAALGTGTRLAPWPGRACGALPRWTPTAPAQGCHSKPGPARPVPLKKRGYDVTRNPHLNKGMAFTLEERLQLGIHGLIPPCFLSQDVQLLRIMRYYERQQSDLDKYIILMTLQDRNEKLFYRVLTSDVEKFMPIVYTPTVGLACQHYGLTFRRPRGLFITIHDKGHLATMLNSWPEDNIKAVVVTDGERILGLGDLGCYGMGIPVGKLALYTACGGVNPQQCLPVLLDVGTNNEELLRDPLYIGLKHQRVHGKAYDDLLDEFMQAVTDKFGINCLIQFEDFANANAFRLLNKYRNKYCMFNDDIQGTASVAVAGILAALRITKNKLSNHVFVFQGAGEAAMGIAHLLVMALEKEGVPKAEATRKIWMVDSKGLIVKGRSHLNHEKEMFAQDHPEVNSLEEVVRLVKPTAIIGVAAIAGAFTEQILRDMASFHERPIIFALSNPTSKAECTAEKCYRVTEGRGIFASGSPFKSVTLEDGKTFIPGQGNNAYVFPGVALGVIAGGIRHIPDEIFLLTAEQIAQEVSEQHLSQGRLYPPLSTIRDVSLRIAIKVLDYAYKHNLASYYPEPKDKEAFVRSLVY

SEQ ID NO: 18398 - protein, 561 aa, Homo sapiens
MTVLEITLAVILTLLGLAILAILLTRWARCKQSEMYISRYSSEQSARLLDYEDGRGSRHAYSTQSDTSYDNRERSKRDYTPSTNSLALSRSSIALPQGSMSSIKCLQTTEEPPSRTAGAMMQFTAPIPGATGPIKLSQKTIVQTPGPIVQYPGSNAGPPSAPRGPPMAPIIISQRTASQLAAPIIISQRTARIPQVHTMDSSGKITLTPVVILTGYMDEELAKKSCSKIQILKCGGTARSQNSREENKEALKNDIIFTNSVESLKSAHIKEPEREGKGTDLEKDKIGMEVKVDSDAGIPKRQETQLKISEMSIPQGQGAQIKKSVSDVPRGQESQVKKSESGVPKGQEAQVTKSGLVVLKGQEAQVEKSEMGVPRRQESQVKKSQSGVSKGQEAQVKKRESVVLKGQEAQVEKSELKVPKGQEGQVEKTEADVPKEQEVQEKKSEAGVLKGPESQVKNTEVSVPETLESQVKKSESGVLKGQEAQEKKESFEDKGNNDKEKERDAEKDPNKKEKGDKNTKGDKGKDKVKGKRESEINGEKSKGSKRAKANTGRKYNKKVEE

SEQ ID NO: 18399 - protein, 488 aa, Homo sapiens
MENLTKHSIECSSFRGDWECKNQFERKQGSQEGHFSEMIFTPEDMPTFSIQHQRIHTDEKLLECKECGKDFSFVSVLVRHQRIHTGEKPYECKECGKAFGSGANLAYHQRIHTGEKPFECKECGKAFGSGSNLTHHQRIHTGEKPYECKECGKAFSFGSGLIRHQIIHSGEKPYECKECGKSFSFESALIRHHRIHTGEKPYECIDCGKAFGSGSNLTQHRRIHTGEKPYECKACGMAFSSGSALTRHQRIHTGEKPYICNECGKAFSFGSALTRHQRIHTGEKPYVCKECGKAFNSGSDLTQHQRIHTGEKPYECKECEKAFRSGSKLIQHQRMHTGEKPYECKECGKTFSSGSDLTQHHRIHTGEKPYECKECGKAFGSGSKLIQHQLIHTGERPYECKECGKSFSSGSALNRHQRIHTGEKPYECKECGKAFYSGSSLTQHQRIHTGEKLYECKNCGKAYGRDSEFQQHKKSHNGKKLCELETIN

SEQ ID NO: 18400 - protein, 122 aa, Homo sapiens
VLQTIWGYKELRKPLEKEGWKKSDFQVNLNNASRSQSSHSYDDSTLPLIDRNQKSDKKPDREEIQMSNMGSNTKSLDNNYSTPNERGDHNRTLDRSGDLGDMEPLKGTTPLMVNSLYILLSV

SEQ ID NO: 18401 - protein, 227 aa, Homo sapiens
AGHIMEFSQDQHGSRFIQLKLERATPAERQLVFNEILQAAYQLMVDVFGNYVIQKFFEFGSLEQKLALAERIRGHVLSLALQMYGCRVIQKALEFIPSDQQVINEMVRELDGHVLKCVKDQNGNHVVQKCIECVQPQSLQFIIDAFKGQDQYGNYVIQHVLEHGRPEDKSKIVAEIRGNVLVLSQHKFASNVVEKCVTHASRTERAVLIDEVCTMNDGPHSALYTMM

SEQ ID NO: 18402 - protein, 183 aa, Homo sapiens
DFPATNWDDKSIRQAFIRKVFLVLTLQLSVTLSTVSVFTFVAESVLTASLSYMVGMIASFYNTEAVIMAVGITTAVCFTVVIFSMQTRYDFTSCMGVLLVSMVVLFIFAILCIFIRNRILEIVYASLGALLFTCFLAVDTQLLLGNKQLSLSPEEYVFAALNLYTDIINIFLYILTIIGRAKE

SEQ ID NO: 18403 - protein, 355 aa, Homo sapiens
MGCVFQSTEDKCIFKIDWTLSPGEHAKDEYVLYYYSNLSVPIGRFQNRVHLMGDILCNDGSLLLQDVQEADQGTYICEIRLKGESQVFKKAVVLHVLPEEPKELMVHVGGLIQMGCVFQSTEVKHVTKVEWIFSGRRAKEEIVFRYYHKLRMSVEYSQSWGHFQNRVNLVGDIFRNDGSIMLQGVRESDGGNYTCSIHLGNLVFKKTIVLHVSPEEPRTLVTPAALRPLVLGGNQLVIIVGIVCATILLLPVLILIVKKTCGNKSSVNSTVLVKNTKKTNPEIKEKPCHFERCEGEKHIYSPIIVREVIEEEEPSEKSEATYMTMHPVWPSLRSDRNNSLEKKSGGGMPKTQQAF

SEQ ID NO: 18404 - protein, 906 aa, Homo sapiens
FAPVICKRTCLKGQCRDSCQQGSNMTLIGENGHSTDTLTGSGFRVADKPEEKSLCFRLVSPEHQCQHPLTTRLTRQLCCCSVGKAWGARCQRCPTDGTAAFKEICPAGKGYHILTSHQTLTIQGESDFSLFLHPDGPPKPQQLPESPSQAPPPEDTEEERGVTTDSPVSEERSVQQSHPTATTTPARPYPELISRPSPPTMRWFLPDLPPSRSAVEIAPTQVTETDECRLNQNICGHGECVPGPPDYSCHCNPGYRSHPQHRYCVDVNECEAEPCGPGRGICMNTGGSYNCHCNRGYRLHVGAGGRSCVDLNECAKPHLCGDGGFCINFPGHYKCNCYPGYRLKASRPPVCEDIDECRDPSSCPDGKCENKPGSFKCIACQPGYRSQGGGACRDVNECAEGSPCSPGWCENLPGSFRCTCAQGYAPAPDGRSCLDVDECEAGDVCDNGICSNTPGSFQCQCLSGYHLSRDRSHCEDIDECDFPAACIGGDCINTNGSYRCLCPQGHRLVGGRKCQDIDECSQDPSLCLPHGACKNLQGSYVCVCDEGFTPTQDQHGCEEVEQPHHKKECYLNFDDTVFCDSVLATNVTQQECCCSLGAGWGDHCEIYPCPVYSSAEFHSLCPDGKGYTQDNNIVNYGIPAHRDIDECMLFGSEICKEGKCVNTQPGYECYCKQGFYYDGNLLECVDVDECLDESNCRNGVCENTRGGYRCACTPPAEYSPAQRQCLSPEEMERAPERRDVCWSQRGEDGMCAGPLAGPALTFDDCCCRQGRGWGAQCRPCPPRGAGSHCPTSQSESNSFWDTSPLLLGKPPRDEDSSEEDSDECRCVSGRCVPRPGGAVCECPGGFQLDASRARCVDIDECRELNQRGLLCKSERCVNTSGSFRCVCKAGFARSRPHGACVPQRRR

SEQ ID NO: 18405 - protein, 221 aa, Homo sapiens
MKAAYLSMFGKEDHKPFGDDEVELFRAVPGLKLKIAGKSLPTEKFAIRKSRRYFSSNPISLPVPALEMMYIWNGYAVIGKQPKLTDGILEIITKAEEMLEKGPENEYSVDDECLVKLLKGLCLKYLGRVQEAEENFRSISANEKKIKYDHYLIPNALLELALLLMEQDRNEEAIKLLESAKQNYKNYSMESRTHFRIQAATLQAKSSLENSSRSMVSSVSL

SEQ ID NO: 18406 - protein, 405 aa, Homo sapiens
MRELKRTLDAKGHGVLEMPSGTGKTVSLLALIMAYQRAYPLEVTKLIYCSRTVPEIEKVIEELRKLLNFYEKQEGEKLPFLGLALSSRKNLCIHPEVTPLRFGKDVDGKCHSLTASYVRAQYQHDTSLPHCRFYEEFDAHGREVPLPAGIYNLDDLKALGRRQGWCPYFLARYSILHANVVVYSYHYLLDPKIADLVSKELARKAVVVFDEAHNIDNVCIDSMSVNLTRRTLDRCQGNLETLQKTVLRIKETDEQRLRDEYRRLVEGLREASAARETDAHLANPVLPDEVLQEAVPGSIRTAEHFLGFLRRLLEYVKWRLRVQHVVQESPPAFLSGLAQRVCIQRKPLRFCAERLRSLLHTLEITDLADFSPLTLLANFATLVSTYAKGQAQHCGSSRNQKRSHP

SEQ ID NO: 18407 - protein, 1009 aa, Homo sapiens
MVGEGPYLISDLDQRGRRRSFAERYDPSLKTMIPVRPCARLAPNPVDDAGLLSFATFSWLTPVMVKGYRQRLTVDTLPPLSTYDSSDTNAKRFRVLWDEEVARVGPEKASLSHVVWKFQRTRVLMDIVANILCIIMAAIGPTVLIHQILQQTERTSGKVWVGIGLCIALFATEFTKVFFWALAWAINYRTAIRLKVALSTLVFENLVSFKTLTHISVGEVLNILSSDSYSLFEAALFCPLPATIPILMVFCAAYAFFILGPTALIGISVYVIFIPVQMFMAKLNSAFRRSAILVTDKRVQTMNEFLTCIRLIKMYAWEKSFTNTIQDIRRRERKLLEKAGFVQSGNSALAPIVSTIAIVLTLSCHILLRRKLTAPVAFSVIAMFNVMKFSIAILPFSIKAMAEANVSLRRMKKILIDKSPPSYITQPEDPDTVLLLANATLTWEHEASRKSTPKKLQNQKRHLCKKQRSEAYSERSPPAKGATGPEEQSDSLKSVLHSISFVVRKGKILGICGNVGSGKSSLLAALLGQMQLQKGVVAVNGTLAYVSQQAWIFHGNVRENILFGEKYDHQRYQHTVRVCGLQKDLSNLPYGDLTEIGERGLNLSGGQRQRISLARAVYSDRQLYLLDDPLSAVDAHVGKHVFEECIKKTLRGKTVVLVTHQLQFLESCDEVILLEDGEICEKGTHKELMEERGRYAKLIHNLRGLQFKDPEHLYNAAMVEAFKESPAEREEDAVLAPGNEKDEGKESETGSEFVDTKVPEHQLIQTESPQEGTVTWKTYHTYIKASGGYLLSLFTVFLFLLMIGSAAFSNWWLGLWLDKGSRMTCGPQGNRTMCEVGAVLADIGQHVYQWVYTASMVFMLVFGVTKGFVFTKTTLMASSSLHDTVFDKILKSPMSFFDTTPTGRLMNRFSKDMDELDVRLPFHAENFLQQFFMVVFILVILAAVFPAVLLVVASLAVGFFILLRIFHRGVQELKKVENVSRSPWFTHITSSMQGLGIIHAYGKKESCIT

SEQ ID NO: 18408 - protein, 201 aa, Homo sapiens
AFQDLLDQVGGLGRFQILQMVFLIMFNVIVYHQTQLENFAAFILDHRCWVHILDNDTIPDNDPGTLSQDALLRISIPFDSNLRPEKCRRFVHPQWKLIHLNGTFPNTSEPDTEPCVDGWVYDQSSFPSTIVTKWDLVCESQPLNSVAKFLFMAGMMVGGNLYGHLSDRKPLSSPNHVSTDCDEGLEVPIAIHQHHVFWYLS

SEQ ID NO: 18409 - protein, 732 aa, Homo sapiens
MSRRKISSESFSSLGSDYLETSPEEEGECPLSRLCWNGSRSPPGPLEPSPAAAAAAAAPAPTPAASAAAAAATAGARRVQRRRRVNLDSLGESISRLTAPSPQTIQQTLKRTLQYYEHQVIGYRDAEKNFHNISNRCSYADHSNKEEIEDVSGILQCTANILGLKFEEIQKRFGEEFFNICFHENERVLRAVGGTLQDFFNGFDALLEHIRTSFGKQATLESPSFLCKELPEGTLMLHYFHPHHIVGFAMLGMIKAAGKKIYRLDVEVEQVANEKLCSDVSNPGNCSCLTFLIKECENTNIMKNLPQGTSQVPADLRISINTFCRAFPFHLMFDPSMSVLQLGEGLRKQLRCDTHKVLKFEDCFEIVSPKVNATFERVLLRLSTPFVIRTKPEASGSENKDKVMEVKGQMIHVPESNSILFLGSPCVDKLDELMGRGLHLSDIPIHDATRDVILVGEQAKAQDGLKKRMDKLKATLERTHQALEEEKKKTVDLLYSIFPGDVAQQLWQGQQVQARKFDDVTMLFSDIVGFTAICAQCTPMQVISMLNELYTRFDHQCGFLDIYKVETIGDAYCVAAGLHRKSLCHAKPIALMALKMMELSEEVLTPDGRPIQMRIGIHSGSVLAGVVGVRMPRYCLFGNNVTLASKFESGSHPRRINVSPTTYQLLKREESFTFIPRSREELPDNFPKEIPGICYFLEVRTGPKPPKPSLSSSRIKKVSYNIGTMFLRETSL

SEQ ID NO: 18410 - protein, 214 aa, Homo sapiens
MRPKTGQVGCETPEELGPGPRQRWPLLLLGLAMVAHGLLRPMVAPQSGDPDPGASVGSSRSSLRSLWGRLLLQPSPQRADPRCWPRGFWSEPQSLCYVFGTGTKVTVLGQPKANPTVTLFPPSSEELQANKATLVCLISDFYPGAVTVAWKADGSPVKAGVETTKPSKQSNNKYAASSYLSLTPEQWKSHRSYSCQVTHEGSTVEKTVAPTECS

SEQ ID NO: 18411 - protein, 1348 aa, Homo sapiens
MADTDLFMECEEEELEPWQKISDVIEDSVVEDYNSVDKTTTAGNPLVQQGGQPLILTQNPAPGLGTMVTQPVLRPVQVMQNANHVTSSPVASQPIFITTQGFPVRNVRPVQNAMNQVGIVLNVQQGQTVRPITLVPAPGTQFVKPTVGVPQVFSQMTPVRPGSTMPVRPTTNTFTTVIPATLTIRSTVPQSQSQQTKSTPSTSTTPTATQPTSLGQLAVQSPGQSNQTTNPKLVSIASFVTVKRPGVTGENSNEVAKLVNTLNTIPSLGQSPGPVVVSNNSSAHGSQRTSGPESSMKVTSSIPVFDLQDGGRKICPRCNAQFRVTEALRGHMCYCCPEMVEYQKKGKSLDSEPSVPSAAKPPSPEKTAPVASTPSSTPIPALSPPTKVPEPNENVGDAVQTKLIMLVDDFYYGRDGGKVAQLTNFPKVATSFRCPHCTKRLKNNIRFMNHMKHHVELDQQNGEVDGHTICQHCYRQFSTPFQLQCHLENVHSPYESTTKCKICEWAFESEPLFLQHMKDTHKPGEMPYVCQVCQYRSSLYSEVDVHFRMIHEDTRHLLCPYCLKVFKNGNAFQQHYMRHQKRNVYHCNKCRLQFLFAKDKIEHKLQHHKTFRKPKQLEGLKPGTKVTIRASRGQPRTVPVSSNDTPPSALQEAAPLTSSMDPLPVFLYPPVQRSIQKRAVRKMSVMGRQTCLECSFEIPDFPNHFPTYVHCSLCRYSTCCSRAYANHMINNHVPRKSPKYLALFKNSVSGIKLACTSCTFVTSVGDAMAKHLVFNPSHRSSSILPRGLTWIAHSRHGQTRDRVHDRNVKNMYPPPSFPTNKAATVKSAGATPAEPEELLTPLAPALPSPASTATPPPTPTHPQALALPPLATEGAECLNVDDQDEGSPVTQEPELASGGGGSGGVGKKEQLSVKKLRVVLFALCCNTEQAAEHFRNPQRRIRRWLRRFQASQGENLEGKYLSFEAEEKLAEWVLTQREQQLPVNEETLFQKATKIGRSLEGGFKISYEWAVRFMLRHHLTPHARRAVAHTLPKDVAENAGLFIDFVQRQIHNQDLPLSMIVAIDEISLFLDTEVLSSDDRKENALQTVGTGEPWCDVVLAILADGTVLPTLVFYRGQMDQPANMPDSILLEAKESGYSDDEIMELWSTRVWQKHTACQRSKGMLVMDCHRTHLSEEVLAMLSASSTLPAVVPAGCSSKIQPLDVCIKRTVKNFLHKKWKEQAREMADTACDSDVLLQLVLVWLGEVLGVIGDCPELVQRSFLVASVLPGPDGNINSPTRNADMQEELIASLEEQLKLSGEHSESSTPRPRSSPEETIEPESLHQLFEGESETESFYGFEEADLDLMEI

SEQ ID NO: 18412 - protein, 532 aa, Homo sapiens
MALRSVMFSDVSIDFSPEEWEYLDLEQKDLYRDVMLENYSNLVSLGCFISKPDVISSLEQGKEPWKVVRKGRRQYPDLETKYETKKLSLENDIYEINLSQWKIMERIENHGLKGLILKNDWESTGKIEGQERPQEGYFSSVKMPSEKVSSYQKRTSVTPHQRLHFVDKPYECKECGKAFRVRQQLTFHHRIHTGEKPYECKECGMAFRQTAHLTRHQRLHSGEKLYECKECGEAFICGADLRVHQKMHIGEKPYECKECGKAFRVRGQLTLHQRIHTGEKPYVCKECGKAFRQYAHLTRHQKLNSADRLYECKECGKAFLCGSGLRVHHKLHTGEKPYECKECGKAFRVRQQLTLHQRIHTGEKPYECKECGKTFSRGYHLILHHRIHTGEKPYECKECWKAFSRYSQLISHQSIHIGVKPYDCKECGKAFRLLSQLTQHQSIHIGEKPYKCKECGKAFRLRQKLTLHQSIHTGEKPFECKECRKAFRLNSSLIQHLRIHSGEKPYECKECKKAFRQHSHLTHHLKIHNVKI

SEQ ID NO: 18413 - protein, 396 aa, Homo sapiens
MMNSSNIQVKQRGPYTYRVRFLAKENVTQDAEDNTVSFLQPNGAIFEPSLSVGTEADNFTVLNLAVAAASHIYQNQFVQMILNSLINKSKSSMFQVRTLRELLWGYRDPFLSLVPYPVTTTVGLFYPYNNTADGVYKVFNGKDNISKVAIIDTYKGKRNLSYWESHCDMINGTDAASFPPFVEKSQVLQFFSSDICRSIYAVFESDVNLKGIPVYRFVLPSKAFASPVENPDNYCFCTEKIISKNCTSYGVLDISKCKEGRPVYISLPHFLYASPDVSEPIDGLNPNEEEHRTYLDIEPITGFTLQFAKRLQVNLLVKPSEKIQVLKNLKRNYIVPILWLNETGTIGDEKANMFRSQVTGKINLLGLIEMILLSVGVVMFVAFMISYCACRSKTIK

SEQ ID NO: 18414 - protein, 668 aa, Homo sapiens
MNGQEVFYLTYTPEDVEGNVQLETGDKINFVIDNNKHTGAVSARNIMLLKKKQARCQGVVCAMKEAFGFIERGDVVKEIFFHYSEFKGDLETLQPGDDVEFTIKDRNGKEVATDVRLLPQGTVIFEDISIEHFEGTVTKVIPKVPSKNQNDPLPGRIKVDFVIPKELPFGDKDTKSKVTLLEGDHVRFNISTDRRDKLERATNIEVLSNTFQFTNEAREMGVIAAMRDGFGFIKCVDRDVRMFFHFSEILDGNQLHIADEVEFTVVPDMLSAQRNHAIRIKKLPKGTVSFHSHSDHRFLGTVEKEATFSNPKTTSPNKGKEKEAEDGIIAYDDCGVKLTIAFQAKDVEGSTSPQIGDKVEFSISDKQRPGQQVATCVRLLGRNSNSKRLLGYVATLKDNFGFIETANHDKEIFFHYSEFSGDVDSLELGDMVEYSLSKGKGNKVSAEKVNKTHSVNGITEEADPTIYSGKVIRPLRSVDPTQTEYQGMIEIVEEGDMKGEVYPFGIVGMANKGDCLQKGESVKFQLCVLGQNAQTMAYNITPLRRATVECVKDQFGFINYEVGDSKKLFFHVKEVQDGIELQAGDEVEFSVILNQRTGKCSACNVWRVCEGPKAVAAPRPDRLVNRLKNITLDDASAPRLMVLRQPRGPDNSMGFGAERKIRQAGVID

SEQ ID NO: 18415 - protein, 185 aa, Homo sapiens
MAAPEQPLAISRGCTSSSSLSPPRGDRTLLVRHLPAELTAEEKEDLLKYFGAQSVRVLSDKGRLKHTAFATFPNEKAAIKALTRLHQLKLLGHTLVVEFAKEQDRVHSPCPTSGSEKKKRSDDPVEDDKEKKELGYLTVENGIAPNHGLTFPLNSCLKYMYPPPSSTILANIVNALASVPKFYVQ

SEQ ID NO: 18416 - protein, 205 aa, Homo sapiens
MAEPGHSHHLSARVRGRTERRIPRLWRLLLWAGTAFQVTQGTGPELHACKESEYHYEYTACDSTGSRWRVAVPHTPGLCTSLPDPIKGTECSFSCNAGEFLDMKDQSCKPCAEGRYSLGTGIRFDEWDELPHGFASLSANMELDDSAAESTGNCTSSKWVPRGDYIASNTDECTATLMYAVNLKQSGTVNFEYYYPDSSIIFEFF

SEQ ID NO: 18417 - protein, 930 aa, Homo sapiens
MVGEGPYLISDLDQRGRRRSFAERYDPSLKTMIPVRPCARLAPNPVDDAGLLSFATFSWLTPVMVKGYRQRLTVDTLPPLSTYDSSDTNAKRFRVLWDEEVARVGPEKASLSHVVWKFQRTRVLMDIVANILCIIMAAIGPTVLIHQILQQTERTSGKVWVGIGLCIALFATEFTKVFFWALAWAINYRTAIRLKVALSTLVFENLVSFKTLTHISVGEMFMAKLNSAFRRSAILVTDKRVQTMNEFLTCIRLIKMYAWEKSFTNTIQDIRRRERKLLEKAGFVQSGNSALAPIVSTIAIVLTLSCHILLRRKLTAPVAFSVIAMFNVMKFSIAILPFSIKAMAEANVSLRRMKKILIDKSPPSYITQPEDPDTVLLLANATLTWEHEASRKSTPKKLQNQKRHLCKKQRSEAYSERSPPAKGATGPEEQSDSLKSVLHSISFVVRKGKILGICGNVGSGKSSLLAALLGQMQLQKGVVAVNGTLAYVSQQAWIFHGNVRENILFGEKYDHQRYQHTVRVCGLQKDLSNLPYGDLTEIGERGLNLSGGQRQRISLARAVYSDRQLYLLDDPLSAVDAHVGKHVFEECIKKTLRGKTVVLVTHQLQFLESCDEVILLEDGEICEKGTHKELMEERGRYAKLIHNLRGLQFKDPEHLYNAAMVEAFKESPAEREEDAGIIVPEHQLIQTESPQEGTVTWKTYHTYIKASGGYLLSLFTVFLFLLMIGSAAFSNWWLGLWLDKGSRMTCGPQGNRTMCEVGAVLADIGQHVYQWVYTASMVFMLVFGVTKGFVFTKTTLMASSSLHDTVFDKILKSPMSFFDTTPTGRLMNRFSKDMDELDVRLPFHAENFLQQFFMVVFILVILAAVFPAVLLVVASLAVGFFILLRIFHRGVQELKKVENVSRSPWFTHITSSMQGLGIIHAYGKKESCIT

SEQ ID NO: 18418 - protein, 602 aa, Homo sapiens
MIEKMQGSRMDEQRCSFPPPLKTEEDYIPYPSVHEVLGREGPFPLILLPQFGGYWIEGTNHEITSIPETEPLQSPTTKVKLECNPTARIYRKHFLGKEHFNYYSLDAALGHLVFSLKYDVIGDQEHLRLLLRTKCRTYHDVIPISCLTEFPNVVQMAKLVCEDVNVDRFYPVLYPKASRLIVTFDEHVISNNFKFGVIYQKLGQTSEEELFSTNEESPAFVEFLEFLGQKVKLQDFKGFRGGLDVTHGQTGTESVYCNFRNKEIMFHVSTKLPYTEGDAQQLQRKRHIGNDIVAVVFQDENTPFVPDMIASNFLHAYVVVQAEGGGPDGPLYKVSVTARDDVPFFGPPLPDPAVFRKGPEFQEFLLTKLINAEYACYKAEKFAKLEERTRAALLETLYEELHIHSQSMMGLGGDEDKMENGSGGGGFFESFKRVIRSRSQSMDAMGLSNKKPNTVSTSHSGSFAPNNPDLAKAAGISLIVPGKSPTRKKSGPFGSRRSSAIGIENIQEVQEKRESPPAGQKTPDSGHVSQEPKSENSSTQSSPEMPTTKNRAETAAQRAEALKDFSRSSSSASSFASVVEETEGVDGEDTGLHVAGGQCQHH

SEQ ID NO: 18419 - protein, 281 aa, Homo sapiens
MRAAGVGLVDCHCHLSAPDFDRDLDDVLEKAKKANVVALVAVAEHSGEFEKIMQLSERYNGFVLPCLGVHPVQGLPPEDQRSVTLKDLDVALPIIENYKDRLLAIGEVGLDFSPRFAGTGEQKEEQRQVLIRQIQLAKRLNLPVNVHSRSAGRPTINLLQEQGAEKVLLHAFDGRPSVAMEGVRAGYFFSIPPSIIRSGQLLSLFSKKQKLVKQLPLTSICLETDSPALGPEKQVRNEPWNISISAEYIAQVKGISVEEVIEVTTQNALKLFPKLRHLLQK

SEQ ID NO: 18420 - protein, 143 aa, Homo sapiens
RAAGVGLVDCHCHLSAPDFDRDLDDVLEKAKKANVVALVAVAEHSGEFEKIMQLSERYNGFVLPCLGVHPVQGLPPEDQRSVTLKDLDVALPIIENYKDRLLAIGEVGLDFSPRFAGTGEQKEEQRQVLIRQIQLAKRLNLPV

SEQ ID NO: 18421 - protein, 1155 aa, Homo sapiens
MKTLAERRRSAPSLILDKALQKRPTTRDSPSASVDTCTFLSSLVCSNRTLLIDGRAELKRGLQRQERHLFLFNDLFVVAKIKYNNNFKIKNKIKLTDMWTASCVDEVGEGNTNAMKSFVLGWPTVNFVATFSSPEQKDKWLSLLQRYINLEKEKDYPKSIPLKIFAKDIGNCAYSKTITVMNSDTANEVINMSLPMLGITGSERDYQLWVNSGKEEAPYPLIGHEYPYGIKMSHLRDSALLTPGSKDSTTPFNLQEPFLMEQLPREMQCQFILKPSRLAAAQQLSDSGHKTFKRRRSIINWAFWRGSSTHLDNLPSSPTSPMPGQLFGISLPNICENDNLPKPVLDMLFFLNQKGPLTKGIFRQSANVKSCRELKEKLNSGVEVHLDCESIFVIASVLKDFLRNIPGSIFSSDLYDHWVSVMDQGNDEEKINTVQRLLDQLPRANVVLLRYLFGVLHNIEQHSSSNQMTAFNLAVCVAPSILWPPASSSPELENEFTKKVSLLIQFLIENCLRIFGEEITSLFREVSVRCDTRENASDISCFQLNDSSYDSLENELNEDVDAPCSDLVKKLGQGSRSMDSVLTLSDYDLDQPEVEGLLTLSDFDLAHSKDEDVQMKRPLESKPVNILVYTKIPLRDHARAPSAMCTPSYLSTAAANAAKSLRRHRRCSEPSIDYLDSKLSYLREFYQKKLRKSSCDAILSQKDEDYLKQNQPLQEEGKTCFKQSLVTGTDVSKKNATTQNTKKKSLSGSEGNHVKLFPKSKPVAISVASYSPMSSQDHSKNQPFDVNTSGYSPPHTADALKGPRTHRRCSEPNIEDQNRKLTYLRGIYSKKQHKTSCEAGLLHGEEDYLKRHKSLQMEGQKLINQSLVMGIEVGKSSATNQNTEKVLPPRLNLCPRTSYSSLSSPGTSPSGSSVSSQDSAFSQISEHSVFTPTETSSPIDCTFQAQRKREDLSPDFSNASHVSGMPGPSSGQACSRPAYTKKDTMEWHSQMHSVTLHPSTWLRNGVASLKNWSLKKKAKAARPEEEKIASPKGPLEPPPHASGVPEANSLQEEQKDLPLRAAEGLSPVQSAQRCSSSPFQDSERHCSSPFSLVESRLKLCMKSHEEIEPGSQSSSGSLPWERASASSWTLEDATSPDSGPTVVCDIEDRYLTKDI

SEQ ID NO: 18422 - protein, 455 aa, Homo sapiens
MPDYRTRALFVQSTLGDSAGPELQLLSIVPGRDLQPSDSFTGPTRKMPPSASAVDFFQLFVPDNVLKNMVVQTNMYAKKFQERFGSDGAWVEVTLTEMKAFLGYMISTSISHCESVLSIWSGGFYSNRSLALVMSQARFEKILKYFHVVAFRSSQTTHGLYKVQPFLDSLQNSFDSAFRPSQTQVLHEPLIDEDPVFIATCTERELRKRKKRKFSLWVRQCSSTGFIIQIYVHLKEGGGPDGLDALKNKPQLHSMVARSLCRNAAGKNYIIFTGPSITSLTLFEEFEKQGIYCCGLLRARKSDCTGLPLSMLTNPATPPARGQYQIKMKGNMSLICWYNKGHFRFLTNAYSPVQQGVIIKRKSGEIPCPLAVEAFAAHLSYICRYDDKYSKYFISHKPNKTWQQVFWFAISIAINNAYILYKMSDAYHVKRYSRAQFGERLVRELLGLEDASPTH

SEQ ID NO: 18423 - protein, 442 aa, Homo sapiens
PRLPRAGARERVRGFLTQTRVRSAQSPGGSLPSDDLGEMESSSSDYYNKDNEEESLLANVASLRHELKITEWSLQSLGEELSSVSPSENSDYAPNPSRSEKLILDVQPSHPGLLNYSPYENVCKISGSSTDFQKKPRDKMFSSSAPVDQEIKSLREKLNKLRQQNACLVTQNHSLMTKFESIHFELTQSRAKVSMLESAQQQAASVPILEEQIINLEAEVSAQDKVLREAENKLEQSQKMVIEKEQSLQESKEECIKLKVDLLEQTKQGKRAERQRNEALYNAEELSKAFQQYKKKVAEKLEKVQAEEEILERNLTNCEKENKRLQERCGLYKSELEILKEKLRQLKEENNNGKEKLRIMAVKNSEVMAQLTESRQSILKLESELENKDEILRDKFSLMNENRELKVRVAAQNERLDLCQQEIESSRVELRSLEKIISQLPN

SEQ ID NO: 18424 - protein, 432 aa, Homo sapiens
YNPILGETFRCCWFHPQTDSRTFYIAEQVSHHPPVSAFHVSNRKDGFCISGSITAKSRFYGNSLSALLDGKATLTFLNRAEDYTLTMPYAHCKGILYGTMTLELGGKVTIECAKNNFQAQLEFKLKPFFGGSTSINQISGKITSGEEVLASLSGHWDRDVFIKEEGSGSSALFWTPSGEVRRQRLRQHTVPLEEQTELESERLWQHVTRAISKGDQHRATQEKFALEEAQRQRARERQESLMPWKPQLFHLDPITQEWHYRYEDHSPWDPLKDIAQFEQDGILRTLQQEAVARQTTFLGSPGPRHERSGPDQRLRKASDQPSGHSQATESSGSTPESCPELSDEEQDGDFVPGGESPCPRCRKEARRLQALHEAILSIREAQQELHRHLSAMLSSTARAAQAPTPGLLQSPRSWFLLCVFLACQLFINHILK

SEQ ID NO: 18425 - protein, 844 aa, Homo sapiens
MFWKFDLHSSSHIDTLLEREDVTLKELMDEEDVLQECKAQNRKLIEFLLKAECLEDLVSFIIEEPPQDMDEKIRYKYPNISCELLTSDVSQMNDRLGEDESLLMKLYSFLLNDSPLNPLLASFFSKVLSILISRKPEQIVDFLKKKHDFVDLIIKHIGTSAIMDLLLRLLTCIEPPQPRQDVLNWLNEEKIIQRLVEIVHPSQEEDRHSNASQSLCEIVRLSRDQMLQIQNSTEPDPLLATLEKQEIIEQLLSNIFHKEKNESAIVSAIQILLTLLETRRPTFEGHIEICPPGMSHSACSVNKSVLEAIRGRLGSFHELLLEPPKKSVMKTTWGVLDPPVGNTRLNVIRLISSLLQTNTSSINGDLMELNSIGVILNMFFKYTWNNFLHTQVEICIALILASPFENTENATITDQDSTGDNLLLKHLFQKCQLIERILEAWEMNEKKQAEGGRRHGYMGHLTRIANCIVHSTDKGPNSALVQQLIKDLPDEVRERWETFCTSSLGETNKRNTVDLAFSDYQMQQMTSNFIDQFGFNDEKFADQDDIGNVSFDRVSDINFTLNTNESGNIALFEACCKERIQQFDDGGSDEEDIWEEKHIAFTPESQRRSSSGSTDSEESTDSEEEDGAKQDLFEPSSANTEDKMEVDLSEPPNWSANFDVPMETTHGAPLDSVGSDVWSTEEPMPTKETGWASFSEFTSSLSTKDSLRSNSPVEMETSTEPMDPLTPSAAALAVQPEAAGSVAMEASSDGEEDAESTDKVTETVMNGGMKETLSLTVDAKTETAVFKSEEGKLSTSQDAACKDAEECPETAEAKCAAPRPPSSSPEQRTGQPSAPGDTSVNGPV

SEQ ID NO: 18426 - protein, 796 aa, Homo sapiens
MLRGGRRGQLGWHSWAAGPGSLLAWLILASAGAAPCPDACCPHGSSGLRCTRDGALDSLHHLPGAENLTELYIENQQHLQHLELRDLRGLGELRNLTIVKSGLRFVAPDAFHFTPRLSRLNLSFNALESLSWKTVQGLSLQELVLSGNPLHCSCALRWLQRWEEEGLGGVPEQKLQCHGQGPLAHMPNASCGVPTLKVQVPNASVDVGDDVLLRCQVEGRGLEQAGWILTELEQSATVMKSGGLPSLGLTLANVTSDLNRKNVTCWAENDVGRAEVSVQVNVSFPASVQLHTAVEMHHWCIPFSVDGQPAPSLRWLFNGSVLNETSFIFTEFLEPAANETVRHGCLRLNQPTHVNNGNYTLLAANPFGQASASIMAAFMDNPFEFNPEDPIPVSFSPVDTNSTSGDPVEKKDETPFGVSVAVGLAVFACLFLSTLLLVLNKCGRRNKFGINRPAVLAPEDGLAMSLHFMTLGGSSLSPTEGKGSGLQGHIIENPQYFSDACVHHIKRRDIVLKWELGEGAFGKVFLAECHNLLPEQDKMLVAVKALKEASESARQDFQREAELLTMLQHQHIVRFFGVCTEGRPLLMVFEYMRHGDLNRFLRSHGPDAKLLAGGEDVAPGPLGLGQLLAVASQVAAGMVYLAGLHFVHRDLATRNCLVGQGLVVKIGDFGMSRDIYSTDYYRVGGRTMLPIRWMPPESILYRKFTTESDVWSFGVVLWEIFTYGKQPWYQLSNTEAIDCITQGRELERPRACPPEVYAIMRGCWQREPQQRHSIKDVHARLQALAQAPPVYLDVLG

SEQ ID NO: 18427 - protein, 265 aa, Homo sapiens
TSKTSNIRANFENLAKEKEQEDRRKAEAERAQRMAKERQEQEEARRKLEEQARAKTQTPPVSPAPQPTEERLPSSPVYEDAASFKAELSYRGPVSGTEPEPVYSMEAADYREASSQQGLAYATEAVYESAEAPGHYPAEDSTYDEYENDLGITAVALYDYQAAGDDEISFDPDDIITNIEMIDDGWWRGVCKGRFRELAFSCVRVALVPIKCSRDLPGQARGLRKLISFLRSREAGPVPSCSQVGGVSFQKVTWKCLGTWVPECP

SEQ ID NO: 18428 - protein, 182 aa, Homo sapiens
MEQGKGLAVLILAIILLQGTLAQSIKGNHLVKVYDYQEDGSVLLTCDAEAKNITWFKDGKMIGFLTEDKKKWNLGSNAKDPRGMYQCKGSQNKSKPLQVYYRMCQNCIELNAATISGFLFAEIVSIFVLAVGVYFIAGQDGVRQSRASDKQTLLPNDQLYQPLKDREDDQYSHLQGNQLRRN

SEQ ID NO: 18429 - protein, 189 aa, Homo sapiens
MEYHPDLENLDEDGYTQLHFDSQSNTRIAVVSEKGSCAASPPWRLIAVILGILCLVILVIAVVLGTMAIWRSNSGSNTLENGYFLSRNKENHSQPTQSSLEDSVTPTKAVKTTGVLSSPCPPNWIIYEKSCYLFSMSLNSWDGSKRQCWQLGSNLLKIDSSNELISDQNHSYPRKPISKLCMDSRVSHL

SEQ ID NO: 18430 - protein, 704 aa, Homo sapiens
MTAGSSYPLFLAAYACTGCLAERLGWFIKSSNEATNITPKHNMKAFLDELKAENIKKFLYNFTQIPHLAGTEQNFQLAKQIQSQWKEFGLDSVELAHYDVLLSYPNKTHPNYISIINEDGNEIFNTSLFEPPPPGYENVSDIVPPFSAFSPQGMPEGDLVYVNYARTEDFFKLERDMKINCSGKIVIARYGKVFRGNKVKNAQLAGAKGVILYSDPADYFAPGVKSYPDGWNLPGGGVQRGNILNLNGAGDPLTPGYPANEYAYRRGIAEAVGLPSIPVHPIGYYDAQKLLEKMGGSAPPDSSWRGSLKVPYNVGPGFTGNFSTQKVKMHIHSTNEVTRIYNVIGTLRGAVEPDRYVILGGHRDSWVFGGIDPQSGAAVVHEIVRSFGTLKKEGWRPRRTILFASWDAEEFGLLGSTEWAEENSRLLQERGVAYINADSSIEGNYTLRVDCTPLMYSLVHNLTKELKSPDEGFEGKSLYESWTKKSPSPEFSGMPRISKLGSGNDFEVFFQRLGIASGRARYTKNWETNKFSGYPLYHSVYETYELVEKFYDPMFKYHLTVAQVRGGMVFELANSIVLPFDCRDYAVVLRKYADKIYSISMKHPQEMKTYSVSFDSLFSAVKNFTEIASKFSERLQDFDKSKHVIYAPSSHNKYAGESFPGIYDALFDIESKVDPSKAWGEVKRQIYVAAFTVQAAAETLSEVA

SEQ ID NO: 18431 - protein, 339 aa, Homo sapiens
MNHSERFVFIAEWYDPNASLLRRYELLFYPGDGSVEMHDVKNHRTFLKRTKYDNLHLEDLFIGNKVNVFSRQLVLIDYGDQYTARQLGSRKEKTLALIKPDAISKAGEIIEIINKAGFTITKLKMMMLSRKEALDFHVDHQSRPFFNELIQFITTGPIIAMEILRDDAICEWKRLLGPANSGVARTDASESIRALFGTDGIRNAAHGPDSFASAAREMELFFPSSGGCGPANTAKFTNCTCCIVKPHAVSEGLLGKILMAIRDAGFEISAMQMFNMDRVNVEEFYEVYKGVVTEYHDMVTEMYSGPCVAMEIQQNNATKTFREFCGPADPTPKSPISHK

SEQ ID NO: 18432 - protein, 129 aa, Homo sapiens
MAAMETETAPLTLESLPTDPLLLILSFLDYRDLINCCYVSRRLSQLSSHDPLWRRHCKKYWLISEEEKTQKNQCWKSLFIDTYSDVGRYIDHYAAIKKAWDDLKKYLEPRCPRMVLSLKGVGIKMMLAL

SEQ ID NO: 18433 - protein, 995 aa, Homo sapiens
MDALNRNQIGPGCQTQTMVQKGPLDLIETGKGLKVQTDKPHLVSLGSGRLSTAITLLPLEEGRTVIGSAARDISLQGPGLAPEHCYIENLRGTLTLYPCGNACTIDGLPVRQPTRLTQGCMLCLGQSTFLRFNHPAEAKWMKSMIPAGGRAPGPPYSPVPAESESLVNGNHTPQTATRGPSACASHSSLVSSIEKDLQEIMDSLVLEEPGAAGKKPAATSPLSPMANGGRYLLSPPTSPGAMSVGSSYENTSPAFSPLSSPASSGSCASHSPSGQEPGPSVPPLVPARSSSYHLALQPPQSRPSGARSESPRLSRKGGHERPPSPGLRGLLTDSPAATVLAEARRATESPRLGGQLPVVAISLSEYPASGALSQPTSIPGSPKFQPPVPAPRNKIGTLQDRPPSPFREPPGSERVLTTSPSRQLVGRTFSDGLATRTLQPPESPRLGRRGLDSMRELPPLSPSLSRRALSPLPTRTTPDPKLNREVAESPRPRRWAAHGASPEDFSLTLGARGRRTRSPSPTLGESLAPHKGSFSGRLSPAYSLGSLTGASPCQSPCVQRKLSSGDLRVPVTRERKNSITEISDNEDDLLEYHRRQRQERLREQEMERLERQRLETILNLCAEYSRADGGPEAGELPSIGEATAALALAGRRPSRGLAGASGRSSEEPGVATQRLWESMERSDEENLKEECSSTESTQQEHEDAPSTKLQGEVLALEEERAQVLGHVEQLKVRVKELEQQLQESAREAEMERALLQGEREAERALLQKEQKAVDQLQEKLVALETGIQKERDKEAEALETETKLFEDLEFQQLERESRVEEERELAGQGLLRSKAELLRSIAKRKERLAILDSQAGQIRAQAVQESERLARDKNASLQLLQKEKEKLTVLERRYHSLTGGRPFPKTTSTLKEVYRSKMDGEATSPLPRTRSGPLPSSSGSSSSSSQLSVATLGRSPSPKSALLTQNGTGSLPRNLAATLQDIETKRQLALQQKGE

SEQ ID NO: 18434 - protein, 903 aa, Homo sapiens
MAHLGPTPPPHSLNYKSEDRLSEQDWPAYFKVPCCGVDTSQIESEEAEVDVRERETQRDREPKRARDLTLRDSCTDNSMQFGTRTTTAEPGFMGTWQNADTNLLFRMSQQAIRCTLVNCTCECFQPGKINLRTCDQCKHGWVAHALDKLSTQHLYHPTQVEIVQSNVVFDISSLMLYGTQAVPVRLKILLDRLFSVLKQEEVLHILHGLGWTLRDYVRGYILQDAAGKVLDRWAIMSREEEIITLQQFLRFGETKSIVELMAIQEKEGQAVAVPSSKTDSDIRTFIESNNRTRSPSLLAHLENSNPSSIHHFENIPNSLAFLLPFQYINPVSAPLLGLPPNGLLLEQPGLRLREPSLSTQNEYNESSESEVSPTPYKNDQTPNRNALTSITNVEPKTEPACVSPIQNSAPVSDLTKTEHPKSSFRIHRMRRMGSASRKGRVFCNACGKTFYDKGTLKIHYNAVHLKIKHRCTIEGCNMVFSSLRSRNRHSANPNPRLHMPMLRNNRDKDLIRATSGAATPVIASTKSNLALTSPGRPPMGFTTPPLDPVLQNPLPSQLVFSGLKTVQPVPPFYRSLLTPGEMVSPPTSLPTSPIIPTSGTIEQHPPPPSEPVVPAVMMATHEPSADLAPKKKPRKSSMPVKIEKEIIDTADEFDDEDDDPNDGGAVVNDMSHDNHCHSQEEMSPGMSVKDFSKHNRTRCISRTEIRRADSMTSEDQEPERDYENESESSEPKLGEESMEGDEHIHSEVSEKVLMNSERPDENHSEPSHQDVIKVKEEFTDPTYDMFYMSQYGLYNGGGASMAALHESFTSSLNYGSPQKFSPEGDLCSSPDPKICYVCKKSFKSSYSVKLHYRNVHLKEMHVCTVAGCNAAFPSRRSRDRYWEKSNEQNGLLVSWGETLSSLK

SEQ ID NO: 18435 - protein, 649 aa, Homo sapiens
RLPRAGGPLGLSIVGGSDHSSHPFGVQEPGVFISKVLPRGLAARSGLRVGDRILAVNGQDVRDATHQEAVSALLRPCLELSLLVRRDPAPPGLRELCIQKAPGERLGISIRGGARGHAGNPRDPTDEGIFISKVSPTGAAGRDGRLRVGLRLLEVNQQSLLGLTHGEAVQLLRSVGDTLTVLVCDGFEASTDAALEVSPGVIANPFAAGIGHRNSLESISSIDRELSPEGPGKEKELPGQTLHWGPEATEAAGRGLQPLKLDYRALAAVPSAGSVQRVPSGAAGGKMAESPCSPSGQQPPSPPSPDELPANVKQAYRAFAAVPTSHPPEDAPAQPPTPGPAASPEQLSFRERQKYFELEVRVPQAEGPPKRVSLVGADDLRKMQEEEGEGHGSGVGVGSRLVWPDPPCPPAARKLQQKRAQMLREAAEAGAEARLALDGETLGEEEQEDEQPPWASPSPTSRQSPASPPPLGGGAPVRTAKAERRHQERLRVQSPEPPAPERALSPAELRALEAEKRALWRAARMKSLEQDALRAQMVLSRSQEGRGTRGPLERLAEAPSPAPTPSPTPVEDLGPQTSTSPGRLSPDFAEELRSLEPSPSPGPQEEDGEVALVLLGRPSPGAVGPEDVALCSSRRPVRPGRRGLGPVPS

SEQ ID NO: 18436 - protein, 231 aa, Homo sapiens
MSVEHADIWVKSYSLYSRERYICNSGFKRKAGTSSLTECVLNKATNVAHWTTPSLKCIRDPALVHQRPAPPSTVTTAGVTPQPESLSPSGKEPAASSPSSNNTAATTAAIVPGSQLMPSKSPSTGTTEISSHESSHGTPSQTTAKNWELTASASHQPPGVYPQGHSDTTVAISTSTVLLCGLSAVSLLACYLKSRQTPPLASVEMEAMEALPVTWGTSSRDEDLENCSHHL

SEQ ID NO: 18437 - protein, 330 aa, Homo sapiens
MKLFDASPTFFAFLLGHILAMEVLAWLLIYLLGPGWVPSALAAFILAISQAQSWCLQHDLGHASIFKKSWWNHVAQKFVMGQLKGFSAHWWNFRHFQHHAKPNIFHKDPDVTVAPVFLLGESSVEYGKKKRRYLPYNQQHLYFFLIGPPLLTLVNFEVENLAYMLVCMQWADLLWAASFYARFFLSYLPFYGVPGVLLFFVAVRVLESHWFVWITQMNHIPKEIGHEKHRDWVSSQLAATCNVEPSLFTNWFSGHLNFQIEHQCQHTLPTPSLFPRMPRHNYSRVAPLVKSLCAKHGLSYEVKPFLTALVDIVRSLKKSGDIWLDAYLHQ

SEQ ID NO: 18438 - protein, 745 aa, Homo sapiens
MNGEADCPTDLEMAAPKGQDRWSQEDMLTLLECMKNNLPSNDSSKFKTTESHMDWEKVAFKDFSGDMCKLKWVEISNEVRKFRTLTELILDAQEHVKNPYKGKKLKKHPDFPKKPLTPYFRFFMEKRAKYAKLHPEMSNLDLTKILSKKYKELPEKKKMKYIQDFQREKQEFERNLARFREDHPDLIQNAKKSDIPEKPKTPQQLWYTHEKKVYLKVRPDEIMRDYIQKHPELNISEEGITKSTLTKAERQLKDKFDGRPTKPPPNSYSLYCAELMANMKDVPSTERMVLCSQQWKLLSQKEKDAYHKKCDQKKKDYEVELLRFLESLPEEEQQRVLGEEKMLNINKKQATSPASKKPAQEGGKGGSEKPKRPVSAMFIFSEEKRRQLQEERPELSESELTRLLARMWNDLSEKKKAKYKAREAALKAQSERKPGGEREERGKLPESPKRAEEIWQQSVIGDYLARFKNDRVKALKAMEMTWNNMEKKEKLMWIKKAAEDQKRYERELSEMRAPPAATNSSKKMKFQGEPKKPPMNGYQKFSQELLSNGELNHLPLKERMVEIGSRWQRISQSQKEHYKKLAEEQQKQYKVHLDLWVKSLSPQDRAAYKEYISNKRKSMTKLRGPNPKSSRTTLQSKSPRRMMKRMRMTRTRMKKRKMMRMGTPLKMAATPLSPAARTRARMGMRMKRMTRTKTTTRMTMRMKIMSPRAAAPAPPPQGTPQTLTPTEAQPHPRAARESPGAPLPN

SEQ ID NO: 18439 - protein, 500 aa, Homo sapiens
MMKMLLDPMGGIVMTNDGNAILREIQVQHPAAKSMIEISRTQDEEVGDGTTSVIILAGEMLSVAEHFLEQQMHPTVVISAYRKALDDMISTLKKISIPVDISDSDMMLNIINSSITTKAISRWSSLACNIALDAVKMVQFEENGRKEIDIKKYARVEKIPGGIIEDSCVLRGVMINKDVTHPRMRRYIKNPRIVLLDSSLEYKKGESQTDIEITREEDFTRILQMEEEYIQQLCEDIIQLKPDVVITEKGISDLAQHYLMRANITAIRRVRKTDNNRIARACGARIVSRPEELREDDVGTGAGLLEIKKIGDEYFTFITDCKDPKACTILLRGASKEILSEVERNLQDAMQVCRNVLLDPQLVPGGGASEMAVAHALTEKSKAMTGVEQWPYRAVAQALEVIPRTLIQNCGASTIRLLTSLRAKHTQENCETWGVNGETGTLVDMKELGIWEPLAVKLQTYKTAVETAVLLLRIDDIVSGHKKKGDDQSRQGGAPDAGQE

SEQ ID NO: 18440 - protein, 181 aa, Homo sapiens
YKIANNPTTDKENKKWSYGFYLIHTQGQNGLEFYCKTKDLKKKWLEQFEMALSNIRPDYADSNFHDFKMHTFTRVTSCKVCQMLLRGTFYQGYLCFKCGARAHKECLGRVDNCGRVNSGGLPKMQVIRNYSGTPPPALHEGPPLQLQAGDTVELLKGDAHSLFWQGRNLASGEVGFFPSDA

SEQ ID NO: 18441 - protein, 348 aa, Homo sapiens
LYKNRLGSGGRGRCIKQGENWYSPTEFEAMAGRASSKDWKRSIRYAGRPLQCLIQDGILNPHAASCTCAACCDDMTLSGPVRLFVPYKRRKKENELPTTPVKKDSPKNITLLPATAATTFTVTPSGQITTSGALTFDRASTVEATAVISESPAQGDVFAGATVQEASVQPPCRASHPEPHYPGYQDSCQIAPFPEAALPTSHPKIVLTSLPALAVPPPTPTKAAPPALVNGLELSEPRSWLYLEEMVNSLLNTAQQLKTLFEQAKHASTYREAATNQAKIHADAERKEQSCVNCGREAMSECTGCHKVNYCSTFCQRKRWSLTMLTSLVSISWLRAILPCQPPKVLGL

SEQ ID NO: 18442 - protein, 148 aa, Homo sapiens
MTMTANKNSSITHGAGGTKAPRGTLSRKSFEFEDASSLQSLYPSSPTENGTENQPKFGSKSTLEENAYEDIVGDLPKENPYEDVDLKSRRAGRKSQQLSENSLDSLHRMWSPQDRKYNSPPTQLSLKPNSQSLRSGNWSERKSHRLPR

SEQ ID NO: 18443 - protein, 784 aa, Homo sapiens
MSEQTPAEAGAAGAREDACRDYQSSLEDLTFNSKPHINMLTILAEENLPFAKEIVSLIEAQTAKAPSSEKLPVMYLMDSIVKNVGREYLTAFTKNLVATFICVFEKVDENTRKSLFKLRSTWDEIFPLKKLYALDVRVNSLDPAWPIKPLPPNVNTSSIHVNPKFLNKSPEEPSTPGTVVSSPSISTPPIVPDIQKNLTQEQLIRQQLLAKQKQLLELQQKKLELELEQAKAQLAVSLSVQQETSNLGPGSAPSKLHVSQIPPMAVKAPHQVPVQSEKSRPGPSLQIQDLKGTNRDPRLNRISQHSHGKDQSHRKEFLMNTLNQSDTKTSKTIPSEKLNSSKQEKSKSGEKITKKELDQLDSKSKSKSKSPSPLKNKLSHTKDLKNQESESMRLSDMNKRDPRLKKHLQDKTDGKDDDVKEKRKTAEKKDKDEHMKSSEHRLAGSRNKIINGIVQKQDTITEESEKQGTKPGRSSTRKRSRSRSPKSRSPIIHSPKRRDRRSPKRRQRSMSPTSTPKAGKIRQSGAKQSHMEEFTPPSREDRNAKRSTKQDIRDPRRMKKTEEERPQETTNQHSTKSGTEPKENVENWQSSKSAKRWKSGWEENKSLQQVDEHSKPPHLRHRESWSSTKGILSPRAPKQQQHRLSVDANLQIPKELTLASKRELLQKTSERLASGEITQDDFLVVVHQIRQLFQYQEGVREEQRSPFNDRFPLKRPRYEDSDKPFVDSPASRFAGLDTNQRLTALAEDRPLFDGPSRPSVARDGPTKMIFEGPNKLSPRIDGPP

SEQ ID NO: 18444 - protein, 488 aa, Homo sapiens
MDPGQQPPPQPAPQGQGQPPSQPPQGQGPPSGPGQPAPAATQAAPQAPPAGHQIVHVRGDSETDLEALFNAVMNPKTANVPQTVPMRLRKLPDSFFKPPEPKSHSRQASTDAGTAGALTPQHVRAHSSPASLQLGAVSPGTLTPTGVVSGPAATPTAQHLRQSSFEIPDDVPLPAGWEMAKTSSGQRYFLNHIDQTTTWQDPRKAMLSQMNVTAPTSPPVQQNMMNSASGPLPDGWEQAMTQDGEIYYINHKNKTTSWLDPRLDPRFAMNQRISQSAPVKQPPPLAPQSPQGGVMGGSNSNQQQQMRLQQLQMEKERLRLKQQELLRQELALRSQLPTLEQDGGTQNPVSSPGMSQELRTMTTNSSDPFLNSGTYHSRDESTDSGLSMSSYSVPRTPDDFLNSVDEMDTGDTINQSTLPSQQNRFPDYLEAIPGTNVDLGTLEGDGMNIEGEELMPSLQEALSSDILNDMESVLAATKLDKESFLTWL

SEQ ID NO: 18445 - protein, 34 aa, Homo sapiens
ISSLRGIQRIAATSKILSAPGSQREGRNPQLNQQ

SEQ ID NO: 18446 - protein, 628 aa, Homo sapiens
MNKGERLNQDQLDAVSKYQEVTNNLEFAKELQRSFMALSQDIQKTIKKTARREQLMREEAEQKRLKTVLELQYVLDKLGDDEVRTDLKQGLNGVPILSEEELSLLDEFYKLVDPERDMSLRLNEQYEHASIHLWDLLEGKEKPVCGTTYKVLKEIVERVFQSNYFDSTHNHQNGLCEEEEAASAPAVEDQVPEAEPEPAEEYTEQSEVESTEYVNRQFMAETQFTSGEKEQVDEWTVETVEVVNSLQQQPQAASPSVPEPHSLTPVAQADPLVRRQRVQDLMAQMQGPYNFIQDSMLDFENQTLDPAIVSAQPMNPTQNMDMPQLVCPPVHSESRLAQPNQVPVQPEATQVPLVSSTSEGYTASQPLYQPSHATEQRPQKEPIDQIQATISLNTDQTTASSSLPAASQPQVFQAGTSKPLHSSGINVNAAPFQSMQTVFNMNAPVPPVNEPETLKQQNQYQASYNQSFSSQPHQVEQTELQQEQLQTVVGTYHGSPDQSHQVTGNHQQPPQQNTGFPRSNQPYYNSRGVSRGGSRGARGLMNGYRGPANGFRGGYDGYRPSFSNTPNSGYTQSQFSAPRDYSGYQRDGYQQNFKRGSGQSGPRGAPRGRGGPPRPNRGMPQMNTQQVN

SEQ ID NO: 18447 - protein, 501 aa, Homo sapiens
MPSKTKYNLVDDGHDLRIPLHNEDAFQHGICFEAKYVGSLDVPRPNSRVEIVAAMRRIRYEFKAKNIKKKKVSIMVSVDGVKVILKKKKKKKEWTWDESKMLVMQDPIYRIFYVSHDSQDLKIFSYIARDGASNIFRCNVFKSKKKSQAMRIVRTVGQAFEVCHKLSLQHTQQNADGQEDGESERNSNSSGDPGRQLTGAERASTATAEETDIDAVEVPLPGNDVLEFSRGVTDLDAVGKEGGSHTGSKVSHPQEPMLTASPRMLLPSSSSKPPGLGTETPLSTHHQMQLLQQLLQQQQQQTQVAVAQVHLLKDQLAAEAAARLEAQARVHQLLLQNKDMLQHISLLVKQVQELELKLSGQNAMGSQDSLLEITFRSGALPVLCDPTTPKPEDLHSPPLGAGLADFAHPAGSPLGRRDCLVKLECFRFLPPEDTPPPAQGEALLGGLELIKFRESGIASEYESNTDESEERDSWSQEELPRLLNVLQRQELGDGLDDEIAV

SEQ ID NO: 18448 - protein, 521 aa, Homo sapiens
MQPGLSPGSPGDPRPPTPETDYPESLTSYPEEDYSPVGSFGEPGPTSPLTTPPGWSCHVSQDKQMLYTNHFTQEQVPVPAPRSIHKSSQDGDTPAQASPPEEKVPAELDEVGSWEEVSPATAAVRTKTLDKAGVLHRTKTADKGKRLRKKHWSASWTVLEGGVLTFFKDSKTSAAGGLRQPSKFSTPEYTVELRGATLSWAPKDKSSRKNVLELRSRDGSEYLIQHDSEAIISTWHKAIAQGIQELSAELPPEESESSRVDFGSSERLGSWQEKEEDARPNAAAPALGPVGLESDLSKVRHKLRKFLQRRPTLQSLREKGYIKDQVFGCALAALCERERSRVPRFVQQCIRAVEARGLDIDGLYRISGNLATIQKLRYKVDHDERLDLDDGRWEDVHVITGALKLFFRELPEPLFPFSHFRQFIAAIKLQDQARRSRCVRDLVRSLPAPNHDTLRMLFQHLCRVIEHGEQNRMSVQSVAIVFGPTLLRPEVEETSMPMTMVFQNQVVELILQQCADIFPPH

SEQ ID NO: 18449 - protein, 94 aa, Homo sapiens
AERQLYSSLVKFHAHPESSERDRTLQVELEGAQVLRSRLEEVLGRSLERLNRLETLAAIGGAAAGDDTEDTSTEFTDSIEEEAAHHSHQQPSFL

SEQ ID NO: 18450 - protein, 400 aa, Homo sapiens
MTEQVIGANSVPGIIAPDNVHVIQPSNPVASGNHLQPSEVTTYPISPKVIHCDTGRANLQNLLVVNQNSAAGVQSQPIGYQRQYPVGTASLQTVPGVIQYTQGTTNLQTWPGDLQNPLNANPGLTHTSNSSQWNTSFASFTSFNPKKFINEEVRTLGVSAIQILIGLTHIFSAINPVLYYYPFVTWLSGYPLWGGLSYIVSGSLSVWAAKDPSPCVVNSSISFNIISALFAFAGIFIIITDLSLYYVTTYSKAVSGGLLPFALLEFILTCVVSHFGCQATCCRQFENVAVIPTVFSFNPANTTTSPVNATTGPVNAATGPVSATNGPVNTTIHPVNTTTSPVNTTTSPVNVTTGPVNANIGPVNVTTGPVNTTTAPAKATTSCVNAIHTSNVPPNPRTKK

SEQ ID NO: 18451 - protein, 793 aa, Homo sapiens
MDEGTGLQPGAGEQLEAPATAEAVQERCEPETLRSKSLPVLSSASCRPSLSPTSGDANPAFGCVDSSGHQELKQGPNPLAPSPSAPSTSAGLGDCNHRVDLSKTFSVSSALAMLQERRCLYVVLTDSRCFLVCMCFLTFIQALMVSGYLSSVITTIERRYSLKSSESGLLVSCFDIGNLVVVVFVSYFGGRGRRPLWLAVGGLLIAFGAALFALPHFISPPYQIQELNASAPNDGLCQGGNSTATLEPPACPKDSGGNNHWVYVALFICAQILIGMGSTPIYTLGPTYLDDNVKKENSSLYLAIMYVMGALGPAVGYLLGGLLIGFYVDPRNPVHLDQNDPRFIGNWWSGFLLCAIAMFLVIFPMFTFPKKLPPRHKKKKKKKFSVDAVSDDDVLKEKSNNSEQADKKVSSMGFGKDVRGVIIVPSAGVGIVLGGYIIKKLKLGARESAKLAMICSGVSLLCFSTLFIVGCESINLGGINIPYTTGPSLTMPHRNLTGSCNVNCGCKIHEYEPVCGSDGITYFNPCLAGCVNSGNLSTGIRNYTECTCVQSRQVITPPTVGQRSQLRVVIVKTYLNENGYAVSGKCKRTCNTLIPFLVFLFIVTFITACAQPSAIIVTLRSVEDEERPFALGMQFVLLRTLAYIPTPIYFGAVIDTTCMLWQQECGVQGSCWEYNVTSFRFVYFGLAAGLKFVGFIFIFLAWYSIKYKEDGLQRRRQREFPLSTVSERVGHPDNARTRSCPAFSTQGEFHEETGLQKGIQCAAQTYPGPFPEAISSSADPGLEESPAALEPPS

SEQ ID NO: 18452 - protein, 832 aa, Homo sapiens
MVALRGLGSGLQPWCPLDLRLEWVDTVWELDFTETEPLDPSIEAEIIETGLAAFTKLYESLLPFATGEHGSMESIWTFFIENNVSHSTLVALFYHFVQIVHKKNVSVQYREYGLHAAGLYFLLLEVPGSVANQVFHPVMFDKCIQTLKKSWPQESNLNRKRKKEQPKSSQANPGRHRKRGKPPRREDIEMDEIIEEQEDENICFSARDLSQIRNAIFHLLKNFLRLLPKFSLKEKPQCVQNCIEVFVSLTNFEPVLHECHVTQARALNQAKYIPELAYYGLYLLCSPIHGEGDKVISCVFHQMLSVILMLEVGEGSHRAPLAVTSQVINCRNQAVQFISALVDELKESIFPVVRILLQHICAKVVDKSEYRTFAAQSLVQLLSKLPCGEYAMFIAWLYKYSRSSKIPHRVFTLDVVLALLELPEREVDNTLSLEHQKFLKHKFLVQEIMFDRCLDKAPTVRSKALSSFAHCLELTVTSASESILELLINSPTFSVIESHPGTLLRNSSAFSYQRQTSNRSEPSGEINIDSSGETVGSGERCVMAMLRRRIRDEKTNVRKSALQVLVSILKHCDVSGMKEDLWILQDQCRDPAVSVRKQALQSLTELLMAQPRCVQIQKAWLRGVVPVVMDCESTVQEKALEFLDQLLLQNIRHHSHFHSGDDSQVLAWALLTLLTTESQELSRYLNKAFHIWSKKEKFSPTFINNVISHTGTEHSAPAWMLLSKIAGSSPRLDYSRIIQSWEKISSQQNPNSNTLGHILCVIGHIAKHLPKSTRDKVTDAVKCKLNGFQWSLEVISSAVDALQRLCRASAETPAEEQHWLEKESCVQRAVRA

SEQ ID NO: 18453 - protein, 305 aa, Homo sapiens
MGCVFQSTEDKCIFKIDWTLSPGEHAKDEYVLYYYSNLSVPIGRFQNRVHLMGDILCNDGSLLLQDVQEADQGTYICEIRLKGESQVFKKAVVLHVLPEEPKELMVHVGGLIQMGCVFQSTEVKHVTKVEWIFSGRRAKEEIVFRYYHKLRMSVEYSQSWGHFQNRVNLVGDIFRNDGSIMLQGVRESDGGNYTCSIHLGNLVFKKTIVLHVSPEEPRTLVTPAALRPLVLGGNQLVIIVGIVCATILLLPVLILIVKKTCGNKSSVNSTVLVKNTKKTNPEIKEKPCHFERCEGEVNTRFSLKH

SEQ ID NO: 18454 - protein, 1016 aa, Homo sapiens
MVAMAEAEAGVAVEVRGLPPAVPDELLTLYFENRRRSGGGPVLSWQRLGCGGVLTFREPADAERVLAQADHELHGAQLSLRPAPPRAPARLLLQGLPPGTTPQRLEQHVQALLRASGLPVQPCCALASPRPDRALVQLPKPLSEADVRVLEEQAQNLGLEGTLVSLARVPQARAVRVVGDGASVDLLLLELYLENERRSGGGPLEDLQRLPGPLGTVASFQQWQVAERVLQQEHRLQGSELSLVPHYDILEPEELAENTSGGDHPSTQGPRATKHALLRTGGLVTALQGAGTVTMGSGEEPGQSGASLRTGPMVQGRGIMTTGSGQEPGQSGTSLRTGPMGSLGQAEQVSSMPMGSLEHEGLVSLRPVGLQEQEGPMSLGPVGSAGPVETSKGLLGQEGLVEIAMDSPEQEGLVGPMEITMGSLEKAGPVSPGCVKLAGQEGLVEMVLLMEPGAMRFLQLYHEDLLAGLGDVALLPLEGPDMTGFRLCGAQASCQAAEEFLRSLLGSISCHVLCLEHPGSARFLLGPEGQHLLQGLEAQFQCVFGTERLATATLDTGLEEVDPTEALPVLPGNAHTLWTPDSTEEVRELLATLEGLDLDGEDWLPRELEEEGPQEQPEEEVTPGHEEEEPVAPSTVAPRWLEEEAALQLALHRSLEPQGQVAEQEEAAALRQALTLSLLEQPPLEAEEPPDGGTDGKAQLVVHSAFEQDVEELDRALRAALEVHVQEETVGPWRRTLPAELRARLERCHGVSVALRGDCTILRGFGAHPARAARHLVALLAGPWDQSLAFPLAASGPTLAGQTLKGPWNNLERLAENTGEFQEVVRAFYDTLDAARSSIRVVRVERVSHPLLQQQYELYRERLLQRCERRPVEQVLYHGTTAPAVPDICAHGFNRSFCGRNATVYGKGVYFARRASLSVQDRYSPPNADGHKAVFVARVLTGDYGQGRRGLRAPPLRGPGHVLLRYDSAVDCICQPSIFVIFHDTQALPTHLITCEHVPRASPDDPSGLPGRSPDT

SEQ ID NO: 18455 - protein, 656 aa, Homo sapiens
MPAVSKGDGMRGLAVFISDIRNCKSKEAEIKRINKELANIRSKFKGDKALDGYSKKKYVCKLLFIFLLGHDIDFGHMEAVNLLSSNRYTEKQIGYLFISVLVNSNSELIRLINNAIKNDLASRNPTFMGLALHCIASVGSREMAEAFAGEIPKVLVAGDTMDSVKQSAALCLLRLYRTSPDLVPMGDWTSRVVHLLNDQHLGVVTAATSLITTLAQKNPEEFKTSVSLAVSRLSRIVTSASTDLQDYTYYFVPAPWLSVKLLRLLQCYPPPEDPAVRGRLTECLETILNKAQEPPKSKKVQHSNAKNAVLFEAISLIIHHDSEPNLLVRACNQLGQFLQHRETNLRYLALESMCTLASSEFSHEAVKTHIETVINALKTERDVSVRQRAVDLLYAMCDRSNAPQIVAEMLSYLETADYSIREEIVLKVAILAEKYAVDYTWYVDTILNLIRIAGDYVSEEVWYRVIQIVINRDDVQGYAAKTVFEALQAPACHENLVKVGGYILGEFGNLIAGDPRSSPLIQFHLLHSKFHLCSVPTRALLLSTYIKFVNLFPEVKPTIQDVLRSDSQLRNADVELQQRAVEYLRLSTVASTDILATVLEEMPPFPERESSILAKLKKKKGPSTVTDLEDTKRDRSVDVNGGPEPAPASTSAVVCL

SEQ ID NO: 18456 - protein, 811 aa, Homo sapiens
MTTEVGSVSEVKKDSSQLGTDATKEKPKEVAENQQNQSSDPEEEKGSQPPPAAESQSSLRRQKREKETSESRGISRFIPPWLKKQKSYTLVVAKDGGDKKEPTQAVVEEQVLDKEEPLPEEQRQAKGDAEEMAQKKQEIKVEVKEEKPSVSKEEKPSVSKVEMQPTELVSKEREEKVKETQEDKLEGGAAKRETKEVQTNELKAEKASQKVTKKTKTVQCKVTLLDGTEYSCDLEKHAKGQVLFDKVCEHLNLLEKDYFGLLFQESPEQKNWLDPAKEIKRQLRNLPWLFTFNVKFYPPDPSQLTEDITRYFLCLQLRQDIASGRLPCSFVTHALLGSYTLQAELGDYDPEEHGSIDLSEFQFAPTQTKELEEKVAELHKTHRGLSPAQADSQFLENAKRLSMYGVDLHHAKDSEGVDIKLGVCANGLLIYKDRLRINRFAWPKILKISYKRSNFYIKVRPAELEQFESTIGFKLPNHRAAKRLWKVCVEHHTFYRLVSPEQPPKAKFLTLGSKFRYSGRTQAQTRQASTLIDRPAPHFERTSSKRVSRSLDGAPIGVMDQSLMKDFPGAAGEISAYGPGLVSIAVVQDGDGRREVRSPTKAPHLQLIEGKSSHETLNIVEEKKRAEVGKDERVITEEMNGKEISPGSGPGEIRKVEPVTQKDSTSLSSESSSSSSESEEEDVGEYRPHHRVTEGTIREEQEYEEEVEEEPRPAAKIDGGAGGDSGTLLTAQTITSESVSTTTTTHITKTVKGGISETRIEKRIVITGDGDIDHDQALAQAIREAREQHPDMSVTRVVVHKETELAEEGED

SEQ ID NO: 18457 - protein, 997 aa, Homo sapiens
MPLAFCGSENHSAAYRVDQGVLNNGCFVDALNVVPHVFLLFITFPILFIGWGSQSSKVHIHHSTWLHFPGHNLRWILTFMLLFVLVCEIAEGILSDGVTESHHLHLYMPAGMAFMAAVTSVVYYHNIETSNFPKLLIALLVYWTLAFITKTIKFVKFLDHAIGFSQLRFCLTGLLVILYGMLLLVEVNVIRVRRYIFFKTPREVKPPEDLQDLGVRFLQPFVNLLSKGTYWWMNAFIKTAHKKPIDLRAIGKLPIAMRALTNYQRLCEAFDAQVRKDIQGTQGARAIWQALSHAFGRRLVLSSTFRILADLLGFAGPLCIFGIVDHLGKENDVFQPKTQFLGVYFVSSQEFLANAYVLAVLLFLALLLQRTFLQASYYVAIETGINLRGAIQTKIYNKIMHLSTSNLSMGEMTAGQICNLVAIDTNQLMWFFFLCPNLWAMPVQIIVGVILLYYILGVSALIGAAVIILLAPVQYFVATKLSQAQRSTLEYSNERLKQTNEMLRGIKLLKLYAWENIFRTRVETTRRKEMTSLRAFAIYTSISIFMNTAIPIAAVLITFVGHVSFFKEADFSPSVAFASLSLFHILVTPLFLLSSVVRSTVKALVSAEIREEQCAPHEPTPQGPASKYQAVPLRVVNRKRPAREDCRGLTGPLQSLVPSADGDADNCCVQIMGGYFTWTPDGIPTLSNITIRIPRGQLTMIVGQVGCGKSSLLLAALGEMQKVSGAVFWSSLPDSEIGEDPSPERETATDLDIRKRGPVAYASQKPWLLNATVEENIIFESPFNKQRYKMVIEACSLQPDIDILPHGDQTQIGERGINLSGGQRQRISVARALYQHANVVFLDDPFSALDIHLSDHLMQAGILELLRDDKRTVVLVTHKLQYLPHADWIIAMKDGTIQREGTLKDFQRSECQLFEHWKTLMNRQDQELEKRRQLRARRMTTCRPCCTSVLRSHGEPAPSTCPPPASCSCRCWSSHSCSSTWSWWPSTTGWPSGPTAP

SEQ ID NO: 18458 - protein, 819 aa, Homo sapiens
MAKPLTDQEKRRQISIRGIVGVENVAELKKSFNRHLHFTLVKDRNVATTRDYYFALAHTVRDHLVGRWIRTQQHYYDKCPKRVYYLSLEFYMGRTLQNTMINLGLQNACDEAIYQLGLDIEELEEIEEDAGLGNGGLGRLAACFLDSMATLGLAAYGYGIRYEYGIFNQKIRDGWQVEEADDWLRYGNPWEKSRPEFMLPVHFYGKVEHTNTGTKWIDTQVVLALPYDTPVPGYMNNTVNTMRLWSARAPNDFNLRDFNVGDYIQAVLDRNLAENISRVLYPNDNFFEGKELRLKQEYFVVAATLQDIIRRFKASKFGSTRGAGTVFDAFPDQVAIQLNDTHPALAIPELMRIFVDIEKLPWSKAWELTQKTFAYTNHTVLPEALERWPVDLVEKLLPRHLEIIYEINQKHLDRIVALFPKDVDRLRRMSLIEEEGSKRINMAHLCIVGSHAVNGVAKIHSDIVKTKVFKDFSELEPDKFQNKTNGITPRRWLLLCNPGLAELIAEKIGEDYVKDLSQLTKLHSFLGDDVFLRELAKVKQENKLKFSQFLETEYKVKINPSSMFDVQVKRIHEYKRQLLNCLHVITMYNRIKKDPKKLFVPRTVIIGGKAAPGYHMAKMIIKLITSVADVVNNDPMVGSKLKVIFLENYRVSLAEKVIPATDLSEQISTAGTEASGTGNMKFMLNGALTIGTMDGANVEMAEEAGEENLFIFGMRIDDVAALDKKGYEAKEYYEALPELKLVIDQIDNGFFSPKQPDLFKDIINMLFYHDRFKVFADYEAYVKCQDKVSQLYMKSDAVRPKHWPGKDSVQTGPLRETVR

SEQ ID NO: 18459 - protein, 650 aa, Homo sapiens
MAGMSQRPPSMYWCVGPEESAVCPERAMETLNGAGDTGGKPSTRGGDPAARSRRTEGIRAAYRRGDRGGARDLLEEACDQCASQLEKGQLLSIPAAYGDLEMVRYLLSKRLVELPTEPTDDNPAVVAAYFGHTAVVQELLESLPGPCSPQRLLNWMLALACQRGHLGVVKLLVLTHGADPESYAVRKNEFPVIVRLPLYAAIKSGNEDIAIFLLRHGAYFCSYILLDSPDPSKHLLRKYFIEASPLPSSYPGKTALRVKWSHLRLPWVDLDWLIDISCQITELDLSANCLATLPSVIPWGLINLRKLNLSDNHLGELPGVQSSDEIICSRLLEIDISSNKLSHLPPGFLHLSKLQKLTASKNCLEKLFEEENATNWIGLRKLQELDISDNKLTELPALFLHSFKSLNSLNVSRNNLKVFPDPWACPLKCCKASRNALECLPDKMAVFWKNHLKDVDFSENALKEVPLGLFQLDALMFLRLQGNQLAALPPQEKWTCRQLKTLDLSRNQLGKNEDGLKTKRIAFFTTRGRQRSGTEAASVLEFPAFLSESLEVLCLNDNHLDTVPPSVCLLKSLSELYLGNNPGLRELPPELGQLGNLWQLDTEDLTISNVPAEIQKEGPKAMLSYLRAQLRKAEKCKLMKMIIVGPPRQG

SEQ ID NO: 18460 - protein, 924 aa, Homo sapiens
MLSLDPSGPEWDCPLGSKDLEEEGPWGGGSGLPPTGCFPGSWRQDVGLDCKGSPEGAEARAWTVYYYSLLQSCLQQAGLPETQDRGQVPRTGCPGAEVTLCVLGSPSTFLPVLLEGGVQSPGNMLLCLSPAWLMKVPAPGQPGEAALLVSKAVSFHPGGLTFLDDFVPPRRATYFLAGLGLGPGRGREAAELARDLTCPTGASAELARLLEDRLLTRQLLAQQGGVAVPATLAFTYKPPGLLRGGDASLGLRLVELSGKEGQETLVKEEVEAFLRSEALGDILQVAVKLSGWRWRGRQAWRLHPRAELGAVVDTVLALLEKLEEEESVLVEAVYPPAQLPCSDGPSPGPGLAVRICAVVCRTQGDRPLLSKVVCGVGRGDRPLRHHNSLPRTLEAALAAVLALEAGLSAEQRGGRRAHTDFLGVDFALTAAGGVLTPVALELNGGLCLEACGALEGLWAAPRLGPAADEAVAAPLVETMLRRSARCLMEGKQLLVVGAGGVSKKFVWEAARDYGLQLHLVESDPNHFASQLVQTFIHFDMTEHRRDEENARLLAELVRARGLKLDGCFSYWDDCLVLTALLCQELGLPCSSPAAMRLAKQKSLTQLHLLHHHGPPWPAPSLHAVPCCPLESEADVERAVHQVPLPGVMKLEFGAGAVGVRLVEDAPQCHEHFSRITRDLQGEADHPGIGLGWGNAMLLMEFVEGTEHDVDLVLFGGRLLAAFVSDNGPTRLPGFTETAACMPTGLAPEQEAQMVQAAFRCCLGCGLLDGVFNVELKLTGAGPRLIEINPRMGGFYLRDWILELYGVDLLLAAVMVACGLRPALPTRPRARGHLVGVMCLVSQHLQALSSTASRETLQALHDRGLLRLNLLEEALVPGEYEEPYCSVACAGPSPTEARLRLLGLCQGLGIDGPSYPVAHFLSHFK

SEQ ID NO: 18461 - protein, 471 aa, Homo sapiens
MTVGTVKIVIRGDRNTGKTALWHRLQGRPFVEEYIPTQEIQVTSIHWSYKTTDDIVKVEVWDVVDKGKCKKRGDGLKMENDPQEAESEMALDAEFLDVYKNCNGVVMMFDITKQWTFNYILRELPKVPTHVPVCVLGNYRDMGEHRVILPDDVRDFIDNLDRPPGSSYFRYAESSMKNSFGLKYLHKFFNIPFLQLQRETLLRQLETNQLDMDATLEELSVQQETEDQNYGIFLEMMEARSRGHASPLAANGQSPSPGSQSPVVPAGAVSTGSSSPGTPQPAPQLPLNAAPPSSVPPVPPSEALPPPACPSAPAPRRSIISRLFGTSPATEAAPPPPEPVPAAEGPATVQSVEDFVPDDRLDRSFLEDTTPARDEKKVGAKAAQQDSDSDGEALGGNPMVAGFQDDVDLEDQPRGSPPLPAGPVPSQDITLSSEEEAEVAAPTKGPAPAPQQCSEPETKWSGEAQQHQAPC

SEQ ID NO: 18462 - protein, 934 aa, Homo sapiens
MIDLSFLTEEEQEAIMKVLQRDAALKRAEEERVRHLPEKIKDDQQLKNMSGQWFYEAKAKRHRDKIHGADIIRASMRKKRPQIAAEQSKDRENGAKESWVNNVNKDAFLPPELAGVVEEPEEDAAPASPSSSVVNPASSVIDMSQENTRKPNVSPEKRKNPFNSSKLPEGHSSQQTKNEQSKNGRTGLFQTSKEDELSESKEKSTVADTSIQKLEKSKQTLPGLSNGSQIKAPIPKARKMIYKSTDLNKDDNQSFPRQRTDSLKARGAPRGILKRNSSSSSTDSETLRYNHNFEPKSKIVSPGLTIHERISEKEHSLEDNSSPNSLEPLKHVRFSAVKDELPQSPGLIHGREVGEFSVLESDRLKNGMEDAGDTEEFQSDPKPSQYRKPSLFHQSTSSPYVSKSETHQPMTSGSFPINGLHSHSEVLTARPQSMENSPTINEPKDKSSELTRLESVLPRSPADELSHCVEPEPSQVPGGSSRDRQQGSEEEPSPVLKTLERSAARKMPSKSLEDISSDSSNQAKVDNQPEELVRSAEDVSTVPTQPDNPFSHPDKLKRMSKSVPAFLQDESDDRETDTASESSYQLSRHKKSPSSLTNLSSSSGMTSLSSVSGSVMSVYSGDFGNLEVKGNIQFAIEYVESLKELHVFVAQCKDLAAADVKKQRSDPYVKAYLLPDKGKMGKKKTLVVKKTLNPVYNEILRYKIEKQILKTQKLNLSIWHRDTFKRNSFLGEVELDLETWDWDNKQNKQLRWYPLKRKTAPVALEAENRGEMKLALQYVPEPVPGKKLPTTGEVHIWVKECLDLPLLRGSHLNSFVKCTILPDTSRKSRQKTRAVGKTTNPIFNHTMVYDGFRPEDLMEACVELTVWDHYKLTNQFLGGLRIGFGTGKSYGTEVDWMDSTSEEVALWEKMVNSPNTWIEATLPLRMLLIAKISK

SEQ ID NO: 18463 - protein, 228 aa, Homo sapiens
MRNCFRLQEEMLQREEAENTLQSFRQDVDNASLARLDLERKVESLQEEIAFLKKLHEEEIQELQAQIQEQHVQIDVDVSKPDLTAALRDVRQQYESVAAKNLQEAEEWYKSKFADLSEAANRNNDALRQAKQESTEYRRQVQSLTCEVDALKGTNESLERQMREMEENFAVEAANYQDTIGRLQDEIQNMKEEMARHLREYQDLLNVKMALDIEIATYRKLLEGEESR

SEQ ID NO: 18464 - protein, 913 aa, Homo sapiens
ILYPPLKQEQVQVLIEKYEPNNSLARKGQISVDGFMRYLSGEENGVVSPEKLDLNEDMSQPLSHYFINSSHNTYLTAGQLAGNSSVEMYRQVLLSGCRCVELDCWKGRTAEEEPVITHGFTMTTEISFKEVIEAIAECAFKTSPFPILLSFENHVDSPKQQAKMAEYCRLIFGDALLMEPLEKYPLESGVPLPSPMDLMYKILVKNKKKSHKSSEGSGKKKLSEQASNTYSDSSSMFEPSSPGAGEADTESDDDDDDDDCKKSSMDEGTAGSEAMATEEMSNLVNYIQPVKFESFEISKKRNKSFEMSSFVETKGLEQLTKSPVEFVEYNKMQLSRIYPKGTRVDSSNYMPQLFWNAGCQMVALNFQTMDLAMQINMGMYEYNGKSGYRLKPEFMRRPDKHFDPFTEGIVDGIVANTLSVKIISGQFLSDKKVGTYVEVDMFGLPVDTRRKAFKTKTSQGNAVNPVWEEEPIVFKKVVLPTLACLRIAVYEEGGKFIGHRILPVQAIRPGYHYICLRNERNQPLTLPAVFVYIEVKDYVPDTYADVIEALSNPIRYVNLMEQRAKQLAALTLEDEEEVKKEADPGETPSEAPSEARTTPAENGVNHTTTLTPKPPSQALHSQPAPGSVKAPAKTEDLIQSVLTEVEAQTIEELKQQKSFVKLQKKHYKEMKDLVKRHHKKTTDLIKEHTTKYNEIQNDYLRRRAALEKSAKKDSKKKSEPSSPDHGSSTIEQDLAALDAEMTQKLIDLKDKQQQQLLNLRQEQYYSEKYQKREHIKLLIQKLTDVAEECQNNQLKKLKEICEKEKKELKKKMDKKRQEKITEAKSKDKSQMEEEKTEMIRSYIQEVVQYIKRLEEAQSKRQEKLVEKHKEIRQQILDEKPKGEGSSSFLSETCHEDPSVSPNFTPPNPQALKW

SEQ ID NO: 18465 - protein, 951 aa, Homo sapiens
NTPSSLAVCADGELYVADLGNIRIRFIRKNKPFLNTQNMYELSSPIDQELYLFDTTGKHLYTQSLPTGDYLYNFTYTGDGDITLITDNNGNMVNVRRDSTGMPLWLVVPDGQVYWVTMGTNSALKSVTTQGHELAMMTYHGNSGLLATKSNENGWTTFYEYDSFGRLTNVTFPTGQVSSFRSDTDSSVHVQVETSSKDDVTITTNLSASGAFYTLLQDQVRNSYYIGADGSLRLLLANGMEVALQTEPHLLAGTVNPTVGKRNVTLPIDNGLNLVEWRQRKEQARGQVTVFGRRLRVHNRNLLSLDFDRVTRTEKIYDDHRKFTLRILYDQAGRPSLWSPSSRLNGVNVTYSPGGYIAGIQRGIMSERMEYDQAGRITSRIFADGKTWSYTYLEKSMVLLLHSQRQYIFEFDKNDRLSSVTMPNVARQTLETIRSVGYYRNIYQPPEGNASVIQDFTEDGHLLHTFYLGTGRRVIYKYGKLSKLAETLYDTTKVSFTYDETAGMLKTINLQNEGFTCTIRYRQIGPLIDRQIFRFTEEGMVNARFDYNYDNSFRVTSMQAVINETPLPIDLYRYDDVSGKTEQFGKFGVIYYDINQIITTAVMTHTKHFDAYGRMKEVQYEIFRSLMYWMTVQYDNMGRVVKKELKVGPYANTTRYSYEYDADGQLQTVSINDKPLWRYSYDLNGNLHLLSPGNSARLTPLRYDIRDRITRLGDVQYKMDEDGFLRQRGGDIFEYNSAGLLIKAYNRAGSWSVRYRYDGLGRRVSSKSSHSHHLQFFYADLTNPTKVTHLYNHSSSEITSLYYDLQGHLFAMELSSGDEFYIACDNIGTPLAVFSGTGLMIKQILYTAYGEIYMDTNPNFQIIIGYHGGLYDPLTKLVHMGRRDYDVLAGRWTSPDHELWKHLSSSNVMPFNLYMFKNNNPISNSQDIKCFMTERTKDFLPKTATLLWPHT

SEQ ID NO: 18466 - protein, 309 aa, Homo sapiens
MITFLPIIFSSLVVVTFVIGNFANGFIALVNSIEWFKRQKISFADQILTALAVSRVGLLWVLLLNWYSTVLNPAFNSVEVRTTAYNIWAVINHFSNWLATTLSIFYLLKIANFSNFIFLHLKRRVKSVILVMLLGPLLFLACHLFVINMNEIVRTKEFEGNMTWKIKLKSAMYFSNMTVTMVANLVPFTLTLLSFMLLICSLCKHLKKMQLHGKGSQDPSTKVHIKALQTVISFLLLCAIYFLSIMISVWSFGSLENKPVFMFCKAIRFSYPSIHPFILIWGNKKLKQTFLSVFWQMRYWVKGEKTSSP

SEQ ID NO: 18467 - protein, 625 aa, Homo sapiens
MELWAPQRLPQTRGKATAPSKDPDRGFRRDGHHRPVPHSWHNGERFHQWQDNRGSPQPQQEPRADHQQQPHYASRPGDWHQPVSGVDYYEGGYRNQLYSRPGYENSYQSYQSPTMREEYAYGSYYYHGHPQWLQEERVPRQRSPYIWHEDYREQKYLDEHHYENQHSPFGTNSETHFQSNSRNPCKDSPASNSGQEWPGELFPGSLLAEAQKNKPSLASESNLLQQRESGLSSSSYELSQYIRDAPERDDPPASAAWSPVQAEDVSSAGPKAPMKFYIPHVPVSFGPGGQLVHVGPSSPTDGQAALVELHSMEVILNDSEEQEEMRSFSGPLIREDVHKVDIMTFCQQKAAQSCKSETLGSRDSALLWQLLVLLCRQNGSMVGSDIAELLMQDCKKLEKYKRQPPVANLINLTDEDWPVLSSGTPNLLTGEIPPSVETPAQIVEKFTRLLYYGRKKEALEWAMKNHLWGHALFLSSKMDPQTYSWVMSGFTSTLALNDPLQTLFQLMSGRIPQAATCCGEKQWGDWRPHLAVILSNQAGDPELYQRAIVAIGDTLAGKGLVEAAHFCYLMAHVPFGHYTVKTDHLVLLGSSHRYATWEKGNSKDIFQGTVLALVGFYGSIFHFLM

SEQ ID NO: 18468 - protein, 522 aa, Homo sapiens
RMIQDTKQVPHTHEREINVMLYNKYFHQVLTICSESIIRVWELETGLQVYQILEPHGFNTEVTSAAVDESGFLFATGAYNGTVRIWDFGSGQEMKVLPEGKDWKEDEHCLRRLIFLKAQEKHQQLVLALERNGTIKMIQGKEDDIYLMVIWELPDVVPFLQDGKHAVHLRMSTRDRNMAIPFPDVELIVERNFSQPTDNPTMDLLRVNCIDLLQVEGYNLIAAGTLNGVIILWNFVTSTVKKVYRPEDCFTVNPDLHPKHFKINDILFLFRTPECARRSSQDSICSSSQCESSKGPQSSKGSKQSIHDSEVKGEQTDVMVGKQQPMDKKHPGIANLPEAQPPILVTAHEDGHLRLWTLEGRLLKDMLPFTKHSAISLTSLYTDSCTRILLAGNVEGHVILCNISSFLDPPHDEKKFKQLLSWRAHSLEIIQVIYVEEKQVVLTASIDGSVRLWHALNGHYCGYFGQRRLFELSQTRDFILPCDVTEYPIEIKEESKFTEKQKYEYPLIFDREKFEDIPWKVS

SEQ ID NO: 18469 - protein, 353 aa, Homo sapiens
MGQDQTKQQIEKGLQLYQSNQTEKALQVWTKVLEKSSDLMGRFRVLGCLVTAHSEMGRYKEMLKFAVVQIDTARELEDADFLLESYLNLARSNEKLCEFHKTISYCKTCLGLPGTRAGAQLGGQVSLSMGNAFLGLSVFQKALESFEKALRYAHNNDDAMLECRVCCSLGSFYAQVKDYEKALFFPCKAAELVNNYGKGWSLKYRAMSQYHMAVAYRLLGRLGSAMECCEESMKIALQHGDRPLQALCLLCFADIHRSRGDLELSQLKLHCLSESIYRSKGLQRELRAHVVRFHECVEETELYCGLCGESIGEKNSRLQALPCSHIFHLRWGLLGGWTGVGRISSGHSRAQLA

SEQ ID NO: 18470 - protein, 725 aa, Homo sapiens
MGRSNSRSHSSRSKSRSQSSSRSRSRSHSRKKRYSSRSRSRTYSRSRSRDRMYSRDYRRDYRNNRGMRRPYGYRGRGRGYYQGGGGRYHRGGYRPVWNRRHSRSPRRGRSRSRSPKRRSVSSQRSRSRSRRSYRSSRSPRSSSSRSSSPYSKSPVSKRRGSQEKQTKKAEGEPQEESPLKSKSQEEPKDTFEHDPSESIDEFNKSSATSGDIWPGLSAYDNSPRSPHSPSPIATPPSQSSSCSDAPMLSTVHSAKNTPSQHSHSIQHSPERSGSGSVGNGSSRYSPSQNSPIHHIPSRRSPAKTIAPQNAPRDESRGRSSFYPDGGDQETAKTGKFLKRFTDEESRVFLLDRGNTRDKEASKEKGSEKGRAEGEWEDQEALDYFSDKESGKQKFNDSEGDDTEETEDYRQFRKSVLADQGKSFATASHRNTEEEGLKYKSKVSLKGNRESDGFREEKNYKLKETGYVVERPSTTKDKHKEEDKNSERITVKKETQSPEQVKSEKLKDLFDYSPPLHKNLDAREKSTFREESPLRIKMIASDSHRPEVKLKMAPVPLDDSNRPASLTKDRLLASTLVHSVKKEQEFRSIFDHIKLPQASKSTSESFIQHIVSLVHHVKEQYFKSAAMTLNERFTSYQKATEEHSTRQKSPEIHRIDISPSTLRKHTRLAGEERVFKEENQKGDKKLRCDSADLRHDIDRRRKERSKERGDSKGSRESSGSRKQEKT

SEQ ID NO: 18471 - protein, 430 aa, Homo sapiens
MAAMETETAPLTLESLPTDPLLLILSFLDYRDLINCCYVSRRLSQLSSHDPLWRRHCKKYWLISEEEKTQKNQCWKSLFIDTYSDVGRYIDHYAAIKKAWDDLKKYLEPRCPRMVLSLKEGAREEDLDAVEAQIGCKLPDDYRCSYRIHNGQKLVVPGLLGSMALSNHYRSEDLLDVDTAAGGFQQRQGLKYCLPLTFCIHTGLSQYIAVEAAEGRNKNEVFYQCPDQMARNPAAIDMFIIGATFTDWFTSYVKNVVSGGFPIIRDQIFRYVHDPECVATTGDITVSVSTSFLPELSSVHPPHYFFTYRIRIEMSKDALPEKACQLDSRYWRITNAKGDVEEVQGPGVVGEFPIISPGRVYEYTSCTTFSTTSGYMEGYYTFHFLYFKDKIFNVAIPRFHMACPTFRVSIARLGYLMTSVTVTPTLETIT

SEQ ID NO: 18472 - protein, 420 aa, Homo sapiens
MTVVGNPRSWSCQWLPILILLLGTGHGPGVEGVTHYKAGDPVILYVNKVGPYHNPQETYHYYQLPVCCPEKIRHKSLSLGEVLDGDRMAESLYEIRFRENVEKRILCHMQLSSAQVEQLRQAIEELYYFEFVVDDLPIRGFVGYMEESGFLPHSHKIGLWTHLDFHLEFHGDRIIFANVSVRDVKPHSLDGLRPDEFLGLTHTYSVRWSETSVERRSDRRRGDDGGFFPRTLEIHWLSIINSMVLVFLLVGFVAVILMRVLRNDLARYNLDEETTSAGSGDDFDQGDNGWKIIHTDVFRFPPYRGLLCAVLGVGAQFLALGTGIIVMALLGMFNVHRHGAINSAAILLYALTCCISGYVSSHFYRQIGGERWVWNIILTTSLFSGSASHNHPAASDGLAAGGLSPHCHWRHLWEEQRQPL

SEQ ID NO: 18473 - protein, 948 aa, Homo sapiens
MASSIRRGRGAWTRLLSLLLLAAWEVGSGQLRYSVPEEAKHGTFVGRIAQDLGLELEELVPRLFRVASKRHGDLLEVNLQNGILFVNSRIDREELCGRSAECSIHVEVIVDRPLQVFHVEVEVKDINDNPPIFPMTVKTIRFPESRLLDSRFPLEGASDADIGVNALLSYKLSSSEFFFLDIQANDELSESLSLVLGKSLDREETAEVNLLLVATDGGKPELTGTVQILIKVLDVNDNEPTFAQSVYKVKLLENTANGTLVVKLNASDADEGPNSEIVYSLGSDVSSTIQTKFTIDPISGEIRTKGKLDYEEAKSYEIQVTATDKGTPSMSGHCKISLKLVDINDNTPEVSITSLSLPISENASLGTVIALITVSDRDSGTNGHVTCSLTPHVPFKLVSTFKNYYSLVLDSALDRESVSAYELVVTARDGGSPSLWATTSVSIEVADVNDNAPAFAQPEYTVFVKENNPPGCHIFTVSAWDADAQENALVSYSLVERRVGERALSSYVSVHAESGKVYALQPLDHEEVELLQFQVSARDAGVPPLGSNVTLQVFVLDENDNAPALLAPRAGTAAGAVSELVPWSVGAGHVVAKVRAVDADSGYNAWLSYELQLGTGSARIPFRVGLYTGEISTTRALDEADSPRHRLLVLVKDHGEPALTATATVLVSLVESGQAPKASSRAWVGAAGSEATLVDVNVYLIIAICAVSSLLVLTVLLYTALRCSVPPTEGARAPGKPTLVCSSAVGSWSYSQQRRQRVCSGEDPPKTDLMAFSPSLSQGPDSAEEKQLSESEYVGKPRQPNPDWRYSASLRAGMHSSVHLEEAGILRAGPGGPDQQWPTVSSATPEPEAGEVSPPVGAGVNSNSWTFKYGPGNPKQSGPGELPDKFIIPGSPAIISIRQEPTNSQIDKSDFITFGKKEETKKKKKKKKGNKTQEKKEKGNSTTDNSDQ

SEQ ID NO: 18474 - protein, 172 aa, Homo sapiens
MKYSCCALVLAVLGTELLGSLCSTVRSPRFRGRIQQERKNIRPNIILVLTDDQDVELGSLQVMNKTRKIMEHGGATFINAFVTTPMCCPSRSSMLTGKYVHNHNVYTNNENCSSPSWQAMHEPRTFAVYLNNTGYRTAFFGKYLNEYNGSYIPPGWREWLGLIKNSRFYNYT

SEQ ID NO: 18475 - protein, 230 aa, Homo sapiens
MHDKGITTAAVCVYPARVCDAVKALKAAGCNIPVASVAAGFPAGQTHLKTRLEEIRLAVEDGATEIDVVINRSLVLTGQWEALYDEIRQFRKACGEAHLKTILATGELGTLTNVYKASMIAMMAGSDFIKTSTGKETVNATFPVAIVMLRAIRDFFWKTGNKIGFKPAGGIRSAKDSLAWLSLVKEELGDEWLKPELFRIGASTLLSDIERQIYHHVTGRYAAYHDLPMS

SEQ ID NO: 18476 - protein, 3096 aa, Homo sapiens
MAAQGSPSSSPSDDSTTSGSLPELPPTSTATSRSPPESKGSSRSSLLQWTCPEDSLPLAVFYGPLDAKNPLLASCEKEIQELLGFMRKKKALATTEEEKHEFRRRCATSLFNIWTKYAPRLPADYYNEKLLKVGDSLCQMKEYKLALLQCYGRYLQQFNTNFDENKVDVTQFKATFFPKGFKDKTAGLTFHALSGKNMCNYQLVCDSDENLKNKESVVQCLHILSSLRLIMQVALPQEHLCWIIFNGTIYIYTICRKLMVIGQSSKALEYLLWASMCMESLVPLLSLRYLTWRATLYTAVCQCCYDCHAGIHGEAFARRALAKIDELRQLELMSSSKSQEESRRYFREATMKMAVMIFKRGVFESRRKNKAVFRPKIRINLREVQTLSWPRTVTERLLDEMFDSTASQFLAVLEALSDSNRRILQTGPIVTDEVEIHDVVSELFMAGKELLIMSNIGADGMLDFPKTSLLELMIGRKDVISVDAAVKFIKLAFTYEEWSLFESSAVHLIYFLQRQDDPESKKAEKDLTLLIAMEPLINVKRNKGLIFPLENYKEGQSTQIYLKKIAVHDTCLKTCGYSEDIFHLAATLYVCVCTAPQDVQPDKEIVVDTIMFLWQKCKLGIQRLNISRNDYAKFTQKISTNKWIYLLWQINEVIHCYKMEDIDIVVVAEVTLRLSEILESLGSPGRKFKQSLDVPLREGTNKFPGAPKGITEILPILQKNPVEQLLFAYKLLDRAIGGINLNCMLTSLPNGSSVIDHCYAKRTHHIDGDTYKPLASNSFMMDLHLELIQAQHRIAVVLLDKLQVLQTPTVSKDISTKGPEKLKQSGSTDCFTELNIMNKIKKNTLSKAIYLMQKALLIFEKDATSTSSWELLMEAYSLIQRIEAEQNALYSYQKYLESSKRKKSRVPPPPILLSRTHCSVTLKPAPFTSEVKVSWYCILGCKAEGSYGKVRLNNNHLPNSGEAIPADGKSVFEVKGLETNEKYVFAVAAYSNNGKLVGGAIGETTKPILVYPPLSTITARMFLTQVAYQVGNYELAKKVFSPVWDYFVASPLQDEQSVICLSNIITITQRRLHSDILAETSSILLYLFLRNIFVTSDIKIKEENLFCDNIKGNEIFPSQQIARLIECERVLVALELSNFLNDSSYALQAVTQCYGLLAPIIYHNIVLVPVVQILIKCIVVLQGLPSIVCSKKHTASFESIQHMIACCIFYITKILRSWREYDLAVMIINYGKKMLDITPGCKSLFDGSNEQEEMPEEDSSKKSLKTKKPQQILLPEKINEQLALLETHLLKLTKQYVTSELSGGEDPIFLYPVVLNWSVKGAVKEVMKFKQKPRFLEFFTQVMLKCMNEEKFHLMVEVTTPVHDFLKRRNESLLGLIKVKYKDSALNKKANKSLKFKAAVMEIGRSAEMQQRIRSKKKETLRDFIFKNPAISEMVAHERNRRTSVRKAAQRYLMDYLNPLILSYVKRKRFHRLSLEEMPWRAQMNLYLAGAHFNLVLQKLWECTKMKFGTSHMMVSFRSCDPNMFSLYNSGTVLPTRKLTVENYKAMLDFLLTAKKRKANLPSDAEEFSTFINSIMSDENMSKTQTVYDSDSQSGSSAKEKDRGANLCVMDHFMKIFLYCRRAMVLAHRGGYWTLLQNCCRALWNFTQELQILLKQAVDLDKTFPISQDGFLCTSVLPFYLGAELLIDMLIQLQNTSSIKPIEDKGEFSVPSCYGNIKNDNGGSSLTFEHPLDDVNVVDLKWIHDFVLKSLEVLYQVEKWETLVSLAIQFNTVSHERYTEQVTPLLVYAQRQLLLRIQKFKGPDITQQPCARYEAEYGEKITCRNFIGKQLKINSSTIEATSNCTDLLKMLISSEYSRAKALVCVPVDVTDTLRCFRETLEKSKYHNRSIRHSRKLLSLFLAQTQDVLQASNQRSLKVQALHSLGSLLIFAEKKRAAFKCWCQALDDIFRKPDVLHTWKEFGPSLTNVTNSHSPPGFKDYSEEFLSRVGIWGCLQGAVISAKIAQFIKSLNVEKKTDCCILSALLFQGLLRTTLPHPKAERCYAQYEITQLLPGIELFSDRYRADICSVIASLYYIIRELHFVRQNLIVLPLLALYQYFVSGICQDITRNLEARILKIEVLIDLRFFSEAFYEISQIFYGKNMPCPIPAGYKATGKMKIFQSFDSGKLLTSKENIQAIDELRNKGLPAVLVTIGQPHLLNKFNFVKAYFFLSVAATINCVPENKFKTVITNKSKPNLPNLEEIYSKDDGSSFYNLTKLKDEITLSMLKSMLLMEAEDRLNFLLSEVEQKTLSQCSAGELEIVVEARLQLAAVALQRHRAAYSAAIVFSTLTLLQDSKLFEKKVVQDDTENPVSPGTSVTENKDDSEFLDPISLNAREYFNIHLWLRCRLALVTAFVAQIHGIGIVKEDDMTDCLSLINEVCMEAKSAGDTELQAEFLTQAVILGLQEKHLKADIMTNLQDIIHLLEGNEFISPQSRLTLARSLVLLDDLTKAEKFKESPSSKTGKLNLLTRAHSILTEQMLAFGETIEFRSSNTKYANPLQPLKNIYLPHVMLLAKIKMRIGHTVAKQVYYKNKRKDPSKWLPALHLFDVALKLCRTTAVEEHEVEAEILFQKGKIERQILMEEKSPSFQLESLYEAIQLSLKNDQNSGLIRDSYLEMALLYFHLKKPKIKISGSPLTLKPPLRRSSSVKETSANKFEMYSSLAWIAIRAAAQVSEAVLAINLLIGKKNTRMHKVNQVALPNIPEFAALDLLSSYTDYLLDNYQVLFQTSCTFLYQNDDVCDSADGRKKTQTKVDITWILLLRYYIHLQRINNLSKLLASATPVSGISLPDDTLLTSLYNSELILRQKEVHFFLKKFLQLYSSSCIDEFPKELLCQLENPPLSEKDLRESSAKLYRDSSVQSILSFKPVSGSSCVDITPIEMVTQASNKELCFQWYIPPLDRPPKETEPMVLLLYAYNLKPLKISDVRHSTYNSTCVGSLWIPLNRVIAIHEKLSNLAQIAELSLPAAPEITSNENIYEVEVEEESVDNEMEDMIIQCCSEIASLFLNDKEPTPLSEVPFDISLPSIFNLERLFDLANGCILSGGSLFNWIVSIIP

SEQ ID NO: 18477 - protein, 264 aa, Homo sapiens
MPVEEFVAGWISGALGLVLGHPFDTVKLLGFFKGMSFPIASIAVVNSVLFGVYSNTLLVLTATSHQERRAQPPSYMHIFLAGCTGGFLQAYCLAPFDLIKVRLQNQTEPRAQPGSPPPRYQGPVHCAASIFREEGPRGLFRGAWALTLRDTPTVGIYFITYEGLCRQYTPEGQNPSSATVLVAGGFAGIASWVAATPLDMIKSRMQMDGLRRRVYQGMLDCMVSSIRQEGLGVFFRGVTINSARAFPVNAVTFLSYEYLLRWWG

SEQ ID NO: 18478 - protein, 838 aa, Homo sapiens
MERMNWLSRLASRGPGHRIPQGANLQTPVMADPETCLMVFKNHWSQVVRILERQGPRAAPGGADDLSAVRNHTYQMLTLLAEDRAVPSAPTGPGPLLEFALHEDLLTRVLTWQLQWDELGDGVEERRAEQLKLFEMLVSEARQPLLRHGPVREALLTLLDACGRPVPSSPALDEGLVLLLSQLCVCVAQEPSLLEFFLQPPPEPGAAPRLLLFSRLVPFVHREGTLGQQARDALLLLMALSAGSPTVGRYIADHSYFCPVLATGLSALYSSLPRKIEVPGDDWHCLRREDWLGVPALALFMSSLEFCNAVIQVAHPLVQKQLVDYIHNGFLVPVMGPALHKTSVEEMIASTAYLELFLRSISEPALLRTFLRFLLLHRHDTHTILDTLVARIGSNSRLCMVSLSLFRTLLNLSCEDVLLQLVLRYLVPCNHVMLSQKPAVRDVDLYGRAADKFLSLIPRCCRHHAPSPPRPEHASWARGPGSPSVDSSSVTTVPRPSTPSRLALFLRQQSLGGSESPGPAPCSPGLSASPASSPGRRPTPAEEPGELEDNYLEYLREARRGVDRCVRACRTWSAPYDGERPSPEPSPFGSRTKKRSLLPEEDRNNVGEGEEEELGRRGRAGGAGEGPGHLPPPQLNGVPGSWPEGAKKVRLVPKEGAGELLEGISEGMAGLEGFGQELRELEVALSNGGTGSESPLEPPLPLEEEEAYESFTCPPEPPGPFLSSPLRTLNQLPSQPFTGKLLSLGLPFCVLFACSRHVCAGFLDLLAMSFLCTCLAPHPSCLHHFQIRVMSYLCPCVCLYVFHACAGLSIDLHLSLVCMSYVHVPPLSLVWPFPAICN

SEQ ID NO: 18479 - protein, 840 aa, Homo sapiens
MGLPTLEFSDSYLDSPDFRERLQCHEIELERTNKFIKELIKDGSLLIGALRNLSMAVQKFSQSLQDFQFECIGDAETDDEISIAQSLKEFARLLIAVEEERRRLIQNANDVLIAPLEKFRKEQIGAAKADTQIDREHQNFYEASLEYVFKIQEVQEKKKFEFVEPLLSFLQGLFTFYHEGYELAQEFAPYKQQLQFNLQNTRNNFESTRQEVERLMQRMKSANQDYRPPSQWTMEGYLYVQEKRPLGFTWIKHYCTYDKGSKTFTMSVSEMKSSGKMNGLVTSSPEMFKLKSCIRRKTDSIDKRFCFDIEVVERHGIITLQAFSEANRKLWLEAMDGKEPIYTLPAIISKKEEMYLNEAGFNFVRKCIQAVETRGITILGLYRIGGVNSKVQKLMNTTFSPKSPPDIDIDIELWDNKTITSGLKNYLRCLAEPLMTYKLHKDFIIAVKSDDQNYRVEAVHALVHKLPEKNREMLDILIKHLVKVSLHSQQNLMTVSNLGVIFGPTLMRAQEETVAAMMNIKFQNIVVEILIEHYEKIFHTAPDPSIPLPQPQSRSGSRRTRAICLSTGSRKPRGRYTPCLAEPDSDSYSSSPDSTPMGSIESLSSHSSEQNSTTKSASCQPREKSGGIPWIATPSSSNGQKSLGLWTTSPESSSREDATKTDAESDCQSVASVTSPGDVSPPIDLVKKEPYGLSGLKRASASSLRSISAAEGNKSYSGSIQSLTSVGSKETPKASPNPDLPPKMCRRLRLDTASSNGYQRPGSVVAAKAQLFENVGSPKPVSSGRQAKAMYSCKAEHSHELSFPQGAIFSNVYPSVEPGWLKATYEGKTGLVPENYVVFL

SEQ ID NO: 18480 - protein, 1200 aa, Homo sapiens
MNPRQGYSLSGYYTHPFQGYEHRQLRYQQPGPGSSPSSFLLKQIEFLKGQLPEAPVIGKQTPSLPPSLPGLRPRFPVLLASSTRGRQVDIRGVPRGVHLRSQGLQRGFQHPSPRGRSLPQRGVDCLSSHFQELSIYQDQEQRILKFLEELGEGKATTAHDLSGKLGTPKKEINRVLYSLAKKGKLQKEAGTPPLWKIAVSTQAWNQHSGVVRPDGHSQGAPNSDPSLEPEDRNSTSVSEDLLEPFIAVSAQAWNQHSGVVRPDSHSQGSPNSDPGLEPEDSNSTSALEDPLEFLDMAEIKEKICDYLFNVSDSSALNLAKNIGLTKARDINAVLIDMERQGDVYRQGTTPPIWHLTDKKRERMQIKRNTNSVPETAPAAIPETKRNAEFLTCNIPTSNASNNMVTTEKVENGQEPVIKLENRQEARPEPARLKPPVHYNGPSKAGYVDFENGQWATDDIPDDLNSIRAAPGEFRAIMEMPSFYSHGLPRCSPYKKLTECQLKNPISGLLEYAQFASQTCEFNMIEQSGPPHEPRFKFQVVINGREFPPAEAGSKKVAKQDAAMKAMTILLEEAKAKDSGKSEESSHYSTEKESEKTAESQTPTPSATSFFSGKSPVTTLLECMHKLGNSCEFRLLSKEGPAHEPKFQYCVAVGAQTFPSVSAPSKKVAKQMAAEEAMKALHGEATNSMASDNQPEGMISESLDNLESMMPNKVRKIGELVRYLNTNPVGGLLEYARSHGFAAEFKLVDQSGPPHEPKFVYQAKVGGRWFPAVCAHSKKQGKQEAADAALRVLIGENEKAERMGFTELPLTGSTFHDQIAMLSHRCFNTLTNSFQPSLLGRKILAAIIMKKDSEDMGVVVSLGTGNRCVKGDSLSLKGETVNDCHAEIISRRGFIRFLYSELMKYNSQTAKDSIFEPAKGGEKLQIKKTVSFHLYISTAPCGDGALFDKSCSDRAMESTESRHYPVFENPKQGKLRTKVENGEGTIPVESSDIVPTWDGIRLGERLRTMSCSDKILRWNVLGLQGALLTHFLQPIYLKSVTLGYLFSQGHLTRAICCRVTRDGSAFEDGLRHPFIVNHPKVGRVSIYDSKRQSGKTKETSVNWCLADGYDLEILDGTRGTVDGPRNELSRVSKKNIFLLFKKLCSFRYRRDLLRLSYGEAKKAARDYETAKNYFKKGLKDMGYGNWISKPQEEKNFYLCPV

SEQ ID NO: 18481 - protein, 409 aa, Homo sapiens
MVELFIFLFLLGETPFKVVVKSLSPKELVRIHVPKPLDRNDGTFLMRYRMYETVDEGLKIEVLYGDEHVAQSPYILKGPVYHEYCECPEDPQAWQKTLSCPTKEPQIAKDFASFPSINLQQMLKEVPKRFGDERGAIVHYTILNNHVYRRSLGKYTDFKMFSDEILLSLTRKVLLPDLEFYVNLGDWPLEHRKVNGTPSPIPIISWCGSLDSRDVVLPTYDITHSMLEAMRGVTNDLLSIQGNTGPSWINKTERAFFRGRDSREERLQLVQLSKENPQLLDAGITGYFFFQEKEKELGKAKLMGFFDFFKYKYQVNVDGTVAAYRYPYLMLGDSLVLKQDSPYYEHFYMALEPWKHYVPIKRNLSDLLEKVKWAKSFTLSPRLECSGTISTHCNLCLPGSRNFVPQPPE

SEQ ID NO: 18482 - protein, 455 aa, Homo sapiens
MVRELLREPAGLSLVLKKIPIPETPPQTPPQVLDSPHQRSPSLSLAPLSPRAPSEDVFAFDLSSNPSPGPSPAWTDSASLGPEPLPIPPEPPAILPAGVAGTPGLPESPDKSPVGRKKSKGLATRLSRRRVSCRELGRPDCDGWLLLRKAPGGFMGPRWRRRWFVLKGHTLYWYRQPQDEKAEGLINVSNYSLESGHDQKKKYVFQLTHDVYKPFIFAADTLTDLSMWVRHLITCISKYQSPGRAPPPREEDCYSETEAEDPDDEAGSHSASPSPAQAGSPLHGDTSPAATPTQRSPRTSFGSLTDSSEEALEGMVRGLRQGGVSLLGQPQPLTQEQWRSSFMRRNRDPQLNERVHRVRALQSTLKAKLQELQVLEEVLGDPELTGEKFRQWKEQNRELYSEGLGAWGVAQAEGSSHILTSDSTEQSPHSLPSDPEEHSHLCPLTSESSLRPPDL

SEQ ID NO: 18483 - protein, 335 aa, Homo sapiens
MCCQVCEAVRSGNEEVLADVRTIVNQISYTPQDPRDLCGRILTTCYMASKNSSQETCTRARELAQQIGSHHISLNIDPAVKAVMGIFSLVTGKSPLFAAHGGSSRENLALQNVQARIRMVLAYLFAQLSLWSRGVHGGLLVLGSANVDESLLGYLTKYDCSSADINPIGGISKTDLRAFVQFCIQRFQLPALQSILLAPATAELEPLADGQVSQTDEEDMGMTYAELSVYGKLRKVAKMGPYSMFCKLLGMWRHICTPRQVADKVKRFFSKYSMNRHKMTTLTPAYHAENYSPEDNRFDLRPFLYNTSWPWQFRCIENQVLQLERAEPQSLDGVD

SEQ ID NO: 18484 - protein, 884 aa, Homo sapiens
MSLYFPANEYGVLCIQEYRKNSKVESSTRNNFMGLKDHLGHDLGHLYVESTDPQLSPAVPWSTVENPSMDTVNVGKDEKEASEENASSGDSEENTNSDHESEQLGSISVEPGLITKTHRQLCRSPCLEPHILKRNEILQDFKPEESQTTSKEAKKPPDVVREYQTKLEFALKLGYSEEQVQLVLNKLGTDALINDILGELVKLGNKSEADQTVSTINTITRETSSLESQRSESPMQEIVTDDGENLRPIVIDGSNVAMSHGNKEVFSCRGIKLAVDWFLERGHKDITVFVPAWRKEQSRPDALITDQEILRKLEKEKILVFTPSRRVQGRRVVCYDDRFIVKLAFESDGIIVSNDNYRDLANEKPEWKKFIDERLLMYSFVNDKFMPPDDPLGRHGPSLDNFLRKKPIVPEHKKQPCPYGKKCTYGHKCKYYHPERGSQPQRSVADELRAMSRNTAAKTANEGGLVKSNSVPCSTKADSTSDVKRGAPKRQSDPSIRTQVYQDLEEKLPTKNKLETRSVPSLVSIPATSTAKPQSTTSLSNGLPSGVHFPPQDQRPQGQYPSMMMATKNHGTPMPYEQYPKCDSPVDIGYYSMLNAYSNLSLSGPRSPERRFSLDTDYRISSVASDCSSEGSMSCGSSDSYVGYNDRSYVSSPDPQLEENLKCQHMHPHSRLNPQPFLQNFHDPLTRGQSYSHEEPKFHHKPPLPHLALHLPHSAVGARSSCPGDYPSPPSSAHSKAPHLGRSLVATRIDSISDSRLYDSSPSRQRKPYSRQEGLGSWERPGYGIDAYGYRQTYSLPDNSTQPCYEQFTFQSLPEQQEPAWRIPYCGMPQDPPRYQDNREKIYINLCNIFPPDLVRIVMKRNPHMTDAQQLAAAILVEKSQLGY

SEQ ID NO: 18485 - protein, 622 aa, Homo sapiens
MALRGTLRPLKVRRRREMLPQQVGFVCAVLALVCCASGLFGSLGHKTASASKRVLPDTWRNRKLMAPVNGTQTAKNCTDPAIHEFPTDLFSNKERQHGAVLLHILGALYMFYALAIVCDDFFVPSLEKICERLHLSEDVAGATFMAAGSSTPELFASVIGVFITHGDVGVGTIVGSAVFNILCIIGVCGLFAGQVVRLTWWAVCRDSVYYTISVIVLIVFIYDEQIVWWEGLVLIILYVFYILIMKYNVKMQAFFTVKQKSIANGNPVNSELEAGNDFYDGSYDDPSVPLLGQVKEKPQYGKNPVVMVDEIMSSSPPKFTFPEAGLRIMITNKFGPRTRLRMASRIIINERQRLINSANGVSSKPLQNGRHENIENGNVPVENPEDPQQNQEQQPPPQPPPPEPEPVEADFLSPFSVPEARGDKVKWVFTWPLIFLLCVTIPNCSKPRWEKFFMVTFITATLWIAVFSYIMVWLVTIIGYTLGIPDVIMGITFLAAGTSVPDCMASLIVARQGLGDMAVSNTIGSNVFDILVGLGVPWGLQTMVVNYGSTVKINSRGLVYSVVLLLGSVALTVLGIHLNKWRLDRKLGVYVLVLYAIFLCFSIMIEFNVFTFVNLPMCREDD

SEQ ID NO: 18486 - protein, 764 aa, Homo sapiens
MKHVKDSKTGSEGTVVQLLANHFRVISRPQWVAYKYNVDYKPDIEDGNLRTILLDQHRRKFGERHIFDGNSLLLSRPLKERRVEWLSTTKDKNIVKITVEFSKELTPTSPDCLRYYNILFRRTFKLLDFEQVGRNYYTKKKAIQLYRHGTSLEIWLGYVTSVLQYENSITLCADVSHKLLRIETAYDFIKRTSAQAQTGNIREEVTNKLIGSIVLTKYNNKTYRVDDIDWKQNPEDTFNKSDGSKITYIDYYRQQHKEIVTVKKQPLLVSQGRWKKGLTGTQREPILLIPQLCHMTGLTDEICKDYSIVKELAKHTRLSPRRRHHTLKEFINTLQDNKKVRELLQLWDLKFDTNFLSVPGRVLKNANIVQGRRMVKANSQGDWSREIRELPLLNAMPLHSWLILYSRSSHREAMSLKGHLQSVTAPMGITMKPAEMIEVDGDANSYIDTLRKYTRPTLQMVICILPNDDKRRYDSIKRYLCTKCPIPSQCVVKKTLEKVQARTIVTKIAQQMNCKMGGALWKVETDVQRTMFVGIDCFHDIVNRQKSIAGFVASTNAELTKWYSQCVIQKTGEELVKELEICLKAALDVWCKNESSMPHSVIVYRDGVGDGQLQALLDHEAKKMSTYLKTISPNNFTLAFIVVKKRINTRFFLKHGSNFQNPPPGTVIDVELTRNEWYDFFIVSQSVQDGTVTPTHYNVIYDTIGLSPDTVQRLTYCLCHMYYNLPGIIRVPAPCHYAHKLAYLVGQSIHQEPNRSLSTRLFYL

SEQ ID NO: 18487 - protein, 467 aa, Homo sapiens
MAQALPWLLLWMGAGVLPAHGTQHGIRLPLRSGLGGAPLGLRLPRETDEEPEEPGRRGSFVEMVDNLRGKSGQGYYVEMTVGSPPQTLNILVDTGSSNFAVGAAPHPFLHRYYQRQLSSTYRDLRKGVYVPYTQGKWEGELGTDLVSIPHGPNVTVRANIAAITESDKFFINGSNWEGILGLAYAEIARPDDSLEPFFDSLVKQTHVPNLFSLQLCGAGFPLNQSEVLASVGGSMIIGGIDHSLYTGSLWYTPIRREWYYEVIIVRVEINGQDLKMDCKETEKFPDGFWLGEQLVCWQAGTTPWNIFPVISLYLMGEVTNQSFRITILPQQYLRPVEDVATSQDDCYKFAISQSSTGTVMGAVIMEGFYVVFDRARKRIGFAVSACHVHDEFRTAAVEGPFVTLDMEDCGYNIPQTDESTLMTIAYVMAAICALFMLPLCLMVCQWRCLRCLRQQHDDFADDISLLK

SEQ ID NO: 18488 - protein, 120 aa, Homo sapiens
MSAGSERGAAATPGGLPAPCASKVELRLSCRHLLDRDPLTKSDPSVALLQQAQGQWVQVGRTEVVRSSLHPVFSKVFTVDYYFEEVQRLRFEVYDTHGPSGFSCQEDDFLGGMECTLGQV

SEQ ID NO: 18489 - protein, 1645 aa, Homo sapiens
MDDDSLDELVARSPGPDGHPQVGPADPAESSVGSSGDSGDDSDSEHGDGTDGEDEGASEEEDLEDRSGSEDSEDDGETLLEVAGTQGKLEAAGSFNSDDDAESCPICLNAFRDQAVGTPENCAHYFCLDCIVEWSKNANSCPVDRTLFKCICIRAQFGGKILRKIPVENTKASEEEEDPTFCEVCGRSDREDRLLLCDGCDAGYHMECLDPPLQEVPVDEWFCPECAAPGVVLAADAGPVSEEEVSLLLADVVPTTSRLRPRAGRTRAIARTRQSERVRATVNRNRISTARRVQHTPGRLGSSLLDEAIEAVATGLSTAVYQRPLTPRTPARRKRKTRRRKKVPGRKKTPSGPSAKSKSSATRSKKRQHRVKKRRGKKVKSEATTRSRIARTLGLRRPVHSSCIPSVLKPVEPSLGLLRADIGAASLSLFGDPYELDPFDSSEELSANPLSPLSAKRRALSRSALQSHQPVARPVSVGLSRRRLPAAVPEPDLEEEPVPDLLGSILSGQSLLMLGSSDVIIHRDGSLSAKRAAPVSFQRNSGSLSRGEEGFKGCLQPRALPSGSPAQGPSGNRPQSTGLSCQGRSRTPARTAGAPVRLDLPAAPGAVQARNLSNGSVPGFRQSHSPWFNGTNKHTLPLASAASKISSRDSKPPCRSVVPGPPLKPAPRRTDISELPRIPKIRRDDGGGRRDAAPAHGQSIEIPSACISRLTGREGTGQPGRGTRAESEASSRVPREPGVHTGSSRPPAPSSHGSLAPLGPSRGKGVGSTFESFRINIPGNMAHSSQLSSPGFCNTFRPVDDKEQRKENPSPLFSIKKTKQLRSEVYDPSDPTGSDSSAPGSSPERSGPGLLPSEITRTISINSPKAQTVQAVRCVTSYTVESIFGTEPEPPLGPSSAMSKLRGAVAAEGASDTEREEPTESQGLAARLRRPSPPEPWDEEDGASCSTFFGSEERTVTCVTVVEPEAPPSPDVLQAATHRVVELRPPSRSRSTSSSRSRKKAKRKRVSREHGRTRSGTRSESRDRSSRSASPSVGEERPRRQRSKAKSRRSSSDRSSSRERAKRKKAKDKSREHRRGPWGHSRRTSRSRSGSPGSSSYEHYESRKKKKRRSASRPRGRECSPTSSLERLCRHKHQRERSHERPDRKESVAWPRDRRKRRSRSPSSEHRAREHRRPRSREKWPQTRSHSPERKGAVREASPAPLAQGEPGREDLPTRLPALGEAHVSPEVATADKAPLQAPPVLEVAAECEPDDLDLDYGDSVEAGHVFDDFSSDAVFIQLDDMSSPPSPESTDSSPERDFPLKPALPPASLAVAAIQREVSLMHDEDPSQPPPLPEGTQEPHLLRPDAAEKAEAPSSPDVAPAGKEDSPSASGRVQEAARPEEVVSQTPLLRSRALVKRVTWNLQESESSAPAEDRAPRAPLHRPQKPREGAWDMEDVAPTGVRQVFSELPFPSHVLPEPGFPDTDPSQVYSPGLPPAPAQPSSIPPCALVSQPTVQFILQGSLPLVGCGAAQTLAPVPAALTPASEPASQATAASNSEEKTPAPRLAAEKTKKEEYMKKLHMQERAVEEVKLAIKPFYQKREVTKEEYKDILRKAVQKICHSKSGEINPVKVANLVKAYVDKYRHMRRHKKPEAGEEPPTQGAEG

SEQ ID NO: 18490 - protein, 129 aa, Homo sapiens
MWRPVQLCHFHSALLHSRQKPWPSPAVFFRRNVRGLPPRFSSPTPLWRKVLSTAVVGAPLLLGARYVMAEAREKRRMRLVVDGMGRFGRSLKVGLQISLDYWWCTNVVLRGVEEPRLLGGDVCVSPAGG

SEQ ID NO: 18491 - protein, 1018 aa, Homo sapiens
MDKILEAVVTSSYPVSVKQGLVRRVLEAARQPLEREQCLALLALGARLYVGGAEELPRRVGCQLLHVAGRHHPDVFAEFFSARRVLRLLQGGAGPPGPRALACVQLGLQLLPEGPAADEVFALLRREVLRTVCERPGPAACAQVARLLARHPRCVPDGPHRLLFCQQLVRCLGRFRCPAEGEEGAVEFLEQAQQVSGLLAQLWRAQPAAILPCLKELFAVISCAEEEPPSSALASVVQHLPLELMDGVVRNLSNDDSVTDSQMLTAISRMIDWVSWPLGKNIDKWIIALLKGLAAVKKFSILIEVSLTKIEKVFSKLLYPIVRGAALSVLKYMLLTFQHSHEAFHLLLPHIPPMVASLVKEDSNSGTSCLEQLAELVHCMVFRFPGFPDLYEPVMEAIKDLHVPNEDRIKQLLGQDAWTSQKSELAGFYPRLMAKSDTGKIGLINLGNTCYVNSILQALFMASDFRHCVLRLTENNSQPLMTKLQWLFGFLEHSQRPAISPENFLSASWTPWFSPGTQQDCSEYLKYLLDRLHEEEKTGTRICQKLKQSSSPSPPEEPPAPSSTSVEKMFGGKIVTRICCLCCLNVSSREEAFTDLSLAFPPPERCRRRRLGSVMRPTEDITARELPPPTSAQGPGRVGPRRQRKHCITEDTPPTSLYIEGLDSKEAGGQSSQEERIEREEEGKEERTEKEEVGEEEESTRGEGEREKEEEVEEEEEKVEKETEKEAEQEKEEDSLGAGTHPDAAIPSGERTCGSEGSRSVLDLVNYFLSPEKLTAENRYYCESCASLQDAEKVVELSQGPCYLILTLLRFSFDLRTMRRRKILDDVSIPLLLRLPLAGGRGQAYDLCSVVVHSGVSSESGHYYCYAREGAARPAASLGTADRPEPENQWYLFNDTRVSFSSFESVSNVTSFFPKDTAYVLFYRQRPREGPEAELGSSRVRTEPTLHKDLMEAISKDNILYLQEQEKEARSRAAYISALPTSPHWGRGFDEDKDEDEGSPGGCNPAGGNGGDFHRLVF

SEQ ID NO: 18492 - protein, 62 aa, Homo sapiens
MWATLPLLCAGAWLLGVPVCGAAELCVNSLEKFHFKSWMSKKTKAHCVLVAESVGEHQCMCF

SEQ ID NO: 18493 - protein, 702 aa, Homo sapiens
MSKELAAMGPGASGDGVRTETAPHIALDSRVGLHAYDISVVVIYFVFVIAVGIWSSIRASRGTIGGYFLAGRSMSWWPIGASLMSSNVGSGLFIGLAGTGAAGGLAVGGFEWNMRKSRSGGDRGIHPRSHGRTGATWLLLALGWVFVPVYIAAGVVTMPQYLKKRFGGQRIQVYMSVLSLILYIFTKISTDIFSGALFIQMALGWNLYLSTGILLVVTAVYTIAGGLMAVIYTDALQTVIMVGGALVLMFLGFQDVGWYPGLEQRYRQAIPNVTVPNTTCHLPRPDAFHILRDPVSGDIPWPGLIFGLTVLATWCWCTDQVIVQRSLSAKSLSHAKGGSVLGGYLKILPMFFIVMPGMISRALFPDEVGCVDPDVCQRICGARVGCSNIAYPKLVMALMPVGLRGLMIAVIMAALMSSLTSIFNSSSTLFTIDVWQRFRRKSTEQELMVVGRVFVVFLVVISILWIPIIQSSNSGQLFDYIQAVTSYLAPPITALFLLAIFCKRVTEPGAFWGLVFGLGVGLLRMILEFSYPAPACGEVDRRPAVLKDFHYLYFAILLCGLTAIVIVIVSLCTTPIPEEQLTRLTWWTRNCPLSELEKEAHESTPEISERPAGECPAGGGAAENSSLGQEQPEAPSRSWGKLLWSWFCGLSGTPEQALSPAEKAALEQKLTSIEEEPLWRHVCNINAVLLLAINIFLWGYFA

SEQ ID NO: 18494 - protein, 225 aa, Homo sapiens
MTSQPVPNETIIVLPSNVINFSQAEKPEPTNQGQDSLKKHLHAEIKVIGTIQILCGMMVLSLGIILASASFSPNFTQVTSTLLNSAYPFIGPFFFIISGSLSIATEKRLTKLLVHSSLVGSILSALSALVGFIILSVKQATLNPASLQCELDKNNIPTRSYVSYFYHDSLYTTDCYTAKASLAGTLSLMLICTLLEFCLAVLTAVLRWKQAYSDFPGVSVLAGFT

SEQ ID NO: 18495 - protein, 533 aa, Homo sapiens
MFEVNMKERDDGSVTITNLSSKAVKAFLDYAYTGKTKITDDNVEMFFQLSSFLQVSFLSKACSDFLIKSINLVNCLQLLSISDSYGSTSLFDHALHFVQHHFSLLFKSSDFLEMNFGVLQKCLESDELNVPEEEMVLKVVLSWTKHNLESRQKYLPHLIEKVRLHQLSEETLQDCLFNEESLLKSTNCFDIIMDAIKCVQGSGGLFPDARPSTTEKYIFIHKTEENGENQYTFCYNIKSDSWKILPQSHLIDLPGSSLSSYGEKIFLTGGCKGKCCRTVRLHIAESYHDATDQTWCYCPVKNDFFLVSTMKTPRTMHTSVMALDRLFVIGGKTRGSRDIKSLLDVESYNPLSKEWISVSPLPRGIYYPEASTCQNVIYVLGSEVEITDAFNPSLDCFFKYNATTDQWSELVAEFGQFFHATLIKAVPVNCTLYICDLSTYKVYSFCPDTCVWKGEGSFECAGFNAGAIGIEDKIYILGGDYAPDEITDEVQVYHSNRSEWEEVSPMPRALTEFYCQVIQFNKYRDPWFSNLCA

SEQ ID NO: 18496 - protein, 1238 aa, Homo sapiens
MKVVPEKNAVRILWGRERGARAMGAQRLLQELVEDKTRWMKWEGKRVELPDSPRSTFLLAFSPDRTLLASTHVNHNIYITEVKTGKCVHSLIGHRRTPWCVTFHPTISGLIASGCLDGEVRIWDLHGGSESWFTDSNNAIASLAFHPTAQLLLIATANEIHFWDWSRREPFAVVKTASEMERVRLVRFDPLGHYLLTAIVNPSNQQGDDEPEIPIDGTELSHYRQRALLQSQPVRRTPLLHNFLHMLSSRSSGIQVGEQSTVQDSATPSPPPPPPQPSTERPRTSAYIRLRQRVSYPTAECCQHLGILCLCSRCSGTRVPSLLPHQDSVPPASARATTPSFSFVQTEPFHPPEQASSTQQDQGLLNRPSAFSTVQSSTAGNTLRNLSLGPTRRSLGGPLSSHPSRYHREIAPGLTGSEWTRTVLSLNSRSEAESMPPPRTSASSVSLLSVLRQQEGGSQASVYTSATEGRGFPASGLATESDGGNGSSQNNSGSIRHELQCDLRRFFLEYDRLQELDQSLSGEAPQTQQAQEMLNNNIESERPGPSHQPTPHSSENNSNLSRGHLNRCRACHNLLTFNNDTLRWERTTPNYSSGEASSSWQVPSSFESVPSSGSQLPPLERTEGQTPSSSRLELSSSASPQEERTVGVAFNQETGHWERIYTQSSRSGTVSQEALHQDMPEESSEEDSLRRRLLESSLISLSRYDGAGSREHPIYPDPARDNGDRSRHRAPRNARMSAPSLGRFVPRRFLLPEYLPYAGIFHERGQPGLATHSSVNRVLAGAVIGDGQSAVASNIANTTYRLQWWDFTKFDLPEISNASVNVLVQNCKIYNDASCDISADGQLLAAFIPSSQRGFPDEGILAVYSLAPHNLGEMLYTKRFGPNAISVSLSPMGRYVMVGLASRRILLHPSTEHMVAQVFRLQQAHGGETSMRRVFNVLYPMPADQRRHVSINSARWLPEPGLGLAYGTNKGDLVICRPEALNSGVEYYWDQLNETVFTVHSNSRSSERPGTSRATWRTDRDMGLMNAIGLQPRNPATSVTSQGTQTLALQLQNAETQTEREVPEPGTAASGPGEGEGSEYGASGEDALSRIQRLMAEGGMTAVVQREQSTTMASMGGFGNNIIVSHRIHRSSQTGTEPGAAHTSSPQPSTSRGLLPEAGQLAERGLSPRTASWDQPGTPGREPTQPTLPSSSPVPIPVSLPSAEGPTLHCELTNNNHLLDGGSSRGDAAGPRGEPRNR

SEQ ID NO: 18497 - protein, 553 aa, Homo sapiens
MEQIDIMVSNKKMDWERKMRALETRLDLRDQELANAQTCLDQKGQEVGLLRQKLDSLEKCNLAMTQNYEGQLQSLKAQFSKLTNNFEKLRLHQMKQNKVPRKELPHLKEEIPFELSNLNQKLEEFRAKSREWDKQEILYQTHLISLDAQQKLLSEKCNQFQKQAQSYQTQLNGKKQCLEDSSSEIPRLICDPDPNCEINERDEFIIEKLKSAVNEIALSRNKLQDENQKLLQELKMYQRQCQAMEAGLSEVKSELQSRDDLLRIIEMERLQLHRELLKIGECQNAQGNKTRLESSYLPSIKEPERKIKELFSVMQDQPNHEKELNKIRSQLQQVEEYHNSEQERMRNEISDLTEELHQKEITIATVTKKAALLEKQLKMELEIKEKMLAKQKVSDMKYKAVRTENTHLKGMMGDLDPGEYMSMDFTNREQSRHTSINKLQYENERLRNDLAKLHVNGKSTWTNQNTYEETGRYAYQSQIKVEQNEERLSHDCEPNRSTMPPLPPSTFQAKEMTSPLVSDDDVFPLVSCWLWAFFFFNGLLLYSYTDVNKLTYI

SEQ ID NO: 18498 - protein, 1047 aa, Homo sapiens
MAPRLQLEKAAWRWAETVRPEEVSQEHIETAYRIWLEPCIRGVCRRNCKGNPNCLVGIGEHIWLGEIDENSFHNIDDPNCERRKKNSFVGLTNLGATCYVNTFLQVWFLNLELRQALYLCPSTCSDYMLGDGIQEEKDYEPQTICEHLQYLFALLQNSNRRYIDPSGFVKALGLDTGQQQDAQEFSKLFMSLLEDTLSKQKNPDVRNIVQQQFCGEYAYVTVCNQCGRESKLLSKFYELELNIQGHKQLTDCISEFLKEEKLEGDNRYFCENCQSKQNATRKIRLLSLPCTLNLQLMRFVFDRQTGHKKKLNTYIGFSEILDMEPYVEHKGGSYVYELSAVLIHRGVSAYSGHYIAHVKDPQSGEWYKFNDEDIEKMEGKKLQLGIEEDLEPSKSQTRKPKCGKGTHCSRNAYMLVYRLQTQEKPNTTVQVPAFLQELVDRDNSKFEEWCIEMAEMRKQSVDKGKAKHEEVKELYQRLPAGAEPYEFVSLEWLQKWLDESTPTKPIDNHACLCSHDKLHPDKISIMKRISEYAADIFYSRYGGGPRLTVKALCKECVVERCRILRLKNQLNEDYKTVNNLLKAAVKGSDGFWVGKSSLRSWRQLALEQLDEQDGDAEQSNGKMNGSTLNKDESKEERKEEEELNFNEDILCPHAVFFFSKYIFLNSGELCISENERRLVSKEAWSKLQQYFPKAPEFPSYKECCSQCKILEREGEENEALHKMIANEQKTSLPNLFQDKNRPCLSNWPEDTDVLYIVSQFFVEEWRKFVRKPTRCSPVSSVGNSALLCPHGGLMFTFASMTKEDSKLIALIWPSEWQMIQKLFVVDHVIKITRIEVGDVNPSETQYISEPKLCPECREGLLCQQQRDLREYTQATIYVHKVVDNKKVMKDSAPELNVSSSETEEDKEEAKPDGEKDPDFNQSNGGTKRQKISHQNYIAYQKQVIRRSMRHRKVRGEKALLVSANQTLKELKIQIMHAFSVAPFDQNLSIDGKILSDDCATLGTLGVIPESVILLKADEPIADYAAMDDVMQVCMPEEGFKGTGLLGH

SEQ ID NO: 18499 - protein, 295 aa, Homo sapiens
MDKYDVIKAIGQGAFGKAYLAKGKSDSKHCVIKEINFEKMPIQEKEASKKEVILLEKMKHPNIVAFFNSFQENGRLFIVMEYCDGGDLMKRINRQRGVLFSEDQILGWFVQISLGLKHIHDRKILHRDIKAQNIFLSKNGMVAKLGDFGIARVLNNSMELARTCIGTPYYLSPEICQNKPYNNKTDIWSLGCVLYELCTLKHPFEGNNLQQLVLKICQAHFAPISPGFSRELHSLISQLFQVSPRDRPSINSILKRPFLENLIPKYLTPENSVTCLYAEQERQLLDMLGRWSRAC

SEQ ID NO: 18500 - protein, 846 aa, Homo sapiens
MSVSNLSWLKKKSQSVDINAPGFNPLAGAGKQTPQASKPPAPKTPIIEEEQNNAANTQKHPSRRSELKRFYTIDTGQKKTLDKKDGRRMSFQKPKGTIEYTVESRDSLNSIALKFDTTPNELVQLNKLFSRAVVTGQVLYVPDPEYVSSVESSPSLSPVSPLSPTSSEAEFDKTTNPDVHPTEATPSSTFTGIRPARVVSSTSEEEEAFTEKFLKINCKYITSGKGTVSGVLLVTPNNIMFDPHKNDPLVQENGCEEYGIMCPMEEVMSAAMYKEILDSKIKESLPIDIDQLSGRDFCHSKKMTGSNTEEIDSRIRDAGNDSASTAPRSTEESLSEDVFTESELSPIREELVSSDELRQDKSSGASSESVQTVNQAEVESLTVKSESTGTPGHLRSDTEHSTNEVGTLCHKTDLNNLEMAIKEDQIADNFQGISGPKEDSTSIKGNSDQDSFLHENSLHQEESQKENMPCGETAEFKQKQSVNKGKQGKEQNQDSQTEAEELRKLWKTHTMQQTKQQRENIQQVSQKEAKHKITSADGHIESSALLKEKQRHRLHKFLCLRVGKPMRKTFVSQASATMQQYAQRDKKHEYWFAVPQERTDHLYAFFIQWSPEIYAEDTGEYTREPGFIVVKKIEESETIEDSSNQAAAREWEITTREDINSKQVATVKADLESESFRPNLSDPSELLLPDQIEKLTKHLPPRTIGYPWTLVYGTGKHGTSLKTLYRTMTGLDTPVLMVIKDSDGQVFGALASEPLKVSDGFYGTGETFVFTFCPEFEVFKWTGDNMFFIKGDMDSLAFGGGGGEFALWLDGDLYHGRSHSCKTFGNRTLSKKEDFFIQDIEIWAFE

SEQ ID NO: 18501 - protein, 1166 aa, Homo sapiens
MIWPKVECCHFKTAVEAPLGMKLDKKMEVFIPLSTSAASSGPWAHSLFAFIPSWPKKNLFKRESPITHRLYGDISREVQGTSENGVIFQKCALVSGSSEAQTARIWLLVNNTKTTSSANLSELLLLDSIAGLTIWDSVGNRTSEGFQAFSKKFLQVGDAFAVSYAATLQAGDLGNGESLKLPAQLTFQSSSRNRTQLKVLFSITAEENVTVLPHHGLHAAGFFIAFLLSLVLTWAALFLMVRYQCLKGNMLTRHRVWQYESKLEPLPFTSADGVNEDLSLNDQMIDILSSEDPGSMLQALEELEIATLNRADADLEACRTQISKDIIALLLKNLTSSGHLSPQVERKMSAVFKKQFLLLENEIQEEYDRKMVALTAECDLETRKKMENQYQREMMAMEEAEELLKRAGERSAVECSNLLRTLHGLEQEHLRKSLALQQEEDFAKAHRQLAVFQRNELHSIFFTQIKSAIFKGELKPEAAKMLLQNYSKIQENVEELMDFFQASKRYHLSKRFGHREYLVQNLQSSETRVQGLLSTAAAQLTHLIQKHERAGYLDEDQMEMLLERAQTEVFSIKQKLDNDLKQEKKKLHQKLITKRRRELLQKHREQRREQASVGEAFRTVEDAGQYLHQKRSLMEEHGATLEELQERLDQAALDDLRTLTLSLFEKATDELRRLQNSAMTQELLKRGVPWLFLQQILEEHGKEMAARAEQLEGEERDRDQEGVQSVRQRLKDDAPEAVTEEQAELRRWEHLIFMKLCSSVFSLSEEELLRMRQEVHGCFAQMDRSLALPKIRARVLLQQFQTAWREAEFVKLDQAVAAPELQQQSKVRKSRSKSKSKGELLKKCIEDKIHLCEEQASEDLVEKVRGELLRERVQRMEAQEGGFAQSLVALQFQKASRVTETLSAYTALLSIQDLLLEELSASEMLTKSACTQILESHSRELQELERKLEDQLVQQEAAQQQQALASWQQWVADGPGILNEPGEVDSERQVSTVLHQALSKSQTLLEQHQQCLREEQQNSVVLEDLLENMEADTFATLCSQELRLASYLARMAMVPGATLRRLLSVVLPTASQPQLLALLDSATERHVDHAAESDGGAEQADVGRRRKHQSWWQALDGKLRGDLISRGLEKMLWARKRKQRSGNQESFWQYLVGTPEIGLIEWMSEK

SEQ ID NO: 18502 - protein, 706 aa, Homo sapiens
MTTEVGSVSEVKKDSSQLGTDATKEKPKEVAENQQNQSSDPEEEKGSQPPPAAESQSSLRRQKREKETSESRGISRFIPPWLKKQKSYTLVVAKDGGDKKEPTQAVVEEQVLDKEEPLPEEQRQAKGDAEEMAQKKQEIKVEVKEEKPSVSKEEKPSVSKVEMQPTELVSKEREEKVKETQEDKLEGGAAKRETKEVQTNELKAEKASQKVTKKTKTVQCKVTLLDGTEYSCDLEKHAKGQVLFDKVCEHLNLLEKDYFGLLFQESPEQKNWLDPAKEIKRQLRNLPWLFTFNVKFYPPDPSQLTEDITRYFLCLQLRQDIASGRLPCSFVTHALLGSYTLQAELGDYDPEEHGSIDLSEFQFAPTQTKELEEKVAELHKTHRGLSPAQADSQFLENAKRLSMYGVDLHHAKDSEGVDIKLGVCANGLLIYKDRLRINRFAWPKILKISYKRSNFYIKVRPAELEQFESTIGFKLPNHRAAKRLWKVCVEHHTFYRLVSPEQPPKAKFLTLGSKFRYSGRTQAQTRQASTLIDRPAPHFERTSSKRVSRSLDGAPIGVMDQSLMKDFPGAAGEISAYGPGLVSIAVVQDGDGRREVRSPTKAPHLQLIEGKIDGGAGGDSGTLLTAQTITSESVSTTTTTHITKTVKGGISETRIEKRIVITGDGDIDHDQALAQAIREAREQHPDMSVTRVVVHKETELAEEGED

SEQ ID NO: 18503 - protein, 670 aa, Homo sapiens
MTSVWKRLQRVGKRAAKFQFVACYHELVLECTKKWQPDKLVVVWTRRNRRICSKAHSWQPGIQNPYRGTVVWMVPENVDISVTLYRDPHVDQYEAKEWTFIIENESKGQRKVLATAEVDLARHAGPVPVQVPVRLRLKPKSVKVVQAELSLTLSGVLLREGRATDDDMQSLASLMSVKPSDVGNLDDFAESDEDEAHGPGAPEARARVPQPDPSRELKTLCEEEEEGQGRPQQAVASPSNAEDTSPAPVSAPAPPARTSRGQGSERANEAGGQVGPEAPRPPETSPEMRSSRQPAQDTAPTPAPRLRKGSDALRPPVPQGEDEVPKASGAPPAGLGSARETQAQACPQEGTEAHGARLGPSIEDKGSGDPFGRQRLKAEEMDTEDRPEASGVDTEPRSGGREANTKRSGVRAGEAEESSAVCQVDAEQRSKVRHVDTKGPEATGVMPEAPPALVSSSQSLLEWCQEVTTGYRGVRITNFTTSWRNGLAFCAILHRFYPDKIDYASLDPLNIKQNNKQAFDGFAALGVSRLLEPADMVLLSVPDKLIVMTYLCQIRAFCTGQELQLVQLEGGGGAGTYRVGSAQPSPPDDLDAGGLAQRLRGHGAEGPQEPKEAADRADGAAPGVASRNAVAGRASKDGGAEAPRESRPAEVPAEGLVNGAGAPGGGGVRL

SEQ ID NO: 18504 - protein, 736 aa, Homo sapiens
MTSTGKDGGAQHAQYVGPYRLEKTLGKGQTGLVKLGVHCVTCQKVAIKIVNREKLSESVLMKVEREIAILKLIEHPHVLKLHDVYENKKYLYLVLEHVSGGELFDYLVKKGRLTPKEARKFFRQIISALDFCHSHSICHRDLKPENLLLDEKNNIRIADFGMASLQVGDSLLETSCGSPHYACPEVIRGEKYDGRKADVWSCGVILFALLVGALPFDDDNLRQLLEKVKRGVFHMPHFIPPDCQSLLRGMIEVDAARRLTLEHIQKHIWYIGGKNEPEPEQPIPRKVQIRSLPSLEDIDPDVLDSMHSLGCFRDRNKLLQDLLSEEENQEKMIYFLLLDRKERYPSQEDEDLPPRNEIDPPRKRVDSPMLNRHGKRRPERKSMEVLSVTDGGSPVPARRAIEMAQHGQRSRSISGASSGLSTSPLSSPRVTPHPSPRGSPLPTPKGTPVHTPKESPAGTPNPTPPSSPSVGGVPWRARLNSIKNSFLGSPRFHRRKLQVPTPEEMSNLTPESSPELAKKSWFGNFISLEKEEQIFVVIKDKPLSSIKADIVHAFLSIPSLSHSVISQTSFRAEYKATGGPAVFQKPVKFQVDITYTEGGEAQKENGIYSVTFTLLSGPSRRFKRVVETIQAQLLSTHDPPAAQHLSDTTNCMEMMTGRLSKCGSPLSNFFDVIKQLFSDEKNGQAAQAPSTPAKRSAHGPLGDSAAAGPGPGGDAEYPTGKDTAKMGPPTARREQP

SEQ ID NO: 18505 - protein, 1323 aa, Homo sapiens
MPVVWPTLLDLSRDECKRILRKLELEAYAGVISALRAQGDLTKEKKDLLGELSKVLSISTERHRAEVRRAVNDERLTTIAHNMSGPNSSSEWSIEGRRLVPLMPRLVPQTAFTVTANAVANAAIQHNASLPVPAETGSKEVVVCYSYTSTTSTPTSTPVPSGSIATVKSPRPASPASNVVVLPSGSTVYVKSVSCSDEDEKPRKRRRTNSSSSSPVVLKEVPKAVVPVSKTITVPVSGSPKMSNIMQSIANSLPPHMSPVKITFTKPSTQTTNTTTQKVIIVTTSPSSTFVPNILSKSHNYAAVTKLVPTSVIASTTQKPPVVITASQSSLVSNSSSGSSSSTPSPIPNTVAVTAVVSSTPSVVMSTVAQGVSTSAIKMASTRLPSPKSLVSAPTQILAQFPKQHQQSPKQQLYQVQQQTQQQVAQPSPVSHQQQPQQSPLPPGIKPTIQIKQESGVKIITQQVQPSKILPKPVTATLPTSSNSPIMVVSSNGAIMTTKLVTTPTGTQATYTRPTVSPSIGRMAATPGAATYVKTTSGSIITVVPKSLATLGGKIISSNIVSGTTTKITTIPMTSKPNVIVVQKTTGKGTTIQGLPGKNVVTTLLNAGGEKTIQTVPTGAKPAILTATRPITKMIVTQPKGIGSTVQPAAKIIPTKIVYGQQGKTQVLIKPKPVTFQATVVSEQTRQLVTETLQQASRVAEAGNSSIQEGKEEPQNYTDSSSSSTESSQSSQDSQPVVHVIASRRQDWSEHEIAMETSPTIIYQDVSSESQSATSTIKALLELQQTTVKEKLESKPRQPTIDLSQMAVPIQMTQEKRHSPESPSIAVVESELVAEYITTERTDEGTEVAFPLLVSHRSQPQQPSQPQRTLLQHVAQSQTATQTSVVVKSIPASSPGAITHIMQQALSSHTAFTKHSEELGTEEGEVEEMDTLDPQTGLFYRSALTQSQSAKQQKLSQPPLEQTQLQVKTLQCFQTKQKQTIHLQADQLQHKLPQMPQLSIRHQKLTPLQQEQAQPKPDVQHTQHPMVAKDRQLPTLMAQPPQTVVQVLAVKTTQQLPKLQQAPNQPKIYVQPQTPQSQMSLPASSEKQTASQVEQPIITQGSSVTKITFEGRQPPTVTKITGGSSVPKLTSPVTSISPIQASEKTAVSDILKMSLMEAQIDTNVEHMIVDPPKKALATSMLTGEAGSLPSTHMVVAGMANSTPQQQKCRESCSSPSTVGSSLTTRKIDPPAVPATGQFMRIQNVGQKKAEESPAEIIIQAIPQYAIPCHSSSNVVVEPSGLLELNNFTSQQLDDEETAMEQDIDSSTEDGTEPSPSQSSAERS

SEQ ID NO: 18506 - protein, 2617 aa, Homo sapiens
MLTDSGGGGTSFEEDLDSVAPRSAPAGASEPPPPGGVGLGIRTVRLFGEAGPASGVGSSGGGGSGSGTGGGDAALDFKLAAAVLRTGGGGGASGSDEDEVSEVESFILDQEDLDNPVLKTTSEIFLSSTAEGADLRTVDPETQARLEALLEAAGIGKLSTADGKAFADPEVLRRLTSSVSCALDEAAAALTRMKAENSHNAGQVDTRSLAEACSDGDVNAVRKLLDEGRSVNEHTEEGESLLCLACSAGYYELAQVLLAMHANVEDRGNKGDITPLMAASSGGYLDIVKLLLLHDADVNSQSATGNTALTYACAGGFVDIVKVLLNEGANIEDHNENGHTPLMEAASAGHVEVARVLLDHGAGINTHSNEFKESALTLACYKGHLDMVRFLLEAGADQEHKTDEMHTALMEACMDGHVEVARLLLDSGAQVNMPADSFESPLTLAACGGHVELAALLIERGANLEEVNDEGYTPLMEAAREGHEEMVALLLAQGANINAQTEETQETALTLACCGGFSEVADFLIKAGADIELGCSTPLMEASQEGHLELVKYLLASGANVHATTATGDTALTYACENGHTDVADVLLQAGADLEHESEGGRTPLMKAARAGHLCTVQFLISKGANVNRATANNDHTVVSLACAGGHLAVVELLLAHGADPTHRLKDGSTMLIEAAKGGHTNVVSYLLDYPNNVLSVPTTDVSQLPPPSQDQSQVPRVPTHTLAMVVPPQEPDRTSQENSPALLGVQKGTSKQKSSSLQVADQDLLPSFHPYQPLECIVEETEGKLNELGQRISAIEKAQLKSLELIQGEPLNKDKIEELKKNREEQVQKKKKILKELQKVERQLQMKTQQQFTKEYLETKGQKDTVSLHQQCSHRGVFPEGEGDGSLPEDHFSELPQVDTILFKDNDVDDEQQSPPSAEQIDFVPVQPLSSPQCNFSSDLGSNGTNSLELQKVSGNQQIVGQPQIAITGHDQGLLVQEPDGLMVATPAQTLTDTLDDLIAAVSTRVPTGSNSSSQTTECLTPESCSQTTSNVASQSMPPVYPSVDIDAHTESNHDTALTLACAGGHEELVSVLIARDAKIEHRDKKGFTPLILAATAGHVGVVEILLDKGGDIEAQSERTKDTPLSLACSGGRQEVVDLLLARGANKEHRNVSDYTPLSLAASGGYVNIIKILLNAGAEINSRTGSKLGISPLMLAAMNGHVPAVKLLLDMGSDINAQIETNRNTALTLACFQGRAEVVSLLLDRKANVEHRAKTGLTPLMEAASGGYAEVGRVLLDKGADVNAPPVPSSRDTALTIAADKGHYKFCELLIHRGAHIDVRNKKGNTPLWLASNGGHFDVVQLLVQAGADVDAADNRKITPLMSAFRKGHVKVVQYLVKEVNQFPSDIECMRYIATITDKELLKKCHQCVETIVKAKDQQAAEANKNASILLKELDLEKSREESRKQALAAKREKRKEKRKKKKEEQKRKQEEDEENKPKENSELPEDEDEEENDEDVEQEVPIEPPSATTTTTIGISATSATFTNVFGKKRANVVTTPSTNRKNKKNKTKETPPTAHLILPEQHMSLAQQKADKNKINGEPRGGGAGGNSDSDNLDSTDCNSESSSGGKSQELNFVMDVNSSKYPSLLLHSQEEKTSTATSKTQTRLEGEVTPNSLSTSYKTVSLPLSSPNIKLNLTSPKRGQKREEGWKEVVRRSKKLSVPASVVSRIMGRGGCNITAIQDVTGAHIDVDKQKDKNGERMITIRGGTESTRYAVQLINALIQDPAKELEDLIPKNHIRTPASTKSIHANFSSGVGTTAASSKNAFPLGAPTLVTSQATTLSTFQPANKLNKNVPTNVRSSFPVSLPLAYPHPHFALLAAQTMQQIRHPRLPMAQFGGTFSPSPNTWGPFPVRPVNPGNTNSSPKHNNTSRLPNQNGTVLPSESAGLATASCPITVSSVVAASQQLCVTNTRTPSSVRKQLFACVPKTSPPATVISSVTSTCSSLPSVSSAPITSGQAPTTFLPASTSQAQLSSQKMESFSAVPPTKEKVSTQDQPMANLCTPSSTANSCSSSASNTPGAPETHPSSSPTPTSSNTQEEAQPSSVSDLSPMSMPFASNSEPAPLTLTSPRMVAADNQDTSNLPQLAVPAPRVSHRMQPRGSFYSMVPNATIHQDPQSIFVTNPVTLTPPQGPPAAVQLSSAVNIMNGSQMHINPANKSLPPTFGPATLFNHFSSLFDSSQVPANQGWGDGPLSSRVATDASFTVQSAFLGNSVLGHLENMHPDNSKAPGFRPPSQRVSTSPVGLPSIDPSGSSPSSSSAPLASFSGIPGTRVFLQGPAPVGTPSFNRQHFSPHPWTSASNSSTSAPPTLGQPKGVSASQDRKIPPPIGTERLARIRQGGSVAQAPAGTSFVAPVGHSGIWSFGVNAVSEGLSGWSQSVMGNHPMHQQLSDPSTFSQHQPMERDDSGMVAPSNIFHQPMASGFVDFSKGLPISMYGGTIIPSHPQLADVPGGPLFNGLHNPDPAWNPMIKVIQNSTECTDAQQASLLPSVPALKGEIPSPQLTRPKKRIGRPMVASPNQRHQDHLRPKVPAGVQELTHCPDTPLLPPSDSRGHNSSNSPSLQAGGAEGAGDRGRDTR

SEQ ID NO: 18507 - protein, 803 aa, Homo sapiens
ETLALLKAQIDPVLLKNSSQQDNSSRESPSLEDEETKKEEETPKQEEQKESEKMKSEEQPMDLENRSTANVLEETTVKKEKEDEKELVKLPVIVKLEKPLPENEEKKIIKEESDSFKENVKPIKVEVKECRADPKDTKSSMEKPVAQEPERIEFGGNIKSSHEITEKSTEETEKLKNDQQAKIPLKKREIKLSDDFDSPVKGPLCKSVTPTKEFLKDEIKQEEETCKRISTITALGHEGKQLVNGEVSDERVAPNFKTEPIETKFYETKEESYSPSKDRNIITEGNGTESLNSVITSMKTGELEKETAPLRKDADSSISVLEIHSQKAQIEEPDPPEMETSLDSSEMAKDLSSKTALSSTESCTMKGEEKSPKTKKDKRPPILECLEKLEKSKKTFLDKDAQRLSPIPEEVPKSTLESEKPGSPEAAETSPPSNIIDHCEKLASEKEVVECQSTSTVGGQSVKKVDLETLKEDSEFTKVEMDNLDNAQTSGIEEPSETKGSMQKSKFKYKLVPEEETTASENTEITSERQKEGIKLTIRISSRKKKPDSPPKVLEPENKQEKTEKEEEKTNVGRTLRRSPRISRPTAKVAEIRDQKADKKRGEGEDEVEEESTALQKTDKKEILKKSEKDTNSKVSKVKPKGKVRWTGSRTRGRWKYSSNDESEGSGSEKSSAASEEEEEKESEEAILADDDEPCKKCGLPNHPELILLCDSCDSGYHTACLRPPLMIIPDGEWFCPPCQHKLLCEKLEEQLQDLDVALKKKERAERRKERLVYVGISIENIIPPQEPDFSEDQEEKKKDSKK

SEQ ID NO: 18508 - protein, 383 aa, Homo sapiens
MTGGTNKTSSSISEILDKVQEDAEDVLFSLGFGQEDHKDTSRIPARFFTTPSQAKGIDFQLFLKSQVRRIEMEDPCLMLASRFKQVQTLAVTADAFFCLYSYVSKTPVQKFTPSHMFWNCNHPTDVPSIRILSREPEPQSPRDRLRKAISKMCLYTCPRDRPPPPHNTPKRNSLDQVVLEVMDKVKEEKQFLQQDSDLGQFSQEDPVPPAEGKKLPTSPYPCVFCCEEETQQRMSTVLAPSQTLDSNPKVPCCTHSLPIEDPQWSTDPAQIRRELCSLPATNTETHPAKDETFWKRKSRARKSLFQKNLMGRKVKSLDLSITQQKWKQSVDRPELRRSLSQQPQDTFDLEEVQSNSEEEQSQSRWPSRPRHPHHHQTFAGKDS

SEQ ID NO: 18509 - protein, 590 aa, Homo sapiens
SICVVFAMSFVPASFTLVLIEERVTRAKHLQLMGGLSPTLYWLGNFLWDMCNYLVPACIVVLIFLAFQQRAYVAPANLPALLLLLLLYGTAYVVLTCINLFIGINGSMATFVLELFSDQKLQEVSRILKQVFLIFPHFCLGRGLIDMVRNQAMADAFERLGDRQFQSPLRWEVVGKNLLAMVIQGPLFLLFTLLLQHRSQLLPQPRVRSLPLLGEEDEDVARERERVVQGATQGDVLVLRNLTKVYRGQRMPAVDRLCLGIPPGECFGLLGVNGAGKTSTFRMVTGDTLASRGEAVLAGHSVAREPSAAHLSMGYCPQSDAIFELLTGREHLELLARLRGVPEAQVAQTAGSGLARLGLSWYADRPAGTYSGGNKRKLATALALVGDPAVVFLDEPTTGMDPSARRFLWNSLLAVVREGRSVMLTSHSMEECEALCSRLAIMVNGRFRCLGSPQHLKGRFAAGHTLTLRVPAARSQPAAAFVAAEFPGAELREAHGGRLRFQLPPGGRCALARVFGELAVHGAEHGVEDFSVSQTMLEEVFLYFSKDQGKDEDTEEQKEAGVGVDPAPGLQHPKRVSQFLDDPSTAETVL

SEQ ID NO: 18510 - protein, 835 aa, Homo sapiens
MGKTANSPGSGARPDPVRSFNRWKKKHSHRQNKKKQLRKQLKKPEWQVERESISRLMQNYEKINVNEITRFSDFPLSKKTLKGLQEAQYRLVTEIQKQTIGLALQGKDVLGAAKTGSGKTLAFLVPVLEALYRLQWTSTDGLGVLIISPTRELAYQTFEVLRKVGKNHDFSAGLIIGGKDLKHEAERINNINILVCTPGRLLQHMDETVSFHATDLQMLVLDEADRILDMGFADTMNAVIENLPKKRQTLLFSATQTKSVKDLARLSLKNPEYVWVHEKAKYSTPATLEQNYIVCELQQKISVLYSFLRSHLKKKSIVFFSSCKEVQYLYRVFCRLRPGVSILALHGRQQQMRRMEVYNEFVRKRAAVLFATDIAARGLDFPAVNWVLQFDCPEDANTYIHRAGRTARYKEDGEALLILLPSEKAMVQQLLQKKVPVKEIKINPEKLIDVQKKLESILAQDQDLKERAQRCFVSYVRSVYLMKDKEVFDVSKLPIPEYALSLGLAVAPRVRFLQKMQKQPTKELVRSQADKVIEPRAPSLTNDEVEEFRAYFNEKMSILQKGGKRLEGTEHRQDNDTGNEEQEEEEDDEEEMEEKLAKAKGSQAPSLPNTSEAQKIKEVPTQFLDRDEEEEDADFLKVKRHNVFGLDLKDEKTLQKKEPSKSSIKKKMTKVAEAKKVMKRNFKVNKKITFTDEGELVQQWPQMQKSAIKDAEEDDDTGGINLHKAKERLQEEDKFDKEEYRKKIKAKHREKRLKEREARREANKRQAKAKDEEEAFLDWSDDDDDDDDGFDPSTLPDPDKYRSSEDSDSEDMENKIRYVFTMGMKYILSTLTSVF

SEQ ID NO: 18511 - protein, 583 aa, Homo sapiens
MVPEMRGLSPDRRLPEPAPCPAAGSPEPRSAGRRQRHVLALPEEEAWRPQQCALLEADASDEVGMLPASPRAASGFDNFFQVQEGEGQGWEGAMALEAGSSPFLPVSPEVMKRRRGGLIEQRDIIKAHEAHKMQSTPQARRKEWEMARFGEAVVARPGSGDGDSDQSRNRQGTPVPASGQAAAYKQTKAQRARTMALYNPIPVRQNCFTVNRSLFIFGEDNIVRKYAKKLIDWPPFEYMILATIIANCIVLALEQHLPEDDKTPMSRRLEKTEPYFIGIFCFEAGIKIVALGFIFHKGSYLRNGWNVMDFIVVLSGILATAGTHFNTHVDLRTLRAVRVLRPLKLVSGIPSLQIVLKSIMKAMVPLLQIGLLLFFAILMFAIIGLEFYSGKLHRACFMNNSGILEGFDPPHPCGVQGCPAGYECKDWIGPNDGITQFDNILFAVLTVFQCITMEGWTTVLYNTNDALGATWNWLYFIPLIIIGSFFVLNLVLGVLSGEFAKERERVENRRAFMKLRRQQQIERELNGYRAWIDKAEEVMLAEENKNAGTSALEVLRRATIKRSRTEAMTRDSSDEHCVDISSV

SEQ ID NO: 18512 - protein, 918 aa, Homo sapiens
MDDSEVESTASILASVKEQEAQFEKLTRALEEERRHVSAQLERVRVSPQDANPLMANGTLTRRHQNGRFVGDADLERQKFSDLKLNGPQDHSHLLYSTIPRMQEPGQIVETYTEEDPEGAMSVVSVETSDDGTTRRTETTVKKVVKTVTTRTVQPVAMGPDGLPVDASSVSNNYIQTLGRDFRKNGNGGPGPYVGQAGTATLPRNFHYPPDGYSRHYEDGYPGGSDNYGSLSRVTRIEERYRPSMEGYRAPSRQDVYGPQPQVRVGGSSVDLHRFHPEPYGLEDDQRSMGYDDLDYGMMSDYGTARRTGTPSDPRRRLRSYEDMIGEEVPSDQYYWAPLAQHERGSLASLDSLRKGGPPPPNWRQPELPEVIAMLGFRLDAVKSNAAAYLQHLCYRNDKVKTDVRKLKGIPVLVGLLDHPKKEVHLGACGALKNISFGRDQDNKIAIKNCDGVPALVRLLRKARDMDLTEVITGTLWNLSSHDSIKMEIVDHALHALTDEVIIPHSGWEREPNEDCKPRHIEWESVLTNTAGCLRNVSSERSEARRKLRECDGLVDALIFIVQAEIGQKDSDSKLVENCVCLLRNLSYQVHREIPQAERYQEAAPNVANNTGPHAASCFGAKKGKDEWFSRGKKPIEDPANDTVDFPKRTSPARGYELLFQPEVVRIYISLLKESKTPAILEASAGAIQNLCAGRWTYGRYIRSALRQEKALSAIADLLTNEHERVVKAASGALRNLAVDARNKELIGKHAIPNLVKNLPGGQQNSSWNFSEDTVISILNTINEVIAENLEAAKKLRETQGIEKLVLINKSGNRSEKEVRAAALVLQTIWGYKELRKPLEKEGWKKSDFQVNLNNASRSQSSHSYDDSTLPLIDRNQKSDNNYSTPNERGDHNRTLDRSGDLGDMEPLKGTTPLMQKI

SEQ ID NO: 18513 - protein, 311 aa, Homo sapiens
MLYQTINSLKTKNPKLKILLSIGGYLFGSKGFHPMVDSSTSRLEFINSIILFLRNHNFDGLDVSWIYPDQKENTHFTVLIHELAEAFQKDFTKSTKERLLLTAGVSAGRQMIDNSYQVEKLAKDLDFINLLSFDFHGSWEKPLITGHNSPLSKGWQDRGPSSYYNVEYAVGYWIHKGMPSEKVVMGIPTYGHSFTLASAETTVGAPASGPGAAGPITESSGFLAYYEICQFLKGAKITRLQDQQVPYAVKGNQWVGYDDVKSMETKVQFLKNLNLGGAMIWSIDMDDFTGKSCNQGPYPLVQAVKRSLGSL

SEQ ID NO: 18514 - protein, 1111 aa, Homo sapiens
MPALWLGCCLCFSLLLPAARATSRREVCDCNGKSRQCIFDRELHRQTGNGFRCLNCNDNTDGIHCEKCKNGFYRHRERDRCLPCNCNSKGSLSARCDNSGRCSCKPGVTGARCDRCLPGFHMLTDAGCTQDQRLLDSKCDCDPAGIAGPCDAGRCVCKPAVTGERCDRCRSGYYNLDGGNPEGCTQCFCYGHSASCRSSAEYSVHKITSTFHQDVDGWKAVQRNGSPAKLQWSQRHQDVFSSAQRLDPVYFVAPAKFLGNQQVSYGQSLSFDYRVDRGGRHPSAHDVILEGAGLRITAPLMPLGKTLPCGLTKTYTFRLNEHPSNNWSPQLSYFEYRRLLRNLTALRIRATYGEYSTGYIDNVTLISARPVSGAPAPWVEQCICPVGYKGQFCQDCASGYKRDSARLGPFGTCIPCNCQGGGACDPDTGDCYSGDENPDIECADCPIGFYNDPHDPRSCKPCPCHNGFSCSVMPETEEVVCNNCPPGVTGARCELCADGYFGDPFGEHGPVRPCQPCQCNNNVDPSASGNCDRLTGRCLKCIHNTAGIYCDQCKAGYFGDPLAPNPADKCRACNCNPMGSEPVGCRSDGTCVCKPGFGGPNCEHGAFSCPACYNQVKIQMDQFMQQLQRMEALISKAQGGDGVVPDTELEGRMQQAEQALQDILRDAQISEGASRSLGLQLAKVRSQENSYQSRLDDLKMTVERVRALGSQYQNRVRDTHRLITQMQLSLAESEASLGNTNIPASDHYVGPNGFKSLAQEATRLAESHVESASNMEQLTRETEDYSKQALSLVRKALHEGVGSGSGSPDGAVVQGLVEKLEKTKSLAQQLTREATQAEIEADRSYQHSLRLLDSVSRLQGVSDQSFQVEEAKRIKQKADSLSSLVTRHMDEFKRTQKNLGNWKEEAQQLLQNGKSGREKSDQLLSRANLAKSRAQEALSMGNATFYEVESILKNLREFDLQVDNRKAEAEEAMKRLSYISQKVSDASDKTQQAERALGSAAADAQRAKNGAGEALEISSEIEQEIGSLNLEANVTADGALAMEKGLASLKSEMREVEGELERKELEFDTNMDAVQMVITEAQKVDTRAKNAGVTIQDTLNTLDGLLHLMGM

SEQ ID NO: 18515 - protein, 821 aa, Homo sapiens
LTGDATSPEGETDKNLANRVHSPHKRLSHRHLKVSTASLTSVDPAGHIIDLVNDQLPDISISEEDKKKNLALLEEAKLVSERFLTRRGRKSRSSPGDSPSAVSPNLSPSASPTSSRSNSLTVPTPPGLDVCSGPPSPLPGAPPQKGDEADVSSPHPGEPNVPKGLADRKQNDQRKVSQGRLAPRPPPVEKSKEIAIEQKENFDPLQYPETTPKGLAPVTNSSGKMALNSPQPGPVESELGKQLLKTGWEGSPLPRSPTQDAAGVGPPASQGRGPAGEPMGPEAGSKAELPPTVSRPPLLRGLSWDSGPEEPGPRLQKVLAKLPLAEEEKRFAGKAGGKLAKAPGLKDFQIQVQPVRMQKLTKLREEHILMRNQNLVGLKLPDLSEAAEQEKGLPSELSPAIEEEESKSGLDVMPNISDVLLRKLRVHRSLPGSAPPLTEKEVENVFVQLSLAFRNDSYTLESRINQAERERNLTEENTEKELENFKASITSSASLWHHCEHRETYQKLLEDIAVLHRLAARLSSRAEVVGAVRQEKRMSKATEVMMQYVENLKRTYEKDHAELMEFKKLANQNSSRSCGPSEDGVPRTARSMSLTLGKNMPRRRVSVAVVPKFNALNLPGQTPSSSSIPSLPALSESPNGKGSLPVTSALPALLENGKTNGDPDCEASAPALTLSCLEELSQETKARMEEEAYSKGFQEGLKKTKELQDLKEEEEEQKSESPEEPEEVEETEEEEKGPRSSKLEELVHFLQVMYPKLCQHWQVIWMMAAVMLVLTVVLGLYNSYNSCAEQADGPLGRSTCSAAQRDSWWSSGLQHEQPTEQ

SEQ ID NO: 18516 - protein, 296 aa, Homo sapiens
MLGNELCSVCGDKASGFHYNVLSCEGCKGFFRRSVIKGAHYICHSGGHCPMDTYMRRKCQECRLRKCRQAGMREECVLSEEQIRLKKLKRQEEEQAHATSLPPRASSPPQILPQLSPEQLGMIEKLVAAQQQCNRRSFSDRLRVTVMLLETSRRYNPGSESITFLKDFSYNREDFAKAGLQVEFINPIFEFSRAMNELQLNDAEFALLIAISIFSADRPNVQDQLQVERLQHTYVEALHAYVSIHHPHDRLMFPRMLMKLVSLRTLSSVHSEQVFALRLQDKKLPPLLSEIWDVHE

SEQ ID NO: 18517 - protein, 1168 aa, Homo sapiens
MSARERQPALKKKMKTLAERRRSAPSLILDKALQKRPTTRDSPSASVDTCTFLSSLVCSNRTLLIDGRAELKRGLQRQERHLFLFNDLFVVAKIKYNNNFKIKNKIKLTDMWTASCVDEVGEGNTNAMKSFVLGWPTVNFVATFSSPEQKDKWLSLLQRYINLEKEKDYPKSIPLKIFAKDIGNCAYSKTITVMNSDTANEVINMSLPMLGITGSERDYQLWVNSGKEEAPYPLIGHEYPYGIKMSHLRDSALLTPGSKDSTTPFNLQEPFLMEQLPREMQCQFILKPSRLAAAQQLSDSGHKTFKRRRSIINWAFWRGSSTHLDNLPSSPTSPMPGQLFGISLPNICENDNLPKPVLDMLFFLNQKGPLTKGIFRQSANVKSCRELKEKLNSGVEVHLDCESIFVIASVLKDFLRNIPGSIFSSDLYDHWVSVMDQGNDEEKINTVQRLLDQLPRANVVLLRYLFGVLHNIEQHSSSNQMTAFNLAVCVAPSILWPPASSSPELENEFTKKVSLLIQFLIENCLRIFGEEITSLFREVSVRCDTRENASDISCFQLNDSSYDSLENELNEDVDAPCSDLVKKLGQGSRSMDSVLTLSDYDLDQPEVEGLLTLSDFDLAHSKDEDVQMKRPLESKPVNILVYTKIPLRDHARAPSAMCTPSYLSTAAANAAKSLRRHRRCSEPSIDYLDSKLSYLREFYQKKLRKSSCDAILSQKDEDYLKQNQPLQEEGKTCFKQSLVTGTDVSKKNATTQNTKKKSLSGSEGNHVKLFPKSKPVAISVASYSPMSSQDHSKNQPFDVNTSGYSPPHTADALKGPRTHRRCSEPNIEDQNRKLTYLRGIYSKKQHKTSCEAGLLHGEEDYLKRHKSLQMEGQKLINQSLVMGIEVGKSSATNQNTEKVLPPRLNLCPRTSYSSLSSPGTSPSGSSVSSQDSAFSQISEHSVFTPTETSSPIDCTFQAQRKREDLSPDFSNASHVSGMPGPSSGQACSRPAYTKKDTMEWHSQMHSVTLHPSTWLRNGVASLKNWSLKKKAKAARPEEEKIASPKGPLEPPPHASGVPEANSLQEEQKDLPLRAAEGLSPVQSAQRCSSSPFQDSERHCSSPFSLVESRLKLCMKSHEEIEPGSQSSSGSLPWERASASSWTLEDATSPDSGPTVVCDIEDRYLTKDI

SEQ ID NO: 18518 - protein, 363 aa, Homo sapiens
MELLKLNRSVQGTGPGPGASLCRPGAPLLNSSSVGNLSCEPPRIRGAGTRGVSVSVSTLSLVAIALERYSAICRPLQARVWQTRSHAARVIVATWLLSGLLMVPYPVYTVVQPVGPRVLQCVHRWPSARVRQTWSVLLLLLLFFIPGVVMAVAYGLISRELYLGLRFDGDSDSDSQSRVRNQGGLPGAVHQNGRCRPETGAVGEDSDGCYVQLPRSRPALELTALTAPGPGSGSRPTQAKLLAKKRVVRMLLVIVVLFFLCWLPVYSANTWRAFDGPGAHRALSGAPISFIHLLSYASACVNPLVYCFMHRRFRQACLETCARCCPRPPRARPRALPDEDPPTPSIASLSRLSYTTISTLGPG

SEQ ID NO: 18519 - protein, 519 aa, Homo sapiens
NAYSFGRTTIANLKSGNNLLWLHTSFAFLYLLLTVYSMRRHTSKMRYKEDDLVKRTLFINGISKYAESEKIKKHFEEAYPNCTVLEARPCYNVARLMFLDAERKKAERGKLYFTNLQSKENVPTMINPKPCGHLCCCVVRGCEQVEAIEYYTKLEQKLKEDYKREKEKVNEKPLGMAFVTFHNETITAIILKDFNVCKCQGCTCRGEPRPSSCSESLHISNWTVSYAPDPQNIYWEHLSIRGFIWWLRCLVINVVLFILLFFLTTPAIIITTMDKFNVTKPVEYLNNPIITQFFPTLLLWCFSALLPTIVYYSAFFEAHWTRSGENRTTMHKCYTFLIFMVLLLPSLGLSSLDLFFRWLFDKKFLAEAAIRFECVFLPDNGAFFVNYVIASAFIGNAMDLLRIPGLLMYMIRLCLARSAAERRNVKRHQAYEFQFGAAYAWMMCVFTVVMTYSITCPIIVPFGLMYMLLKHLVDRYNLYYAYLPAKLDKKIHSGAVNQVVAAPILCLFWLLFFSTMRTD

SEQ ID NO: 18520 - protein, 187 aa, Homo sapiens
NPYGQPQVFPGQDPDSPQHGNYQEEGPPSYYDNQDFPATNWDDKSIRQAFIRKSVLTASLSYMVGMIASFYNTEAVIMAVGITTAVCFTVVIFSMQTRYDFTSCMGVLLVSMVVLFIFAILCIFIRNRILEIVYASLGALLFTCFLAVDTQLLLGNKQLSLSPEEYVFAALNLYTDIINIFLYILTI

SEQ ID NO: 18521 - protein, 272 aa, Homo sapiens
MGYFLKLYAYVNSHSLFVWVCDRSYKRSFRPMILNKIKELSRNQFSTMSHLRKDSQPSSPGDDAMDRSGLPDLQGRFELSGKNRQYPLDALEPQPSIGDIKDIKKAAKSMLDPAHKSHFHPVTPSLVFLCFIFDGLHQALLSVGVSKRSNTVVGNENEERGTPYASRFKDMPNFIALEKSSVLRHCCDLLIGIAAGSSDKICTSSLQVQRRFKAMMASIGRLSHGESADLLISCNAESAIGWISSRPWVGELMFTLLFGDFESPLHKLRKSS

SEQ ID NO: 18522 - protein, 348 aa, Homo sapiens
MENQAHNTMGTSPCEAELQELMEQIDIMVSNKKMDWERKMRALETRLDLRDQELANAQTCLDQKGQEVGLLRQKLDSLEKCNLAMTQNYEGQLQSLKAQFSKLTNNFEKLRLHQMKQNKVPRKELPHLKEEIPFELSNLNQKLEEFRAKSREWDKQEILYQTHLISLDAQQKLLSEKCNQFQKQAQSYQTQLNGKKQCLEDSSSEIPRLICDPDPNCEINERDEFIIEKLKSAVNEIALSRNKLQDENQKLLQELKMYQRQCQAMEAGLSEVKSELQSRDDLLRIIEMERLQLHRELLKIGECQNAQGNKTRLESSYLPSIKEPERKIKELFSVMQDQPNHEKELNKR

SEQ ID NO: 18523 - protein, 604 aa, Homo sapiens
MPKPINVRVTTMDAELEFAIQPNTTGKQLFDQVVKTVGLREVWFFGLQYVDSKGYSTWLKLNKKVTQQDVKKENPLQFKFRAKFFPEDVSEELIQEITQRLFFLQVKEAILNDEIYCPPETAVLLASYAVQAKYGDYNKEIHKPGYLANDRLLPQRVLEQHKLTKEQWEERIQNWHEEHRGMLREDSMMEYLKIAQDLEMYGVNYFEIKNKKGTELWLGVDALGLNIYEHDDKLTPKIGFPWSEIRNISFNDKKFVIKPIDKKAPDFVFYAPRLRINKRILALCMGNHELYMRRRKPDTIEVQQMKAQAREEKHQKQLERAQLENEKKKREIAEKEKERIEREKEELMERLKQIEEQTIKAQKELEEQTRKALELDQERKRAKEEAERLEKERRAAEEAKSAIAKQAADQMKNQEQLAAELAEFTAKIALLEEAKKKKEEEATEWQHKAFAAQEDLEKTKEELKTVMSAPPPPPPPPVIPPTENEHDEHDENNAEASAELSNEGVMNHRSEEERVTETQKNERVKKQLQALSSELAQARDETKKTQNDVLHAENVKAGRDKYKTLRQIRQGNTKQRIDEFEAMWGPKLYALFQMRSCQSSIKQM

SEQ ID NO: 18524 - protein, 1060 aa, Homo sapiens
MHQCRSDEYNCSSGMCIRSSWVCDGDNDCRDWSDEANCTAIYHTCEASNFQCRNGHCIPQRWACDGDTDCQDGSDEDPVNCEKKCNGFRCPNGTCIPSSKHCDGLRDCSDGSDEQHCEPLCTHFMDFVCKNRQQCLFHSMVCDGIIQCRDGSDEDAAFAGCSQDPEFHKVCDEFGFQCQNGVCISLIWKCDGMDDCGDYSDEANCENPTEAPNCSRYFQFRCENGHCIPNRWKCDRENDCGDWSDEKDCGDSHILPFSTPGPSTCLPNYYRCSSGTCVMDTWVCDGYRDCADGSDEEACPLLANVTAASTPTQLGRCDRFEFECHQPKTCIPNWKRCDGHQDCQDGRDEANCPTHSTLTCMSREFQCEDGEACIVLSERCDGFLDCSDESDEKACSDELTVYKVQNLQWTADFSGDVTLTWMRPKKMPSASCVYNVYYRVVGESIWKTLETHSNKTNTVLKVLKPDTTYQVKVQVQCLSKAHNTNDFVTLRTPEGLPDAPRNLQLSLPREAEGVIVGHWAPPIHTHGLIREYIVEYSRSGSKMWASQRAASNFTEIKNLLVNTLYTVRVAAVTSRGIGNWSDSKSITTIKGKVIPPPDIHIDSYGENYLSFTLTMESDIKVNGYVVNLFWAFDTHKQERRTLNFRGSILSHKVGNLTAHTSYEISAWAKTDLGDSPLAFEHVMTRGVRPPAPSLKAKAINQTAVECTWTGPRNVVYGIFYATSFLDLYRNPKSLTTSLHNKTVIVSKDEQYLFLVRVVVPYQGPSSDYVVVKMIPDSRLPPRHLHVVHTGKTSVVIKWESPYDSPDQDLLYAVAVKDLIRKTDRSYKVKSRNSTVEYTLNKLEPGGKYHIIVQLGNMSKDSSIKITTVSLSAPDALKIITENDHVLLFWKSLALKEKHFNESRGYEIHMFDSAMNITAYLGNTTDNFFKISNLKMGHNYTFTVQARCLFGNQICGEPAILLYDELGSGADASATQAARSTDVAAVVVPILFLILLSLGVGFAILYTKHRRLQSSFTAFANSHYSSRLGSAIFSSGDDLGEDDEDAPMITGFSDDVPMVIA

SEQ ID NO: 18525 - protein, 801 aa, Homo sapiens
MSSKQATSPFACAADGEDAMTQDLTSREKEEGSDQHVASHLPLHPIMHNKPHSEELPTLVSTIQQDADWDSVLSSQQRMESENNKLCSLYSFRNTSTSPHKPDEGSRDREIMTSVTFGTPERRKGSLADVVDTLKQKKLEEMTRTEQEDSSCMEKLLSKDWKEKMERLNTSELLGEIKGTPESLAEKERQLSTMITQLISLREQLLAAHDEQKKLAASQIEKQRQQMDLARQQQEQIARQQQQLLQQQHKINLLQQQIQVQGHMPPLMIPIFPHDQRTLAAAAAAQQGFLFPPGITYKPGDNYPVQFIPSTMAAAAASGLSPLQLQQLYAAQLASMQVSPGAKMPSTPQPPNTAGTVSPTGIKNEKRGTSPVTQVKDEAAAQPLNLSSRPKTAEPVKSPTSPTQNLFPASKTSPVNLPNKSSIPSPIGGSLGRGSSLGKWKSQHQEETYELDILSSLNSPALFGDQDTVMKAIQEARKMREQIQREQQQQQPHGVDGKLSSINNMGLNSCRNEKERTRFENLGPQLTGKSNEDGKLGPGVIDLTRPEDAEGSKAMNGSAAKLQQYYCWPTGGATVAEARVYRDARGRASSEPHIKRPMNAFMVWAKDERRKILQAFPDMHNSNISKILGSRWKSMSNQEKQPYYEEQARLSKIHLEKYPNYKYKPRPKRTCIVDGKKLRIGEYKQLMRSRRQEMRQFFTVGQQPQIPITTGTGVVYPGAITMATTTPSPQMTSDCSSTSASPEPSLPVIQSTYGMKTDGGSLAGNEMINGEDEMEMYDDYEDDPKSDYSSENEAPEAVSAN

SEQ ID NO: 18526 - protein, 779 aa, Homo sapiens
SATNLESEEDSEAPVDSTLNNNRNQEFVSSSRSISGENATSESEFTLGGDDSGVSMNPARSALALLAMAQSGDAVSVKIEEENQDLMHFNLQKKRAKGKGQVKEEDNSNQKQLKRPAQGKRQNPRGTDIYLPYTPPSSESCHDGYQHQEKMRQKIKEVEEKQPEVKTGFIASFLDFLKSGPKQQFSTLAVRMPNRTRRPGTQMVRTFCPPPLPKPSSTTPTPLVSETGGNSPSDKVDNELKNLEHLSSFSSDEDDPGYSQDAYKSVSTPLTTLDATSDKKKKTEALQVATTSPTANTTGTATTSSTTVGAVKQEPLHSTSYAVNILENISSSESSKPIELDGLPSDQFAKGQDTVAIEGFTDEEDTESGGEGQYRERDEFVVKIEDIETFKEALKTGKEPPAIWKVQKALLQKFVPEIRDGQREFAATNSYLGYFGDAKSKYKRIYVKFIENANKKEYVRVCSKKPRNKPSQTIRTVQAKPSSSSKTSDPLASKTTTTKAPSVKPKVKQPKVKAEPPPKKRKKWKEEFSSSQSDSSPEIHTSSSDDEEFEPPAPFVTRFLNTRAMKETFKSYMELLVSIALDPDTMQALEKSNDELLLPHMKKIDGMLNDNRKRLLLNLHLDQSFKNALESFPELTIITRDSKAKSGGTAISKIKMNGKAYNKKTLRTSKTTTKSAQEFAVDPEKIQLYSLYHSLHHYKYHVYLICKDEVISSHLLKKNVFQNVKETLAIVFWSVLKRVVKYMCVCILSMYSVNNDLIYCSESLCYVLCSDLPEPHHLL

SEQ ID NO: 18527 - protein, 319 aa, Homo sapiens
MLAKVVEGDLAFKGGRDISVSLLTLVVTACGLALFGVSLFVSWKLCWVPWRERGLPSGSKDNNQEPLNYMDTETNEQENSEDFLDPPTPCPDSSMKISHTSPDIPLSTQTGIQENCAHGVRVQRQVTEPTSSARHNSIRRQLNLSNPDFNIQQLQKQEQLTGIGRIKPELYKQRSLDNDDGRRSNSKACGKLNFILKYDCDLEQLIVKIHKAVNLPAKDFSGTSDPYVKIYLLPDRKTKHQTKVHRKTLNPVFDEVFLFPVPYNDLEARKLHFSVYDFDRFSRHDLIGQVVVDHFLDLADFPRECILWKDIEYVTNILS

SEQ ID NO: 18528 - protein, 389 aa, Homo sapiens
MAPSHRASQVGFCPTPERPLWRLPPTCRPRRMSVCYRPPGNETLLSWKTSRATGTAFLLLAALLGLPGNGFVVWSLAGWRPARGRPLAATLVLHLALADGAVLLLTPLFVAFLTRQAWPLGQAGCKAVYYVCALSMYASVLLTGLLSLQRCLAVTRPFLAPRLRSPALARRLLLAVWLAALLLAVPAAVYRHLWRDRVCQLCHPSPVHAAAHLSLETLTAFVLPFGLMLGCYSVTLARLRGARWGSGRHGARVGRLVSAIVLAFGLLWAPYHAVNLLQAVAALAPPEGALAKLGGAGQAARAGTTALAFFSSSVNPVLYVFTAGDLLPRAGPRFLTRLFEGSGEARGGGRSREGTMELRTTPQLKVVGQGRGNGDPGGGMEKDGPEWDL

SEQ ID NO: 18529 - protein, 1357 aa, Homo sapiens; identical to SEQ ID NO: 11720

SEQ ID NO: 18530 - protein, 612 aa, Homo sapiens
MELAMDNSYAFNQRSTCNGIPSEKKNNFLVSEDHGQKILSVLQNFREQNVFYDFKIIMKDEIIPCHRCVLAACSDFFRAMFEVNMKERDDGSVTITNLSSKAVKAFLDYAYTGKTKITDDNVEMFFQLSSFLQVSFLSKACSDFLIKSINLVNCLQLLSISDSYGSTSLFDHALHFVQHHFSLLFKSSDFLEMNFGVLQKCLESDELNVPEEEMVLKVVLSWTKHNLESRQKYLPHLIEKVRLHQLSEETLQDCLFNEESLLKSTNCFDIIMDAIKCVQGSGGLFPDARPSTTEKYIFIHKTEENGENQYTFCYNIKSDSWKILPQSHLIDLPGSSLSSYGEKIFLTGGCKGKCCRTVRLHIAESYHDATDQTWCYCPVKNDFFLVSTMKTPRTMHTSVMALDRLFVIGGKTRGSRDIKSLLDVESYNPLSKEWISVSPLPRGIYYPEASTCQNVIYVLGSEVEITDAFNPSLDCFFKYNATTDQWSELVAEFGQFFHATLIKAVPVNCTLYICDLSTYKVYSFCPDTCVWKGEGSFECAGFNAGAIGIEDKIYILGGDYAPDEITDEVQVYHSNRSEWEEVSPMPRALTEFYCQVIQFNKYRDPWFSNLCA

SEQ ID NO: 18531 - protein, 152 aa, Homo sapiens
MAEPGHSHHLSARVRGRTERRIPRLWRLLLWAGTAFQVTQGTGPELHACKESEYHYEYTACDSTGSRWRVAVPHTPGLCTSLPDPIKGTECSFSCNAGEFLDMKDQSCKPCAEGRYSLGTGIRFDEWDELPHGFASLSANMELDDSAAESTG

SEQ ID NO: 18532 - protein, 609 aa, Homo sapiens
MPTAESEAKVKTKVRFEELLKTHSDLMREKKKLKKKLVRSEENISPDTIRSNLHYMKETTSDDPDTIRSNLPHIKETTSDDVSAANTNNLKKSTRVTKNKLRNTQLATENPNGDASVEEDKQGKPNKKVIKTVPQLTTQDLKPETPENKVDSTHQKTHTKPQPGVDHQKSEKANEGREETDLEEDEELMQAYQCHVTEEMAKEIKRKIRKKLKEQLTYFPSDTLFHDDKLSSEKRKKKKEVPVFSKAETSTLTISGDTVEGEQKKESSVRSVSSDSHQDDEISSMEQSTEDSMQDDTKPKPKKTKKKTKAVADNNEDVDGDGVHEITSRDSPVYPKCLLDDDLVLGVYIHRTDRLKSDFMISHPMVKIHVVDEHTGQYVKKDDSGRPVSSYYEKENVDYILPIMTQPYDFKQLKSRLPEWEEQIVFNENFPYLLRGSDESPKVILFFEILDFLSVDEIKNNSEVQNQECGFRKIAWAFLKLLGANGNANINSKLRLQLYYPPTKPRSPLSVVEAFEWWSKCPRNHYPSTLYVTVRGLKVPDCIKPSYRSMMALQEEKGKPVHCERHHESSSVDTEPGLEESKEVIKWKRLPGQENEDVFVLISPTMEEY

SEQ ID NO: 18533 - protein, 622 aa, Homo sapiens
MDSHSGEPALLPCGTCDMVFRSSALLATHTQRFCIGHPTQEMTFGAQASVATEPQRAAVVPQEHQGVPQEPQGLPDQQASRSALKRLTEEVQWLRLSLQEMRPWITEVPRVFAGPWTRSEARPQSPMSEAVGSPSERLRALFRTRARRVAEMEAQSRALQLRGEELSRRLQVVACTRGGMSRLFGLEQEIRELQAEAGRTRGALEVLGARIQELQAEPGNPLSSRREAELYSPVQKANPGTLAAEIRALREAYIRDGGRDPGVLGQIWQLQVEASALELQRSQTRRGRAGATSGELPVVEAENRRLEAEILALQMQRGRAPLGPQDLRLLGDASLQPKGRRDPPLLPPPVAPPLPPLPGFSEPQLPGTMTRNLGLDSHFLLPTSDMLGPAPYDPGAGLVIFYDFLRGLEASWIWVQLRTGLARDGRDTGRTTALPPALCLPPPPAPGPMGNCAILASRQPVPRLPPSSSVSLVCELQVWQGLAWARAPQPKAWVSLGLFDQDQRVLSGRWRLPLRALPLDPSLSLGQLNGIPQAGQAELFLRLVNARDAAVQTLAEINPASVHEYQYPPPVSSTSSLEASFLTPAVGFADPPPRTEEPLSGVKDRDEGLGPHHSSDLPPVSF

SEQ ID NO: 18534 - protein, 253 aa, Homo sapiens
QKRKKKKMPEILSLRGRQRAHSKLANKPVVQPVEEQEPKGPQASEERNLEPPSSEQLEPTVTFLFTLLNTSEPTEPKDPESDSEIQEYQFLDQEDWGPQRTSKEIRQLQNDCMRLRESLNTTQVHNLALGEKLQNLPTLLYKSLKEGAQAIQEEAQAIQDEVKALQEESQALPEVALLRCAGSHGSGEGRGGCPMLLTRAVSACSDPNPRKAGLLFKLPDLPHDHRDQGQAWPGPRPEVGHLLGRPLLQPAPP

SEQ ID NO: 18535 - protein, 143 aa, Homo sapiens
MKHRLGFLLQKSDSCEHNSSHNKKDKVVICQRVSQEEVKKWAESLENLISHECGLAAFKAFLKSEYSEENIDFWISCEEYKKIKSPSKLSPKAKKIYNEFISVQATKEVNLDSCTREETSRNMLEPTITCFDEAQKKIFNLME

SEQ ID NO: 18536 - protein, 662 aa, Homo sapiens
MFLFVLANFSMATFMDPGIFPRAEEDEDKEDDFRAPLYKTVEIKGIQVRMKWCATCRFYRPPRCSHCSVCDNCVEEFDHHCPWVNNCIGRRNYRYFFLFLLSLTAHIMGVFGFGLLYVLYHIEELSGVRTAVTMAVMCVAGLFFIPVAGLTGFHVVLVARGRTTNEQVTGKFRGGVNPFTNGCCNNVSRVLCSSPAPRYLGRPKKEKTIVIRPPFLRPEVSDGQITVKIMDNGIQGELRRTKSKGSLEITESQSADAEPPPPPKPDLSRYTGLRTHLGLATNEDSSLLAKDSPPTPTMYKYRPGYSSSSTSAAMPHSSSAKLSRGDSLKEPTSIAESSRHPSYRSEPSLEPESFRSPTFGKSFHFDPLSSGSRSSSLKSAQGTGFELGQLQSIRSEGTTSTSYKSLANQTRNGSLSYDSLLTPSDSPDFESVQAGPEPDPPLGYTSPFLSARLAQQREAERHPRLVPTGPTHREPSPVRYDNLSRHIVASLQEREKLLRQSPPLPGREEEPGLGDSGIQSTPGSGHAPRTSSSSDDSKRSPLGKTPLGRPAVPRFGKPDGLRGRGVGSPEPGPTAPYLGRSMSYSSQKAQPGVSETEEVALQPLLTPKDEVQLKTTYSKSNGQPKSLGSASPGPGQPPLSSPTRGGVKKVSGVGGTTYEISV

SEQ ID NO: 18537 - protein, 417 aa, Homo sapiens
MGGVGEPGPREGPAQPGAPLPTFCWEQIRAHDQPGDKWLVIERRVYDISRWAQRHPGGSRLIGHHGAEDATDAFRAFHQDLNFVRKFLQPLLIGELAPEEPSQDGPLNAQLVEDFRALHQAAEDMKLFDASPTFFAFLLGHILAMEAQSWCLQHDLGHASIFKKSWWNHVAQKFVMGQLKGFSAHWWNFRHFQHHAKPNIFHKDPDVTVAPVFLLGESSVEYGKKKRRYLPYNQQHLYFFLIGPPLLTLVNFEVENLAYMLVCMQWADLLWAASFYARFFLSYLPFYGVPGVLLFFVAVRVLESHWFVWITQMNHIPKEIGHEKHRDWVSSQLAATCNVEPSLFTNWFSGHLNFQIEHHLFPRMPRHNYSRVAPLVKSLCAKHGLSYEVKPFLTALVDIVRSLKKSGDIWLDAYLHQ

SEQ ID NO: 18538 - protein, 398 aa, Homo sapiens
FQDLLDQVGGLGRFQILQMVFLIMFNVIVYHQTQLENFAAFILDHRCWVHILDNDTIPDNDPGTLSQDALLRISIPFDSNLRPEKCRRFVHPQWKLIHLNGTFPNTSEPDTEPCVDGWVYDQSSFPSTIVTKWDLVCESQPLNSVAKFLFMAGMMVGGNLYGHLSDRFGRKFVLRWSYLQLAIVGTCAAFAPTILVYCSLRFLAGAATFSIIVNTVLLIVEWITHQFCAMALTLTLCAASIGHITLGSLAFVIRDQCILQLVMSAPCFVFFLFSRWLAESARWLIINNKPEEGLKELRKAAHRNGMKNAEDILTMEVLKSTMKQELEAAQKKHSLCELLRIPNICKRICFLSFVRSAGVCWRSTPDPVCLGITSGGCRTAKIPACSFLWKLHFRGAPA

SEQ ID NO: 18539 - protein, 879 aa, Homo sapiens
MANGTLTRRHQNGRFVGDADLERQKFSDLKLNGPQDHSHLLYSTIPRMQEPGQIVETYTEEDPEGAMSVVSVETSDDGTTRRTETTVKKVVKTVTTRTVQPVAMGPDGLPVDASSVSNNYIQTLGRDFRKNGNGGPGPYVGQAGTATLPRNFHYPPDGYSRHYEDGYPGGSDNYGSLSRVTRIEERYRPSMEGYRAPSRQDVYGPQPQVRVGGSSVDLHRFHPEPYGLEDDQRSMGYDDLDYGMMSDYGTARRTGTPSDPRRRLRSYEDMIGEEVPSDQYYWAPLAQHERGSLASLDSLRKGGPPPPNWRQPELPEVIAMLGFRLDAVKSNAAAYLQHLCYRNDKVKTDVRKLKGIPVLVGLLDHPKKEVHLGACGALKNISFGRDQDNKIAIKNCDGVPALVRLLRKARDMDLTEVITGTLWNLSSHDSIKMEIVDHALHALTDEVIIPHSGWEREPNEDCKPRHIEWESVLTNTAGCLRNVSSERSEARRKLRECDGLVDALIFIVQAEIGQKDSDSKLVENCVCLLRNLSYQVHREIPQAERYQEAAPNVANNTGPHAASCFGAKKGKGKKPIEDPANDTVDFPKRTSPARGYELLFQPEVVRIYISLLKESKTPAILEASAGAIQNLCAGRWTYGRYIRSALRQEKALSAIADLLTNEHERVVKAASGALRNLAVDARNKELIGKHAIPNLVKNLPGGQQNSSWNFSEDTVISILNTINEVIAENLEAAKKLRETQGIEKLVLINKSGNRSEKEVRAAALVLQTIWGYKELRKPLEKEGWKKSDFQVNLNNASRSQSSHSYDDSTLPLIDRNQKSDKKPDREEIQMSNMGSNTKSLDNNYSTPNERGDHNRTLDRSGDLGDMEPLKGTTPLMQKI

SEQ ID NO: 18540 - protein, 115 aa, Homo sapiens
FYNYMMGIEFNPRIGKWFDFKLFFNGRPGIVAWTLINLSFAAKQRELHSHVTNAMVLVNVLQAIYVIDFFWNETWYLKTIDICHDHFGWYLGWGDCVWLPYLYTLQMRNAAVEAE

SEQ ID NO: 18541 - protein, 169 aa, Homo sapiens
MAYNDTDRNQTEKLLKRVRELEQEVQRLKKEQAKNKEDSNIRENSAGAGKTKRAFDFSAHGRRHVALRIAYMGWGYQGFASQENTNNTIEEKLFEALTKTRLVESRQTSNYHRCGRTDKGVSAFGQVISLDLRSQFPRGRDSEDFNVKEEANAAAEEIRYTHILNRVLP

SEQ ID NO: 18542 - protein, 343 aa, Homo sapiens
MEESKTLKSENHEPKKNVICEESKAVQVIGNQTLKARNDKSVKEIENSSPNRNSSKKNKQNDICIEKTEVKSCKVNAANLPGPKDLGLVLRDQSHCKAKKFPNSPVKAEKATISQAKSEKATSLQAKAEKSPKSPNSVKAEKASSYQMKSEKVPSSPAEAEKGPSLLLKDMRQKTELQQIGKKIPSSFTSVDKVNIEAVGGEKCALQNSPRSQKQQTCTDNTGDSDDSASGIEDVSDDLSKMKNDESNKENSSEMDYLENATVIDESALTPEQRLGLKQAEERLERDHIFRLEKRSPEYTNCRYLCKLCLIHIENIQGAHKHIKEKRHKKNILNVHLGCMAHL

SEQ ID NO: 18543 - protein, 640 aa, Homo sapiens
MFSCVKPYEDQNYSALRRDCRRRKVLFEDPLFPATDDSLYYKGTPGPAVRWKRPKGICEDPRLFVDGISSHDLHQGQVGNCWFVAACSSLASRESLWQKVIPDWKEQEWDPEKPNAYAGIFHFHFWRFGEWVDVVIDDRLPTVNNQLIYCHSNSRNEFWCALVEKAYAKLAGCYQALDGGNTADALVDFTGGVSEPIDLTEGDFANDETKRNQLFERMLKVHSRGGLISASIKAVTAADMEARLACGLVKGHAYAVTDVRKVRLGHGLLAFFKSEKLDMIRLRNPWGEREWNGPWSDTSEEWQKVSKSEREKMGVTVQDDGEFWMTFEDVCRYFTDIIKCRVINTSHLSIHKTWEEARLHGAWTLHEDPRQNRGGGCINHKDTFFQNPQYIFEVKKPEDEVLICIQQRPKRSTRREGKGENLAIGFDIYKVEENRQYRMHSLQHKAASSIYINSRSVFLRTDQPEGRYVIIPTTFEPGHTGEFLLRVFTDVPSNCRELRLDEPPHTCWSSLCGYPQLVTQVHVLGAAGLKDSPTGANSYVIIKCEGDKVRSAVQKGTSTPEYNVKGIFYRKKLSQPITVQVWNHRVLKDEFLGQVHLKADPDNLQALHTLHLRDRNSRQPSNLPGTVAVHILSSTSLMAV

SEQ ID NO: 18544 - protein, 367 aa, Homo sapiens
MGEGTINGLLDELLQTRVLNKEEMEKVKRENATVMDKTRALIDSVIPKGAQACQICITYICEEDSYLAGTLGLSAAPQAVQDNPAMPTSSGSEGNVKLCSLEEAQRIWKQKSAEIYPIMDKSSRTRLALIICNEEFDSIPRRTGAEVDITGMTMLLQNLGYSVDVKKNLTASDMTTELEAFAHRPEHKTSDSTFLVFMSHGIREGICGKKHSEQVPDILQLNAIFNMLNTKNCPSLKDKPKVIIIQACRGDSPGVVWFKDSVGVSGNLSLPTTEEFEDDAIKKAHIEKDFIAFCSSTPDNVSWRHPTMGSVFIGRLIEHMQEYACSCDVEEIFRKVRFSFEQPDGRAQMPTTERVTLTRCFYLFPGH

SEQ ID NO: 18545 - protein, 224 aa, Homo sapiens
PGISPPPEKQKRKKKKMPEILSLRGRQRAHSKLANKPVVQPVEEQEPKGPQASEERNLEPPSSEQLEPTVTFLFTLLNTSEPTEPKDPESDSEIQEYQFLDQEDWGPQRTSKEIRQLQNDCMRLRESLNTTQVHNLALGEKLQNLPTLLYKSLKEGAQAIQEEAQAIQDEVKALQEESQALPEVALLSDPNPRKAGLLFKLPDLPHDHRDQGQAWPGPRPEVGH

SEQ ID NO: 18546 - protein, 822 aa, Homo sapiens
MRLALLWALGLLGAGSPLPSWPLPNIGGTEEQQAESEKAPREPLEPQVLQDDLPISLKKVLQTSLPEPLRIKLELDGDSHILELLQNRELVPGRPTLVWYQPDGTRVVSEGHTLENCCYQGRVRGYAGSWVSICTCSGLRGLVVLTPERSYTLEQGPGDLQGPPIISRIQDLHLPGHTCALSWRESVHTQKPPEHPLGQRHIRRRRDVVTETKTVELVIVADHSEAQKYRDFQHLLNRTLEVALLLDTFFRPLNVRVALVGLEAWTQRDLVEISPNPAVTLENFLHWRRAHLLPRLPHDSAQLVTGTSFSGPTVGMAIQNSICSPDFSGGVNMDHSTSILGVASSIAHELGHSLGLDHDLPGNSCPCPGPAPAKTCIMEASTDFLPGLNFSNCSRRALEKALLDGMGSCLFERLPSLPPMAAFCGNMFVEPGEQCDCGFLDDCVDPCCDSLTCQLRPGAQCASDGPCCQNCQLRPSGWQCRPTRGDCDLPEFCPGDSSQCPPDVSLGDGEPCAGGQAVCMHGRCASYAQQCQSLWGPGAQPAAPLCLQTANTRGNAFGSCGRNPSGSYVSCTPRDAICGQLQCQTGRTQPLLGSIRDLLWETIDVNGTELNCSWVHLDLGSDVAQPLLTLPGTACGPGLVCIDHRCQRVDLLGAQECRSKCHGHGVCDSNRHCYCEEGWAPPDCTTQLKATSSLTTGLLLSLLVLLVLVMLGASYWYRARLHQRLCQLKGPTCQYRAAQSGPSERPGPPQRALLARGTKQASALSFPAPPSRPLPPDPVSKRLQAELADRPNPPTRPLPADPVVRSPKVTVGGEKGTASPPT

SEQ ID NO: 18547 - protein, 803 aa, Homo sapiens
MTELKAKGPRAPHVAGGPPSPEVGSPLLCRPAAGPFPGSQTSDTLPEVSAIPISLDGLLFPRPCQGQDPSDEKTQDQQSLSDVEGAYSRAEATRGAGGSSSSPPEKDSGLLDSVLDTLLAPSGPGQSQPSPPACEVTSSWCLFGPELPEDPPAAPATQRVLSPLMSRSGCKVGDSSGTAAAHKVLPRGLSPARQLLLPASESPHWSGAPVKPSPQAAAVEVEEEDGSESEESAGPLLKGKPRALGGAAAGGGAAAVPPGAAAGGVALVPKEDSRFSAPRVALVEQDAPMAPGRSPLATTVMDFIHVPILPLNHALLAARTRQLLEDESYDGGAGAASAFAPPRSSPCASSTPVAVGDFPDCAYPPDAEPKDDAYPLYSDFQPPALKIKEEEEGAEASARSPRSYLVAGANPAAFPDFPLGPPPPLPPRATPSRPGEAAVTAAPASASVSSASSSGSTLECILYKAEGAPPQQGPFAPPPCKAPGASGCLLPRDGLPSTSASAAAAGAAPALYPALGLNGLPQLGYQAAVLKEGLPQVYPPYLNYLRPDSEASQSPQYSFESLPQKICLICGDEASGCHYGVLTCGSCKVFFKRAMEGQHNYLCAGRNDCIVDKIRRKNCPACRLRKCCQAGMVLGGRKFKKFNKVRVVRALDAVALPQPVGVPNESQALSQRFTFSPGQDIQLIPPLINLLMSIEPDVIYAGHDNTKPDTSSSLLTSLNQLGERQLLSVVKWSKSLPGFRNLHIDDQITLIQYSWMSLMVFGLGWRSYKHVSGQMLYFAPDLILNESHRSLSSFKLAKKSSSV

SEQ ID NO: 18548 - protein, 516 aa, Homo sapiens
MPNVLLPPKESNLFKRILKCYEQKQYKNGLKFCKMILSNPKFAEHGETLAMKGLTLNCLGKKEEAYEFVRKGLRNDVKSHVCWHVYGLLQRSDKKYDEAIKCYRNALKLDKDNLQILRDLSLLQIQMRDLEGYRETRYQLLQLRPTQRASWIGYAIAYHLLKDYDMALKLLEEFRQTQQVPPNKIDYEYSELILYQNQVMREADLLQESLEHIEMYEKQICDKLLVEEIKGEILLKLGRLKEASEVFKNLIDRNAENWCYYEGLEKALQISTLEERLQIYEEISKQHPKAITPRRLPLTLVPGERFRELMDKFLRVNFSKGCPPLFTTLKSLYYNTEKVSIIQELVTNYEASLKTCDFFSPYENGEKEPPTTLLWVQYFLAQHFDKLGQYSLALDYINAAIASTPTLIELFYMKAKIYKHIGNLKEAAKWMDEAQSLDTADRFINSKCAKYMLRANMIKEAEEMCSKFTREGTSAMENLNEMQCMWFQTECISAYQRLGRYGDALKKCHEVERVSC

SEQ ID NO: 18549 - protein, 1122 aa, Homo sapiens
GDGGKMAAAGALERSFVELSGAERERPRHFREFTVCSIGTANAVAGAVKYSESAGGFYYVESGKLFSVTRNRFIHWKTSGDTLELMEESLDINLLNNAIRLKFQNCSVLPGGVYVSETQNRVIILMLTNQTVHRLLLPHPSRMYRSELVVDSQMQSIFTDIGKVDFTDPCNYQLIPAVPGISPNSTASTAWLSSDGEALFALPCASGGIFVLKLPPYDIPGMVSVVELKQSSVMQRLLTGWMPTAIRGDQSPSDRPLSLAVHCVEHDAFIFALCQDHKLRMWSYKEQMCLMVADMLEYVPVKKDLRLTAGTGHKLRLAYSPTMGLYLGIYMHAPKRGQFCIFQLVSTESNRYSLDHISSLFTSQETLIDFALTSTDIWALWHDAENQTVVKYINFEHNVAGQWNPVFMQPLPEEEIVIRDDQDPREMYLQSLFTPGQFTNEALCKALQIFCRGTERNLDLSWSELKKEVTLAVENELQGSVTEYEFSQEEFRNLQQEFWCKFYACCLQYQEALSHPLALHLNPHTNMVCLLKKGYLSFLIPSSLVDHLYLLPYENLLTEDETTISDDVDIARDVICLIKCLRLIEESVTVDMSVIMEMSCYNLQSPEKAAEQILEDMITIDVENVMEDICSKLQEIRNPIHAIGLLIREMDYETEVEMEKGFNPAQPLNIRMNLTQLYGSNTAGYIVCRGVHKIASTRFLICRDLLILQQLLMRLGDAVIWGTGQLFQAQQDLLHRTAPLLLSYYLIKWGSECLATDVPLDTLESNLQHLSVLELTDSGALMANRFVSSPQTIVELFFQEVARKHIISHLFSQPKAPLSQTGLNWPEMITAITSYLLQLLWPSNPGCLFLECLMGNCQYVQLQDYIQLLHPWCQVNVGSCRFMLGRCYLVTGEGQKALECFCQAASEVGKEEFLDRLIRSEDGEIVSTPRLQYYDKVLRLLDVIGLPELVIQLATSAITEAGDDWKSQATLRTCIFKHHLDLGHNSQAYEALTQIPDSSRQLDCLRQLVVVLCERSQLQDLVEFPYVNLHNEVVGIIESRARAVDLMTHNYYELLYAFHIYRHNYRKAGTVMFEYGMRLGREVRTLRGLEKQGNCYLAALNCLRLIRPEYAWIVQPVSGAVV

SEQ ID NO: 18550 - protein, 835 aa, Homo sapiens
MNYIASSGPLFKDGKKRIDYILVYRKTNIQYDKRNTFEKNLRAEGLMLEKEPAIASPDIMFIKIHIPWDTLCKYAERLNIRMPFRKKCYYTDGRSKSMGRMQTYFRRIKNWMAQNPMVLDKSAFPDLEESDCYTGPFSRARIHHFIINNKDTFFSNATRSRIVYHMLERTKYENGISKVGIRKLINNGSYIAAFPPHEGAYKSSQPIKTHGPQNNRHLLYERWARWGMWYKHQPLDLIRLYFGEKIGLYFAWLGWYTGMLIPAAIVGLCVFFYGLFTMNNSQVSQEICKATEVFMCPLCDKNCSLQRLNDSCIYAKVTYLFDNGGTVFFAIFMAIWATVFLEFWKRRRSILTYTWDLIEWEEEEETLRPQFEAKYYKMEIVNPITGKPEPHQPSSDKVTRLLVSVSGIFFMISLVITAVFGVVVYRLVVMEQFASFKWNFIKQYWQFATSAAAVCINFIIIMLLNLAYEKIAYLLTNLEYPRTESEWENSFALKMFLFQFVNLNSSIFYIAFFLGRFVGHPGKYNKLFDRWRLEECHPSGCLIDLCLQMGVIMFLKQIWNNFMELGYPLIQNWWSRHKIKRGIHDASIPQWENDWNLQPMNLHGLMDEYLEMVLQFGFTTIFVAAFPLAPLLALLNNIIEIRLDAYKFVTQWRRPLPARATDIGIWLGILEGIGILAVITNAFVIAITSDYIPRFVYEYKYGPCANHVEPSENCLKGYVNNSLSFFDLSELGMGKSGYCRYRDYRGPPWSSKPYEFTLQYWHILAARLAFIIVFEHLVFGIKSFIAYLIPDVPKGLHDRIRREKYLVQEMMYEAELEHLQQQRRKSGQPVHHEWP

SEQ ID NO: 18551 - protein, 135 aa, Homo sapiens
ERGDSEPTPGCSGLGPGGVRGFGDGGGAPSWAPEDAWMGTHPKYLEMMELDIGDATQVYVAFLVYLDLMESKSWHEVNCVGLPELQLICLVGTEIEGEGLQTVVPTPITASLSHNRYWRATFEEGKYLATLKDLH

SEQ ID NO: 18552 - protein, 337 aa, Homo sapiens
MNESPQTNEFKGTTEEAPAKESPHTSEFKGAALVSPISKRWTHLVRLLRLIILIRIFHLLHQKRQLEKLMRRLVSENKRRYTRDGFDLDLTYVTERIIAMSFPSSGRQSFYRNPIEEVVRFLDKKHRNHYRVYNLCSERAYDPKHFHNRVSRIMIDDHNVPTLHEMVVFTKEVNEWMAQDLENIVAIHCKGGKGRTGTMVCALLIASEIFLTAEESLYYFGERRTNKTHSNKFQGVETPSQNRYVGYFAQVKHLYNWNLPPRRILFIKRFIIYSIRGDVCDLKVQVVMEKKVVFSSTSLGNCSREEGSTQGQLEGGAIQETCARLMGGSNSEREGGT

SEQ ID NO: 18553 - protein, 196 aa, Homo sapiens
GVGEAAQGGEPGQPAQPPPQPHPPPPQQQHKEEMAAEAGEAVASPMDDGDRAEWADIDPVPQNDGPNPVVQIIYSDKFRDVYDYFRAVLQRDERSERAFKLTRDAIELNAANYTVWHFRRVLLKSLQKDLHEEMNYITAIIEEQPKNYQVWHHRRVLVEWLRDPSQELEFIADILNQDAKNYHAWQHRQWVIQEFK

SEQ ID NO: 18554 - protein, 550 aa, Homo sapiens
METDLNSQDRKDLDKFIKFFALKTVQVIVQARLGEKICTRSSSSPTGSDWFNLAIKDIPEVTHEAKKALAGQLPAVGRSMCVEISLKTSEGDSMELEIWCLEMNEKCDKEIKVSYTVYNRLSLLLKSLLAITRVTPAYRLSRKQGHEYVILYRIYFGEVQLSGLGEGFQTVRVGTVGTPVGTITLSCAYRINLAFMSTRQFERTPPIMGIIIDHFVDRPYPSSSPMHPCNYRTAGEDTGVIYPSVEDSQEVCTTSFSTSPPSQCVFTVTKAHFQTPTPVVTDTLRVPMAGLAFSHQLSSSRLSYQPAALGVGSADLAYPVVFAAGLNATHPHQLMVPGKEGGVPLAPNQPVHGTQADQERLATCTPSDRTHCAATPSSSEDTETVSNSSEGRASPHDVLETIFVRKVGAFVNKPINQVTLTSLDIPFAMFAPKNLELEDTDPMVNPPDSPETESPLQGSLHSDGSSGGSSGNTHDDFVMIDFKPAFSKDDILPMDLGTFYREFQNPPQLSSLSIDIGAQSMAEDLDSLPEKLAVHEKNVREFDAFVETLQ

SEQ ID NO: 18555 - protein, 202 aa, Homo sapiens
MATRRLTDAFLLLRNNSIQNRQLLAEQELDELADDRMALVSGISLDPEAAIGVTKRPPPKWVDGVDEIQYDVGRIKQKMKELASLHDKHLNRPTLDDSSEEEHAIEITTQEITQLFHRCQRAVQALPSRARACSEQEGRLLGNVVASLAQALQELSTSFRHAQSGYLKRMKNREERSQHFFDTSVPLMDDGDDNTLYHRRTS

SEQ ID NO: 18556 - protein, 305 aa, Homo sapiens
MSNTNGSAITEFILLGLTDCPELQSLLFVLFLVVYLVTLLGNLGMIMLMRLDSRLHTPMYFFLTNLAFVDLCYTSNATPQMSTNIVSEKTISFAGCFTQCYIFIALLLTEFYMLAAMAYDRYVAIYDPLRYSVKTSRRVCICLATFPYVYGFSDGLFQAILTFRLTFCRSSVINHFYCADPPLIKLSCSDTYVKEHAMFISAGFNLSSSLTIVLVSYAFILAAILRIKSAEGRHKAFSTCGSHMMAVTLFYGTLFCMYIRPPTDKTVEESKIIAVFYTFVSPVLNPLIYSLRNKDVKQALKNVLR

SEQ ID NO: 18557 - protein, 209 aa, Homo sapiens
MVSKSRWKLLAMLALVLVVMVWYSISREDRYIELFYFPIPEKKEPCLQGEAESKASKLFGNYSRDQPIFLRLEDYFWVKTPSAYELPYGTKGSEDLLLRVLAITSSSIPKNIQSLRCRRCVVVGNGHRLRNSSLGDAINKYDVVIRLNNAPVAGYEGDVGSKTTMRLFYPESAHFDPKVENNPDTLLVLVAFKAMDFHWIETILSDKKR

SEQ ID NO: 18558 - protein, 904 aa, Homo sapiens
MGMDLTCPFGISPACGAQASWSIFGADAAEVPGTRGHSQQEAAMPHIPEDEEPPGEPQAAQSPAGQGPPAAGVSCSPTPTIVLTGDATSPEGETDKNLANRVHSPHKRLSHRHLKVSTASLTSVDPAGHIIDLVNDQLPDISISEEDKKKNLALLEEAKLVSERFLTRRGRKSRSSPGDSPSAVSPNLSPSASPTSSRSNSLTVPTPPGLDVCSGPPSPLPGAPPQQKGDEADVSSPHPGEPNVPKGLADRKQNDQRKVSQGRLAPRPPPVEKSKEIAIEQKENFDPLQYPETTPKGLAPVTNSSGKMALNSPQPGPVESELGKQLLKTGWEGSPLPRSPTQDAAGVGPPASQGRGPAGEPMGPEAGSKAELPPTVSRPPLLRGLSWDSGPEEPGPRLQKVLAKLPLAEEEKRFAGKAGGKLAKAPGLKDFQIQVQPVRMQKLTKLREEHILMRNQNLVGLKLPDLSEAAEQEKGLPSELSPAIEEEESKSGLDVMPNISDVLLRKLRVHRSLPGSAPPLTEKEVENVFVQLSLAFRNDSYTLESRINQAERERNLTEENTEKELENFKASITSSASLWHHCEHRETYQKLLEDIAVLHRLAARLSSRAEVVGAVRQEKRMSKATEVMMQYVENLKRTYEKDHAELMEFKKLANQNSSRSCGPSEDGVPRTARSMSLTLGKNMPRRRVSVAVVPKFNALNLPGQTPSSSSIPSLPALSESPNGKGSLPVTSALPALLENGKTNGDPDCEASAPALTLSCLEELSQETKARMEEEAYSKGFQEGLKKTKELQDLKEEEEEQKSESPEEPEEVEETEEEEKGPRSSKLEELVHFLQVMYPKLCQHWQVIWMMAAVMLVLTVVLGLYNSYNSCAEQADGPLGRSTCSAAQRDSWWSSGLQHEQPTEQ

SEQ ID NO: 18559 - protein, 737 aa, Homo sapiens
MNTSGDPAQTGPEGCRGTMSAEEDARWLRWVTQQFKTIAGEDGEISLQEFKAALHVKESFFAERFFALFDSDRSGTITLQELQEALTLLIHGSPMDKLKFLFQVYDIDGSGSIDPDELRTVLQSCLRESAISLPDEKLDQLTLALFESADADGNGAITFEELRDELQRFPGVMENLTISAAHWLTAPAPRPRPRRPRQLTRAYWHNHRSQLFCLATYAGLHVLLFGLAASAHRDLGASVMVAKGCGQCLNFDCSFIAVLMLRRCLTWLRATWLAQVLPLDQNIQFHQLMGYVVVGLSLVHTVAHTVNFVLQAQAEASPFQFWELLLTTRPGIGWVHGSASPTGVALLLLLLLMFICSSSCIRRSGHFEVFYWTHLSYLLVWLLLIFHGPNFWKWLLVPGILFFLEKAIGLAVSRMAAVCIMEVNLLPSKVTHLLIKRPPFFHYRPGDYLYLNIPTIARYEWHPFTISSAPEQKDTIWLHIRSQGQWTNRLYESFKASDPLGRGSKRLSRSVTMRKSQRSSKGSEILLEKHKFCNIKCYIDGPYGTPTRRIFASEHAVLIGAGIGITPFASILQSIMYRHQKRKHTCPSCQHSWIEGVQDNMKLHKVDFIWINRDQRSFEWFVSLLTKLEMDQAEEAQYGRFLELHMYMTSALGKNDMKAIGLQMALDLLANKEKKDSITGLQTRTQPGRPDWSKVFQKVAAEKKGKVQVFFCGSPALAKVLKGHCEKFGFRFFQENF

SEQ ID NO: 18560 - protein, 136 aa, Homo sapiens
MAATMKKAAAEDVNVTFEDQQKINKFARNTSRITELKEEIEVKKKQLQNLEDACDDIMLADDDCLMIPYQIGDVFISHSQEETQEMLEEAKKNLQEEIDALESRVESIQRVLADLKVQLYAKFGSNINLEADERNT

SEQ ID NO: 18561 - protein, 185 aa, Homo sapiens
MQTDEEIGKVAAAVPVIISRALELFLESLLKKACQVTQSRNAKTMTTSHLKQCIELEQQFDFLKDLVASVPDMQGDGEDNHMDGDKGARRGRKPGSGGRKNGGMGTKSKDKKLSGTDSEQEDESEDTDTDGEEETSQPPPQASHPSAHFQSPPTPFLPFASTLPLPPAPPGPSAPDEEDEEDYDS

SEQ ID NO: 18562 - protein, 946 aa, Homo sapiens
MARGADVPEIPGDLTLKTCGSTASMKVKHVKKLPFTKGHFPKMAECAHFHYENVEFGSIQLSLSEEQNEVMKNGCESKELVYLVQIACQGKSWIVKRSYEDFRVLDKHLHLCIYDRRFSQLSELPRSDTLKDSPESVTQMLMAYLSRLSAIAGNKINCGPALTWMEIDNKGNHLLVHEESSINTPAVGAAHVIKRYTARAPDELTLEVGDIVSVIDMPPKVLSTWWRGKHGFQVGLFPGHCVELINQKVPQSVTNSVPKPVSKKHGKLITFLRTFMKSRPTKQKLKQRGILKERVFGCDLGEHLLNSGFEVPQVLQSCTAFIERYGIVDGIYRLSGVASNIQRLRHEFDSEHVPDLTKEPYVQDIHSVGSLCKLYFRELPNPLLTYQLYEKFSDAVSAATDEERLIKIHDVIQQLPPPHYRTLEFLMRHLSLLADYCSITNMHAKNLAIVWAPNLLRSKQIESACFSGTAAFMEVRIQSVVVEFILNHVDVLFSGRISMAMQEGAASLSRPKSLLVSSPSTKLLTLEEAQARTQAQVNSPIVTENKYIEVGEGPAALQGKFHTIIEFPLERKRPQNKMKKSPVGSWRSFFNLGKSSSVSKRKLQRNESEPSEMKAMALKGGRAEGTLRSAKSEESLTSLHAVDGDSKLFRPRRPRSSSDALSASFNGEMLGNRCNSYDNLPHDNESEEEGGLLHIPALMSPHSAEDVDLSPPDIGVASLDFDPMSFQCSPPKAESECLESGASFLDSPGYSKDKPSANKKDAETGSSQCQTPGSTASSEPVSPLQEKLSPFFTLDLSPTEDKSSKPSSFTEKVVYAFSPKIGRKLSKSPSMSISEPISVTLPPRVSEVIGTVSNTTAQNASSSTWDKCVEERDATNRSPTQIVKMKTNETVAQEAYESEVQPLDQVAAEEVELPGKEDQSVSSSQSKAVASGQTQTGTVCFPPFFL

SEQ ID NO: 18563 - protein, 740 aa, Homo sapiens
MAESRGRLYLWMCLAAALASFLMGFMVGWFIKPLKETTTSVRYHQSIRWKLVSEMKAENIKSFLRSFTKLPHLAGTEQNFLLAKKIQTQWKKFGLDSAKLVHYDVLLSYPNETNANYISIVDEHETEIFKTSYLEPPPDGYENVTNIVPPYNAFSAQGMPEGDLVYVNYARTEDFFKLEREMGINCTGKIVIARYGKIFRGNKVKNAMLAGAIGIILYSDPADYFAPEVQPYPKGWNLPGTAAQRGNVLNLNGAGDPLTPGYPAKEYTFRLDVEEGVGIPRIPVHPIGYNDAEILLRYLGGIAPPDKSWKGALNVSYSIGPGFTGSDSFRKVRMHVYNINKITRIYNVVGTIRGSVEPDRYVILGGHRDSWVFGAIDPTSGVAVLQEIARSFGKLMSKGWRPRRTIIFASWDAEEFGLLGSTEWAEENVKILQERSIAYINSDSSIEGNYTLRVDCTPLLYQLVYKLTKEIPSPDDGFESKSLYESWLEKDPSPENKNLPRINKLGSGSDFEAYFQRLGIASGRARYTKNKKTDKYSSYPVYHTIYETFELVEKFYDPTFKKQLSVAQLRGALVYELVDSKIIPFNIQDYAEALKNYAASIYNLSKKHDQQLTDHGVSFDSLFSAVKNFSEAASDFHKRLIQVDLNNPIAVRMMNDQLMLLERAFIDPLGLPGKLFYRHIIFAPSSHNKYAGESFPGIYDAIFDIENKANSRLAWKEVKKHISIAAFTIQAAAGTLKEVL

SEQ ID NO: 18564 - protein, 84 aa, Homo sapiens
MPVKKKRKSPGVAAAVAEDGGLKKCKISSYCRSQPPARLISGEEHFSSKKCLAWFYEYAGPDEVVGPEGMEKFCEDIGVEPENV

SEQ ID NO: 18565 - protein, 466 aa, Homo sapiens
MMSEHDLADVVQIAVEDLSPDHPVVLENHVVTDEDEPALKRQRLEINCQDPSIKSFLYSINQTICLRLDSIEAKLQALEATCKSLEEKLDLVTNKQHSPIQVPMVAGSPLGATQTCNKVRCAVPGRRQNTIVVKVPGQEDSHHEDGESGSEASDSVSSCGQAGSQSIGSNVTLITLNSEEDYPNGTWLGDENNPEMRVRCAIIPSDMLHISTNCRTAEKMALTLLDYLFHREVQAVSNLSGQGKHGKKQLDPLTIYGIRCHLFYKFGITESDWYRIKQSIDSKCRTAWRRKQRGQSLAVKSFSRRTPNSSSYCPSEPMMSTPPPASELPQPQPQPQALHYALANAQQVQIHQIGEDGQVQVGHLHIAQVPQGEQVQITQDSEGNLQIHHVGQDGQVLQGAQLIAVASSDPAAAGVDGSPLQGSDIQVQYVQLAPVSDHTAGAQTAEALQPTLQPEMQLEHGAIQIQ

SEQ ID NO: 18566 - protein, 135 aa, Homo sapiens
MTMTANKNSSITHGAGGTKAPRGTLSRKSFEFEDASSLQSLYPSSPTENGTENQPKFGSKSTLEENAYEDIVGDLPKENPYEDVDLKSRRAGRKSQQLSENSLDSLHRMWSPQDRKYNSPPTQLSLKPNSQSLRS

SEQ ID NO: 18567 - protein, 377 aa, Homo sapiens
MDELFPLIFPAEPAQASGPYVEIIEQPKQRGMRFRYKCEGRSAGSIPGERSTDTTKTHPTIKINGYTGPGTVRISLVTKDPPHRPHPHELVGKDCRDGFYEAELCPDRCIHSFQNLGIQCVKKRDLEQAISQRIQTNNNPFQVPIEEQRGDYDLNAVRLCFQVTVRDPSGRPLRLPPVLSHPIFDNRAPNTAELKICRVNRNSGSCLGGDEIFLLCDKVQKEDIEVYFTGPGWEARGSFSQADVHRQVAIVFRTPPYADPSLQAPVRVSMQLRRPSDRELSEPMEFQYLPDTDDRHRIEEKRKRTYETFKSIMKKSPFSGPTDPRPPPRRIAVPSRSSASVPKPGKDFLLSHWNDRFSSVQLRSSGDEDSWAPLQTY

SEQ ID NO: 18568 - protein, 875 aa, Homo sapiens
MEPWKQCAQWLIHCKVLPTNHRVTWDSAQVFDLAQTLRDGVLLCQLLNNLRAHSINLKEINLRPQMSQFLCLKNIRTFLTACCETFGMRKSELFEAFDLFDVRDFGKVIETLSRLSRTPIALATGIRPFPTEESINDEDIYKGLPDLIDETLVEDEEDLYDCVYGEDEGGEVYEDLMKAEEAHQPKCPENDIRSCCLAEIKQTEEKYTETLESIEKYFMAPLKRFLTAAEFDSVFINIPELVKLHRNLMQEIHDSIVNKNDQNLYQVFINYKERLVIYGQYCSGVESAISSLDYISKTKEDVKLKLEECSKRANNGKFTLRDLLVVPMQRVLKYHLLLQELVKHTTDPTEKANLKLALDAMKDLAQYVNEVKRDNETLREIKQFQLSIENLNQPVLLFGRPQGDGEIRITTLDKHTKQERHIFLFDLAVIVCKRKGDNYEMKEIIDLQQYKIANNPTTDKENKKWSYGFYLIHTQGQNGLEFYCKTKDLKKKWLEQFEMALSNIRPDYADSNFHDFKMHTFTRVTSCKVCQMLLRGTFYQGYLCFKCGARAHKECLGRVDNCGRVNSGEQGTLKLPEKRTNGLRRTPKQVDPGLPKMQVIRNYSGTPPPALHEGPPLQLQAGDTVELLKGDAHSLFWQGRNLASGEVGFFPSDAVKPCPCVPKPVDYSCQPWYAGAMERLQAETELINRVNSTYLVRHRTKESGEYAISIKYNNEAKHIKILTRDGFFHIAENRKFKSLMELVEYYKHHSLKEGFRTLDTTLQFPYKEPEHSAGQRGNRAGNSSPSLFCGFSFVTPPDYSFVPPSSTPFWSVLSPKVLGIAIARYDFCARDMRELSLLKGDVVKIYTKMSANGWWRGEVNGRVGWFPSTYVEEDE

SEQ ID NO: 18569 - protein, 1982 aa, Homo sapiens
MSLSFLNDEEARKILQVLERNEELQRAEKDRISKLQKTKRDIRWLQGVTGEWFEEIQRKKFCNETDVSQMLKQPLTYRLSKEMAKNDPIELPTSRSKNVTNQKKPTPFSSRMSFRSSFASLFSFRKSGKETSKLPSLGQKGCDGHAGPPMPVRGAAVQAKIYNSPLENHLVDSTFVPKPAVMREESGMPPPWDASLLENEFFQVLDDLDSKLAQEQSASSVNTRTPLNYGSRTQFGHFYSSGNRHGNITERHKKHYNETSNMSIYDILRPGTPREGFKTFSPRTSTIYDMYRTREPRVFKEDYVQKNTFGSTSLCFDSRQRSALPATGHFTARSLHFPATTQSKSGFIPPRHQQSPKRTPLSSIIWNRSDSSRDRENQEEFLRAPSPMEIDPADKYVYPRGFQENKRYESYHSQNVYQRVSLNAPMENAMSPDTFENSENMPFYHQSNTFTRSFFSNTFGRSGEQRRFGQGPFWGQEKGHSFWSDFHRSRKSFSSSDRDFEMISMEANSVSAIHGHNVSSEHWESFSSGYGTDVSRGQEEPHPWQFDFQRSTLDSMVVSHGNETQLTPHFGTPNVCSMTGSSYHVKSSELVSQQDSSPVEVHINKEASSFGIAQTLASSFKTSFSQISDDRRNPQSPNLQNPTVTLQKIFPNKPASHPMRSHTEVTVTSSNSVDSLPLAKSQPNILVTEVNNEKDLNESISEEDKQLSKMDQTNKAGEIPQPVSQTGISNSLPDFQNPLSQDSAKSNGFGFNASTIISSKKSPRVFSRKDTSKMYIPHTDKSNDIKQDKRFTENRKLGSTASLPFIQEHRTPPSFPRTDQGCHQELTVNNEDISRIITNNHWSSALTDTQNAQYSKCKLTPGHKTSCDSLDLSSAALPDSSPSKNSSLDAPVVPSTTVFSRRSPSDKDPSLGEREEKDNAGKNQKNQFIVSHSENQERNDSPVPTHDEVVDVKCHSHSPFRNERGKGKIRHHISCIEKLSKTESISVPTSDHRSLIEANQSNSKVSELDTIYCTLPRKSSSFLIHGRQSGSKIMAASLRNGPPPFQIKNNVEDAMGNYMLNKFSPSSPESANECSKVLSDSALEAPEATERMTNVKSSGSTSVRKGPLPFLINRAMSCPSGEPHASTGREGRKKPLTSGMDASELTPRAWERIISPVESDSSVRDCSLTKRQHQKENFQEYTEKEGKMAASRRSVFALSNEDPLPFCSDLSGKERGKTLHKVKTTSTFSVSGDEDNVKCLEVVSIYYTLPRKPSKKFCNLLQQYTQNTNLLIESPQVETETFPNALEKDKQNYSTREQSGTPSCENLKMSVNSDQTLTTENMTAFRLSNRGPLAPTLQEMASVEAAVSLPEEESKAREIFSDNLAKTPLGDSENKKERGKKLQSETLHTSLMLQRKNVSEEKSENCQQSINSSNSGPSSLPALSEVNIGNSQTRRSSWECTGSGRAIPFTGSGKCPQKDHTSTAVGDGSSGSQPREGRGDIGTNCQKMTNKTLSHSESQVFALTPALHKLQLGEETQSDEPNLESLQSEPRELPQRSQEANMTESRKAEDEMQKSAWDQPSLPEGNKNKTNLDDLVKGENRSSVKHRLAAMSKASRKFPAKDVSPRRHVATIFPQSGSRSGFDHLSLGTVECNPLFPEPTPKSAESIGESRLSENGKHVKKSENLLPITVLPNREPSTHVSNQKSNSISQRHQNEFKNVSESPSKHENSKDVTAAQNLVRESGAPSPITFTSLREAEFSDNQRRLSPPFPLEPAQKSRVSSPLASFLQQQRSASSLEWEPEPHLYRSKSLKSINVHGDLLRKSHPPKVRERHFSESTSIDNALSRLTLGNEFSVNNGYSRRFRSFSELPSCDGNESWAYRSGTKTGPRSAISIYRPIDYGIFGKEQQLAFLENVKRSLTQGRLWKPSFLKNPGFLKDDLRNPPNPSESLSSNSPSSQVPEDGLSPSEPLNIYEDDPVDSDCDTDTTTDDEYYLDENDKESEL

SEQ ID NO: 18570 - protein, 397 aa, Homo sapiens
MLRSTSTVTLLSGGAARTPGAPSRRANVCRLRLTVPPESPVPEQCEKKIERKEQLLDLSNGEPTRKLPQGVVYGVVRRSDQNQQKEMVVYGWSTSQLKEEMNYIKDKTLVDVTLENSNIKDQIRNLQQTYEASMDKLREKQRQLEVAQVENQLLKMKVESSQEANAEVMREMTKKLYSQYEEKLQEEQRKHSAEKEALLEETNSFLKAIEEANKKMQAAEISLEEKDQRIGELDRLIERMEKERHQLQLQLLEHETEMSGELTDSDKERYQQLEEASASLRERIRHLDDMVHCQQKKVKQMVEEIESLKKKLQQKQLLILQLLEKISFLEGENNELQSRLDYLTETQAKTEVETREIGVGCDLLPSQTGRTREIVMPSRNYTPYTRVLELTMKKTLT

SEQ ID NO: 18571 - protein, 1360 aa, Homo sapiens
SHTVFIDYQEKERTDRPNFELSQRKSLGTPTVICTPTEESVFFPGNGESDRLVANDSQLTPLEEWSNNRGPVEVADNMELSKSATCKNIKDVQSPGFLNEPLSSKSQRRKSLKLKNDKTIVFSENHKNDMDITQSCMVEIDNESALEDKEDFHLAGASKTILYSCGQDDMEITRSHTTALECKTLLPNEIAIRPMDKTVLFTDNYSDLEVTDSHTVFIDCQATEKILEENPKFGIGKGKNLGVSFPKDNSCVQEIAEKQALAVGNKIVLHTEQKQQLFAATNRTTNEIIKFHSAAMDEKVIGKVVDQACTLEKAQVESCQLNNRDRRNVDFTSSHATAVCGSSDNYSCLPNVISCTDNLEGSAMLLCDKDEEKANYCPVQNDLAYANDFASEYYLESEGQPLSAPCPLLEKEEVIQTSTKGQLDCVITLHKDQDLIKDPRNLLANQTLVYSQDLGEMTKLNSKRVSFKLPKDQMKVYVDDIYVIPQPHFSTDQPPLPKKGQSSINKEEVILSKAGNKSLNIIENSSAPICENKPKILNSEEWFAAACKKELKENIQTTNYNTALDFHSNSDVTKQVIQTHVNAGEAPDPVITSNVPCFHSIKPNLNNLNGKTGEFLAFQTVHLPPLPEQLLELGNKAHNDMHIVQATEIHNINIISSNAKDSRDEENKKSHNGAETTSLPPKTVFKDKVRRCSLGIFLPRLPNKRNCSVTGIDDLEQIPADTTDINHLETQPVSSKDSGIGSVAGKLNLSPSQYINEENLPVYPDEINSSDSINIETEEKALIETYQKEISPYENKMGKTCNSQKRTWVQEEEDIHKEKKIRKNEIKFSDTTQDREIFDHHTEEDIDKSANSVLIKNLSRTPSSCSSSLDSIKADGTSLDFSTYRSSQMESQFLRDTICEESLREKLQDGRITIREFFILLQVHILIQKPRQSNLPGNFTVNTPPTPEDLMLSQYVYRPKIQIYREDCEARRQKIEELKLSASNQDKLLVDINKNLWEKMRHCSDKELKAFGIYLNKIKSCFTKMTKVFTHQGKVALYGKLVQSAQNEREKLQIKIDEMDKILKKIDNCLTEMETETKNLEDEEKNNPVEEWDSEMRAAEKELEQLKTEEEELQRNLLELEVQKEQTLAQIDFMQKQRNRTEELLDQLSLSEWDVVEWSDDQAVFTFVYDTIQLTITFEESVVGFPFLDKRYRKIVDVNFQSLLDEDQAPPSSLLVHKLIFQYVEEKESWKKTCTTQHQLPKMLEEFSLVVHHCRLLGEEIEYLKRWGPNYNLMNIDINNNELRLLFSSSAAFAKFEITLFLSAYYPSVPLPSTIQNHVGNTSQDDIATILSKVPLENNYLKNVVKQIYQDLFQDCHFYH

SEQ ID NO: 18572 - protein, 125 aa, Homo sapiens
MTVLEITLAVILTLLGLAILAILLTRWARCKQSEMYISRYSSEQSARLLDYEDGRGSRHAYSTQSDTSYDNRERSKRDYTPSTNSLVSMASKFSLGQTELILLLMCFILALSRSSIALPQGSMMQ

SEQ ID NO: 18573 - protein, 242 aa, Homo sapiens
NYLILPSGNLQILNVSLEDKGSYKCAAYNPVTHQLKVEPIGRKLLVSRPSSDDVHILHPTHSQALAVLSRSPVTLECVVSGVPAPQVYWLKDGQDIAPGSNWRRLYSHLATDSVDPADSGNYSCMAGNKSGDVKYVTYMVNVLEHASISKGLQDQIVSLGATVHFTCDVHGNPAPNCTWFHNAQPIHPSARHLTAGNGLKISGVTVEDVGMYQCVADNGIGFMHSTGRLEIENGQEIYVGNV

SEQ ID NO: 18574 - protein, 965 aa, Homo sapiens
MNISKSEITKETSLKPSRRSLPCLAQSYAYSKSLSQSTSLFQSTESESQAPTSITLISTDKAEQVNTEENKNDSVLRCSFADLSDFCLALGKDKDYTDESEHATYDRSRLINDFVIKDKSEFKTKLSKNDMNYIASSGPLFKDGKKRIDYILVYRKTNIQYDKRNTFEKNLRAEGLMLEKEPAIASPDIMFIKIHIPWDTLCKYAERLNIRMPFRKKCYYTDGRSKSMGRMQTYFRRIKNWMAQNPMVLDKSAFPDLEESDCYTGPFSRARIHHFIINNKDTFFSNATRSRIVYHMLERTKYENGISKVGIRKLINNGSYIAAFPPHEGAYKSSQPIKTHGPQNNRHLLYERWARWGMWYKHQPLDLIRLYFGEKIGLYFAWLGWYTGMLIPAAIVGLCVFFYGLFTMNNSQVSQEICKATEVFMCPLCDKNCSLQRLNDSCIYAKVTYLFDNGGTVFFAIFMAIWATVFLEFWKRRRSILTYTWDLIEWEEEEETLRPQFEAKYYKMEIVNPITGKPEPHQPSSDKVTRLLVSVSGIFFMISLVITAVFGVVVYRLVVMEQFASFKWNFIKQYWQFATSAAAVCINFIIIMLLNLAYEKIAYLLTNLEYPRTESEWENSFALKMFLFQFVNLNSSIFYIAFFLGRFVGHPGKYNKLFDRWRLEECHPSGCLIDLCLQMGVIMFLKQIWNNFMELGYPLIQNWWSRHKIKRGIHDASIPQWENDWNLQPMNLHGLMDEYLEMVLQFGFTTIFVAAFPLAPLLALLNNIIEIRLDAYKFVTQWRRPLPARATDIGIWLGILEGIGILAVITNAFVIAITSDYIPRFVYEYKYGPCANHVEPSENCLKGYVNNSLSFFDLSELGMGKSGYCRYRDYRGPPWSSKPYEFTLQYWHILAARLAFIIVFEHLVFGIKSFIAYLIPDVPKGLHDRIRREKYLVQEMMYEAELEHLQQQRRKSGQPVHHEWP

SEQ ID NO: 18575 - protein, 4439 aa, Homo sapiens
MNDLRPLFSPTTYSVTIAESTPLRTSVAQVTATDADIGSNGEFYYYFKNKVDLFSVHPTSGVISLSGRLNYDEKNRYDLEILAVDRGMKLYGNNGVSSTAKLYVHIERINEHAPTIHVVTHVPFSLEKEPTYAVVTVDDLDDGANGEIESVSIVAGDPLDQFFLAKEGKWLNEYKIKERKQIDWESFPYGYNLTLQAKDKGSPQKCSALKAVYIGNPTRDTVPIRFEKEVYDVSISEFSPPGVVVAIVKLSPEPIDVEYKLSPGEDAVYFKINPRSGLIVTARPLNTVKKEVYKLEVTNKEGDLKAQVTISIEDANDHTPEFQQPLYDAYVNESVPVGTSVLTVSASDKDKGENGYITYSIASLNLLPFVINQFTGVISTTEELDFESSPEIYRFIVRASDWGSPYRHESEVNVTIRIGNVNDNSPLFEKVACQGVISYDFPVGGHITAVSAIDIDELELVKYKIISGNELGFFYLNPDSGVLQLKKSLTNSGIKNGNFALRITATDGENLADPMSINISVLHGKVSSKSFSCRETRVAQKLAEKLLIKAKANGKLNLEDGFLDFYSINRQGPYFDKSFPSDVAVKEDLPVGANILKIKAYDADSGFNGKVLFTISDGNTDSCFNIDMETGQLKVLMPMDREHTDLYLLNITIYDLGNPQKSSWRLLTINVEDANDNSPVFIQDSYSVNILESSGIGTEIIQVEARDKDLGSNGEVTYSVLTDTQQFAINSSTGIVYVADQLDRESKANYSLKIEARDKAESGQQLFSVVTLKVFLDDVNDCSPAFIPSSYSVKVLEDLPVGTVIAWLETHDPDLGLGGQVRYSLVNDYNGRFEIDKASGAIRLSKELDYEKQQFYNLTVRAKDKGRPVSLSSVSFVEVEVVDVNENLHTPYFPDFAVVGSVKENSRIGTSVLQVTARDEDSGRDGEIQYSIRDGSGLGRFSIDDESGVITAADILDRETMGSYWLTVYATDRGVVPLYSTIEVYIEVEDVNDNAPLTSEPIYYPVVMENSPKDVSVIQIQAEDPDSSSNEKLTYRITSGNPQNFFAINIKTGLITTTSRKLDREQQAEHFLEVTVTDGGPSPKQSTIWVVVQVLDENDNKPQFPEKVYQIKLPERDRKKRGEPIYRAFAFDRDEGPNAEISYSIVDGNDDGKFFIDPKTGMVSSRKQFTAGSYDILTIKAVDNGRPQKSSTARLHIEWIKKPPPSPIPLTFDEPFYNFTVMESDRVTEIVGVVSVQPANTPLWFDIVGGNFDSAFDAEKGVGTIVIAKPLDAEQRSIYNMSVEVTDGTNVAVTQVFIKVLDNNDNGPEFSQPNYDVTISEDVLPDTEILQIEATDRDEKHKLSYTVHSSIDSISMRKFRIDPSTGVLYTAERLDHEAQDKHILNIMVRDQEFPYRRNLARVIVNVEDANDHSPYFTNPLYEASVFESAALGSAVLQVTALDKDKGENAELIYTIEAGNTGNMFKIEPVLGIITICKEPDMTTMGQFVLSIKVTDQGSPPMSATAIVRISVTMSDNSHPKFIHKDYQAEVNENVDIGTSVILISAISQSTLIYEVKDGDINGIFTINPYSGVITTQKALDYERTSSYQLIIQATNMAGMASNATVNIQIVDENDNAPVFLFSQYSGSLSEAAPINSIVRSLDNSPLVIRATDADSNRNALLVYQIVESTAKKFFTVDSSTGAIRTIANLDHETIAHFHFHVHVRDSGSPQLTAESPVEVNIEVTDVNDNPPVFTQAVFETILLLPTYVGVEVLKVSATDPDSEVPPELTYSLMEGSLDHFLIDSNSGVLTIKNNNLSKDHYMLIVKVSDGKFYSTSMVTIMVKEAMDSGLHFTQSFYSTSISENNTNITKVAIVNAVGNRLNEPLKYSILNPGNKFKIKSTSGVIQTTGVPFDREEQELYELVVEASRELDHLRVARVVVRVNIEDINDNSPVFVGLPYYAAVQVDAEPGTLIYQVTAIDKDKGPNGEVTYVLQDDYGHFEINPNSGNVILKEAFNSDLSNIEYGVTILAKDGGKPSLSTSVELPITIVNKAMPVFDKPFYTASVNEDIRMNTPILSINATSPEGQGIIYIIIDGDPFKQFNIDFDTGVLKVVSPLDYEVTSAYKLTIRASDALTGARAEVTVDLLVNDVNDNPPIFDQPTYNTTLSEASLIGTPVLQVVSIDADSENNKMVHYQIVQDTYNSTDYFHIDSSSGLILTARMLDHELVQHCTLKVRSIDSGFPSLSSEVLVHIYISDVNDNPPVFNQLIYESYVSELAPRGHFVTCVQASDADSSDFDRLEYSILSGNDRTSFLMDSKSGVITLSNHRKQRMEPLYSLNVSVSDGLFTSTAQVHIRVLGANLYSPAFSQSTYVAEVRENVAAGTKVIHVRATDGDPGTYGQISYAIINDFAKDRFLIDSNGQVITTERLDRENPLEGDVSIFVRALDGGGRTTFCTVRVIVVDENDNAPQFMTVEYRASVRADVGRGHLVTQVQAIDPDDGANSRITYSLYSEASVSVADLLEIDPDNGWMVTKGNFNQLKNTVLSFFVKAVDGGIPVKHSLIPVYIHVLPPETFLPSFTQSQYSFTIAEDTAIGSTVDTLRILPSQNVWFSTVNGERPENNKGGIFVIEQETGTIKLDKRLDRETSPAFHFKVAATIPLDKVDIVFTVDVDIKVLDLNDNKPVFETSSYDTIIMEGMPVGTKLTQVRAIDMDWGANGQVTYSLHSDSQPEKVMEAFNIDSNTGWISTLKDLDHETDPTFTFSVVASDLGEAFSLSSTALVSVRVTDINDNAPVFAQEVYRGNVKESDPPGEVVAVLSTWDRDTSDVNRQVSYHITGGNPRGRFALGLVQSEWKVYVKRPLDREEQDIYFLNITATDGLFVTQAMVEVSVSDVNDNSPVCDQVAYTALLPEDIPSNKIILKVSAKDADIGSNGYIRYSLYGSGNSEFFLDPESGELKTLALLDRERIPVYSLMAKATDGGGRFCQSNIHLILEDVNDNPPVFSSDHYNTCVYENTATKALLTRVQAVDPDIGINRKVVYSLADSAGGVFSIDSSSGIIILEQPLDREQQSSYNISVRATDQSPGQSLSSLTTVTITVLDINDNPPVFERRDYLVTVPEDTSPGTQVLAVFATSKDIGTNAEITYLIRSGNEQGKFKINPKTGGISVSEVLDYELCKRFYLVVEAKDGGTPALSAVATVNINLTDVNDNPPKFSQDVYSAVISEDALVGDSVILLIAEDVDSQPNGQIHFSIVNGDRDNEFTVDPVLGLVKVKKKLDRERVSGYSLLVQAVDSGIPAMSSTATVNIDISDVNDNSPVFTPANYTAVIQENKPVGTSILQLVVTDRDSFHNGPPFSFSILSGNEEEEFVLDPHGILRSAVVFQHTESLEYVLCVQAKDSGKPQQVSHTYIRVRVIEESTHKPTAIPLEIFIVTMEDDFPGGVIGKIHATDQDMYDVLTFALKSEQKSLFKVNSHDGKIIALGGLDSGKYVLNVSVSDGRFQVPIDVVVHVEQLVHEMLQNTVTIRFENVSPEDFVGLHMHGFRRTLRNAVLTQKQDSLRIISIQPVAGTNQLDMLFAVEMHSSEFYKPAYLIQKLSNARRHLENIMRISAILEKNCSGLDCQEQHCEQGLSLDSHALMTYSTARISFVCPRFYRNVRCTCNGGLCPGSNDPCVEKPCPGDMQCVSYEASRRPFLCQCPPGKLGECSGHTSLSFAGNSYIKYRLSENSKEEDFKLALRLRTLQSNGIIMYTRANPCIILKIVDGKLWFQLDCGSGPGILGISGRAVNDGSWHSVFLELNRNFTSLSLDDSYVERRRAPLYFQTLSTESSIYFGALVQADNIRSLTDTRVTQVLSGFQGCLDSVILNNNELPLQNKRSSFAEVVGLTELKLGCVLYPDACKRSPCQHGGSCTGLPSGGYQCTCLSQFTGRNCESEITACFPNPCRNGGSCDPIGNTFICNCKAGLTGVTCEEDINECEREECENGGSCVNVFGSFLCNCTPGYVGQYCGLRPVVVPNIQAGHSYVGKEELIGIAVVLFVIFILVVLFIVFRKKVFRKNYSRNNITLVQDPATAALLNKSNGIPFRNLRGSGDGRNVYQEVGPPQVPVRPMAYTPCFQSDSRSNLDKIVDGLGGEHQEMTTFHPESPRILTARRGVVVCSVAPNLPAVSPCRSDCDSIRKNGWDAGTENKGVDDPGEVTCFAGSNKGSNSEVQSLSSFQSDSGDDNASIVTVIQLVNNVVDTIENEVSVMDQGQNYNRAYHWDTSDWMPGARLSDIEEVPNYENQDGGSAHQGSTRELESDYYLGGYDIDSEYPPPHEEEFLSQDQLPPPLPEDFPDQYEALPPSQPVSLASTLSPDCRRRPQFHPSQYLPPHPFPNETDLVGPPASCEFSTFAVSMNQGTEPTGPADSVSLSLHNSRGTSSSDVSANCGFDDSEVAMSDYESVGELSLASLHIPFVETQHQTQV

SEQ ID NO: 18576 - protein, 675 aa, Homo sapiens
MCRECCEYDQIECVCPGKREVVGYTIPCCRNEENECDSCLIHPGCTIFENCKSCRNGSWGGTLDDFYVKGFYCAECRAGWYGGDCMRCGQVLRAPKGQILLESYPLNAHCEWTIHAKPGFVIQLRFVMLSLEFDYMCQYDYVEVRDGDNRDGQIIKRVCGNERPAPIQSIGSSLHVLFHSDGSKNFDGFHAIYEEITACSSSPCFHDGTCVLDKAGSYKCACLAGYTGQRCENLLEAGKSKIKASEDSLSVLEERNCSDPGGPVNGYQKITGGPGLINGRHAKIGTVVSFFCNNSYVLSGNEKRTCQQNGEWSGKQPICIKACREPKISDLVRRRVLPMQVQSRETPLHQLYSAAFSKQKLQSAPTKKPALPFGDLPMGYQHLHTQLQYECISPFYRRLGSSRRTCLRTGKWSGRAPSCIPICGKIENITAPKTQGLRWPWQAAIYRRTSGVHDGSLHKGAWFLVCSGALVNERTVVVAAHCVTDLGKVTMIKTADLKVVLGKFYRDDDRDEKTIQSLQISAIILHPNYDPILLDADIAILKLLDKARISTRVQPICLAASRDLSTSFQESHITVAGWNVLADVRSPGFKNDTLRSGVVSVVDSLLCEEQHEDHGIPVSVTDNMFCASWEPTAPSDICTAETGGIAAVSFPGRASPEPRWHLMGLVSWSYDKTCS

SEQ ID NO: 18577 - protein, 297 aa, Homo sapiens
MSMNNSKQLVSPAAALLSNTTCQTENRLSVFFSVIFMTVGILSNSLAIAILMKAYQRFRQKSKASFLLLASGLVITDFFGHLINGAIAVFVYASDKEWIRFDQSNVLCSIFGICMVFSGLCPLLLGSVMAIERCIGVTKPIFHSTKITSKHVKMMLSGVCLFAVFIALLPILGHRDYKIQASRTWCFYNTEDIKDWEDRFYLLLFSFLGLLALGVSLLCNAITGITLLRVKFKSQQHRQGRSHHLEMVIQLLAIMCVSCICWSPFLGYRIILNGKEKYKVYEEQSDFLHSDKTLNEK

SEQ ID NO: 18578 - protein, 652 aa, Homo sapiens
MPNQGEDCYFFFYSTCTKGDSCPFRHCEAAIGNETVCTLWQEGRCFRQVCRFRHMEIDKKRSEIPCYWENQPTGCQKLNCAFHHNRGRYVDGLFLPPSKTVLPTVPESPEEEVKASQLSVQQNKLSVQSNPSPQLRSVMKVESSENVPSPTHPPVVINAADDDEDDDDQFSEEGDETKTPTLQPTPEVHNGLRVTSVRKPAVNIKQGECLNFGIKTLEEIKSKKMKEKSKKQGEGSSGVSSLLLHPEPVPGPEKENVRTVVRTVTLSTKQGEEPLVRLSLTERLGKRKFSAGGDSDPPLKRSLAQRLGKKVEAPETNIDKTPKKAQVSKSLKERLGMSADPDNEDATDKVNKVGEIHVKTLEEILLERASQKRGELQTKLKTEGPSKTDDSTSGARSSSTIRIKTFSEVLAEKKHRQQEAERQKSKKDTTCIKLKIDSEIKKTVVLPPIVASRGQSEEPAGKTKSMQEVHIKTLEEIKLEKALRVQQSSESSTSSPSQHEATPGARRLLRITKRTGMKEEKNLQEGNEVDSQSSIRTEAKEASGETTGVDITKIQVKRCETMREKHMQKQQEREKSVLTPLRGDVASCNTQVAEKPVLTAVPGITRHLTKRLPTKSSQKVEVETSGIGDSLLNVKCAAQTLEKRGKDIFCPL

SEQ ID NO: 18579 - protein, 114 aa, Homo sapiens
MIARRNPEPLRFLPDEARSLPPPKLTDPRLLYIGFLGYCSGLIDNLIRRRPIATAGLHRQLLYITAFFFAGYYLVKREDYLYAVRDREMFGYMKLHPEDFPEEDVYCCGAERRG

SEQ ID NO: 18580 - protein, 639 aa, Homo sapiens
MIGEEVPSDQYYWAPLAQHERGSLASLDSLRKGGPPPPNWRQPELPEVIAMLGFRLDAVKSNAAAYLQHLCYRNDKVKTDVRKLKGIPVLVGLLDHPKKEVHLGACGALKNISFGRDQDNKIAIKNCDGVPALVRLLRKARDMDLTEVITGTLWNLSSHDSIKMEIVDHALHALTDEVIIPHSGWEREPNEDCKPRHIEWESVLTNTAGCLRNVSSERSEARRKLRECDGLVDALIFIVQAEIGQKDSDSKLVENCVCLLRNLSYQVHREIPQAERYQEAAPNVANNTGPHAASCFGAKKGKGKKPIEDPANDTVDFPKRTSPARGYELLFQPEVVRIYISLLKESKTPAILEASAGAIQNLCAGRWTYGRYIRSALRQEKALSAIADLLTNEHERVVKAASGALRNLAVDARNKELIGKHAIPNLVKNLPGGQQNSSWNFSEDTVISILNTINEVIAENLEAAKKLRETQGIEKLVLINKSGNRSEKEVRAAALVLQTIWGYKELRKPLEKEGWKKSDFQVNLNNASRSQSSHSYDDSTLPLIDRNQKSDKKPDREEIQMSNMGSNTKSLDNNYSTPNERGDHNRTLDRSGDLGDMEPLKGTTPLMQDEGQESLEEELDVLVLDDEGGQVSYPSMQKI

SEQ ID NO: 18581 - protein, 185 aa, Homo sapiens
MAAVATCGSVAASTGSAVATASKSNVTSFQRRGPRASVTNDSGPRLVSIAGTRPSVRNGQLLVSTGLPALDQLLGGGLAVGTVLLIEEDKYNIYSPLLFKYFLAEGIVNGHTLLVASAKEDPANILQELPAPLLDDKCKKEFDEDVYNHKTPESNIKMKIAWRYQLLPKMEANWTSIIFKIWSLL

SEQ ID NO: 18582 - protein, 494 aa, Homo sapiens
MEQKEGKLSEDGTTVSPAADNPEMSGGGAPAEETKGTAGKAINEGPPTESGKQEKAPAEDGMSAELQGEANGLDEVKVESQREAGGKEDAEAELKKEDGEKEETTVGSQEMTGRKEETKSEPKEAEEKESTLASEKQKAEEKEAKPESGQKADANDRDKPEPKATVEEEDAKTASQEETGQRKECSTEPKEKATDEEAKAESQKAVVEDEAKAEPKEPDGKEEAKHGAKEEADAKEEAEDAEEAEPGSPSEEQEQDVEKEPEGGAGVIPSSPEEWPESPTGEGHNLSTDGLGPDCVASGQTSPSASESSPSDVPQSPPESPSSGEKKEKAPERRVSAPARPRGPRAQNRKAIVDKFGGAASGPTALFRNTKAAGAAIGGVKNMLLEWCRAMTKKYEHVDIQNFSSSWSSGMAFCALIHKFFPDAFDYAELDPAKRRHNFTLAFSTAEKLADCAQLLDVDDMVRLAVPDSKCVYTYIQELYRSLVQKGLVKTKKK

SEQ ID NO: 18583 - protein, 1746 aa, Homo sapiens
MDGVSSEANEENDNIERPVRRRHSSILKPPRSPLQDLRGGNERVQESNALRNKKNSRRVSFADTIKVFQTESHMKIVRKSEMEETETGENLLLIQNKKLEDNYCEITGMNTLLSAPIHTQMQQKEFSIIEHTRERKHANDQTVIFSDENQMDLTSSHTVMITKGLLDNPISEKSTKIDTTSFLANLKLHTEDSRMKKEVNFSVDQNTSSENKIDFNDFIKRLKTGKCSAFPDVPDKENFEIPIYSKEPNSASSTHQMHVSLKEDENNSNITRLFREKDDGMNFTQCHTANIQTLIPTSSETNSRESKGNDITIYGNDFMDLTFNHTLQILPATGNFSEIENQTQNAMDVTTGYGTKASGNKTVFKSKQNTAFQDLSINSADKIHITRSHIMGAETHIVSQTCNQDARILAMTPESIYSNPSIQGCKTVFYSSCNDAMEMTKCLSNMREEKNLLKHDSNYAKMYCNPDAMSSLTEKTIYSGEENMDITKSHTVAIDNQIFKQDQSNVQIAAAPTPEKEMMLQNLMTTSEDGKMNVNCNSVPHVSKERIQQSLSNPLSISLTDRKTELLSGENMDLTESHTSNLGSQVPLAAYNLAPESTSESHSQSKSSSDECEEITKSRNEPFQRSDIIAKNSLTDTWNKDKDWVLKILPYLDKDSPQSADCNQEIATSHNIVYCGGVLDKQITNRNTVSWEQSLFSTTKPLFSSGQFSMKNHDTAISSHTVKSVLGQNSKLAEPLRKSLSNPTPDYCHDKMIICSEEEQNMDLTKSHTVVIGFGPSELQELGKTNLEHTTGQLTTMNRQIAVKVEKCGKSPIEKSGVLKSNCIMDVLEDESVQKPKFPKEKQNVKIWGRKSVGGPKIDKTIVFSEDDKNDMDITKSYTIEINHRPLLEKRDCHLVPLAGTSETILYTCRQDDMEITRSHTTALECKTVSPDEITTRPMDKTVVFVDNHVELEMTESHTVFIDYQEKERTDRPNFELSQRKSLGTPTVICTPTEESVFFPGNGESDRLVANDSQLTPLEEWSNNRGPVEVADNMELSKSATCKNIKDVQSPGFLNEPLSSKSQRRKSLKLKNDKTIVFSENHKNDMDITQSCMVEIDNESALEDKEDFHLAGASKTILYSCGQDDMEITRSHTTALECKTLLPNEIAIRPMDKTVLFTDNYSDLEVTDSHTVFIDCQATEKILEENPKFGIGKGKNLGVSFPKDNSCVQEIAEKQALAVGNKIVLHTEQKQQLFAATNRTTNEIIKFHSAAMDEKVIGKVVDQACTLEKAQVESCQLNNRDRRNVDFTSSHATAVCGSSDNYSCLPNVISCTDNLEGSAMLLCDKDEEKANYCPVQNDLAYANDFASEYYLESEGQPLSAPCPLLEKEEVIQTSTKGQLDCVITLHKDQDLIKDPRNLLANQTLVYSQDLGEMTKLNSKRVSFKLPKDQMKVYVDDIYVIPQPHFSTDQPPLPKKGQSSINKEEVILSKAGNKSLNIIENSSAPICENKPKILNSEEWFAAACKKELKENIQTTNYNTALDFHSNSDVTKQVIQTHVNAGEAPDPVITSNVPCFHSIKPNLNNLNGKTGEFLAFQTVHLPPLPEQLLELGNKAHNDMHIVQATEIHNINIISSNAKDSRDEENKKSHNGAETTSLPPKTVFKDKVRRCSLGIFLPRLPNKRNCSVTGIDDLEQIPADTTDINHLETQPVSSKDSGIGSVAGKLNLSPSQYINEENLPVYPDEINSSDSINIETEEKNVGTRRRRYS

SEQ ID NO: 18584 - protein, 132 aa, Homo sapiens
MVRRFLVTLRIRRACGPPRVRVFVVHIPRLTGEWAAPGAPAAVALVLMLLRSQRLGQQPLPRRPGHDDGQRPSGGAAAAPRRGAQLRRPRHSHPTRARRCPGGLPGHAGGAAPGRGAAGRARCLGPSARGPG

SEQ ID NO: 18585 - protein, 668 aa, Homo sapiens
MDQREILQKFLDEAQSKKITKEEFANEFLKLKRQSTKYKADKTYPTTVAEKPKNIKKNRYKDILPYDYSRVELSLITSDEDSSYINANFIKGVYGPKAYIATQGPLSTTLLDFWRMIWEYSVLIIPENFSVFSLIREMRTQRPSLVQTQEQYELVYNAVLELFKRQMDVIRDKHSGTESQAKHCIPEKNHTLQADSYSPNLPKSTTKAAKMMNQQRTKMEIKESSSFDFRTSEISAKEELVLHPAKSSTSFDFLELNYSFDKNADTTMKWQTKAFPIVGEPLQKHQSLDLGSLLFEGCSNSKPVNAAGRYFNSKVPITRTKSTPFELIQQRETKEVDSKENFSYLESQPHDSCFVEMQAQKVMHVSSAELNYSLPYDSKHQIRNASNVKHHDSSALGVYSYIPLVENPYFSSWPPSGTSSKMSLDLPEKQDGTVFPSSLLPTSSTSLFSYYNSHDSLSLNSPTNISSLLNQESAVLATAPRIDDEIPPPLPVWTPESFIVVEEAGEFSPNVPKSLSSAVKVKIGTSLEWGGTSEPKKFDDSVILRPSKSVKLRSPKSELHQDRSSPPPPLPERTLESFFLADEDCMQAQSIETYSTSYPDTMENSTSSKQTLKTPGKSFTRSKSLKILRNMKKSICNSCPPNKPAESVQSNNSSSFLNFGMCVILLKS

SEQ ID NO: 18586 - protein, 312 aa, Homo sapiens
MDEGTGLQPGAGEQLEAPATAEAVQERCEPETLRSKSLPVLSSASCRPSLSPTSGDANPAFGCVDSSGHQELKQGPNPLAPSPSAPSTSAGLGDCNHRVDLSKTFSVSSALAMLQERRCLYVVLTDSRCFLVCMCFLTFIQALMVSGYLSSVITTIERRYSLKSSESGLLVSCFDIGNLVVVVFVSYFGGRGRRPLWLAVGGLLIAFGAALFALPHFISPPYQIQELNASAPNDGLCQGGNSTATLEPPACPKDSGGNNHWVYVALFICAQILIGMGSTPIYTLGPTYLDDNVKKENSSLYLDLLSPCPIGI

SEQ ID NO: 18587 - protein, 1733 aa, Homo sapiens
MLKQPLTYRLSKEMAKNDPIELPTSRSKNVTNQKKPTPFSSRMSFRSSFASLFSFRKSGKETSKLPSLGQKGCDGHAGPPMPVRGAAVQAKIYNSPLENHLVDSTFVPKPAVMREESGMPPPWDASLLENEFFQVLDDLDSKLAQEQSASSVNTRTPLNYGSRTQFGHFYSSGNRHGNITERHKKHYNETSNMSIYDILRPGTPREGFKTFSPRTSTIYDMYRTREPRVFKEDYVQKNTFGSTSLCFDSRQRSALPATGHFTARSLHFPATTQSKSGFIPPRHQQSPKRTPLSSIIWNRSDSSRDRENQEEFLRAPSPMEIDPADKYVYPRGFQENKRYESYHSQNVYQRVSLNAPMENAMSPDTFENSENMPFYHQSNTFTRSFFSNTFGRSGEQRRFGQGPFWGQEKGHSFWSDFHRSRKSFSSSDRDFEMISMEANSVSAIHGHNVSSEHWESFSSGYGTDVSRGQEEPHPWQFDFQRSTLDSMVVSHGNETQLTPHFGTPNVCSMTGSSYHVKSSELVSQQDSSPVEVHINKEASSFGIAQTLASSFKTSFSQISDDRRNPQSPNLQNPTVTLQKIFPNKPASHPMRSHTEVTVTSSNSVDSLPLAKSQPNILVTEVNNEKDLNESISEEDKQLSKMDQTNKAGEIPQPVSQTGISNSLPDFQNPLSQDSAKSNGFGFNASTIISSKKSPRVFSRKDTSKMYIPHTDKSNDIKQDKRFTENRKLGSTASLPFIQEHRTPPSFPRTDQGCHQELTVNNEDISRIITNNHWSSALTDTQNAQYSKCKLTPGHKTSCDSLDLSSAALPDSSPSKNSSLDAPVVPSTTVFSRRSPSDKDPSLGEREEKDNAGKNQKNQFIVSHSENQERNDSPVPTHDEVVDVKCHSHSPFRNERGKGKIRHHISCIEKLSKTESISVPTSDHRSLIEANQSNSKVSELDTIYCTLPRKSSSFLIHGRQSGSKIMAASLRNGPPPFQIKNNVEDAMGNYMLNKFSPSSPESANECSKVLSDSALEAPEATERMTNVKSSGSTSVRKGPLPFLINRAMSCPSGEPHASTGREGRKKPLTSGMDASELTPRAWERIISPVESDSSVRDCSLTKRQHQKENFQEYTEKEGKMAASRRSVFALSNEDPLPFCSDLSGKERGKTLHKVKTTSTFSVSGDEDNVKCLEVVSIYYTLPRKPSKKFCNLLQQYTQNTNLLIESPQVETETFPNALEKDKQNYSTREQSGTPSCENLKMSVNSDQTLTTENMTAFRLSNRGPLAPTLQEMASVEAAVSLPEEESKAREIFSDNLAKTPLGDSENKKERGKKLQSETLHTSLMLQRKNVSEEKSENCQQSINSSNSGPSSLPALSEVNIGNSQTRRSSWECTGSGRAIPFTGSGKCPQKDHTSTAVGDGSSGSQPREGRGDIGTNCQKMTNKTLSHSESQVFALTPALHKLQLGEETQSDEPNLESLQSEPRELPQRSQEANMTESRKAEDEMQKSAWDQPSLPEGNKNKTNLDDLVKGENRSSVKHRLAAMSKASRKFPAKDVSPRRHVATIFPQSGSRSGFDHLSLGTVECNPLFPEPTPKSAESIGESRLSENGKHVKKSENLLPITVLPNREPSTHVSNQKSNSISQRHQNEFKNVSESPSKHENSKDVTAAQNLVRESGAPSPITFTSLREAEFSDNQRRLSPPFPLEPAQKSRVSSPLASFLQQQRSASSLEWEPEPHLYRSKSLKSINVHGDLLRK

SEQ ID NO: 18588 - protein, 208 aa, Homo sapiens
ITCPPPMSVEHADIWVKSYSLYSRERYICNSGFKRKAGTSSLTECVLNKATNVAHWTTPSLKCIRTTEISSHESSHGTPSQTTAKNWELTASASHQPPGVYPQGHSDTTGRKQHLLPDFQASFQRDCINKHIEDKECWTVASFLLFLAISTSTVLLCGLSAVSLLACYLKSRQTPPLASVEMEAMEALPVTWGTSSRDEDLENCSHHL

SEQ ID NO: 18589 - protein, 274 aa, Homo sapiens
MSHEKSFLVSGDNYPPPNPGYPGGPQPPMPPYAQPPYPGAPYPQPPFQPSPYGQPGYPHGPSPYPQGGYPQGPYPQGGYPQGPYPQEGYPQGPYPQGGYPQGPYPQSPFPPNPYGQPQVFPGQDPDSPQHGNYQEEGPPSYYDNQDFPATNWDDKSIRQAFIRKVFLVLTLQLSVTLSTVSVFTFVAEVKGFVRENVWTYYVSYAVFFISLIVLSCCGDFRRKHPWNLVALSVLTASLSYMVGMIASFYNTEAVIMAVGITTAVCFTVVIFSMQ

SEQ ID NO: 18590 - protein, 1176 aa, Homo sapiens
NYYYYLPWAHTKPVVTLTSYWEDISHRLDAVNTLLAMAERLQTNIEALKSGIQGKIPANQLAELWLKLIDEVIEDTRYTLPLTEGKANVTVLDTQIRKLRSRSLSQIHEAAVRMRSEATDVKSTLAEIEDWLDKLMQLTEEPQNSMPDIIIWMIRGEKRLAYARIPAHQVLYSTSGENASGKYCGKTQTIFLKYPQEKNNGPKVPVELRVNIWLGLSAVEKKFNSFAEGTFTVFAEMYENQALMFGKWGTSGLVGRHKFSDVTGKIKLKREFFLPPKGWEWEGEWIVDPERSLLTEADAGHTEFTDEVYQNESRYPGGDWKPAEDTYTDANGDKAASPSELTCPPGWEWEDDAWSYDINRAVDEKGWEYGITIPPDHKPKSWVAAEKMYHTHRRRRLVRKRKKDLTQTASSTARAMEELQDQEGWEYASLIGWKFHWKQRSSDTFRRRRWRRKMAPSETHGAAAIFKLEGALGADTTEDGDEKSLEKQKHSATTVFGANTPIVSCNFDRVYIYHLRCYVYQARNLLALDKDSFSDPYAHICFLHRSKTTEIIHSTLNPTWDQTIIFDEVEIYGEPQTVLQNPPKVIMELFDNDQVGKDEFLGRSIFSPVVKLNSEMDITPKLLWHPVMNGDKACGDVLVTAELILRGKDGSNLPILPPQRAPNLYMVPQGIRPVVQLTAIEILAWGLRNMKNFQMASITSPSLVVECGGERVESVVIKNLKKTPNFPSSVLFMKVFLPKEELYMPPLVIKVIDHRQFGRKPVVGQCTIERLDRFRCDPYAGKEDIVPQLKASLLSAPPCRDIVIEMEDTKPLLASKCLSSMSTALSKMASPATVHLTEKEEEIVDWWSKFYASSGEHEKCGQYIQKGYSKLKIYNCELENVAEFEGLTDFSDTFKLYRGKSDENEDPSVVGEFKGSFRIYPLPDDPSVPAPPRQFRELPDSVPQECTVRIYIVRGLELQPQDNNGLCDPYIKITLGKKVIEDRDHYIPNTLNPVFGRMYELSCYLPQEKDLKISVYDYDTFTRDEKVGETIIDLENRFLSRFGSHCGIPEEYCVSGVNTWRDQLRPTQLLQNVARFKGFPQPILSEDGSRIRYGGRDYSLDEFEANKILHQHLGAPEERLALHILRTQGLVPEHVETRTLHSTFQPNISQILPACDHLEHQGRYLGREKHHRRGNE

SEQ ID NO: 18591 - protein, 536 aa, Homo sapiens
MAQGSHQIDFQVLHDLRQKFPEVPEVVVSRCMLQNNNNLDACCAVLSQESTRYLYGEGDLNFSDDSGISGLRNHMTSLNLDLQSQNIYHHGREGSRMNGSRTLTHSISDGQLQGGQSNSELFQQEPQTAPAQVPQGFNVFGMSSSSGASNSAPHLGFHLGSKGTSSLSQQTPRFNPIMVTLAPNIQTGRNTPTSLHIHGVPPPVLNSPQGNSIYIRPYITTPGGTTRQTQQHSGWVSQFNPMNPQQVYQPSQPGPWTTCPASNPLSHTSSQQPNQQGHQTSHVYMPISSPTTSQPPTIHSSGSSQSSAHSQYNIQNISTGPRKNQIEIKLEPPQRNNSSKLRSSGPRTSSTSSSVNSQTLNRNQPTVYIAASPPNTDELMSRSQPKVYISANAATGDEQVMRNQPTLFISTNSGASAASRNMSGQVSMGPAFIHHHPPKSRAIGNNSATSPRVVVTQPNTKYTFKITVSPNKPPAVSPGVVSPTFELTNLLNHPDHYVETENIQHLTDPTLAHVDRISETRKLSMGSDDAAYTQDI

SEQ ID NO: 18592 - protein, 686 aa, Homo sapiens
MEVVTFGDVAVHFSREEWQCLDPGQRALYREVMLENHSSVAGLAGFLVFKPELISRLEQGEEPWVLDLQGAEGTEAPRTSKTDSTIRTENEQACEDMDILKSESYGTVVRISPQDFPQNPGFGDVSDSEVWLDSHLGSPGLKVTGFTFQNNCLNEETVVPKTFTKDAPQGCKELGSSGLDCQPLESQGESAEGMSQRCEECGKGIRATSDIALHWEINTQKISRCQECQKKLSDCLQGKHTNNCHGEKPYECAECGKVFRLCSQLNQHQRIHTGEKPFKCTECGKAFRLSSKLIQHQRIHTGEKPYRCEECGKAFGQSSSLIHHQRIHTGERPYGCRECGKAFSQQSQLVRHQRTHTGERPYPCKECGKAFSQSSTLAQHQRMHTGEKAQILKASDSPSLVAHQRIHAVEKPFKCDECGKAFRWISRLSQHQLIHTGEKPYKCNKCTKAFGCSSRLIRHQRTHTGEKPFKCDECGKGFVQGSHLIQHQRIHTGEKPYVCNDCGKAFSQSSSLIYHQRIHKGEKPYECLQCGKAFSMSTQLTIHQRVHTGERPYKCNECGKAFSQNSTLFQHQIIHAGVKPYECSECGKAFSRSSYLIEHQRIHTRAQWFYEYGNALEGSTFVSRKKVNTIKKLHQCEDCEKIFRWRSHLIIHQRIHTGEKPYKCNDCGKAFNRSSRLTQHQKIHMG

SEQ ID NO: 18593 - protein, 88 aa, Homo sapiens
MASPGKPGADEAQEEEGELEGGSAGPRAAILEQAEELFLLCDKEAKGFITKHDLQGLQSDLPLTPEQLEAVFESLDRAHTGFLTAREF

SEQ ID NO: 18594 - protein, 921 aa, Homo sapiens
MPLRHWGMARGSKPVGDGAQPMAAMGGLKVLLHWAGPGGGEPWVTFSESSLTAEEVCIHIAHKVGITPPCFNLFALFDAQAQVWLPPNHILEIPRDASLMLYFRIRFYFRNWHGMNPREPAVYRCGPPGTEASSDQTAQGMQLLDPASFEYLFEQGKHEFVNDVASLWELSTEEEIHHFKNESLGMAFLHLCHLALRHGIPLEEVAKKTSFKDCIPRSFRRHIRQHSALTRLRLRNVFRRFLRDFQPGRLSQQMVMVKYLATLERLAPRFGTERVPVCHLRLLAQAEGEPCYIRDSGVAPTDPGPESAAGPPTHEVLVTGTGGIQWWPVEEEVNKEEGSSGSSGRNPQASLFGKKAKAHKAVGQPADRPREPLWAYFCDFRDITHVVLKEHCVSIHRQDNKCLELSLPSRAAALSFVSLVDGYFRLTADSSHYLCHEVAPPRLVMSIRDGIHGPLLEPFVQAKLRPEDGLYLIHWSTSHPYRLILTVAQRSQAPDGMQSLRLRKFPIEQQDGAFVLEGWGRSFPSVRELGAALQGCLLRAGDDCFSLRRCCLPQPGETSNLIIMRGARASPRTLNLSQLSFHRVDQKEITQLSHLGQGTRTNVYEGRLRVEGSGDPEEGKMDDEDPLVPGRDRGQELRVVLKVLDPSHHDIALAFYETASLMSQVSHTHLAFVHGVCVRGPENIMVTEYVEHGPLDVWLRRERGHVPMAWKMVVAQQLASALSYLENKNLVHGNVCGRNILLARLGLAEGTSPFIKLSDPGVGLGALSREERVERIPWLAPECLPGGANSLSTAMDKWGFGATLLEICFDGEAPLQSRSPSEVCLGDPWALPAVGAPPRNPEDRIRAQSCIPSGLVTSSLSGLPAGGPLAGAQCSPSLFRSLWKSLVPGTQKASKRLDFSFRQSDQGSDGRRPGCRVGKKG

SEQ ID NO: 18595 - protein, 61 aa, Homo sapiens
MRAAGVGLVDCHCHLSAPDFDRDLDDVLEKAKKANVVALVAVAEHSGEFEKIMQLSERIWM

SEQ ID NO: 18596 - protein, 764 aa, Homo sapiens
MVAMAEAEAGVAVEVRGLPPAVPDELLTLYFENRRRSGGGPVLSWQRLGCGGVLTFREPADAERVLAQADHELHGAQLSLRPAPPRAPARLLLQGLPPGTTPQRLEQHVQALLRASGLPVQPCCALASPRPDRALVQLPKPLSEADVRVLEEQAQNLGLEGTLVSLARVPQARAVRVVGDGASVDLLLLELYLENERRSGGGPLEDLQRLPGPLGTVASFQQWQVAERVLQQEHRLQGSELSLVPHYDILEPEELAENTSGGDHPSTQGPRATKHALLRTGGLVTALQGAGTVTMGSGEEPGQSGASLRTGPMVQGRGIMTTGSGQEPGQSGTSLRTGPMGSLGQAEQVSSMPMGSLEHEGLVSLRPVGLQEQEGPMSLGPVGSAGPVETSKGLLGQEGLVEIAMDSPEQEGLVGPMEITMGSLEKAGPVSPGCVKLAGQEGLVEMVLLMEPGAMRFLQLYHEDLLAGLGDVALLPLEGPDMTGFRLCGAQASCQAAEEFLRSLLGSISCHVLCLEHPGSARFLLGPEGQHLLQGLEAQFQCVFGTERLATATLDTGLEEVDPTEALPVLPGNAHTLWTPDSTGGDQEDVSLEEVRELLATLEGLDLDGEDWLPRELEEEGPQEQPEEEVTPGHEEEEPVAPSTVAPRWLEEEAALQLALHRSLEPQGQVAEQEEAAALRQALTLSLLEQPPLEAEEPPDGGTDGKAQLVVHSAFEQDVEELDRALRAALEVHVQEETVGPWRRTLPAELRARLERCHGWRGRR

SEQ ID NO: 18597 - protein, 88 aa, Homo sapiens
MIARRNPEPLRFLPDEARSLPPPKLTDPRLLYIGFLGYCSGLIDNLIRRRPIATAGLHRQLLYITAFFFAGYYLVKLEAYANLYVDTL

SEQ ID NO: 18598 - protein, 580 aa, Homo sapiens
MDRVLLRWISLFWLTAMVEGLQVTVPDKKKVAMLFQPTVLRCHFSTSSHQPAVVQWKFKSYCQDRMGESLGMSSTRAQSLSKRNLEWDPYLDCLDSRRTVRVVASKQGSTVTLGDFYRGREITIVHDADLQIGKLMWGDSGLYYCIITTPDDLEGKNEDSVELLVLGRTGLLADLLPSFAVEIMPEWVFVGLVLLGVFLFFVLVGICWCQCCPHSCCCYVRCPCCPDSCCCPQAFRKGYRIQADKERDSMKVLYYVEKELAQFDPARRMRGRYNNTISELSSLHEEDSNFRQSFHQMRSKQFPVSGDLESNPDYWSGVMGGSSGASRGPSAMEYNKEDRESFRHSQPRSKSEMLSRKNFATGVPAVSMDELAAFADSYGQRPRRADGNSHEARGGSRFERSESRAHSGFYQDDSLEEYYGQRSRSREPLTDADRGWAFSPARRRPAEDAHLPRLVSRTPGTAPKYDHSYLGSARERQARPEGASRGGSLETPSKRSAQLGPRSASYYAWSPPGTYKAGSSQDDQEDASDDALPPYSELELTRGPSYRGRDLPYHSNSEKKRKKEPAKKTNDFPTRMSLVV

SEQ ID NO: 18599 - protein, 256 aa, Homo sapiens
MNHSERFVFIAEWYDPNASLLRRYELLFYPGDGSVEMHDVKNHRTFLKRTKYDNLHLEDLFIGNKVNVFSRQLVLIDYGDQYTARQLGSRKEKTLALIKPDAISKAGEIIEIINKAGFTITKLKMMMLSRKEALDFHVDHQSRPFFNELIQFITTGPIIAMEILRDDAICEWKRLLGPANSGVARTDASESIRALFGTDGIRNAAHGPDSFASAAREMELFFPSSGGCGPANTAKFTNCTCCIVKPHAVSEVRRNP

SEQ ID NO: 18600 - protein, 56 aa, Homo sapiens
MPASWTSPQKSSALAPEDHGSSYEVYRYHFQRNDVLSPISTINMHHKRQTVISECS

SEQ ID NO: 18601 - protein, 667 aa, Homo sapiens
MVDIIAKVTRRQSRALPAQVDDPPEPVYANIERQPRATSPGAAAAPLPSPVWETHTDAGTGRPYYYNPDTGVTTWESPFEAAEGAASPATSPASVDSHVSLETEWGQYWDEESRRVFFYNPLTGETAWEDEAENEPEEELEMQPGLSPGSPGDPRPPTPETDYPESLTSYPEEDYSPVGSFGEPGPTSPLTTPPGWSCHVSQDKQMLYTNHFTQEQWVRLEDPHGKPYFYNPEDSSVRWELPQVPVPAPRSIHKSSQDGDTPAQASPPEEKTKTLDKAGVLHRTKTADKGKRLRKKHWSASWTVLEGGVLTFFKDSKTSAAGGLRQPSKFSTPEYTVELRGATLSWAPKDKSSRKNVLELRSRDGSEYLIQHDSEAIISTWHKAIAQGIQELSAELPPEESESSRVDFGSSERLGSWQEKEEDARPNAAAPALGPVGLESDLSKVRHKLRKFLQRRPTLQSLREKGYIKDQVFGCALAALCERERSRVPRFVQQCIRAVEARGLDIDGLYRISGNLATIQKLRYKVDHDERLDLDDGRWEDVHVITGALKLFFRELPEPLFPFSHFRQFIAAIKLQDQARRSRCVRDLVRSLPAPNHDTLRMLFQHLCRVIEHGEQNRMSVQSVAIVFGPTLLRPEVEETSMPMTMVFQNQVVELILQQCADIFPPH

SEQ ID NO: 18602 - protein, 2032 aa, Homo sapiens
MGDDSEWLKLPVDQKCEHKLWKARLSGYEEALKIFQKIKDEKSPEWSKFLGLIKKFVTDSNAVVQLKGLEAALVYVENAHVAGKTTGEVVSGVVSKVFNQPKAKAKELGIEICLMYIEIEKGEAVQEELLKGLDNKNPKIIVACIETLRKALSEFGSKIILLKPIIKVLPKLFESREKAVRDEAKLIAVEIYRWIRDALRPPLQNINSVQLKELEEEWVKLPTSAPRPTRFLRSQQELEAKLEQQQSAGGDAEGGGDDGDEVPQIDAYELLEAVEILSKLPKDFYDKIEAKKWQERKEALESVEVLIKNPKLEAGDYADLVKALKKVVGKDTNVMLVALAAKCLTGLAVGLRKKFGQYAGHVVPTILEKFKEKKPQVVQALQEAIDAIFLTTTLQNISEDVLAVMDNKNPTIKQQTSLFIARSFRHCTASTLPKSLLKPFCAALLKHINDSAPEVRDAAFEALGTALKVVGEKAVNPFLADVDKLKLDKIKECSEKVELIHGKKAGLAADKKEFKPLPGRTAASGAAGDKDTKDISAPKPGPLKKAPAAKAGGPPKKGKPAAPGGAGNTGTKNKKGLETKEIVEPELSIEVCEEKASAVLPPTCIQLLDSSNWKERLACMEEFQKAVELMDRTEMPCQALVRMLAKKPGWKETNFQVMQMKLHIVALIAQKGNFSKTSAQVVLDGLVDKIGDVKCGNNAKEAMTAIAEACMLPWTAEQVVSMAFSQKNPKNQSETLNWLSNAIKEFGFSGLNVKAFISNVKTALAATNPAVRTAAITLLGVMYLYVGPSLRMFFEDEKPALLSQIDAEFEKMQGQSPPAPTRGISKHSTSGTDEGEDGDEPDDGSNDVVDLLPRTEISDKITSELVSKIGDKNWKIRKEGLDEVAGIINDAKFIQPNIGELPTALKGRLNDSNKILVQQTLNILQQLAVAMGPNIKQHVKNLGIPIITVLGDSKNNVRAAALATVNAWAEQTGMKEWLEGEDLSEELKKENPFLRQELLGWLAEKLPTLRSTPTDLILCVPHLYSCLEDRNGDVRKKAQDALPFFMMHLGYEKMAKATGKLKPTSKDQVLAMLEKAKVNMPAKPAPPTKATSKPMGGSAPAKFQPASAPAEDCISSSTEPKPDPKKAKAPGLSSKAKSAQGKKMPSKTSLKEDEDKSGPIFIVVPNGKEQRMKDEKGLKVLKWNFTTPRDEYIEQLKTQMSSCVAKWLQDEMFHSDFQHHNKALAVMVDHLESEKEGVIGCLDLILKWLTLRFFDTNTSVLMKALEYLKLLFTLLSEEEYHLTENEASSFIPYLVVKVGEPKDVIRKDVRAILNRMCLVYPASKMFPFIMEGTKSKNSKQRAECLEELGCLVESYGMNVCQPTPGKALKEIAVHIGDRDNAVRNAALNTIVTVYNVHGDQVFKLIGNLSEKDMSMLEERIKRSAKRPSAAPIKQVEEKPQRAQNISSNANMLRKGPAEDMSSKLNQARSMSGHPEAAQMVRREFQLDLDEIENDNGTVRCEMPELVQHKLDDIFEPVLIPEPKIRAVSPHFDDMHSNTASTINFIISQVASGDINTSIQALTQIDEVLRQEDKAEAMSGHIDQFLIATFMQLRLIYNTHMADEKLEKDEIIKLYSCIIGNMISLFQIESLAREASTGVLKDLMHGLITLMLDSRIEDLEEGQQVIRSVNLLVVKVLEKSDQTNILSALLVLLQDSLLATASSPKFSELVMKCLWRMVRLLPDTINSINLDRILLDIHIFMKVFPKEKLKQCKSEFPIRTLKTLLHTLCKLKGPKILDHLTMIDNKNESELEAHLCRMMKHSMDQTGSKSDKETEKGASRIDEKSSKAKVNDFLAEIFKKIGSKENTKEGLAELYEYKKKYSDADIEPFLKNSSQFFQSYVERGLRVIEMEREGKGRISTSTGISPQMEVTCVPTPTSTVSSIGNTNGEEVGPSVYLERLKILRQRCGLDNTKQDDRPPLTSLLSKPAVPTVASSTDMLHSKLSQLRESREQHQHSDLDSNQTHSSGTVTSSSSTANIDDLKKRLERIKSSRK

SEQ ID NO: 18603 - protein, 645 aa, Homo sapiens
MEDSQDLNEQSVKKTCTESDVSQSQNSRSMEMQDLASPHTLVGGGDTPGSSKLEKSNLSSTSVTTNGTGGENMTVLNTADWLLSCNTPSSATMSLLAVKTEPLNSSETTATTGDGALDTFTGSVITSSGYSPRSAHQYSPQLYPSKPYPHILSTPAAQTMSAYAGQTQYSGMQQPAVYTAYSQTGQPYSLPTYDLGVMLPAIKTESGLSQTQSPLQSGCLSYSPGFSTPQPGQTPYSYQMPGSSFAPSSTIYANNSVSNSTNFSGSQQDYPSYTAFGQNQYAQYYSASTYGAYMTSNNTADGTPSSTSTYQLQESLPGLTNQPGTDLHPGEFDTMQSPSTPIKDLDERTCRSSGSKSRGRGRKNNPSPPPDSDLERVFVWDLDETIIVFHSLLTGSYAQKYGKDPPMAVTLGLRMEEMIFNLADTHLFFNDLEECDQVHIDDVSSDDNGQDLSTYSFATDGFHAAASSANLCLPTGVRGGVDWMRKLAFRYRRVKELYNTYKNNVGGLLGPAKRDAWLQLRAEIEGLTDSWLTNALKSLSIISTRSNCINVLVTTTQLIPALAKVLLYSLGGAFPIENIYSATKIGKESCFERIMQRFGRKVVYVVIGDGVEEEQAAKKHNMPFWRISSHSDLLALHQALELEYL

SEQ ID NO: 18604 - protein, 237 aa, Homo sapiens
MVAGSDAGRALGVLSVVCLLHCFGFISCFSQQIYGVVYGNVTFHVPSNVPLKEVLWKKQKDKVAELENSEFRAFSSFKNRVYLDTVSGSLTIYNLTSSDEDEYEMESPNITDTMKFFLYVLESLPSPTLTCALTNGSIEVQCMIPEHYNSHRGLIMYSWDCPMEQCKRNSTSIYFKMENDLPQKIQCTLSNPLFNTTSSIILTTCIPSSGHSRHRYALIPIPLAVITTCIVLYMNVL

SEQ ID NO: 18605 - protein, 374 aa, Homo sapiens
MPGMMEKGPELLGKNRSANGSAKSPAGGGGSGASSTNGGLHYSEPESGCSSDDEHDVGMRVGAEYQARIPEFDPVETRSCYVSQAGLKLRGSSHPPSLASQSAGIIGATKYTDKDNGGMLVWSPYHSIPDAKLDEYIAIAKEKHGYNVEQALGMLFWHKHNIEKSLADLPNFTPFPDEWTVEDKVLFEQAFSFHGKSFHRIQQMLPDKTIASLVKYYYSWKKTRSRTSLMDRQARKLANRHNQGDSDDDVEETHPMDGNDSDYDPKKEAKKEGNTEQPVQTSKIGLGRREYQSLQHRHHSQRSKCRPPKGMYLTQEDVVAVSCSPNAANTILRQLDMELISLKRQFQASTGSFGLYPLRIWEDYYILLTKCSEC

SEQ ID NO: 18606 - protein, 1162 aa, Homo sapiens
MEPEEERIRYSQRLRGTMRRRYEDDGISDDEIEGKRTFDLEEKLHTNKYNANFVTFMEGKDFNVEYIQRGGLRDPLIFKNSDGLGIKMPDPDFTVNDVKMCVGSRRMVDVMDVNTQKGIEMTMAQWTRYYETPEEEREKLYNVISLEFSHTRLENMVQRPSTVDFIDWVDNMWPRHLKESQTESTNAILEMQYPKVQKYCLMSVRGCYTDFHVDFGGTSVWYHIHQGGKVFWLIPPTAHNLELYENWLLSGKQGDIFLGDRVSDCQRIELKQGYTFVIPSGWIHAVYTPTDTLVFGGNFLHSFNIPMQLKIYNIEDRTRVPNKFRYPFYYEMCWYVLERYVYCITNRSHLTKEFQKESLSMDLELNGLESGNGDEEAVDREPRRLSSRRSVLTSPVANGVNLDYDGLGKTCRSLPSLKKTLAGDSSSDCSRGSHNGQVWDPQCAPRKDRQVHLTHFELEGLRCLVDKLESLPLHKKCVPTGIEDEDALIADVKILLEELANSDPKLALTGVPIVQWPKRDKLKFPTRPKVRVPTIPITKPHTMKPAPRLTPVRPAAASPIVSGARRRRVRCRKCKACVQGECGVCHYCRDMKKFGGPGRMKQSCVLRQCLAPRLPHSVTCSLCGEVDQNEETQDFEKKLMECCICNEIVHPGCLQMDGEGLLNEELPNCWECPKCYQEDSSEKAQKRKMEESDEEAVQAKVLRPLRSCDEPLTPPPHSPTSMLQLIHDPVSPRGMVTRSSPGAGPSDHHSASRDERFKRRQLLRLQATERTMVREKENNPSGKKELSEVEKAKIRGSYLTVTLQRPTKELHGTSIVPKLQAITASSANLRHSPRVLVQHCPARTPQRGDEEGLGGEEEEEEEEEEEDDSAEEGGAARLNGRGSWAQDGDESWMQREVWMSVFRYLSRRELCECMRVCKTWYKWCCDKRLWTKIDLSRCKAIVPQALSGIIKRQPVSLDLSWTNISKKQLTWLVNRLPGLKDLLLAGCSWSAVSALSTSSCPLLRTLDLRWAVGIKDPQIRDLLTPPADKPGQDNRSKLRNMTDFRLAGLDITDATLRLIIRHMPLLSRLDLSHCSHLTDQSSNLLTAVGSSTRYSLTELNMAGCNKLTDQTLIYLRRIANVTLIDLRGCKQITRKACEHFISDLSINSLYCLSDEKLIQKIS

SEQ ID NO: 18607 - protein, 191 aa, Homo sapiens
ASVRSGASDAGGEMREGFGRGPQRETPSPPPREFSNLSQPRKNLWGIKSTAVRNIDGSINNINEDDEEDVVDLAANSLLNKLIHQSLVESSHRVEVLQKDPSSPLYSVKTFEELRLKEELLKGIYAMGFNRPSKIQEMALPMMLAHPPQNLIAQSQSGTGKTAAFVLAMLSRVNALELFPQCLCLAPTYEL

SEQ ID NO: 18608 - protein, 337 aa, Homo sapiens
MADLDSPPKLSGVQQPSEGVGGGRCSEISAELIRSLTELQELEAVYERLCGEEKVVERELDALLEQQNTIESKMVTLHRMGPNLQLIEGDAKQLAGMITFTCNLAENVSSKVRQLDLAKNRLYQAIQRADDILDLKFCMDGVQTALRSEDYEQAAAHTHRYLCLDKSVIELSRQGKEGSMIDANLKLLQEAEQRLKAIVAEKFAIATKEGDLPQVERFFKIFPLLGLHEEGLRKFSEYLCKQVASKAEENLLMVLGTDMSDRRAAVIFADTLTLLFEGIARIVETHQPIVETYYGPGRLYTLIKYLQVECDRQVEKVVDKFIKQRDYHQQNFVFSFF

SEQ ID NO: 18609 - protein, 568 aa, Homo sapiens
MPAMLPTGSHSAVLPPSHCSTAPPSTSQEPSSSADPKLCLSPPTSDSRQERNVQFGLAYQEGRLQKLLKMNGPEDLPKSYDYDLIIIGGGSGGLAAAKEAAQYGKKVMVLDFVTPTPLGTRWGLGGTCVNVGCIPKKLMHQAALLGQALQDSRNYGWKVEETVKHDWDRMIEAVQNHIGSLNWGYRVALREKKVVYENAYGQFIGPHRIKATNNKGKEKIYSAERFLIATGERPRYLGIPGDKEYCISSDDLFSLPYCPGKTLVVGASYVALECAGFLAGIGLDVTVMVRSILLRGFDQDMANKIGEHMEEHGIKFIRQFVPIKVEQIEAGTPGRLRVVAQSTNSEEIIEGEYNTVMLAIGRDACTRKIGLETVGVKINEKTGKIPVTDEEQTNVPYIYAIGDILEDKVELTPVAIQAGRLLAQRLYAGSTVKCDYENVPTTVFTPLEYGACGLSEEKAVEKFGEENIEVYHSYFWPLEWTIPSRDNNKCYAKIICNTKDNERVVGFHVLGPNAGEVTQGFAAALKCGLTKKQLDSTIGIHPVCAEVFTTLSVTKRSGASILQAGCUG

SEQ ID NO: 18610 - protein, 132 aa, Homo sapiens
MTVLEITLAVILTLLGLAILAILLTRWARCKQSEMYISRYSSEQSARLLDYEDGRDFSSQRSKRGRGSRHAYSTQSERSKRDYTPSTNSLALSRSSIALPQGSMSSIKCLQTTEEPPSRTAGAMMQFTAPIP

SEQ ID NO: 18611 - protein, 265 aa, Homo sapiens
MNRFLLLMSLYLLGSARGTSSQPNELSGSIDHQTSVQQLPGEFFSLENPSDAEALYETSSGLNTLSEHGSSEHGSSKHTVAEHTSGEHAESEHASGEPAATEHAEGEHTVGEQPSGEQPSGEHLSGEQPLSELESGEQPSDEQPSGEHGSGEQPSGEQASGEQPSGEHASGEQASGAPISSTSTGTILNCYTCAYMNDQGKCLRGEGTCITQNSQQCMLKKIFEGGKLQFMVQGCENMCPSMNLFSHGTRMQIICCRNQSFCNKI

SEQ ID NO: 18612 - protein, 240 aa, Homo sapiens
MGEDSPVAMFSWYLDNTPTEQAEPLLDACRLRGFWPRSLTLLQSNTSTLLLNSSFLQSRGEVIRIRATGSCLHCGPEPALPSVYLPLGEENNDFVLTVVISATNRAGDTQQTQAMAKVALGDTCVEDVAFQAAVSEKIPTALQGEGGPEQLLQLAKAVSSMLNQEHESQGSGQSLSIDVRQKVPVGSWGAPFIPFLWGPRVCVRPFGLWIKVHGSGEKPVVSPKRLTPPPSLVFWVSDIK

SEQ ID NO: 18613 - protein, 104 aa, Homo sapiens
QDLEKKRKLRKIEWMRQMYYSGSLEAKSTHHETLGLIHTATKGLIRAFEDGGIDSVMEWEVDEVLNWTNTLNFDEDTKKMEKSLVLENNAFLLYKSSSFVYLHY

SEQ ID NO: 18614 - protein, 141 aa, Homo sapiens
MRVEPSWPNQLLKTSVKFLMTSPEIASLSWGQMKVKGSNTTYKDCKVWPGGSRTWDWRETGTEHSPGVQPADVKEVVEKGVQTLVIGRGMSEALKVPSSTVEYLKKHGIDVRVLQTEQAVKEYNALVAQGVRVGGVFHSTC

SEQ ID NO: 18615 - protein, 695 aa, Homo sapiens
MGITSLLANGVYAAAYPLHDGDYNGENVEFNDRKLLYEEWARYGVFYKYQPIDLVRKYFGEKIGLYFAWLGVYTQMLIPASIVGIIVFLYGCATMDENIPSMEMCDQRHNITMCPLCDKTCSYWKMSSACATARASHLFDNPATVFFSVFMALWAATFMEHWKRKQMRLNYRWDLTGFEEEEEAVKDHPRAEYEARVLEKSLKKESRNKETDKVKLTWRDRFPAYLTNLVSIIFMIAVTFAIVLGVIIYRISMAAALAMNSSPSVRSNIRVTVTATAVIINLVVIILLDEVYGCIARWLTKIEVPKTEKSFEERLIFKAFLLKFVNSYTPIFYVAFFKGRFVGRPGDYVYIFRSFRMEECAPGGCLMELCIQLSIIMLGKQLIQNNLFEIGIPKMKKLIRYLKLKQQSPPDHEECVKRKQRYEVDYNLEPFAGLTPEYMEMIIQFGFVTLFVASFPLAPLFALLNNIIEIRLDAKKFVTELRRPVAVRAKDIGIWYNILRGIGKLAVIINAFVISFTSDFIPRLVYLYMYSKNGTMHGFVNHTLSSFNVSDFQNGTAPNDPLDLGYEVQICRYKDYREPPWSENKYDISKDFWAVLAARLAFVIVFQNLVMFMSDFVDWVIPDIPKDISQQIHKEKVLMVELFMREEQDKQQLLETWMEKERQKDEPPCNHHNTKACPDSLGSPAPSHAYHGGVL

SEQ ID NO: 18616 - protein, 520 aa, Homo sapiens
MPSLVVSGIMERNGGFGELGCFGGSAKDRGLLEDERALQLALDQLCLLGLGEPPAPTAGEDGGGGGGGAPAQPAAPPQPAPPPPPAAPPAAPTAAPAAQTPQPPTAPKGASDAKLCALYKEAELRLKGSSNTTECVPVPTSEHVAEIVGRQGCKIKALRAKTNTYIKTPVRGEEPVFMVTGRREDVATARREIISAAEHFSMIRASRNKSGAAFGVAPALPGQVTIRVRVPYRVVGLVVGPKGATIKRIQQQTNTYIITPSRDRDPVFEITGAPGNVERAREEIETHIAVRTGKILEYNNENDFLAGSPDAAIDSRYSDAWRVHQPGCKPLSTFRQNSLGCIGECGVDSGFEAPRLGEQGGDFGYGGYLFPGYGVGKQDVYYGVAETSPPLWAGQENATPTSVLFSSASSSSSSSAKARAGPPGAHRSPATSAGPELAGLPRRPPGEPLQGFSKLGGGGLRSPGGGRDCMVCFESEVTAALVPCGHNLFCMECAVRICERTDPECPVCHITATQAIRIFS

SEQ ID NO: 18617 - protein, 745 aa, Homo sapiens
MARRPRHSIYSSDEDDEDFEMCDHDYDGLLPKSGKRHLGKTRWTREEDEKLKKLVEQNGTDDWKVIANYLPNRTDVQCQHRWQKVLNPELIKGPWTKEEDQRVIELVQKYGPKRWSVIAKHLKGRIGKQCRERWHNHLNPEVKKTSWTEEEDRIIYQAHKRLGNRWAEIAKLLPGRTDNAIKNHWNSTMRRKVEQEGYLQESSKASQPAVATSFQKNSHLMGFAQAPPTAQLPATGQPTVNNDYSYYHISEAQNVSSHVPYPVALHVNIVNVPQPAAAAIQRHYNDEDPEKEKRIKELELLLMSTENELKGQQVLPTQNHTCSYPGWHSTTIADHTRPHGDSAPVSCLGEHHSTPSLPADPGSLPEESASPARCMIVHQGTILDNDSSSWCDLSSFEFFEEADFSPSQHHTGKALQLQQREGNGTKPAGEPSPRVNKRMLSESSLDPPKVLPPARHSTIPLVILRKKRGQASPLATGDCSSFIFADVSSSTPKRSPVKSLPFSPSQFLNTSSNHENSDLEMPSLTSTPLIGHKLTVTTPFHRDQTVKTQKENTVFRTPAIKRSILESSPRTPTPFKHALAAQEIKYGPLKMLPQTPSHLVEDLQDVIKQESDESGIVAEFQENGPPLLKKIKQEVESPTDKSGNFFCSHHWEGDSLNTQLFTQTSPVADAPNILTSSVLMAPASEDEDNVLKAFTVPKNRSLASPLQPCSSTWEPASCGKMEEQMTSSSQARKYVNAFSARTLVM

SEQ ID NO: 18618 - protein, 604 aa, Homo sapiens
MASVAWAVLKVLLLLPTQTWSPVGAGNPPDCDAPLASALPRSSFSSSSELSSSHGPGFSRLNRRDGAGGWTPLVSNKYQWLQIDLGERMEVTAVATQGGYGSSDWVTSYLLMFSDGGRNWKQYRREESIWGFPGNTNADSVVHYRLQPPFEARFLRFLPLAWNPRGRIGMRIEVYGCAYKSEVVYFDGQSALLYRLDKKPLKPIRDVISLKFKAMQSNGILLHREGQHGNHITLELIKGKLVFFLNSGNAKLPSTIAPVTLTLGSLLDDQHWHSVLIELLDTQVNFTVDKHTHHFQAKGDSSYLDLNFEISFGGIPTPGRSRAFRRKSFHGCLENLYYNGVDVTELAKKHKPQILMMGNVSFSCPQPQTVPVTFLSSRSYLALPGNSGEDKVSVTFQFRTWNRAGHLLFGELRRGSGSFVLFLKDGKLKLSLFQPGQSPRNVTAGAGLNDGQWHSVSFSAKWSHMNVVVDDDTAVQPLVAVLIDSGDTYYFGALYEQSCEAHKHRGNPSGLYYIDADGSGPLGPFLVYCNMTDAAWTVVQHGGPDAVTLRGAPSGHPRSAVSFAYAAGAGQLRSAVNLAERCEQRLALRCGTARRPDSRGLVTQ

SEQ ID NO: 18619 - protein, 1035 aa, Homo sapiens
NLDQHFRLLAQKQSLPYLEAANLLLQAQLPPKPPAWAWAEGWTRYGPEGEAVPVAIPEERALVFDVEVCLAEGTCPTLAVAISPSAWYSWCSQRLVEERYSWTSQLSPADLIPLEVPTGASSPTQRDWQEQLVVGHNVSFDRAHIREQYLIQGSRMRFLDTMSMHMAISGLSSFQRSLWIAAKQGKHKVQPPTKQGQKSQRKARRGPAISSWDWLDISSVNSLAEVHRLYVGGPPLEKEPRELFVKGTMKDIRENFQDLMQYCAQDVWATHEVFQQQLPLFLERCPHPVTLAGMLEMGVSYLPVNQNWERYLAEAQGTYEELQREMKKSLMDLANDACQLLSGERYKEDPWLWDLEWDLQEFKQKKAKKVKKEPATASKLPIEGAGAPGDPMDQEDLGPCSEEEEFQQDVMARACLQKLKGTTELLPKRPQHLPGHPGWYRKLCPRLDDPAWTPGPSLLSLQMRVTPKLMALTWDGFPLHYSERHGWGYLVPGRRDNLAKLPTGTTLESAGVVCPYRAIESLYRKHCLEQGKQQLMPQEAGLAEEFLLTDNSAIWQTVEELDYLEVEAEAKMENLRAAVPGQPLALTARGGPKDTQPSYHHGNGPYNDVDIPGCWFFKLPHKDGNSCNVGSPFAKDFLPKMEDGTLQAGPGGASGPRALEINKMISFWRNAHKRISSQMVVWLPRSALPRAVIRHPDYDEEGLYGAILPQVVTAGTITRRAVEPTWLTASNARPDRVGSELKAMVQAPPGYTLVGADVDSQELWIAAVLGDAHFAGMHGCTAFGWMTLQGRKSRGTDLHSKTATTVGISREHAKIFNYGRIYGAGQPFAERLLMQFNHRLTQQEAAEKAQQMYAATKGLRWYRLSDEGEWLVRELNLPVDRTEGGWISLQDLRKVQRETARKSQWKKWEVVAERAWKGGTESEMFNKLESIATSDIPRTPVLGCCISRALEPSAVQEEFMTSRVNWVVQSSAVDYLHLMLVAMKWLFEEFAIDGRFCISIHDEVRYLVREEDRYRAALALQITNLLTSKIPSSYG

SEQ ID NO: 18620 - protein, 41 aa, Homo sapiens
MWATLPLLCAGAWLLGVPVCGAAELCVNSLGTQRARRPRGC

SEQ ID NO: 18621 - protein, 866 aa, Homo sapiens
MFFACYCALRTNVKKYRYQDEDAPHDHSLPRLTHEVRGPELVHVSEKNLSQIENVHGYVLQSHISPLKASPAPIIVNTDTLDTIPYVNGTEIEYEFEEITLERGNSGLGFSIAGGTDNPHIGDDPGIFITKIIPGGAAAEDGRLRVNDCILRVNEVDVSEVSHSKAVEALKEAGSIVRLYVRRRRPILETVVEIKLFKGPKGLGFSIAGGVGNQHIPGDNSIYVTKIIDGGAAQKDGRLQVGDRLLMVNNYSLEEVTHEEAVAILKNTSEVVYLKVGKPTTIYMTDPYGPPDITHSYSPPMENHLLSGNNGTLEYKTSLPPISPGRYSPIPKHMLVDDDYTRPPEPVYSTVNKLCDKPASPRHYSPVECDKSFLLSAPYSHYHLGLLPDSEMTSHSQHSTATRQPSMTLQRAVSLEGEPRKVVLHKGSTGLGFNIVGGEDGEGIFVSFILAGGPADLSGELQRGDQILSVNGIDLRGASHEQAAAALKGAGQTVTIIAQYQPEDYARFEAKIHDLREQMMNHSMSSGSGSLRTNQKRSLYVRAMFDYDKSKDSGLPSQGLSFKYGDILHVINASDDEWWQARRVMLEGDSEEMGVIPSKRRVERKERARLKTVKFNAKPGVIDSKGDIPGLGDDGYGTKTLKHVSSNASDSESSYRGQEDLILSYEPVTRQEINYTRPVIILGPMKDRINDDLISEFPDKFGSCVPHTTRPKRDYEVDGRDYHFVISREQMEKDIQEHKFIEAGQYNDNLYGTSVQSVRFVAERGKHCILDVSGNAIKRLQVAQLYPIAIFIKPRSLEPLMEMNKRLTEEQAKKTYDRAIKLEQEFGEYFTAIVQGDTLEDIYNQCKLVIEEQSGPFIWIPSKEKL

SEQ ID NO: 18622 - protein, 889 aa, Homo sapiens
MYLSICCCFLLWAPALTLKNLNYSVPEEQGAGTVIGNIGRDARLQPGLPPAERGGGGRSKSGSYRVLENSAPHLLDVDADSGLLYTKQRIDRESLCRHNAKCQLSLEVFANDKEICMIKVEIQDINDNAPSFSSDQIEMDISENAAPGTRFPLTSAHDPDAGENGLRTYLLTRDDHGLFGLDVKSRGDGTKFPELVIQKALDREQQNHHTLVLTALDGGEPPRSATVQINVKVIDSNDNSPVFEAPSYLVELPENAPLGTVVIDLNATDADEGPNGEVLYSFSSYVPDRVRELFSIDPKTGLIRVKGNLDYEENGMLEIDVQARDLGPNPIPAHCKVTVKLIDRNDNAPSIGFVSVRQGALSEAAPPGTVIALVRVTDRDSGKNGQLQCRVLGGGGTGGGGGLGGPGGSVPFKLEENYDNFYTVVTDRPLDRETQDEYNVTIVARDGGSPPLNSTKSFAIKILDENDNPPRFTKGLYVLQVHENNIPGEYLGSVLAQDPDLGQNGTVSYSILPSHIGDVSIYTYVSVNPTNGAIYALRSFNFEQTKAFEFKVLAKDSGAPAHLESNATVRVTVLDVNDNAPVIVLPTLQNDTAELQVPRNAGLGYLVSTVRALDSDFGESGRLTYEIVDGNDDHLFEIDPSSGEIRTLHPFWEDVTPVVELVVKVTDHGKPTLSAVAKLIIRSVSGSLPEGVPRVNGEQHHWDMSLPLIVTLSTISIILLAAMITIAVKCKRENKEIRTYNCRIAEYSHPQLGGGKGKKKKINKNDIMLVQSEVEERNAMNVMNVVSSPSLATSPMYFDYQTRLPLSSPRSEVMYLKPASNNLTVPQGHAGCHTSFTGQGTNASETPATRMSIIQTDNFPAEPNYMGSRQQFVQSISVAPRLRTQKEPA

SEQ ID NO: 18623 - protein, 641 aa, Homo sapiens
MLGSWHTVRVPGSENELHLAELEPSSLYEVLMVARSAAGEGQPAMLTFRTSKEKTASSKNTQASSPPVGIPKYPVVSEAANNNFGVVLTDSSRHSGVPEAPDRPTISTASETSVYVTWIPRANGGSPITAFKVEYKRMRTSNWLVAAEDIPPSKLSVEVRSLEPGSTYKFRVIAINHYGESFRSSASRPYQVVGFPNRFSSRPITGPHIAYTEAVSDTQIMLKWTYIPSSNNNTPIQGFYIYYRPTDSDNDSDYKRDVVEGSKQWHMIGHLQPETSYDIKMQCFNEGGESEFSNVMICETKVKRVPGASEYPVKDLSTPPNSLGSGGNVGPATSPARSSDMLYLIVGCVLGVMVLILMVFIAMCLWKNRQQNTIQKYDPPGYLYQGSDMNGQMVDYTTLSGASQINGNVHGGFLTNGGLSSGYSHLHHKVPNAVNGIVNGSLNGGLYSGHSNSLTRTHVDFEHPHHLVNGGGMYTAVPQIDPLECVNCRNCRNNNRCFTKTNSTFSSSPPPVVPVVAPYPQDGLEMKPLSHVKVPVCLTSAVPDCGQLPEESVKDNVEPVPTQRTCCQDIVNDVSSDGSEDPAEFSRGDSCAHSETEINIVSWNALILPPVPEGCAEKTMWSPPGIPLDSPTEVLQQPRET

SEQ ID NO: 18624 - protein, 513 aa, Homo sapiens
MAASEVAGVVANAPSPPESSSLCASKSDEGLPDGLSTKDSAQKQKNSPLLSTDFKTADSEVNTDQDIEKNLDKMMTERTLLKERYQEVLDKQRQVENQLQVQLKQLQQRREEEMKNHQEILKAIQDVTIKREETKKKIEKEKKEFLQKEQDLKAEIEKLCEKGRREVWEMELDRLKNQDGEINRNIMEETERAWKAEILSLESRKELLVLKLEEAEKEAELHLTYLKSTPPTLETVRSKQEWETRLNGVRIMKKNVRDQFNSHIQLVRNGAKLSSLPQIPTPTLPPPPSETDFMLQVFQPSPSLAPRMPFSIGQVTMPMVMPSADPRSLSFPILNPALSQPSQPSSPLPGSHGRNSPGLGSLVSPHGPHMPPAASIPPPPGLGGVKASAETPRPQPVDKLEKILEKLLTRFPQCNKAQMTNILQQIKTARTTMAGLTMEELIQLVAARLAEHERVAASTQAPATCKLCLMCQKLVQPSELHPMACTHVLHKECIKFWAQTNTNDTCPFCPTLK

SEQ ID NO: 18625 - protein, 1440 aa, Homo sapiens
MARAQALVLALTFQLCAPETETPAAGCTFEEASDPAVPCEYSQAQYDDFQWEQVRIHPGTRAPADLPHGSYLMVNTSQHAPGQRAHVIFQSLSENDTHCVQFSYFLYSRDGHSPGTLGVYVRVNGGPLGSAVWNMTGSHGRQWHQAELAVSTFWPNEYQVLFEALISPDRRGYMGLDDILLLSYPCAKAPHFSRLGDVEVNAGQNASFQCMAAGRAAEAERFLLQRQSGALVPAAGVRHISHRRFLATFPLAAVSRAEQDLYRCVSQAPRGAGVSNFAELIVKEPPTPIAPPQLLRAGPTYLIIQLNTNSIIGDGPIVRKEIEYRMARGPWAEVHAVSLQTYKLWHLDPDTEYEISVLLTRPGDGGTGRPGPPLISRTKCAEPMRAPKGLAFAEIQARQLTLQWEPLGYNVTRCHTYTVSLCYHYTLGSSHNQTIRECVKTEQGVSRYTIKNLLPYRNVHVRLVLTNPEGRKEGKEVTFQTDEDVPSGIAAESLTFTPLEDMIFLKWEEPQEPNGLITQYEISYQSIESSDPAVNVPGPRRTISKLRNETYHVFSNLHPGTTYLFSVRARTGKGFGQAALTEITTNISAPSFDYADMPSPLGESENTITVLLRPAQGRGAPISVYQVIVEEERARRLRREPGGQDCFPVPLTFEAALARGLVHYFGAELAASSLPEAMPFTVGDNQTYRGFWNPPLEPRKAYLIYFQAASHLKGETRLNCIRIARKAACKESKRPLEVSQRSEEMGLILGICAGGLAVLILLLGAIIVIIRKGKPVNMTKATVNYRQEKTHMMSAVDRSFTDQSTLQEDERLGLSFMDTHGYSTRGDQRSGGVTEASSLLGGSPRRPCGRKGSPYHTGQLHPAVRVADLLQHINQMKTAEGYGFKQEYESFFEGWDATKKKDKVKGSRQEPMPAYDRHRVKLHPMLGDPNADYINANYIDIRINREGYHRSNHFIATQGPKPEMVYDFWRMVWQEHCSSIVMITKLVEVGRVKCSRYWPEDSDTYGDIKIMLVKTETLAEYVVRTFALERRGYSARHEVRQFHFTAWPEHGVPYHATGLLAFIRRVKASTPPDAGPIVIHCSAGTGRTGCYIVLDVMLDMAECEGVVDIYNCVKTLCSRRVNMIQTEEQYIFIHDAILEACLCGETTIPVSEFKATYKEMIRIDPQSNSSQLREEFQTLNSVTPPLDVEECSIALLPRNRDKNRSMDVLPPDRCLPFLISTDGDSNNYINAALTDSYTRSAAFIVTLHPLQSTTPDFWRLVYDYGCTSIVMLNQLNQSNSAWPCLQYWPEPGRQQYGLMEVEFMSGTADEDLVARVFRVQNISREGHLLVRHFQFLRWSAYRDTPDSKKAFLHLLAEVDKWQAESGDGRTIVHCLNGGGRSGTFCACATVLEMIRCHNLVDVFFAAKTLRNYKPNMVETMDQYHFCYDVALEYLEGLESR

SEQ ID NO: 18626 - protein, 206 aa, Homo sapiens
IFEAVGAQGTVVLDEESLHVDDLDLFDGDSGLRFAEDLEVSELKVGADLEREGDLGEVPPHAVHESNHLTDLYRRDETIQVKGNGYVQSPRFPNSYPRNLLLTWRLHSQENTRIQLVFDNQFGLEEAENDICRYDFVEVEDISETSTIIRGRWCGHKEVPPRIKSRTNQIKITFKSDDYFVAKPGFKIYYSLLEDFQPAAASETNW

SEQ ID NO: 18627 - protein, 764 aa, Homo sapiens
MTELKAKGPRAPHVAGGPPSPEVGSPLLCRPAAGPFPGSQTSDTLPEVSAIPISLDGLLFPRPCQGQDPSDEKTQDQQSLSDVEGAYSRAEATRGAGGSSSSPPEKDSGLLDSVLDTLLAPSGPGQSQPSPPACEVTSSWCLFGPELPEDPPAAPATQRVLSPLMSRSGCKVGDSSGTAAAHKVLPRGLSPARQLLLPASESPHWSGAPVKPSPQAAAVEVEEEDGSESEESAGPLLKGKPRALGGAAAGGGAAAVPPGAAAGGVALVPKEDSRFSAPRVALVEQDAPMAPGRSPLATTVMDFIHVPILPLNHALLAARTRQLLEDESYDGGAGAASAFAPPRSSPCASSTPVAVGDFPDCAYPPDAEPKDDAYPLYSDFQPPALKIKEEEEGAEASARSPRSYLVAGANPAAFPDFPLGPPPPLPPRATPSRPGEAAVTAAPASASVSSASSSGSTLECILYKAEGAPPQQGPFAPPPCKAPGASGCLLPRDGLPSTSASAAAAGAAPALYPALGLNGLPQLGYQAAVLKEGLPQVYPPYLNYLRPDSEASQSPQYSFESLPQKICLICGDEASGCHYGVLTCGSCKVFFKRAMEGRKFKKFNKVRVVRALDAVALPQPVGVPNESQALSQRFTFSPGQDIQLIPPLINLLMSIEPDVIYAGHDNTKPDTSSSLLTSLNQLGERQLLSVVKWSKSLPGFRNLHIDDQITLIQYSWMSLMVFGLGWRSYKHVSGQMLYFAPDLILNESHRSLSSFKLAKKSSSV

SEQ ID NO: 18628 - protein, 553 aa, Homo sapiens
MIKSRPLDYTFVPRTWIFPAEYTQFQNYVKELKKKRKQKTFIVKPANGAMGHGISLIRNGDKLPSQDHLIVQEYIEKPFLMEGYKFDLRIYILVTSCDPLKIFLYHDGLVRMGTEKYIPPNESNLTQLYMHLTNYSVNKHNEHFERDETENKGSKRSIKWFTEFLQANQHDVAKFWSDISELVVKTLIVAEPHVLHAYRMCRPGQPPGSESVCFEVLGFDILLDRKLKPWLLEINRAPSFGTDQKIDYDVKRGVLLNALKLLNIRTSDKRRNLAKQKAEAQRRLYGQNSIKRLLPGSSDWEQQRHQLERRKEELKERLAQVRKQISREEHENRHMGNYRRIYPPEDKALLEKYENLLAVAFQTFLSGRAASFQRELNNPLKRMKEEDILDLLEQCEIDDEKLMGKTTKTRGPKPLCSMPESTEIMKRPKYCSSDSSYDSSSSSSESDENEKEEYQNKKREKQVTYNLKPSNHYKLIQQPSSIRRSVSCPRSISAQSPSSGDTRPFSAQQMISVSRPTSASRSHSLNRASSYMRHLPHSNDACSTNSQVIILAQ

SEQ ID NO: 18629 - protein, 1989 aa, Homo sapiens
MDEVEQDQHEARLKELFDSFDTTGTGSLGQEELTDLCHMLSLEEVAPVLQQTLLQDNLLGRVHFDQFKEALILILSRTLSNEEHFQEPDCSLEAQPKYVRGGKRYGRRSLPEFQESVEEFPEVTVIEPLDEEARPSHIPAGDCSEHWKTQRSEEYEAEGQLRFWNPDDLNASQSGSSPPQDWIEEKLQEVCEDLGITRDGHLNRKKLVSICEQYGLQNVDGEMLEEVFHNLDPDGTMSVEDFFYGLFKNGKSLTPSASTPYRQLKRHLSMQSFDESGRRTTTSSAMTSTIGFRVFSCLDDGMGHASVERILDTWQEEGIENSQEILKALDFSLDGNINLTELTLALENELLVTKNSIHQAALASFKAEIRHLLERVDQVVREKEKLRSDLDKAEKLKSLMASEVDDHHAAIERRNEYNLRKLDEEYKERIAALKNELRKEREQILQQAGKQRLELEQEIEKAKTEENYIRDRLALSLKENSRLENELLENAEKLAEYENLTNKLQRNLENVLAEKFGDLDPSSAEFFLQEERLTQMRNEYERQCRVLQDQVDELQSELEEYRAQGRVLRLPLKNSPSEEVEANSGGIEPEHGLGSEECNPLNMSIEAELVIEQMKEQHHRDICCLRLELEDKVRHYEKQLDETVVSCKKAQENMKQRHENETHTLEKQISDLKNEIAELQGQAAVLKEAHHEATCRHEEEKKQLQVKLEEEKTHLQEKLRLQHEMELKARLTQAQASFEREREGLQSSAWTEEKVRGLTQELEQFHQEQLTSLVEKHTLEKEELRKELLEKHQRELQEGREKMETECNRRTSQIEAQFQSDCQKVTERCESALQSLEGRYRQELKDLQEQQREEKSQWEFEKDELTQECAEAQELLKETLKREKTTSLVLTQEREMLEKTYKEHLNSMVVERQQLLQDLEDLRNVSETQQSLLSDQILELKSSHKRELREREEVLCQAGASEQLASQRLERLEMEHDQERQEMMSKLLAMENIHKATCETADRERAEMSTEISRLQSKIKEMQQATSPLSMLQSGCQVIGEEEVEGDGALSLLQQGEQLLEENGDVLLSLQRAHEQAVKENVKMATEISRLQQRLQKLEPGLVMSSCLDEPATEFFGNTAEQTEQFLQQNRTKQVEGVTRRHVLSDLEDDEVRDLGSTGTSSVQRQEVKIEESEASVEGFSELENSEETRTESWELKNQISQLQEQLMMLCADCDRASEKKQDLLFDVSVLKKKLKMLERIPEASPKYKLLYEDVSRENDCLQEELRMMETRYDEALENNKELTAEVFRLQDELKKMEEVTETFLSLEKSYDEVKIENEGLNVLVLRLQGKIEKLQESVVQRCDCCLWEASLENLEIEPDGNILQLNQTLEECVPRVRSVHHVIEECKQENQYLEGNTQLLEKVKAHEIAWLHGTIQTHQERPRVQNQVILEENTTLLGFQDKHFQHQATIAELELEKTKLQELTRKLKERVTILVKQKDVLSHGEKEEELKAMMHDLQITCSEMQQKVELLRYESEKLQQENSILRNEITTLNEEDSISNLKLGTLNGSQEEMWQKTETVKQENAAVQKMVENLKKQISELKIKNQQLDLENTELSQKNSQNQEKLQELNQRLTEMLCQKEKEPGNSALEEREQEKFNLKEELERCKVQSSTLVSSLEAELSEVKIQTHIVQQENHLLKDELEKMKQLHRCPDLSDFQQKISSVLSYNEKLLKEKEALSEELNSCVDKLAKSSLLEHRIATMKQEQKSWEHQSASLKSQLVASQEKVQNLEDTVQNVNLQMSRMKSDLRVTQQEKEALKQEVMSLHKQLQNAGGKSWAPEIATHPSGLHNQQKRLSWDKLDHLMNEEQQLLWQENERLQTMVQNTKAELTHSREKVRQLESNLLPKHQKHLNPSGTMNPTEQEKLSLKRECDQFQKEQSPANRKVSQMNSLEQELETIHLENEGLKKKQVKLDEQLMENSVVGSSREGCSSLPEIVCEDAAPEVHCDA

SEQ ID NO: 18630 - protein, 824 aa, Homo sapiens
MRLALLWALGLLGAGSPLPSWPLPNIVLSWGVLGPAGGTEEQQAESEKAPREPLEPQVLQDDLPISLKKVLQTSLPEPLRIKLELDGDSHILELLQNRELVPGRPTLVWYQPDGTRVVSEGHTLENCCYQGRVRGYAGSWVSICTCSGLRGLVVLTPERSYTLEQGPGDLQGPPIISRIQDLHLPGHTCALSWRESVHTQKPPEHPLGQRHIRRRRDVVTETKTVELVIVADHSEAQKYRDFQHLLNRTLEVALLLDTFFRPLNVRVALVGLEAWTQRDLVEISPNPAVTLENFLHWRRAHLLPRLPHDSAQLVTGTSFSGPTVGMAIQNSICSPDFSGGVNMDHSTSILGVASSIAHELGHSLGLDHDLPGNSCPCPGPAPAKTCIMEASTDFLPGLNFSNCSRRALEKALLDGMGSCLFERLPSLPPMAAFCGNMFVEPGEQCDCGFLDDCVDPCCDSLTCQLRPGAQCASDGPCCQNCQLRPSGWQCRPTRGDCDLPEFCPGDSSQCPPDVSLGDGEPCAGGQAVCMHGRCASYAQQCQSLWGPGAQPAAPLCLQTANTRGNAFGSCGRNPSGSYVSCTPRDAICGQLQCQTGRTQPLLGSIRDLLWETIDVNGTELNCSWVHLDLGSDVAQPLLTLPGTACGPGLVCIDHRCQRVDLLGAQECRSKCHGHGVCDSNRHCYCEEGWAPPDCTTQLKATSSLTTGLLLSLLVLLVLVMLGASYWYRARLHQRLCQLKGPTCQYRAAQSGPSERPGPPQRALLARGTKSQGPAKPPPPRKPLPADPQGRCPSGDLPGPGAGIPPLVVPSRPAPPPPTVSSLYL

SEQ ID NO: 18631 - protein, 484 aa, Homo sapiens
AAQPSQKITATKIPKSLPTKPSAPSTSIVPIKSPHPTQKTAPSSFTKSALPTQKQVPPTSRPVPARVSRPAEKPIQRNPGMPRPPPPSTRPLPPTTSSSKKPIPTLARTEAKITSHASKPASARTSTHKPPPFTALSSSPAPTPGSTRSTRPPATMVPPTSGTSTPRTAPAVPTPGSAPTGSKKPIGSEASKKAGPKSSPRKPVPLRPGKAARDVPLSDLTTRPSPRQPQPSQQTTPALVLAPAQFLSSSPRPTSSGYSIFHLAGSTPFPLLMGPPGPKGDCGLPGPPGLPGLPGIPGARGPRGPPGPYGNPGLPGPPGAKGDMGLPGLSGNPGPPGRKGHKGYPGPAGHPGEQGQPGPEGSPGAKGYPGRQGLPGPVGDPGPKGSRGYIGLPGLFGLPGSDGERGLPGVPGKRGKMGMPGFPGVFGERGPPGLDGNPGELGLPGPPGVPGLIGDLGVLGPIGYPGPKGMKGLMGSVGEPGLKG

SEQ ID NO: 18632 - protein, 604 aa, Homo sapiens
MAQAIFEALEGMDNQTVLAVQSLLDGQGAVPDPTGQSVNAPPAIQPLDDEDVFLCGKCKKQFNSLPAFMTHKREQCQGNAPALATVSLATNSIYPPSAAPTAVQQAPTPANRQISTYITVPPSPLIQTLVQGNILVSDDVLMSAMSAFTSLDQPMPQGPPPVQSSLNMHSVPSYLTQPPPPPPPPPPLPPPPPPQPPPPPPQSLGPPGRPNPGGNGVVEVYSAAAPLAGSGTVEIQALGMQPYPPLEVPNQCVEPPVYPTPTVYSPGKQGFKPKGPNPAAPMTSATGGTVATFDSPATLKTRRAKGARGLPEAAGKPKAQKLKCSYCDKSFTKNFDLQQHIRSHTGEKPFQCIACGRAFAQKSNVKKHMQTHKVWPPGHSGGTVSRNSVTVQVMALNPSRQEDEESTGLGQPLPGAPQPQALSTAGEEEGDKPESKQVVLIDSSYLCQFCPSKFSTYFQLKSHMTQHKNEQVYKCVVKSCAQTFPKLDTFLEHIKSHQEELSYRCHLCGKDFPSLYDLGVHQYSHSLLPQHSPKKDNAVYKCFLVNATCGVICPPTAAGAGSSAKCARSSSGGSIISNCMLTSTRVRSPTNAQCASLRSTARTN

SEQ ID NO: 18633 - protein, 118 aa, Homo sapiens
MWATLPLLCAGAWLLGVPVCGAAELCVNSLVAGLSPPLGPWSLRSPSQPERCCPWRNSSWWTAPRTSIITAAKGVSPARLSSISCTTRGSWVKTPTPTRARMVIASSNLERPSALSRM

SEQ ID NO: 18634 - protein, 704 aa, Homo sapiens
TEANLTGHEEKVSVENFELLKVLGTGAYGKVFLVRKAGGHDAGKLYAMKVLRKAALVQRAKTQEHTRTERSVLELVRQAPFLVTLHYAFQTDAKLHLILDYVSGGEMFTHLYQRQYFKEAEVRVYGGEIVLALEHLHKLGIIYRDLKLENVLLDSEGHIVLTDFGLSKEFLTEEKERTFSFCGTIEYMAPEIIRSKTGHGKAVDWWSLGILLFELLTGASPFTLEGERNTQAEVSRRILKCSPPFPPRIGPVAQDLLQRLLCKDPKKRLGAGPQGAQEVRNHPFFQGLDWVALAARKIPAPFRPQIRSELDVGNFAEEFTRLEPVYSPPGSPPPGDPRIFQGYSFVAPSILFDHNNAVMTDGLEAPGAGDRPGRAAVARSAMMQQYELDLREPALGQGSFSVCRRCRQRQSGQEFAVKILSRRLEANTQREVAALRLCQSHPNVVNLHEVHHDQLHTYLVLELLRGGELLEHIRKKRHFSESEASQILRSLVSAVSFMHEEAGVVHRDLKPENILYADDTPGAPVKIIDFGFARLRPQSPGVPMQTPCFTLQYAAPELLAQQGYDESCDLWSLGVILYMMLSGQVPFQGASGQGGQSQAAEIMCKIREGRFSLDGEAWQGVSEEAKELVRGLLTVDPAKRLKLEGLRGSSWLQDGSARSSPPLRTPDVLESSGPAVRSGLNATFMAFNRGKREGFFLKSVENAP

SEQ ID NO: 18635 - protein, 250 aa, Homo sapiens
MGDIPAVGLSSWKASPGKVTEAVKEAIDAGYRHFDCAYFYHNEREVGAGIRCKIKEGAVRREDLFIATKLWCTCHKKSLVETACRKSLKALKLNYLDLYLIHWPMGFKPPHPEWIMSCSELSFCLSHPRVQDLPLDESNMVIPSDTDFLDTWEAMEDLVITGLVKNIGVSNFNHEQLERLLNKPGLRFKPLTNQILIRFQIQRNVIVIPGSITPSHIKENIQVFDFELTQHDMDNILSLNRNLRLAMFPM

SEQ ID NO: 18636 - protein, 427 aa, Homo sapiens
MLYDYVERKRKENSGAQLHVTYLVSGSLIQNGHSCHKVAVVREDKLEAVKSKLAVTASIHVYSIQKAMLKDSGPLFNTDYDILKSNLQNCSKFSAIQCAAAVPRAPAESSSSSKKFEQSHLHMSSETQANNELTTNGHGPPASKQVSQQPKGIMGMFASKAAAKTQETNKETKTEAKEVTNASAAGNKAPGKGNMMSNFFGKAAMNKFKVNLDSEQAVKEEKIVEQPTVSVTEPKLATPAGLKKSSKKAEPVKVLQKEKKRGKRVALSDDETKETENMRKKRRRIKLPESDSSEDEVFPDSPGAYEAESPSPPPPPSPPLEPVPKTEPEPPSVKSSSGENKRKRKRVLKSKTYLDGEGCIVTEKVYESESCTDSEEELNMKTSSVHRPPAMTVKKEPREERKGPKKGTAALGKANRQVSITGFFQRK

SEQ ID NO: 18637 - protein, 260 aa, Homo sapiens
MKSLQEALQNQLKETSEKAEKHQATINFLKTEVERKSKMIRDLQNENKSLKNKLLSGNKLCGIHAEESKKIQAQLKELRYGKKDLLFKAQQLTDLEQKLAVAKNELEKAALDRESQMKAMKETVQLCLTSVFRDQPPPPLSLITSNPTRMLLPPRNIASKLPDAAAKSKPQQSASGNNESSQVESTKEGNPSTTACDSQDEGRPCSMKHKESPPSNATAETEPIPQKLQMPPCSECEVKKAPEKPLTSFEGMAAREEKIL

SEQ ID NO: 18638 - protein, 307 aa, Homo sapiens
LGFLYYSAWKLHLLQWEEDSNSVVLSFDSAGQTLGSEYDRLGFLLNLDSKLPAELATKYANFSEGACKPGYASALMTAIFPRFSKPAPMFLDDSFRKWARIREFVPPFGIKGQDNLIKAILSVTKEYRLTPALDSLRCRRCIIVGNGGVLANKSLGSRIDDYDIVVRLNSAPVKGFEKDVGSKTTLRITYPEGAMQRPEQYERDSLFVLAGFKWQDFKWLKYIVYKERVSASDGFWKSVATRVPKEPPEIRILNPYFIQEAAFTLIGLPFNNGLMGRGSWTHNIQREKEFLRKLVKARVITDLSSGI

SEQ ID NO: 18639 - protein, 148 aa, Homo sapiens
PAGLKKSSKKAEPVKVLQKEKKRGKRVALSDDETKETENMRKKRRRIKLPESDSSEDEVFPDSPGAYEAESPSPPPPPSPPLEPVPKTEPEPPSVKSSSGENKRKRKRVLKSKTYLDGEGCIVVLDMQSHSLDILEHYVEMPIQRLER

SEQ ID NO: 18640 - protein, 820 aa, Homo sapiens
MWSWKCLLFWAVLVTATLCTARPSPTLPEQAQPWGAPVEVESFLVHPGDLLQLRCRLRDDVQSINWLRDGVQLAESNRTRITGEEVEVQDSVPADSGLYACVTSSPSGSDTTYFSVNVSDALPSSEDDDDDDDSSSEEKETDNTKPNRMPVAPYWTSPEKMEKKLHAVPAAKTVKFKCPSSGTPNPTLRWLKNGKEFKPDHRIGGYKVRYATWSIIMDSVVPSDKGNYTCIVENEYGSINHTYQLDVVERSPHRPILQAGLPANKTVALGSNVEFMCKVYSDPQPHIQWLKHIEVNGSKIGPDNLPYVQILKTAGVNTTDKEMEVLHLRNVSFEDAGEYTCLAGNSIGLSHHSAWLTVLEALEERPAVMTSPLYLEIIIYCTGAFLISCMVGSVIVYKMKSGTKKSDFHSQMAVHKLAKSIPLRRQVSADSSASMNSGVLLVRPSRLSSSGTPMLAGVSEYELPEDPRWELPRDRLVLGKPLGEGCFGQVVLAEAIGLDKDKPNRVTKVAVKMLKSDATEKDLSDLISEMEMMKMIGKHKNIINLLGACTQDGPLYVIVEYASKGNLREYLQARRPPGLEYCYNPSHNPEEQLSSKDLVSCAYQVARGMEYLASKKCIHRDLAARNVLVTEDNVMKIADFGLARDIHHIDYYKKTTNGRLPVKWMAPEALFDRIYTHQSDVWSFGVLLWEIFTLGGSPYPGVPVEELFKLLKEGHRMDKPSNCTNELYMMMRDCWHAVPSQRPTFKQLVEDLDRIVALTSNQEYLDLSMPLDQYSPSFPDTRSSTCSSGEDSVFSHEPLPEEPCLPRHPAQLANGGLKRR

SEQ ID NO: 18641 - protein, 1462 aa, Homo sapiens
MDTTAAAALPAFVALLLLSPWPLLGSAQGQFSAGGCTFDDGPGACDYHQDLYDDFEWVHVSAQEPHYLPPEMPQGSYMIVDSSDHDPGEKARLQLPTMKENDTHCIDFSYLLYSQKGLNPGTLNILVRVNKGPLANPIWNVTGFTGRDWLRAELAVSTFWPNEYQVIFEAEVSGGRSGYIAIDDIQVLSYPCDKSPHFLRLGDVEVNAGQNATFQCIATGRDAVHNKLWLQRRNGEDIPVAQTKNINHRRFAASFRLQEVTKTDQDLYRCVTQSERGSGVSNFAQLIVREPPRPIAPPQLLGVGPTYLLIQLNANSIIGDGPIILKEVEYRMTSGSWTETHAVNAPTYKLWHLDPDTEYEIRVLLTRPGEGGTGLPGPPLITRTKCAEPMRTPKTLKIAEIQARRIAVDWESLGYNITRCHTFNVTICYHYFRGHNESKADCLDMDPKAPQHVVNHLPPYTNVSLKMILTNPEGRKESEETIIQTDEDVPGPVPVKSLQGTSFENKIFLNWKEPLDPNGIITQYEISYSSIRSFDPAVPVAGPPQTVSNLWNSTHHVFMHLHPGTTYQFFIRASTVKGFGPATAINVTTNISAPTLPDYEGVDASLNETATTITVLLRPAQAKGAPISAYQIVVEELHPHRTKREAGAMECYQVPVTYQNAMSGGAPYYFAAELPPGNLPEPAPFTVGDNRTYQGFWNPPLAPRKGYNIYFQAMSSVEKETKTQCVRIATKAAATEEPEVIPDPAKQTDRVVKIAGISAGILVFILLLLVVILIVKKSKLAKKRKDAMGNTRQEMTHMVNAMDRSYADQSTLHAEDPLSITFMDQHNFSPRLPNDPLVPTAVLVPITDENHSATAESSRLLDVPRYLCEGTESPYQTGQLHPAIRVADLLQHINLMKTSDSYGFKEEYESFFEGQSASWDVAKKDQNRAKNRYGNIIAYDHSRVILQPVEDDPSSDYINANYIDIWLYRDGYQRPSHYIATQGPVHETVYDFWRMIWQEQSACIVMVTNLVEVGRVKCYKYWPDDTEVYGDFKVTCVEMEPLAEYVVRTFTLERRGYNEIREVKQFHFTGWPDHGVPYHATGLLSFIRRVKLSNPPSAGPIVVHCSAGAGRTGCYIVIDIMLDMAEREGVVDIYNCVKALRSRRINMVQTEEQYIFIHDAILEACLCGETAIPVCEFKAAYFDMIRIDSQTNSSHLKDEFQTLNSVTPRLQAEDCSIACLPRNHDKNRFMDMLPPDRCLPFLITIDGESSNYINAALMDSYRQPAAFIVTQYPLPNTVKDFWRLVYDYGCTSIVMLNEVDLSQGCPQYWPEEGMLRYGPIQVECMSCSMDCDVINRIFRICNLTRPQEGYLMVQQFQYLGWASHREVPGSKRSFLKLILQVEKWQEECEEGEGRTIIHCLNGGGRSGMFCAIGIVVEMVKRQNVVDVFHAVKTLRNSKPNMVEAPEQYRFCYDVALEYLESS

SEQ ID NO: 18642 - protein, 1441 aa, Homo sapiens
MRAGVQTGDRIIKVNGTLVTHSNHLEVVKLIKSGSYVALTVQGRPPGSPQIPLADSEVEPSVIGHMSPIMTSPHSPGASGNMERITSPVLMGEENNVVHNQKVEILRKMLQKEQERLQLLQEDYNRTPAQRLLKEIQEAKKHIPQLQEQLSKATGSAQDGAVVTPSRPLGDTLTVSEAETDPGDVLGRTDCSSGDASRPSSDNADSPKSGPKERIYLEENPEKSETIQDTDTQSLVGSPSTRIAPHIIGAEDDDFGTEHEQINGQCSCFQSIELLKSRPAHLAVFLHHVVSQFDPATLLCYLYSDLYKHTNSKETRRIFLEFHQFFLDRSAHLKVSVPDEMSADLEKRRPELIPEDLHRHYIQTMQERVHPEVQRHLEDFRQKRSMGLTLAESELTKLDAERDKDRLTLEKERTCAEQIVAKIEEVLMTAQAVEEDKSSTMQYVILMYMKHLGVKVKEPRNLEHKRGRIGFLPKIKQSMKKDKEGEEKGKRRGFPSILGPPRRPSRHDNSAIGRAMELQKARHPKHLSTPSSVSPEPQDSAKLRQSGLANEGTDAGYLPANSMSSVASGASFSQEGGKENDTGSKQVGETSAPGDTLDGTPRTLNTVFDFPPPPLDQVQEEECEVERVTEHGTPKPFRKFDSVAFGESQSEDEQFENDLETDPPNWQQLVSREVLLGLKPCEIKRQEVINELFYTERAHVRTLKVLDQVFYQRVSREGILSPSELRKIFSNLEDILQLHIGLNEQMKAVRKRNETSVIDQIGEDLLTWFSGPGEEKLKHAAATFCSNQPFALEMIKSRQKKDSRFQTFVQDAESNPLCRRLQLKDIIPTQMQRLTKYPLLLDNIAKYTEWPTEREKVKKAADHCRQILNYVNQAVKEAENKQRLEDYQRRLDTSSLKLSEYPNVEELRNLDLTKRKMIHEGPLVWKVNRDKTIDLYTLLLEDILVLLQKQDDRLVLRCHSKILASTADSKHTFSPVIKLSTVLVRQVATDNKALFVISMSDNGAQIYELVAQTVSEKTVWQDLICRMAASVKEQSTKPIPLPQSTPGEGDNDEEDPSKLKEEQHGISVTGLQSPDRDLGLESTLISSKPQSHSLSTSGKSEVRDLFVAERQFAKEQHTDGTLKEVGEDYQIAIPDSHLPVSEERWALDALRNLGLLKQLLVQQLGLTEKSVQEDWQHFPRYRTASQGPQTDSVIQNSENIKAYHSGEGHMPFRTGTGDIATCYSPRTSTESFAPRDSVGLAPQDSQASNILVMDHMIMTPEMPTMEPEGGLDDSGEHFFDAREAHSDENPSEGDGAVNKEEKDVNLRISGNYLILDGYDPVQESSTDEEVASSLTLQPMTGIPAVESTHQQQHSPQNTHSDGAISPFTPEFLVQQRWGAMEYSCFEIQSPSSCADSQSQIMEYIHKIEADLEHLKKVEESYTILCQRLAGSALTDKHSDKS

SEQ ID NO: 18643 - protein, 351 aa, Homo sapiens
MLEVLRVLSTSSEALHHAVIFLFNGAEENVLQASHGFITQHPWASLIRAFINLEAAGVGGKELVFQTGPENPWLVQAYVSAAKHPFASVVAQEVFQSGIIPSDTDFRIYRDFGNIPGIDLAFIENGYIYHTKYDTADRILTDSIQRAGDNILAVLKHLATSDMLAAASKYRHGNMVFFDVLGLFVIAYPSRIGSIINYMVVMGVVLYLGKKFLQPKHKTGNYKKDFLCGLGITLISWFTSLVTVLIIAVFISLIGQSLSWYNHFYVSVCLYGTATVAKIILIHTLAKRFYYMNASAQYLGEVFFDISLFVHCCFLVTLTYQGLCSAFISAVWVAFPLLTKLCVHKDFKQHD

SEQ ID NO: 18644 - protein, 698 aa, Homo sapiens
MVEKGSDHSSDKSPSTPEQGVQRSCSSQSGRSGGKNSKKSQSWYNVLSPTYKQRNEDFRKLFKQLPDTERLIVDYSCALQRDILLQGRLYLSENWICFYSNIFRWETLLTVRLKDICSMTKEKTARLIPNAIQVCTDSEKHFFTSFGARDRTYMMMFRLWQNALLEKPLCPKELWHFVHQCYGNELGLTSDDEDYVPPDDDFNTMGYCEEIPVEENEVNDSSSKSSIETKPDASPQLPKKSITNSTLTSTGSSEAPVSFDGLPLEEEALEGDGSLEKELAIDNIMGEKIEMIAPVNSPSLDFNDNEDIPTELSDSSDTHDEGEVQAFYEDLSGRQYVNEVFNFSVDKLYDLLFTNSPFQRDFMEQRRFSDIIFHPWKKEENGNQSRVILYTITLTNPLAPKTATVRETQTMYKASQESECYVIDAEVLTHDVPYHDYFYTINRYTLTRVARNKSRLRVSTELRYRKQPWGLVKTFIEKNFWSGLEDYFRHLESELAKTESTYLAEMHRQSPKEKASKTTTVRRRKRPHAHLRVPHLEEVMSPVTTPTDEDVGHRIKHVAGSTQTRHIPEDTPNGFHLQSVSKLLLVISCVICFSLVLLVILNMMLFYKLWMLEYTTQTLTAWQGLRLQERLPQSQTEWAQLLESQQKYHDTELQKWREIIKSSVMLLDQMKDSLINLQNGIRSRDYTSESEEKRNRYH

SEQ ID NO: 18645 - protein, 589 aa, Homo sapiens
MTVVGNPRSWSCQWLPILILLLGTGHGPGVEGVTHYKAGDPVILYVNKVGPYHNPQETYHYYQLPVCCPEKIRHKSLSLGEVLDGDRMAESLYEIRFRENVEKRILCHMQLSSAQVEQLRQAIEELYYFEFVVDDLPIRGFVGYMEESGFLPHSHKIGLWTHLDFHLEFHGDRIIFANVSVRDVKPHSLDGLRPDEFLGLTHTYSVRWSETSVERRSDRRRGDDGGFFPRTLEIHWLSIINSMVLVFLLVGFVAVILMRVLRNDLARYNLDEETTSAGSGDDFDQGDNGWKIIHTDVFRFPPYRGLLCAVLGVGAQFLALGTGIIVMALLGMFNVHRHGAINSAAILLYALTCCISGYVSSHFYRQIGGERWVWNIILTTSLFSVPFFLTWSVVNSVHWANGSTQALPATTILLLLTVWLLVGFPLTVIGGIFGKNNASPFDAPCRTKNIAREIPPQPCAISVELYYIFATVWGREQYTLYGILFFVFAILLSVGACISIALTYFQLSGEDYRWWWRSVLSVGSTGLFIFLYSVFYYARRSNMSGAVQTVEFFGYSLLTGYVFFLMLGTISFFSSLKFIRYIYVNLKMD

SEQ ID NO: 18646 - protein, 177 aa, Homo sapiens
MELGCWTQLGLTFLQLLLISSLPREYTVINEACPGAEWNIMCRECCEYDQIECVCPGKREVVGYTIPCCRNEENECDSCLIHPGCTIFENCKSCRNGSWGGTLDDFYVKGFYCAECRAGWYGGDCMPCSSSPCFHDGTCVLDKAGSYKCACLAGYTGQRCENLLEERNCSDPGGPVN

SEQ ID NO: 18647 - protein, 484 aa, Homo sapiens
MFSALKKLVGSDQAPGRDKNIPAGLQSMNQALQRRFAKGVQYNMKIVIRGDRNTGKTALWHRLQGRPFVEEYIPTQEIQVTSIHWSYKTTDDIVKVEVWDVVDKGKCKKRGDGLKMENDPQEAESEMALDAEFLDVYKNCNGVVMMFDITKQWTFNYILRELPKVPTHVPVCVLGNYRDMGEHRVILPDDVRDFIDNLDRPPGSSYFRYAESSMKNSFGLKYLHKFFNIPFLQLQRETLLRQLETNQLDMDATLEELSVQQETEDQNYGIFLEMMEARSRGHASPLAANGQSPSPGSQSPVVPAGAVSTGSSSPGTPQPAPQLPLNAAPPSSVPPVPPSEALPPPACPSAPAPRRSIISRLFGTSPATEAAPPPPEPVPAAEGPATVQSVEDFVPDDRLDRSFLEDTTPARDEKKVRRSAAAPGPLLRWSRGRVSRPPRRRVTPRDPLLHKCCPSSWMTPTLRARDQTHSAGRMTFPCEMTPPM

SEQ ID NO: 18648 - protein, 66 aa, Homo sapiens
MNRPAPVEISYENMRFLITHNPTNATLNKFTEELKKYGVTTLVRVCDATYDKAPVEKEGIHVLMAE

SEQ ID NO: 18649 - protein, 867 aa, Homo sapiens
MFWKFDLHSSSHIDTLLEREDVTLKELMDEEDVLQECKAQNRKLIEFLLKAECLEDLVSFIIEEPPQDMDEKIRYKYPNISCELLTSDVSQMNDRLGEDESLLMKLYSFLLNDSPLNPLLASFFSKVLSILISRKPEQIVDFLKKKHDFVDLIIKHIGTSAIMDLLLRLLTCIEPPQPRQDVLNWLNEEKIIQRLVEIVHPSQEEDRHSNASQSLCEIVRLSRDQMLQIQNSTEPDPLLATLEKQEIIEQLLSNIFHKEKNESAIVSAIQILLTLLETRRPTFEGHIEICPPGMSHSACSVNKSVLEAIRGRLGSFHELLLEPPKKSVMKTTWGVLDPPVGNTRLNVIRLISSLLQTNTSSINGDLMELNSIGVILNMFFKYTWNNFLHTQVEICIALILASPFENTENATITDQDSTGDNLLLKHLFQKCQLIERILEAWEMNEKKQAEGGRRHGYMGHLTRIANCIVHSTDKGPNSALVQQLIKDLPDEVRERWETFCTSSLGETNKRNTVDLVTTCHIHSSSDDEIDFKETGFSQDSSLQQMQQMTSNFIDQFGFNDEKFADQDDIGNVSFDRVSDINFTLNTNESGNIALFEACCKERIQQFDDGGSDEEDIWEEKHIAFTPESQRRSSSGSTDSEESTDSEEEDGAKQDLFEPSSANTEDKMEVDLSEPPNWSANFDVPMETTHGAPLDSVGSDVWSTEEPMPTKETGWASFSEFTSSLSTKDSLRSNSPVEMETSTEPMDPLTPSAAALAVQPEAAGSVAMEASSDGEEDAESTDKVTETVMNGGMKETLSLTVDAKTETAVFKSEEGKLSTSQDAACKDAEECPETAEAKCAAPRPPSSSPEQRTGQPSAPGDTSVNGPV

SEQ ID NO: 18650 - protein, 755 aa, Homo sapiens
MEALTLWLLPWICQCVSVRADSIIHIGAIFEENAAKDDRVFQLAVSDLSLNDDILQSEKITYSIKVIEANNPFQAVQEACDLMTQGILALVTSTGCASANALQSLTDAMHIPHLFVQRNPGGSPRTACHLNPSPDGEAYTLASRPPVRLNDVMLRLVTELRWQKFVMFYDSEYDIRGLQSFLDQASRLGLDVSLQKVDKNISHVFTSLFTTMKTEELNRYRDTLRRAILLLSPQGAHSFINEAVETNLASKDSHWVFVNEEISDPEILDLVHSALGRMTVVRQIFPSAKDNQKCTRNNHRISSLLCDPQEGYLQMLQISNLYLYDSVLMLANAFHRKLEDRKWHSMASLNCIRKSTKPWNGGRSMLDTIKKGHITGLTGVMEFREDSSNPYVQFEILGTTYSETFGKDMRKLATWDSEKGLNGSLQERPMGSRLQGLTLKVVTVLEEPFVMVAENILGQPKRYKGFSIDVLDALAKALGFKYEIYQAPDGRYGHQLHNTSWNGMIGELISKRADLAISAITITPERESVVDFSKRYMDYSVGILIKKPEEKISIFSLFAPFDFAVWACIAAAIPVVGVLIFVLNRIQAVRAQSAAQPRPSASATLHSAIWIVYGAFVQQGGESSVNSMAMRIVMGSWWLFTLIVCSSYTANLAAFLTVSRMDNPIRTFQDLSKQVEMSYGTVRDSAVYEYFRAKGTNPLEQDSTFAELWRTISKNGGADNCVSSPSEGIRKDPGAAGHRGPGCAEAEVVAAHGPL

SEQ ID NO: 18651 - protein, 325 aa, Homo sapiens
MVPSFLSLSFSSLGLWASGLILVLGFLKLIHLLLRRQTLAKAMDKFPGPPTHWLFGHALEIQETGSLDKVVSWAHQFPYAHPLWFGQFIGFLNIYEPDYAKAVYSRGDPKAPDVYDFFLQWIGRGLLVLEGPKWLQHRKLLTPGFHYDVLKPYVAVFTESTRIMLDKWEEKAREGKSFDIFCDVGHMALNTLMKCTFGRGDTGLGHSTIMTSSTGSPHMAAASCGPARWPMTIQTRSSGSGRQPCRMRRCGRRSRTGGTWTSWTFSWVPGMKMTSNCQMQTSGLKWTHSCLKAMTPPPVVSPGFSTAWPCTLSTSIVVERRSARS

SEQ ID NO: 18652 - protein, 689 aa, Homo sapiens
MAGMSQRPPSMYWCVGPEESAVCPERAMETLNGAGDTGGKPSTRGGDPAARSRRTEGIRAAYRRGDRGGARDLLEEACDQCASQLEKGQLLSIPAAYGDLEMVRYLLSKRLVELPTEPTDDNPAVVAAYFGHTAVVQELLESLPGPCSPQRLLNWMLALACQRGHLGVVKLLVLTHGADPESYAVRKNEFPVIVRLPLYAAIKSGNEDIAIFLLRHGAYFCSYILLDSPDPSKHLLRKYFIEASPLPSSYPGKTALRVKWSHLRLPWVDLDWLIDISCQITELDLSANCLATLPSVIPWGLINLRKLNLSDNHLGELPGVQSSDEIICSRLLEIDISSNKLSHLPPGFLHLSKLQKLTASKNCLEKLFEEENATNWIGLRKLQELDISDNKLTELPALFLHSFKSLNSLNVSRNNLKVFPDPWACPLKCCKASRNALECLPDKMAVFWKNHLKDVDFSENALKEVPLGLFQLDALMFLRLQGNQLAALPPQEKWTCRQLKTLDLSRNQLGKNEDGLKTKRIAFFTTRGRQRSGTEAASVLEFPAFLSESLEVLCLNDNHLDTVPPSVCLLKSLSELYLGNNPGLRELPPELGQLGNLWQLDTEDLTISNVPAEIQKEGPKAMLSYLRAQLRKAEKCKLMKMIIVGPPRQGKSTLLEILQTGRAPQVVHGEATIRTTKWELQRPAGSRAK

SEQ ID NO: 18653 - protein, 513 aa, Homo sapiens
MSVVGQDRKSGSGCYLRWLLFLSLLFLGLVAAVCLGLNLIFLVAYLVCACHCRRDDAVQTKQHHSCCITWTAVVAGLICCAAVGVGFYGNSETNDGAYQLMYSLDDANHTFSGIDALVSGTTQKMKVDLEQHLARLSEIFAARGDYLQTLKFIQQMAGSVVVQLSGLPVWREVTMELTKLSDQTGYVEYYRWLSYLLLFILDLVICLIACLGLAKRSKCLLASMLCCGALSLLLSWASLAADGSAAVATSDFCVAPDTFILNVTEGQISTEVTRYYLYCSQSGSSPFQQTLTTFQRALTTMQIQVAGLLQFAVPLFSTAEEDLLAIQLLLNSSESSLHQLTAMVDCRGLHKDYLDALAGICYDGLQGLLYLGLFSFLAALAFSTMICAGPRAWKHFTTRNRDYDDIDDDDPFNPQAWRMAAHSPPRGQLHSFCSYSSGLGSQTSLQPPAQTISNAPVSEYMNQAMLFGRNPRYENVPLIGRASPPPTYSPSMRATYLSVADEHLRHYGNQFPA

SEQ ID NO: 18654 - protein, 520 aa, Homo sapiens
TGDNLSSMLLENLTDNESENTNLKKKVFEKEAHIQELSCLFQSEKANTLKANRFSQSVKVVHERLQIQIHKREAENDKLKEYVKSLETKIAKWNLQSRMNKNEAIVMKEASRQKTVALKKASKVYKQRLDHFTGAIEKLTSQIRDQEAKLSETISASNAWKSHYEKIVIEKTELEVQIETMKKQIINLLEDLKKMEDHGKNSCEEILRKVHSIEYENETLNLENTKLKTTLAALKDEVVSVENELSELQEVEKKQKTLIEMYKTQVQKLQEAAEIVKSRCENLLHKNNQITKTKNKNVEKMRGQMESHLKELERVCDSLTAAERRLHECQESLQCCKGKCADQEHTIRELQGQVDGNHNLLTKLSLEEENCLIQLKCENLQQKLEQMDAENKELEKKLANQEECLKHSNLKFKEKSAEYTALARQLEAALEEGRQKVAEEIEKMSSRESALQIKILDLETELRKKNEEQNQLVCKMNSKAQHQEVCLKEVQNSLEKSENQNESIKNYLQFLKTSYVTMFE

SEQ ID NO: 18655 - protein, 397 aa, Homo sapiens
MNLLPNIESPVTRQEKMATVWDEAEQDGIGEEVLKMSTEEIIQRTRLLDSEIKLLDVDPNDQEEDGANIDLDSQRKGKCAVIKTSTRQTYFLPVIGLVDAEKLKPGDLVGVNKDSYLILETLPTEYDSRVKAMEVDERPTEQYSDIGGLDKQIQELVEAIVLPMNHKEKFENLGIQPPKGVLMYGPPGTGKTLLARACAAQTKATFLKLAGPQLVQMFIGDGAKLVRDAFALAKEKAPSIIFIDELDAIGTKRFDSEKAGDREVQRTMLELLNQLDGFQPNTQVKVIAATNRVDILDPALLRSGRLDRKIEFPMPNEEARARIMQIHSRKMNVSPDVNYEELARCTDDFNGAQCKAVCVEAGMIALRRGATELTHEDYMEGILEVQAKKKANLQYYA

SEQ ID NO: 18656 - protein, 392 aa, Homo sapiens
EERSALFGNIQDIYHFNSELLQDLENCENDPVAIAECFVSKSEEFHIYTQYCTNYPRSVAVLTECMRNKILAKFFRERQETLKHSLPLGSYLLKPVQRILKYHLLLHEIENHLDKDTEGYDVVLDAIDTMQRVAWHINDMKRKHEHAVRLQEIQSLLTNWKGPDLTSYGELVLEGTFRIQRAKNERTLFLFDKLLLITKKRDDTFTYKAHILCGNLMLVEVIPKEPLSFSVFHYKNPKLQHTVQAKSQQDKRLWVLHLKRLILENHAAKIPAKAKQAILEMDAIHHPGFCYSPEGGTKALFGSKEGSAPYRLRRKSEPSSRSHKVLKTSETAQDIQKVSREEGSPQLSSARPSPAQRNSQPSSSTMISVLRAGGALRNIWTDHQISTTFGNG

SEQ ID NO: 18657 - protein, 364 aa, Homo sapiens
MQRLGATLLCLLLAAAVPTAPAPAPTATSAPVKPGPALSYPQEEATLNEMFREVEELMEDTQHKLRSAVEEMEAEEAAAKASSEVNLANLPPSYHNETNTDTKVGNNTIHVHREIHKITNNQTGQMVFSETVITSVGDEEGRRSHECIIDEDCGPSMYCQFASFQYTCQPCRGQRMLCTRDSECCGDQLCVWGHCTKMATRGSNGTICDNQRDCQPGLCCAFQRGLLFPVCTPLPVEGELCHDPASRLLDLITWELEPDGALDRCPCASGLLCQPHRLPRLEPGFVPSLPSHSLVYVCKPTFVGSRDQDGEILLPREVPDEYEVGSFMEEVRQELEDLERSLTEEMALREPAAAAAALLGGEEI

SEQ ID NO: 18658 - protein, 535 aa, Homo sapiens
MRKPRAAVGSGHRKQAASQEGRQKHAKNNSQAKPSACDACAGMIAECPGAPAGLARQPEEVVLQASVSSYHLFRDVAEVTAFRGSLLSWYDQEKRDLPWRRRAEDEMDLDRRAYAVWVSEVMLQQTQVATVINYYTGWMQKWPTLQDLASASLEEVNQLWAGLGYYSRGRRLQEGARKVVEELGGHMPRTAETLQQLLPGVGRYTAGAIASIAFGQATGVVDGNVARVLCRVRAIGADPSSTLVSQQLWGLAQQLVDPARPGDFNQAAMELGATVCTPQRPLCSQCPVESLCRARQRVEQEQLLASGSLSGSPDVEECAPNTGQCHLCLPPSEPWDQTLGVVNFPRKASRKPPREESSATCVLEQPGALGAQILLVQRPNSGLLAGLWEFPSVTWEPSEQLQRKALLQELQRWAGPLPATHLRHLGEVVHTFSHIKLTYQVYGLALEGQTPVTTVPPGARWLTQEEFHTAAVSTAMKKVFRVYQGQQPGTCMGSKRSQVSSPCSRKKPRMGQQVLDNFFRSHISTDAHSLNSAAQ

SEQ ID NO: 18659 - protein, 59 aa, Homo sapiens
AAGVGLVDCHCHLSAPDFDRDLDDVLEKAKKANVVALVAVAEHSGEFEKIMQLSERIWM

SEQ ID NO: 18660 - protein, 1355 aa, Homo sapiens
MVPGEENQLVPKEIENAAEEPRVLCIIQDTTNSKTVNERITLNLPASTPVRKLFEDVANKVGYINGTFDLVWGNGINTADMAPLDHTSDKSLLDANFEPGKKNFLHLTDKDGEQPQILLEDSSAGEDSVHDRFIGPLPREGSGGSTSDYVSQSYSYSSILNKSETGYVGLVNQAMTCYLNSLLQTLFMTPEFRNALYKWEFEESEEDPVTSIPYQLQRLFVLLQTSKKRAIETTDVTRSFGWDSSEAWQQHDVQELCRVMFDALEQKWKQTEQADLINELYQGKLKDYVRCLECGYEGWRIDTYLDIPLVIRPYGSSQAFASVEEALHAFIQPEILDGPNQYFCERCKKKCDARKGLRFLHFPYLLTLQLKRFDFDYTTMHRIKLNDRMTFPEELDMSTFIDVEDEKSPQTESCTDSGAENEGSCHSDQMSNDFSNDDGVDEGICLETNSGTEKISKSGLEKNSLIYELFSVMVHSGSAAGGHYYACIKSFSDEQWYSFNDQHVSRITQEDIKKTHGGSSGSRGYYSSAFASSTNAYMLIYRLKDPARNAKFLEVDEYPEHIKNLVQKERELEEQEKRQREIERNTCKIKLFCLHPTKQVMMENKLEVHKDKTLKEAVEMAYKMMDLEEVIPLDCCRLVKYDEFHDYLERSYEGEEDTPMGLLLGGVKSTYMFDLLLETRKPDQVFQSYKPGEVMVKVHVVDLKAESVAAPITVRAYLNQTVTEFKQLISKAIHLPAETMRIVLERCYNDLRLLSVSSKTLKAEGFFRSNKVFVESSETLDYQMAFADSHLWKLLDRHANTIRLFVLLPEQSPVSYSKRTAYQKAGGDSGNVDDDCERVKGPVGSLKSVEAILEESTEKLKSLSLQQQQDGDNGDSSKSTETSDFENIESPLNERDSSASVDNRELEQHIQTSDPENFQSEERSDSDVNNDRSTSSVDSDILSSSHSSDTLCNADNAQIPLANGLDSHSITSSRRTKANEGKKETWDTAEEDSGTDSEYDESGKSRGEMQYMYFKAEPYAADEGSGEGHKWLMVHVDKRITLAAFKQHLEPFVGVLSSHFKVFRVYASNQEFESVRLNETLSSFSDDNKITIRLGRALKKGEYRVKVYQLLVNEQEPCKFLLDAVFAKGMTVRQSKEELIPQLREQCGLELSIDRFRLRKKTWKNPGTVFLDYHIYEEDINISSNWEVFLEVLDGVEKMKSMSQLAVLSRRWKPSEMKLDPFQEVVLESSSVDELREKLSEISGIPLDDIEFAKGRGTFPCDISVLDIHQDLDWNPKVSTLNVWPLYICDDGAVIFYRDKTEELMELTDEQRNELMKKESSRLQKTGHRVTYSPRKEKALKIYLDGAPNKDLTQD

SEQ ID NO: 18661 - protein, 484 aa, Homo sapiens
MAIGKRLATLPTKEQKTQRLISELSLLNHKLPARVWLPTAGFDHHVVRVPHTQAVVLNSKDKAPYLIYVEVLECENFDTTSVPARIPENRIRSTRSVENLPECGITHEQRAGSFSTVPNYDNDDEAWSVDDIGELQVELPEVHTNSCDNISQFSVDSITSQESKEPVFIAAGDIRRRLSEQLAHTPTAFKRDPEDPSAVALKEPWQEKVRRIREGSPYGHLPNWRLLSVIVKCGDDLRQELLAFQVLKQLQSIWEQERVPLWIKPYKILVISADSGMIEPVVNAVSIHQVKKQSQLSLLDYFLQEHGSYTTEAFLSAQRNFVQSCAGYCLVCYLLQVKDRHNGNILLDAEGHIIHIDFGFILSSSPRNLGFETSAFKLTTEFVDVMGGLDGDMFNYYKMLMLQGLIAARKHMDKVVQIVEIMQQGSQLPCFHGSSTIRNLKERFHMSMTEEQLQLLVEQMVDGSMRSITTKLYDGFQYLTNGIM

SEQ ID NO: 18662 - protein, 610 aa, Homo sapiens
MIGEEVPSDQYYWAPLAQHERGSLASLDSLRKGGPPPPNWRQPELPEVIAMLGFRLDAVKSNAAAYLQHLCYRNDKVKTDVRKLKGIPVLVGLLDHPKKEVHLGACGALKNISFGRDQDNKIAIKNCDGVPALVRLLRKARDMDLTEVITGTLWNLSSHDSIKMEIVDHALHALTDEVIIPHSGWEREPNEDCKPRHIEWESVLTNTAGCLRNVSSERSEARRKLRECDGLVDALIFIVQAEIGQKDSDSKLVENCVCLLRNLSYQVHREIPQAERYQEAAPNVANNTGPHAASCFGAKKGKGKKPIEDPANDTVDFPKRTSPARGYELLFQPEVVRIYISLLKESKTPAILEASAGAIQNLCAGRWTYGRYIRSALRQEKALSAIADLLTNEHERVVKAASGALRNLAVDARNKELIGKHAIPNLVKNLPGGQQNSSWNFSEDTVISILNTINEVIAENLEAAKKLRETQGIEKLVLINKSGNRSEKEVRAAALVLQTIWGYKELRKPLEKEGWKKSDFQVNLNNASRSQSSHSYDDSTLPLIDRNQKSDKKPDREEIQMSNMGSNTKSLDNNYSTPNERGDHNRTLDRSGDLGDMEPLKGTTPLMQKI

SEQ ID NO: 18663 - protein, 393 aa, Homo sapiens
MEPFVVLVLCLSFMLLFSLWRQSCRRRKLPPGPTPLPIIGNMLQIDVKDICKSFTNFSKVYGPVFTVYFGMNPIVVFHGYEAVKEALIDNGEEFSGRGNSPISQRITKGLGIISSNGKRWKEIRRFSLTTLRNFGMGKRSIEDRVQEEAHCLVEELRKTKASPCDPTFILGCAPCNVICSVVFQKRFDYKDQNFLTLMKRFNENFRILNSPWIQVCNNFPLLIDCFPGTHNKVLKNVALTRSYIREKVKEHQASLDVNNPRDFIDCFLIKMEQEKDNQKSEFNIENLVGTVADLFVAGTETTSTTLRYGLLLLLKHPEVTAKVQEEIDHVIGRHRSPCMQDRSHMPYTDAVVHEIQRYSDLVPTGVPHAVTTDTKFRNYLIPKSFDNKIMLAA

SEQ ID NO: 18664 - protein, 1002 aa, Homo sapiens
MAFLHLCHLALRHGIPLEEVAKKTSFKDCIPRSFRRHIRQHSALTRLRLRNVFRRFLRDFQPGRLSQQMVMVKYLATLERLAPRFGTERVPVCHLRLLAQAEGEPCYIRDSGVAPTDPGPESAAGPPTHEVLVTGTGGIQWWPVEEEVNKEEGSSGSSGRNPQASLFGKKAKAHKAVGQPADRPREPLWAYFCDFRDITHVVLKEHCVSIHRQDNKCLELSLPSRAAALSFVSLVDGYFRLTADSSHYLCHEVAPPRLVMSIRDGIHGPLLEPFVQAKLRPEDGLYLIHWSTSHPYRLILTVAQRSQAPDGMQSLRLRKFPIEQQDGAFVLEGWGRSFPSVRELGAALQGCLLRAGDDCFSLRRCCLPQPGETSNLIIMRGARASPRTLNLSQLSFHRVDQKEITQLSHLGQGTRTNVYEGRLRVEGSGDPEEGKMDDEDPLVPGRDRGQELRVVLKVLDPSHHDIALAFYETASLMSQVSHTHLAFVHGVCVRGPENIMVTEYVEHGPLDVWLRRERGHVPMAWKMVVAQQLASALSYLENKNLVHGNVCGRNILLARLGLAEGTSPFIKLSDPGVGLGALSREERVERIPWLAPECLPGGANSLSTAMDKWGFGATLLEICFDGEAPLQSRSPSEKEHFYQRQHRLPEPSCPQLATLTSQCLTYEPTQRPSFRTILRDLTRLQPHNLADVLTVNPDSPASDPTVFHKRYLKKIRDLGEGHFGKVSLYCYDPTNDGTGEMVAVKALKADCGPQHRSGWKQEIDILRTLYHEHIIKYKGCCEDQGEKSLQLVMEYVPLGSLRDYLPRHSIGLAQLLLFAQQICEGMAYLHAQHYIHRDLAARNVLLDNDRLVKIGDFGLAKAVPEGHEYYRVREDGDSPVFWYAPECLKEYKFYYASDVWSFGVTLYELLTHCDSSQSPPTKFLELIGIAQGQMTVLRLTELLERGERLPRPDKCPCEVYHLMKNCWETEASFRPTFENLIPILKTVHEKYQGQAPSVFSVC

SEQ ID NO: 18665 - protein, 1337 aa, Homo sapiens
MPVVWPTLLDLSRDECKRILRKLELEAYAGVISALRAQGDLTKEKKDLLGELSKVLSISTERHRAEVRRAVNDERLTTIAHKMNLSLYLGERPSYSMSGPNSSSEWSIEGRRLVPLMPRLVPQTAFTVTANAVANAAIQHNASLPVPAETGSKEVVVCYSYTSTTSTPTSTPVPSGSIATVKSPRPASPASNVVVLPSGSTVYVKSVSCSDEDEKPRKRRRTNSSSSSPVVLKEVPKAVVPVSKTITVPVSGSPKMSNIMQSIANSLPPHMSPVKITFTKPSTQTTNTTTQKVIIVTTSPSSTFVPNILSKSHNYAAVTKLVPTSVIASTTQKPPVVITASQSSLVSNSSSGSSSSTPSPIPNTVAVTAVVSSTPSVVMSTVAQGVSTSAIKMASTRLPSPKSLVSAPTQILAQFPKQHQQSPKQQLYQVQQQTQQQVAQPSPVSHQQQPQQSPLPPGIKPTIQIKQESGVKIITQQVQPSKILPKPVTATLPTSSNSPIMVVSSNGAIMTTKLVTTPTGTQATYTRPTVSPSIGRMAATPGAATYVKTTSGSIITVVPKSLATLGGKIISSNIVSGTTTKITTIPMTSKPNVIVVQKTTGKGTTIQGLPGKNVVTTLLNAGGEKTIQTVPTGAKPAILTATRPITKMIVTQPKGIGSTVQPAAKIIPTKIVYGQQGKTQVLIKPKPVTFQATVVSEQTRQLVTETLQQASRVAEAGNSSIQEGKEEPQNYTDSSSSSTESSQSSQDSQPVVHVIASRRQDWSEHEIAMETSPTIIYQDVSSESQSATSTIKALLELQQTTVKEKLESKPRQPTIDLSQMAVPIQMTQEKRHSPESPSIAVVESELVAEYITTERTDEGTEVAFPLLVSHRSQPQQPSQPQRTLLQHVAQSQTATQTSVVVKSIPASSPGAITHIMQQALSSHTAFTKHSEELGTEEGEVEEMDTLDPQTGLFYRSALTQSQSAKQQKLSQPPLEQTQLQVKTLQCFQTKQKQTIHLQADQLQHKLPQMPQLSIRHQKLTPLQQEQAQPKPDVQHTQHPMVAKDRQLPTLMAQPPQTVVQVLAVKTTQQLPKLQQAPNQPKIYVQPQTPQSQMSLPASSEKQTASQVEQPIITQGSSVTKITFEGRQPPTVTKITGGSSVPKLTSPVTSISPIQASEKTAVSDILKMSLMEAQIDTNVEHMIVDPPKKALATSMLTGEAGSLPSTHMVVAGMANSTPQQQKCRESCSSPSTVGSSLTTRKIDPPAVPATGQFMRIQNVGQKKAEESPAEIIIQAIPQYAIPCHSSSNVVVEPSGLLELNNFTSQQLDDEETAMEQDIDSSTEDGTEPSPSQSSAERS

SEQ ID NO: 18666 - protein, 455 aa, Homo sapiens
MTTDERKLFNHLKSPHLKYWVPFIWFGNLATKARNEGRIRDSVDLQSLMTEMNRYRSWCSLLFGYDWVGIPLVYTQVAEQLINPFGEDDDDFETNWCIDRNLQVSLLAVDEMHMSLPKMKKDIYWDDSAARPPYTLAAADYCIPSFLGSTVQMGLSGSDFPDEEWLWDYEKHGHRHSMIRRVKRFLSAHEHPSSPRRRSYRRQTSDSSMFLPRDDLSPARDLLDVPSRNPPRASPTWKKSCFPEGSPTLHFSMGELSTIRETSQTSTLQSLTPQSSVRTSPIKMPLVPEVLITAAEAPVPTSGGYHHDSATSILSSEFTGVQPSKTEQQQGPMGSILSPSEKETPPGGPSPQTVSASAEENIFNCEEDPGDTFLKRWSLPGFLGSSHTSLGNLSPDPMSSQPALLIDTETSSEISGINIVAGSRVSSDMLYLMENLDTKETDIIELNKETEESPK

SEQ ID NO: 18667 - protein, 616 aa, Homo sapiens
MEDSQDLNEQSVKKTCTESDVSQSQNSRSMEMQDLASPHTLVGGGDTPGSSKLEKSNLSSTSVTTNGTGVSLLAVKTEPLNSSETTATTGDGALDTFTGSVITSSGYSPRSAHQYSPQLYPSKPYPHILSTPAAQTMSAYAGQTQYSGMQQPAVYTAYSQTGQPYSLPTYDLGVMLPAIKTESGLSQTQSPLQSGCLSYSPGFSTPQPGQTPYSYQMPGSSFAPSSTIYANNSVSNSTNFSGSQQDYPSYTAFGQNQYAQYYSASTYGAYMTSNNTADGTPSSTSTYQLQESLPGLTNQPGEFDTMQSPSTPIKDLDERTCRSSGSKSRGRGRKNNPSPPPDSDLERVFVWDLDETIIVFHSLLTGSYAQKYGKDPPMAVTLGLRMEEMIFNLADTHLFFNDLEECDQVHIDDVSSDDNGQDLSTYSFATDGFHAAASSANLCLPTGVRGGVDWMRKLAFRYRRVKELYNTYKNNVGGLLGPAKRDAWLQLRAEIEGLTDSWLTNALKSLSIISTRSNCINVLVTTTQLIPALAKVLLYSLGGAFPIENIYSATKIGKESCFERIVSRFGTNITYVVIGDGRDEEHAANQHNMPFWRISSHSDLLALHQALELEYL

SEQ ID NO: 18668 - protein, 211 aa, Homo sapiens
MKLPLLLALLFGAVSALHLRSETSTFETPLGAKTLPEDEETPEQEMEETPCRELEEEEEWGSGSEDASKKDGAVESISVPDMVDKNLTCPEEEDTVKVVGIPGCQTCRYLLFTCRRCYRGNLVSIHNFNINYRIQCSVSALNQGQVWIGGRITGSGRCRRFQWVDGSRWNFAYWAAHQPWSRGGHCVALCTRGGHWRRAHCLRRLPFICSY

SEQ ID NO: 18669 - protein, 328 aa, Homo sapiens
MLIQVCLYFYCKFLWRCLKFVMRKLTGRCELQRICYNTKPGASRTMKIETSLRDSKSKLLQTSVSVHPDAIEKTIEDIMELKKINPDVNPQLGISLQACLLQIVGYRNLIADVEKLRREAYDSDNPQHEEMLLKLWKFLKPNTPLESRISKQWCEIGFQGDDPKTDFRGMGLLGLYNLQYFAERDATAAQQVLSDSLHPKCRDITKEEISKFSKAEWEKKRMDKAIGYSFAIVGINITDLAYNLLVSGALKTHFYNIAPEAPTLSHFQQTFCYLMHEFHKFWIEEDPMDIMEFNRVREKFRKRIIKQLQNPDMALCPHFAASEGLINM

SEQ ID NO: 18670 - protein, 828 aa, Homo sapiens
MSSKQATSPFACAADGEDAMTQDLTSREKEEGSDQHVASHLPLHPIMHNKPHSEELPTLVSTIQQDADWDSVLSSQQRMESENNKLCSLYSFRNTSTSPHKPDEGSRDREIMTSVTFGTPERRKGSLADVVDTLKQKKLEEMTRTEQEDSSCMEKLLSKDWKEKMERLNTSELLGEIKGTPESLAEKERQLSTMITQLISLREQLLAAHDEQKKLAASQIEKQRQQMDLARQQQEQIARQQQQLLQQQHKINLLQQQIQVQGHMPPLMIPIFPHDQRTLAAAAAAQQGFLFPPGITYKPGDNYPVQFIPSTMAAAAASGLSPLQLQKGHVSHPQINQRLKGLSDRFGRNLDTFEHGGGHSYNHKQIEQLYAAQLASMQVSPGAKMPSTPQPPNTAGTVSPTGIKNEKRGTSPVTQVKDEAAAQPLNLSSRPKTAEPVKSPTSPTQNLFPASKTSPVNLPNKSSIPSPIGGSLGRGSSLDILSSLNSPALFGDQDTVMKAIQEARKMREQIQREQQQQQPHGVDGKLSSINNMGLNSCRNEKERTRFENLGPQLTGKSNEDGKLGPGVIDLTRPEDAEGSKAMNGSAAKLQQYYCWPTGGATVAEARVYRDARGRASSEPHIKRPMNAFMVWAKDERRKILQAFPDMHNSNISKILGSRWKSMSNQEKQPYYEEQARLSKIHLEKYPNYKYKPRPKRTCIVDGKKLRIGEYKQLMRSRRQEMRQFFTVGQQPQIPITTGTGVVYPGAITMATTTPSPQMTSDCSSTSASPEPSLPVIQSTYGMKTDGGSLAGNEMINGEDEMEMYDDYEDDPKSDYSSENEAPEAVSAN

SEQ ID NO: 18671 - protein, 614 aa, Homo sapiens
MKVEREIAILKLIEHPHVLKLHDVYENKKYLYLVLEHVSGGELFDYLVKKGRLTPKEARKFFRQIISALDFCHSHSICHRDLKPENLLLDEKNNIRIADFGMASLQVGDSLLETSCGSPHYACPEVIRGEKYDGRKADVWSCGVILFALLVGALPFDDDNLRQLLEKVKRGVFHMPHFIPPDCQSLLRGMIEVDAARRLTLEHIQKHIWYIGGKNEPEPEQPIPRKVQIRSLPSLEDIDPDVLDSMHSLGCFRDRNKLLQDLLSEEENQEKMIYFLLLDRKERYPSQEDEDLPPRNEIDPPRKRVDSPMLNRHGKRRPERKSMEVLSVTDGGSPVPARRAIEMAQHGQRSRSISGASSGLSTSPLSSPRVTPHPSPRGSPLPTPKGTPVHTPKESPAGTPNPTPPSSPSVGGVPWRARLNSIKNSFLGSPRFHRRKLQVPTPEEMSNLTPESSPELAKKSWFGNFISLEKEEQIFVVIKDKPLSSIKADIVHAFLSIPSLSHSVISQTSFRAEYKATGGPAVFQKPVKFQVDITYTEGGEAQKENGIYSVTFTLLSGPSRRFKRVVETIQAQLLSTHDPPAAQHLSEPPPPAPGLSWGAGLKGQKVATSYESSL

SEQ ID NO: 18672 - protein, 366 aa, Homo sapiens
MPANFTEGSFDSSGTGQTLDSSPVACTETVTFTEVVEGKEWGSFYYSFKTEQLITLWVLFVFTIVGNSVVLFSTWRRKKKSRMTFFVTQLAITDINWRFTGDFTAPDLVCRVVRYLQVVLLYASTYVLVSLSIDRYHAIVYPMKFLQGEKQARVLIVIAWSLSFLFSIPTLIIFGKRTLSNGEVQCWALWPDDSYWTPYMTIVAFLVYFIPLTIISIMYGIVIRTIWIKSKTYETVISNCSDGKLCSSYNRGLISKAKIKAIKYSIIIILAFICCWSPYFLFDILDNFNLLPDTQERFYASVIIQNLPALNSAINPLIYCVFSSSISFPCRVIRLRQLQEAALMLCPQRENWKGTWPGVPSWALPR

SEQ ID NO: 18673 - protein, 404 aa, Homo sapiens
EHRTVEVEKVHLEKKLRDEINLAKQEAQRLKELREGTENERSRQKYAEEELEQVREALRKAEKELESHSSWYAPEALQKWLQLTHEVEVQYYNIKKQNAEKQLLVAKEGAEKIKKKRNTLFGTFHVAHSSSLDDVDHKILTAKQALSEVTAALRERLHRWQQIEILCGFQIVNNPGIHSLVAALNIDPSWMGSTRPNPAHFIMTDDVDDMDEEIVSPLSMQYAAWLMGRRFSDRSLCSTSAGSDDQSLWKYPAPSLQSSVRQRLTEPQHGLGSQRDLTHSDSESSLHMSDRQRVAPKPPQMSRAADEALNAMTSNGSHRLIEGVHPGSLVEKLPDSPALAKKALLALNHGLDKAHSLMELSPSAPPGGSPHLDSSRSHSPSSPDPDTPSPVGDSRALQASRNTR

SEQ ID NO: 18674 - protein, 264 aa, Homo sapiens
MAGMSQRPPSMYWCVGPEESAVCPERAMETLNGAGDTGGKPSTRGGDPAARSRRTEGIRAAYRRGDRGGARDLLEEACDQCASQLEKGQLLSIPAAYGDLEMVRYLLSKRLVELPTEPTDDNPAVVAAYFGHTAVVQELLESLPGPCSPQRLLNWMLALACQRGHLGVVKLLVLTHGADPESYAVRKNEFPVIVRLPLYAAIKSGNEDIAIFLLRHGAYFCSYILLDSPDPSKHLLRKYFIEASPLPSSYPGKTVSSHCLWSVF

SEQ ID NO: 18675 - protein, 466 aa, Homo sapiens
MPHSAGGTAGVGLEAAEPTALLTRAEPPSEPTEIRPQKRKKGPAPKMLGNELCSVCGDKASGFHYNVLSCEGCKGFFRRSVIKGAHYICHSGGHCPMDTYMRRKCQECRLRKCRQAGMREECVLSEEQIRLKKLKRQEEEQAHATSLPPRASSPPQILPQLSPEQLGMIEKLVAAQQQCNRRSFSDRLRVTPWPMAPDPHSREARQQRFAHFTELAIVSVQEIVDFAKQLPGFLQLSREDQIALLKTSAIEVAGEGQGMKGEAEWDYLWEGPPDIELGEPNLLGSRDEENRPPWKRPCSKTSPPSPRLRFAACVQVMLLETSRRYNPGSESITFLKDFSYNREDFAKAGLQVEFINPIFEFSRAMNELQLNDAEFALLIAISIFSADRPNVQDQLQVERLQHTYVEALHAYVSIHHPHDRLMFPRMLMKLVSLRTLSSVHSEQVFALRLQDKKLPPLLSEIWDVHE

SEQ ID NO: 18676 - protein, 914 aa, Homo sapiens
MANGTLTRRHQNGRFVGDADLERQKFSDLKLNGPQDHSHLLYSTIPRMQEPGQIVETYTEEDPEGAMSVVSVETSDDGTTRRTETTVKKVVKTVTTRTVQPVAMGPDGLPVDASSVSNNYIQTLGRDFRKNGNGGPGPYVGQAGTATLPRNFHYPPDGYSRHYEDGYPGGSDNYGSLSRVTRIEERYRPSMEGYRAPSRQDVYGPQPQVRVGGSSVDLHRFHPEPYGLEDDQRSMGYDDLDYGMMSDYGTARRTGTPSDPRRRLRSYEDMIGEEVPSDQYYWAPLAQHERGSLASLDSLRKGGPPPPNWRQPELPEVIAMLGFRLDAVKSNAAAYLQHLCYRNDKVKTDVRKLKGIPVLVGLLDHPKKEVHLGACGALKNISFGRDQDNKIAIKNCDGVPALVRLLRKARDMDLTEVITGTLWNLSSHDSIKMEIVDHALHALTDEVIIPHSGWEREPNEDCKPRHIEWESVLTNTAGCLRNVSSERSEARRKLRECDGLVDALIFIVQAEIGQKDSDSKLVENCVCLLRNLSYQVHREIPQAERYQEAAPNVANNTGPHAASCFGAKKGKDEWFSRGKKPIEDPANDTVDFPKRTSPARGYELLFQPEVVRIYISLLKESKTPAILEASAGAIQNLCAGRWTYGRYIRSALRQEKALSAIADLLTNEHERVVKAASGALRNLAVDARNKELIGKHAIPNLVKNLPGGQQNSSWNFSEDTVISILNTINEVIAENLEAAKKLRETQGIEKLVLINKSGNRSEKEVRAAALVLQTIWGYKELRKPLEKEGWKKSDFQVNLNNASRSQSSHSYDDSTLPLIDRNQKSDKKPDREEIQMSNMGSNTKSLDNNYSTPNERGDHNRTLDRSGDLGDMEPLKGTTPLMQDEGQESLEEELDVLVLDDEGGQVSYPSMQKI

SEQ ID NO: 18677 - protein, 267 aa, Homo sapiens
MPRQFPKLNISEVDEQVRLLAEKVFAKVLREEDSKDALSLFTVPEDCPIGQKEAKERELQKELAEQKSVETAKRKKSFKMIRSQSLSLQMPPQQDWKGPPAASPAMSPTTPVVTGATSLPTPAPYAMPEFQRVTISGDYCAGITLEDYEQAAKSLAKALMIREKYARLAYHRFPRITSQYLGHPRADTAPPEEGLPDFHPPPLPQEDPYCLDDAPPNLDYLVHMQGGILFVYDNKKMLEHQEPHSLPYPDLETYTVDMSHILALITD

SEQ ID NO: 18678 - protein, 915 aa, Homo sapiens
MASFSMDCSPSFCVPGLWNPFIIFRSRSSRRRLHSLGLAAMPEKRPFERLPADVSPINYSLCLKPDLLDFTFEGKLEAAAQVRQATNQIVMNCADIDIITASYAPEGDEEIHATGFNYQNEDEKVTLSFPSTLQTGTGTLKIDFVGELNDKMKGFYRSKYTTPSGEVRYAAVTQFEATDARRAFPCWDEPAIKATFDISLVVPKDRVALSNMNVIDRKPYPDDENLVEVKFARTPVMSTYLVAFVVGEYDFVETRSKDGVCVRVYTPVGKAEQGKFALEVAAKTLPFYKDYFNVPYPLPKIDLIAIADFAAGAMENWGLVTYRETALLIDPKNSCSSSRQWVALVVGHELAHQWFGNLVTMEWWTHLWLNEGFASWIEYLCVDHCFPEYDIWTQFVSADYTRAQELDALDNSHPIEVSVGHPSEVDEIFDAISYSKGASVIRMLHDYIGDKDFKKGMNMYLTKFQQKNAATEDLWESLENASGKPIAAVMNTWTKQMGFPLIYVEAEQVEDDRLLRLSQKKFCAGGSYVGEDCPQWMVPITISTSEDPNQAKLKILMDKPEMNVVLKNVKPDQWVKLNLGTVGFYRTQYSSAMLESLLPGIRDLSLPPVDRLGLQNDLFSLARAGIISTVEVLKVMEAFVNEPNYTVWSDLSCNLGILSTLLSHTDFYEEIQEFVKDVFSPIGERLGWDPKPGEGHLDALLRGLVLGKLGKAGHKATLEEARRRFKDHVEGKQILSADLRSPVYLTVLKHGDGTTLDIMLKLHKQADMQEEKNRIERVLGATLLPDLIQKVLTFALSEEVRPQDTVSVIGGVAGGSKHGRKAAWKFIKDNWEELYNRYQGGFLISRLIKLSVEGFAVDKMAGEVKAFFESHPAPSAERTIQQCCENILLNAAWLKRDAESIHQYLLQRKASPPTV

SEQ ID NO: 18679 - protein, 296 aa, Homo sapiens
MEIYSPDMSEVAAERSSSPSTQLSADPSLDGLPAAEDMPEPQTEDGRTPGLVGLAVPCCACLEAERLRGCLNSEKICIVPILACLVSLCLCIAGLKWVFVDKIFEYDSPTHLDPGGLGQDPIISLDATAASAVWVSSEAYTSPVSRAQSESEVQVTVQGDKAVVSFEPSAAPTPKNRIFAFSFLPSTAPSFPSPTRNPEVRTPKSATQPQTTETNLQTAPKLSTSTSTTGTSHLVKCAEKEKTFCVNGGECFMVKDLSNPSRYLCKCPNEFTGDRCQNYVMASFYSTSTPFLSLPE

SEQ ID NO: 18680 - protein, 358 aa, Homo sapiens
MSVCYRPPGNETLLSWKTSRATGTAFLLLAALLGLPGNGFVVWSLAGWRPARGRPLAATLVLHLALADGAVLLLTPLFVAFLTRQAWPLGQAGCKAVYYVCALSMYASVLLTGLLSLQRCLAVTRPFLAPRLRSPALARRLLLAVWLAALLLAVPAAVYRHLWRDRVCQLCHPSPVHAAAHLSLETLTAFVLPFGLMLGCYSVTLARLRGARWGSGRHGARVGRLVSAIVLAFGLLWAPYHAVNLLQAVAALAPPEGALAKLGGAGQAARAGTTALAFFSSSVNPVLYVFTAGDLLPRAGPRFLTRLFEGSGEARGGGRSREGTMELRTTPQLKVVGQGRGNGDPGGGMEKDGPEWDL

SEQ ID NO: 18681 - protein, 349 aa, Homo sapiens
MADADEGFGLAHTPLEPDAKDLPCDSKPESALGAPSKSPSSPQAAFTQQGMEGIKVFLHERELWLKFHEVGTEMIITKAGRRMFPSYKVKVTGLNPKTKYILLMDIVPADDHRYKFADNKWSVTGKAEPAMPGRLYVHPDSPATGAHWMRQLVSFQKLKLTNNHLDPFGHIILNSMHKYQPRLHIVKADENNGFGSKNTAFCTHVFPETAFIAVTSYQNHKITQLKIENNPFAKGFRGSDDMELHRMSRMQSKEYPVVPRSTVRQKVASNHSPFSSESRALSTSSNLGSQYQCENGVSGPSQDLLPPPNPYPLPQEHSQIYHCTKRKGECDHPWSICFLSYLFLSLGWG

SEQ ID NO: 18682 - protein, 603 aa, Homo sapiens
MALRGTLRPLKVRRRREMLPQQVGFVCAVLALVCCASGLFGSLGHKTASASKRVLPDTWRNRKLMAPVNGTQTAKNCTDPAIHEFPTDLFSNKERQHGAVLLHILGALYMFYALAIVCDDFFVPSLEKICERLHLSEDVAGATFMAAGSSTPELFASVIGVFITHGDVGVGTIVGSAVFNILCIIGVCGLFAGQVVRLTWWAVCRDSVYYTISVIVLIVFIYDEQIVWWEGLVLIILYVFYILIMKYNVKMQAFFTVKQKSIANGNPVNSELEAVKEKPQYGKNPVVMVDEIMSSSPPKFTFPEAGLRIMITNKFGPRTRLRMASRIIINERQRLINSANGVSSKPLQNGRHENIENGNVPVENPEDPQQNQEQQPPPQPPPPEPEPVEADFLSPFSVPEARGDKVKWVFTWPLIFLLCVTIPNCSKPRWEKFFMVTFITATLWIAVFSYIMVWLVTIIGYTLGIPDVIMGITFLAAGTSVPDCMASLIVARQGLGDMAVSNTIGSNVFDILVGLGVPWGLQTMVVNYGSTVKINSRGLVYSVVLLLGSVALTVLGIHLNKWRLDRKLGVYVLVLYAIFLCFSIMIEFNVFTFVNLPMCREDD

SEQ ID NO: 18683 - protein, 410 aa, Homo sapiens
MVNHFIAEFKRKHKKDISENKRAVRRLRTACERAKRTLSSSTQASIEIDSLYEGIDFYTSITRARFEELNADLFRGTLDPVEKALRDAKLDKSQIHDIVLVGGSTRIPKIQKLLQDFFNGKELNKSINPDEAVAYGAAVQAAILSGDKSENVQDLLLLDVTPLSLGIETAGGVMTVLIKRNTTIPTKQTQTFTTYSDNQPGVLIQVYEGERAMTKDNNLLGKFELTGIPPAPRGVPQIEVTFDIDANGILNVSAVDKSTGKENKITITNDKGRLSKEDIERMVQEAEKYKAEDEKQRDKVSSKNSLESYAFNMKATVEDEKLQGKINDEDKQKILDKCNEIINWLDKNQTAEKEEFEHQQKELEKVCNPIITKLYQSAGGMPGGMPGGFPGGGAPPSGGASSGPTIEEVD

SEQ ID NO: 18684 - protein, 935 aa, Homo sapiens
MVGEGPYLISDLDQRGRRRSFAERYDPSLKTMIPVRPCARLAPNPVDDAGLLSFATFSWLTPVMVKGYRQRLTVDTLPPLSTYDSSDTNAKRFRVLWDEEVARVGPEKASLSHVVWKFQRTRVLMDIVANILCIIMAAIGPTVLIHQILQQTERTSGKVWVGIGLCIALFATEFTKVFFWALAWAINYRTAIRLKVALSTLVFENLVSFKTLTHISVGEVLNILSSDSYSLFEAALFCPLPATIPILMVFCAAYAFFILGPTALIGISVYVIFIPVQMFMAKLNSAFRRSAILVTDKRVQTMNEFLTCIRLIKMYAWEKSFTNTIQDIRRRERKLLEKAGFVQSGNSALAPIVSTIAIVLTLSCHILLRRKLTAPVAFSVIAMFNVMKFSIAILPFSIKAMAEANVSLRRMKKILIDKSPPSYITQPEDPDTVLLLANATLTWEHEASRKSTPKKLQNQKRHLCKKQRSEAYSERSPPAKGATGPEEQSDSLKSVLHSISFVVRKGKILGICGNVGSGKSSLLAALLGQMQLQKGVVAVNGTLAYVSQQAWIFHGNVRENILFGEKYDHQRYQHTVRVCGLQKDLSNLPYGDLTEIGERGLNLSGGQRQRISLARAVYSDRQLYLLDDPLSAVDAHVGKHVFEECIKKTLRGKTVVLVTHQLQFLESCDEVILLEDGEICEKGTHKELMEERGRYAKLIHNLRGLQFKDPEHLYNAAMVEAFKESPAEREEDAVLAPGNEKDEGKESETGSEFVDTKVPEHQLIQTESPQEGTVTWKTYHTYIKASGGYLLSLFTVFLFLLMIGSAAFSNWWLGLWLDKGSRMTCGPQGNRTMCEVGAVLADIGQHVYQWVYTASMVFMLVFGVTKGFVFTKTTLMASSSLHDTVFDKHFPQRSPGAQEGGECQPVTLVHPHHLLHAGPGHHSRLWQEGELHHLV

SEQ ID NO: 18685 - protein, 908 aa, Homo sapiens
MANGTLTRRHQNGRFVGDADLERQKFSDLKLNGPQDHSHLLYSTIPRMQEPGQIVETYTEEDPEGAMSVVSVETSDDGTTRRTETTVKKVVKTVTTRTVQPVAMGPDGLPVDASSVSNNYIQTLGRDFRKNGNGGPGPYVGQAGTATLPRNFHYPPDGYSRHYEDGYPGGSDNYGSLSRVTRIEERYRPSMEGYRAPSRQDVYGPQPQVRVGGSSVDLHRFHPEPYGLEDDQRSMGYDDLDYGMMSDYGTARRTGTPSDPRRRLRSYEDMIGEEVPSDQYYWAPLAQHERGSLASLDSLRKGGPPPPNWRQPELPEVIAMLGFRLDAVKSNAAAYLQHLCYRNDKVKTDVRKLKGIPVLVGLLDHPKKEVHLGACGALKNISFGRDQDNKIAIKNCDGVPALVRLLRKARDMDLTEVITGTLWNLSSHDSIKMEIVDHALHALTDEVIIPHSGWEREPNEDCKPRHIEWESVLTNTAGCLRNVSSERSEARRKLRECDGLVDALIFIVQAEIGQKDSDSKLVENCVCLLRNLSYQVHREIPQAERYQEAAPNVANNTGPHAASCFGAKKGKGKKPIEDPANDTVDFPKRTSPARGYELLFQPEVVRIYISLLKESKTPAILEASAGAIQNLCAGRWTYGRYIRSALRQEKALSAIADLLTNEHERVVKAASGALRNLAVDARNKELIGKHAIPNLVKNLPGGQQNSSWNFSEDTVISILNTINEVIAENLEAAKKLRETQGIEKLVLINKSGNRSEKEVRAAALVLQTIWGYKELRKPLEKEGWKKSDFQVNLNNASRSQSSHSYDDSTLPLIDRNQKSDKKPDREEIQMSNMGSNTKSLDNNYSTPNERGDHNRTLDRSGDLGDMEPLKGTTPLMQDEGQESLEEELDVLVLDDEGGQVSYPSMQKI

SEQ ID NO: 18686 - protein, 488 aa, Homo sapiens
MSAMFSQDFFLAIILQDSSADSFWNPNAFETDSDLPAGWMRVQDTSGTYYWHIPTGTTQWEPPGRASPSQGSSPQEESQLTWTGFAHGEGFEDGEFWKDEPSDEAPMELGLKEPEEGTLTFPAQSLSPEPLPQEEEKLPPRNTNPGIKCFAVRSLGWVEMTEEELAPGRSSVAVNNCIRQLSYHKNNLHDPMSGGWGEGKDLLLQLEDETLKLVEPQSQALLHAQPIISIRVWGVGRDSGRDFAYVARDKLTQMLKCHVFRCEAPAKNIATSLHEICSKIMAERRNARCLVNGLSLDHSKLVDVPFQVEFPAPKNELVQKFQVYYLGNVPVAKPVGVDVINGALESVLSSSSREQWTPSHVSVAPATLTILHQQTEAVLGECRVRFLSFLAVGRDVHTFAFIMAAGPASFCCHMFWCEPNAASLSEAVQAACMLRYQKCLDARSQASTSCLPAPPAESVARRVGWTVRRGVQSLWGSLKPKRLGAHTP

SEQ ID NO: 18687 - protein, 340 aa, Homo sapiens
MHDVKNHRTFLKRTKYDNLHLEDLFIGNKVNVFSRQLVLIDYGDQYTARQLGSRKEKTLALIKPDAISKAGEIIEIINKAGFTITKLKMMMLSRKEALDFHVDHQSRPFFNELIQFITTGPIIAMEILRDDAICEWKRLLGPANSGVARTDASESIRALFGTDGIRNAAHGPDSFASAAREMELFFPSSGGCGPANTAKFTNCTCCIVKPHAVSEGLLGKILMAIRDAGFEISAMQMFNMDRVNVEEFYEVYKGVVTEYHDMVTEMYSGPCVAMEIQQNNATKTFREFCGPADPEIARHLRPGTLRAIFGKTKIQNAVHCTDLPEDGLLEVQYFFKILDN

SEQ ID NO: 18688 - protein, 790 aa, Homo sapiens
MEPNGPSLPRDEGPPTPSSATKVPPAEYRLCNGSDKECVSPTARVTKKETLKAQKENYRQEKKRATRQLLSALTDPSVVIMADSLKIRGTLKSWTKLWCVLKPGVLLIYKTPKGPKGESVGSITQPLPSSYLIFRAASESDGRCWLDALELALRCSSLLRLGTCKPGRDGEPGTSPDASPSSLCGLPASATVHPDQDLFPLNGSSLENDAFSDKSERENPEESDTETQDHSRKTESGSDQSETPGAPVRRGTTYVEQVQEELGELGEASQVETVSEENKSLMWTLLKQLRPGMDLSRVVLPTFVLEPRSFLNKLSDYYYHADLLSRAAVEEDAYSRMKLVLRWYLSGFYKKPKGIKKPYNPILGETFRCCWFHPQTDSRTFYIAEQVSHHPPVSAFHVSNRKDGFCISGSITAKSRFYGNSLSALLDGKATLTFLNRAEDYTLTMPYAHCKGILYGTMTLELGGKVTIECAKNNFQAQLEFKLKPFFGGSTSINQISGKITSGEEVLASLSGHWDRDVFIKEEGSGSSALFWTPSGEVRRQRLRQHTVPLEEQTELESERLWQHVTRAISKGDQHRATQEKFALEEAQRQRARERQESLMPWKPQLFHLDPITQEWHYRYEDHSPWDPLKDIAQFEQDGILRTLQQEAVARQTTFLGSPGPRHERSGPDQRLRKASDQPSGHSQATESSGSTPESCPELSDEEQDGDFVPGGESPCPRCRKEARRLQALHEAILSIREAQQELHRHLSAMLSSTARAAQAPTPGLLQSPRSWFLLCVFLACQLFINHILK

SEQ ID NO: 18689 - protein, 370 aa, Homo sapiens
MKFFLLLFTIGFCWAQYSPNTQQGRTSIVHLFEWRWVDIALECERYLAPKGFGGVQVSPPNENVAIHNPFRPWWERYQPVSYKLCTRSGNEDEFRNMVTRCNNVGVRIYVDAVINHMSGNAVSAGTSSTCGSYFNPGSRDFPAVPYSGWDFNDGKCKTGSGDIENYNDATQVRDCRLVGLLDLALEKDYVRSKIAEYMNHLIDIGVAGFRLDASKHMWPGDIKAILDKLHNLNSNWFPAGSKPFIYQEVIDLGGEPIKSSDYFGNGRVTEFKYGAKLGTVIRKWNGEKMSYLKNWGEGWGFMPSDRALVFVDNHDNQRGHGAGGASILTFWDARLYKMAVGFMLAHPYGFTRVMSSYRWPRQFQNGNEHG

SEQ ID NO: 18690 - protein, 1730 aa, Homo sapiens
MGNSDSQYTLQGSKNHSNTITGAKQIPCSLKIRGIHAKEEKSLHGWGHGSNGAGYKSRSLARSCLSHFKSNQPYASRLGGPTCKVSRGVAYSTHRTNAPGKDFQGISAAFSTENGFHSVGHELADNHITSRDCNGHLLNCYGRNESIASTPPGEDRKSPRVLIKTLGKLDGCLRVEFHNGGNPSKVPAEDCSEPVQLLRYSPTLASETSPVPEARRGSSADSLPSHRPSPTDSRLRSSKGSSLSSESSWYDSPWGNAGELSEAEGSFLAPGMPDPSLHASFPPGDAKKPFNQSSSLSSLRELYKDANLGSLSPSGIRLSDEYMGTHASLSNRVSFASDIDVPSRVAHGDPIQYSSFTLPCRKPKAFVEDTAKKDSLKARMRRISDWTGSLSRKKRKLQEPRSKEGSDYFDSRSDGLNTDVQGSSQASAFLWSGGSTQILSQRSESTHAIGSDPLRQNIYENFMRELEMSRTNTENIETSTETAESSSESLSSLEQLDLLFEKEQGVVRKAGWLFFKPLVTVQKERKLELVARRKWKQYWVTLKGCTLLFYETYGKNSMDQSSAPRCALFAEDSIVQSVPEHPKKENVFCLSNSFGDVYLFQATSQTDLENWVTAVHSACASLFAKKHGKEDTLRLLKNQTKNLLQKIDMDSKMKKMAELQLSVVSDPKNRKAIENQIQQWEQNLEKFHMDLFRMRCYLASLQGGELPNPKSLLAAASRPSKLALGRLGILSVSSFHALVCSRDDSALRKRTLSLTQRGRNKKGIFSSLKGLDTLARKGKEKRPSITQVDELLHIYGSTVDGVPRDNAWEIQTYVHFQDNHGVTVGIKPEHRVEDILTLACKMRQLEPSHYGLQLRKLVDDNVEYCIPAPYEYMQQQVYDEIEVFPLNVYDVQLTKTGSVCDFGFAVTAQVDERQHLSRIFISDVLPDGLAYGEGLRKGNEIMTLNGEAVSDLDLKQMEALFSEKSVGLTLIARPPDTKATLCTSWSDSDLFSRDQKSLLPPPNQSQLLEEFLDNFKKNTANDFSNVPDITTGLKRSQTDGTLDQVSHREKMEQTFRSAEQITALCRSFNDSQANGMEGPRENQDPPPRSLARHLSDADRLRKVIQELVDTEKSYVKDLSCLFELYLEPLQNETFLTQDEMESLFGSLPEMLEFQKVFLETLEDGISASSDFNTLETPSQFRKLLFSLGGSFLYYADHFKLYSGFCANHIKVQKVLERAKTDKAFKAFLDARNPTKQHSSTLESYLIKPVQRVLKYPLLLKELVSLTDQESEEHYHLTEALKAMEKVASHINEMQKIYEDYGTVFDQLVAEQSGTEKEQPEWSSEVMDVLDPRGKLTKGTLEEPRTLVTELSMGELLMHSTVSWLNPFLSLGKARKDLELTVFVFKRAVILVYKENCKLKKKLPSNSRPAHNSTDLDPFKFRWLIPISALQVRLGNPAGTENNSIWELIHTKSEIEGRPETIFQLCCSDSESKTNIVKVIRSILRENFRRHIKCELPLEKTCKDRLVPLKNRVPVSAKLASSRSLKVLKNSSSNEWTGETGKGTLLDSDEGSLSSGTQSSGCPTAEGRQDSKSTSPGKYPHPGLADFADNLIKESDILSDEDDDHRQTVKQGSPTKDIEIQFQRLRISEDPDVHPEAEQQPGPESGEGQKGGEQPKLVRGHFCPIKRKANSTKRDRGTLLKAQIRHQSLDSQSENATIDLNSVLEREFSVQSLTSVVSEECFYETESHGKS

SEQ ID NO: 18691 - protein, 1385 aa, Homo sapiens
MQDYNKDDMSYRRISAVEPKTALPFNRFLPNKSRQPSYVPAPLRKKKPDKHEDNRRSWASPVYTEADGTFSSNQRRIWGTNVENWPTVQGTSKSSCYLEEEKAKTRSIPNIVKDDLYVRKLSPVMPNPGNAFDQFLPKCWTPEDVNWKRIKRETYKPWYKEFQGFSQFLLLQALQTYSDDILSSETHTKIDPTSGPRLITRRKNLSYAPGYRRDDLEMAALDPDLENDDFFVRKTGAFHANPYVLRAFEDFRKFSEQDDSVERDIILQCREGELVLPDLEKDDMIVRRIPAQKKEVPLSGAPDRYHPVPFPEPWTLPPEIQAKFLCVLERTCPSKEKSNSCRILVPSYRQKKDDMLTRKIQSWKLGTTVPPISFTPGPCSEADLKRWEAIREASRLRHKKRLMVERLFQKIYGENGSKSMSDVSAEDVQNLRQLRYEEMQKIKSQLKEQDQKWQDDLAKWKDRRKSYTSDLQKKKEEREEIEKQALEKSKRSSKTFKEMLQDRESQNQKSTVPSRRRMYSFDDVLEEGKRPPTMTVSEASYQSERVEEKGATYPSEIPKEDSTTFAKREDRVTTEIQLPSQSPVEEQSPASLSSLRSRSTQMESTRVSASLPRSYRKTDTVRLTSVVTPRPFGSQTRGISSLPRSYTMDDAWKYNGDVEDIKRTPNNVVSTPAPSPDASQLASSLSSQKEVAATEEDVTRLPSPTSPFSSLSQDQAATSKATLSSTSGLDLMSESGEGEISPQREVSRSQDQFSDMRISINQTPGKSLDFGFTIKWDIPGIFVASVEAGSPAEFSQLQVDDEIIAINNTKFSYNDSKEWEEAMAKAQETGHLVMDVRRYGKAGSPETKWIDATSGIYNSEKSSNLSVTTDFSESLQSSNIESKEINGIHDESNAFESKASESISLKNLKRRSQFFEQGSSDSVVPDLPVPTISAPSRWVWDQEEERKRQERWQKEQDRLLQEKYQREQEKLREEWQRAKQEAERENSKYLDEELMVLSSNSMSLTTREPSLATWEATWSEGSKSSDREGTRAGEEERRQPQEEVVHEDQGKKPQDQLVIERERKWEQQLQEEQEQKRLQAEAEEQKRPAEEQKRQAEIERETSVRIYQYRRPVDSYDIPKTEEASSGFLPGDRNKSRSTTELDDYSTNKNGNNKYLDQIGNMTSSQRRSKKEQVPSGAELERQQILQEMRKRTPLHNDNSWIRQRSASVNKEPVSLPGIMRRGESLDNLDSPRSNSWRQPPWLNQPTGFYASSSVQDFSRPPPQLVSTSNRAYMRNPSSSVPPPSAGSVKTSTTGVATTQSPTPRSHSPSASQSGSQLRNSVLPVSVTSEALPQELKSGSETTNCTATTAISDSNLDGQPPCDVSLHTKALLQIEEEVVAAHVDL

SEQ ID NO: 18692 - protein, 173 aa, Homo sapiens
MEPRAADGCFLGDVGFWVERTPVHEAAQRGESLQLQQLIESGACVNQVTVDSITPLHAASLQGQARCVQLLLAAGAQVDARNIDGSTPLCDACASGSIECVKLLLSYGAKVNPPLYTASPLHEACMSGSSECVRLLIDVGANLEAHDCHFGTPLHVACAREHLDCVKVLLNAA

SEQ ID NO: 18693 - protein, 696 aa, Homo sapiens
MTSTGKDGGAQHAQYVGPYRLEKTLGKGQTGLVKLGVHCVTCQKVAIKIVNREKLSESVLMKVEREIAILKLIEHPHVLKLHDVYENKKYLYLVLEHVSGGELFDYLVKKGRLTPKEARKFFRQIISALDFCHSHSICHRDLKPENLLLDEKNNIRIADFGMASLQVGDSLLETSCGSPHYACPEVIRGEKYDGRKADVWSCGVILFALLVGALPFDDDNLRQLLEKVKRGVFHMPHFIPPDCQSLLRGMIEVDAARRLTLEHIQKHIWYIGGKNEPEPEQPIPRKVQIRSLPSLEDIDPDVLDSMHSLGCFRDRNKLLQDLLSEEENQEKMIYFLLLDRKERYPSQEDEDLPPRNEIDPPRKRVDSPMLNRHGKRRPERKSMEVLSVTDGGSPVPARRAIEMAQHGQSKAMFSKSLDIAEAHPQFSKEDRSRSISGASSGLSTSPLSSPRVTPHPSPRGSPLPTPKGTPVHTPKESPAGTPNPTPPSSPSVGGVPWRARLNSIKNSFLGSPRFHRRKLQVPTPEEMSNLTPESSPELAKKSWFGNFISLEKEEQIFVVIKDKPLSSIKADIVHAFLSIPSLSHSVISQTSFRAEYKATGGPAVFQKPVKFQVDITYTEGGEAQKENGIYSVTFTLLSGPSRRFKRVVETIQAQLLSTHDPPAAQHLSEPPPPAPGLSWGAGLKGQKVATSYESSL

SEQ ID NO: 18694 - protein, 1179 aa, Homo sapiens
MKVVPEKNAVRILWGRERGARAMGAQRLLQELVEDKTRWMKWEGKRVELPDSPRSTFLLAFSPDRTLLASTHVNHNIYITEVKTGKCVHSLIGHRRTPWCVTFHPTISGLIASGCLDGEVRIWDLHGGSESWFTDSNNAIASLAFHPTAQLLLIATANEIHFWDWSRREPFAVVKTASEMERVRLVRFDPLGHYLLTAIVNPSNQQGDDEPEIPIDGTELSHYRQRALLQSQPVRRTPLLHNFLHMLSSRSSGIQTEPFHPPEQASSTQQDQGLLNRPSAFSTVQSSTAGNTLRNLSLGPTRRSLGGPLSSHPSRYHREIAPGLTGSEWTRTVLSLNSRSEAESMPPPRTSASSVSLLSVLRQQEGGSQASVYTSATEGRGFPASGLATESDGGNGSSQNNSGSIRHELQCDLRRFFLEYDRLQELDQSLSGEAPQTQQAQEMLNNNIESERPGPSHQPTPHSSENNSNLSRGHLNRCRACHNLLTFNNDTLRWERTTPNYSSGEASSSWQVPSSFESVPSSGSQLPPLERTEGQTPSSSRLELSSSASPQEERTVGVAFNQETGHWERIYTQSSRSGTVSQEALHQDMPEESSEEDSLRRLSPAAYYAQRMIQYLSRRDSIRQRSMRYQQNRLRSSTSSSSSDNQGPSVEGTDLEFEDFEDNGDRSRHRAPRNARMSAPSLGRFVPRRFLLPEYLPYAGIFHERGQPGLATHSSVNRVLAGAVIGDGQSAVASNIANTTYRLQWWDFTKFDLPEISNASVNVLVQNCKIYNDASCDISADGQLLAAFIPSSQRGFPDEGILAVYSLAPHNLGEMLYTKRFGPNAISVSLSPMGRYVMVGLASRRILLHPSTEHMVAQVFRLQQAHGGETSMRRVFNVLYPMPADQRRHVSINSARWLPEPGLGLAYGTNKGDLVICRPEALNSGVEYYWDQLNETVFTVHSNSRSSERPGTSRATWRTDRDMGLMNAIGLQPRNPATSVTSQGTQTLALQLQNAETQTEREVPEPGTAASGPGEGEGSEYGASGEDALSRIQRLMAEGGMTAVVQREQSTTMASMGGFGNNIIVSHRIHRSSQTGTEPGAAHTSSPQPSTSRGLLPEAGQLAERGLSPRTASWDQPGTPGREPTQPTLPSSSPVPIPVSLPSAEGPTLHCELTNNNHLLDGGSSRGDAAGPRGEPRNR

SEQ ID NO: 18695 - protein, 950 aa, Homo sapiens
MVFTPEDRLGKQCLLLPLLLLAAWKVGSGQLHYSVPEEAKHGTFVGRIAQDLGLELAELVPRLFRMASKDREDLLEVNLQNGILFVNSRIDREELCGRSAECSIHLEVIVDRPLQVFHVDVEVRDINDNPPLFPVEEQRVLIYESRLPDSVFPLEGASDADVGSNSILTYKLSSSEYFGLDVKINSDDNKQIGLLLKKSLDREEAPAHNLFLTATDGGKPELTGTVQLLVTVLDVNDNAPTFEQSEYEVRIFENADNGTTVIRLNASDRDEGANGAISYSFNSLVAAMVIDHFSIDRNTGEIVIRGNLDFEQENLYKILIDATDKGHPPMAGHCTVLVRILDKNDNVPEIALTSLSLPVREDAQFGTVIALISVNDLDSGANGQVNCSLTPHVPFKLVSTFKNYYSLVLDSALDRESVSAYELVVTARDGGSPSLWATASLSVEVADMNDNAPAFAQPEYTVFVKENNPPGCHIFTVSARDADAQENALVSYSLVERRVGERALSSYISVHAESGKVYALQPLDHEELELLQFQVSARDAGVPPLGSNVTLQVFVLDENDNAPALLAPRVGGTGGAVSELVPRSLGAGQVVAKVRAVDADSGYNAWLSYELQPPASSARFPFRVGLYTGEISTTRVLDEADSPRHRLLVLVKDHGEPALTATATVLVSLVESGQAPKASSRASVGAAGPEAALVDVNVYLIIAICAVSSLLVLTLLLYTALRCSAPPTEGACTADKPTLVCSSAVGSWSYSQQRRQRVCSGEGPPKMDLMAFSPSLSPCPIMMGKAENQDLNEDHDAKPRQPNPDWRYSASLRAGMHSSVHLEEAGILRAGPGGPDQQWPTVSSATPEPEAGEVSPPVGAGVNSNSWTFKYGPGNPKQSGPGELPDKFIIPGSPAIISIRQEPTNSQIDKSDFITFGKKEETKKKKKKKKGNKTQEKKEKGNSTTDNSDQ

SEQ ID NO: 18696 - protein, 317 aa, Homo sapiens
MATSGAASAELVIGWCIFGLLLLAILAFCWIYVRKYQSRRESEVVSTITAIFSLAIALITSALLPVDIFLVSYMKNQNGTFKDWANANVSRQIEDTVLYGYYTLYSVILFCVFFWIPFVYFYYEEKDDDDTSKCTQIKTALKYTLGFVVICALLLLVGAFVPLNVPNNKNSTEWEKVKSLFEELGSSHGLAALSFSISSLTLIGMLAAITYTAYGMSALPLNLIKGTRSAAYERLENTEDIEEVEQHIQTIKSKSKDGRPLPARDKRALKQFEERLRTLKKRERHLEFIENSWWTKFCGALRPLKETEEKSPVKKSI

SEQ ID NO: 18697 - protein, 1116 aa, Homo sapiens
MKEICRICARELCGNQRRWIFHTASKLNLQVLLSHVLGKDVPRDGKAEFACSKCAFMLDRIYRFDTVIARIEALSIERLQKLLLEKDRLKFCIASMYRKNNDDSGAEIKAGNGTVDMSVLPDARYSALLQEDFAYSGFECWVENEDQIQEPHSCHGSEGPGNRPRRCRGCAALRVADSDYEAICKVPRKVARSISCGPSSRWSTSICTEEPALSEVGPPDLASTKVPPDGESMEEETPGSSVESLDASVQASPPQQKDEETERSAKELGKCDCCSDDQAPQHGCNHKLELALSMIKGLDYKPIQSPRGSRLPIPVKSSLPGAKPGPSMTDGVSSGFLNRSLKPLYKTPVSYPLELSDLQELWDDLCEDYLPLRVQPMTEELLKQQKLNSHETTITQQSVSDSHLAELQEKIQQTEATNKILQEKLNEMSYELKCAQESSQKQDGTIQNLKETLKSRERETEELYQVIEGQNDTMAKLREMLHQSQLGQLHSSEGTSPAQQQVALLDLQSALFCSQLEIQKLQRVVRQKERQLADAKQCVQFVEAAAHESEQQKEASWKHNQELRKALQQLQEELQNKSQQLRAWEAEKYNEIRTQEQNIQHLNHSLSHKEQLLQEFRELLQYRDNSDKTLEANEMLLEKLRQRIHDKAVALERAIDEKFSALEEKEKELRQLRLAVRERDHDLERLRDVLSSNEATMQSMESLLRAKGLEVEQLSTTCQNLQWLKEEMETKFSRWQKEQESIIQQLQTSLHDRNKEVEDLSATLLCKLGPGQSEIAEELCQRLQRKERMLQDLLSDRNKQVLEHEMEIQGLLQSVSTREQESQAAAEKLVQALMERNSELQALRQYLGGRDSLMSQAPISNQQAEVTPTGRLGKQTDQGSMQIPSRDDSTSLTAKEDVSIPRSTLGDLDTVAGLEKELSNAKEELELMAKKERESQMELSALQSMMAVQEEELQVQAADMESLTRNIQIKEDLIKDLQMQLVDPEDIPAMERLTQEVLLLREKVASVESQGQEISGNRRQQLLLMLEGLVDERSRLNEALQAERQLYSSLVKFHAHPESSERDRTLQVELEGAQVLRSRLEEVLGRSLERLNRLETLAAIGGGELESVRIHHKHAY

SEQ ID NO: 18698 - protein, 246 aa, Homo sapiens
MPWKEESEFTKQDKAARVIQQAWKSFLVKFPPDIYYKIFTHRPIEDLCANSPRNYAKLPAKHTSHNKNDHLQEEDHSGWYHRIENNGWRPVSDTFWLSTDGMVVEDKKESEFHFSKLKRRQDLEKKRKLRKIEWMRQMYYSGSLEAKSTHHETLGLIHTATKGLIRAFEDGGIDSVMEWEVDEVLNWTNTLNFDEYIASWKEIATSNSSANFKGIFFRILFSIKMEYEEFLSSPTPANVNTILPQW

SEQ ID NO: 18699 - protein, 602 aa, Homo sapiens
MSQTSLKQKKNEPGMRSSKESLEAEKRKESDKTGVRLSNQMRRAVNPNHSLRCCPFQGHSSCRRCLCAAEGTALGPCHTIRIYIHMCLLWEQGQQITMMRGSQESSLRKTDSRGYLVRSQWSRISRSPSTKAPSIDEPRSRNTSAKLPSSSTSSRTPSTSPSLHDSSPPPLSGQPSLQPPASPQLPRSLDSRPPTPPEPDPGSRRSTKMQENPEAWAQGIVREIRQTRDSQPLEYSRTSPTEWKSSSQRRGIYPASTQLDRNSLSEQQQQQREDEDDYEAAYWASMRSFYEKNPSCSRPWPPKPKNAITIALSSCALFNMVDGRKIYEQEGLEKYMEYQLTNENVILTPGPAFRFVKALQYVNARLRDLYPDEQDLFDIVLMTNNHAQVGVRLINSVNHYGLLIDRFCLTGGKDPIGYLKAYLTNLYIAADSEKVQEAIQEGIASATMFDGAKDMAYCDTQLRVAFDGDAVLFSDESEHFTKEHGLDKFFQYDTLCESKPLAQGPLKGFLEDLGRLQKKFYAKNERLLCPIRTYLVTARSAASSGARVLKTLRRWGLEIDEALFLAGAPKSPILVKIRPHIFFDDHMFHIEGAQRKSLGWMS

SEQ ID NO: 18700 - protein, 890 aa, Homo sapiens
MVYSRRGSLGSRLLLLWLLLAYWKAGSGQLHYSIPEEAKHGTFVGRIAQDLGLELAELVPRLFRVASKGRGDLLEVNLQNGILFVNSRIDREELCRRRAECSIHLEVIVDRPLQVFHVEVAVKDINDNPPRFSRQEQRLFILESRMPDSRFPLEGASDLDIGANAQLRYRLNPNEYFDLDVKTNEEETNFLELVLRKSLDREETQEHRLLVIATDGGKPELTGTVQLLINVLDANDNAPEFDKSIYNVRLLENAPSGTLVIKLNASDADEGINKEIVYFFSNLVLDDVKSKFIINSNTGEIKVNGELDYEDYNSYEINIDAMDKSTFPLSGHCKVVVKLLDVNDNTPEMAITTLFLPVKEDAPLSTVIALISVSDRDSGANGQVTCSLMPHVPFKLVSTFKNYYSLVLDSALDRESVSVYELVVTARDGGSPSLWATASVSVEVADVNDNAPAFAQPQYTVFVKENNPPGCHIFTVSARDADAQENALVSYSLVERRVGERPLSSYVSVHAESGKVYALQPLDHEEVELLQFQVSARDAGVPPLGSNVTLQVFVLDENDNAPALLVPRVGGTGGAVSELVPRSVGAGHVVAKVRAVDPDSGYNAWLSYELQPAPGSARIPFRVGLYTGEISTTRSLDETEAPRHRLLVLVKDHGEPPLTATATVLVSLVESGQAPKASSRASAGAVGPEAALVDVNVYLIIAICAVSSLLVLTLLLYTALRCSAQPTEAVCTRGKPTLLCSSAVGSWSYSQQRRQRVCSGEAPPKTDLMAFSPSLPQGPTSTDNPRQPNPDWRYSASLRAGMHSSVHLEEAGILRAGPGGPDQQWPTVSSATPEPEAGEVSPPVGAGVNSNSWTFKYGPGNPKQSGPEPKKQTQVSFLLRRKGEASQPRQ

SEQ ID NO: 18701 - protein, 231 aa, Homo sapiens
MAVQISKKRKFVADGIFKAELNEFLTRELAEDGYSGVEVRVTPTRTEIIILATRTQNVLGEKGRRIRELTAVVQKRFGFPEGSLCAIAQAESLRYKLLGGLAVRRACYGVLRFIMESGAKGCEVVVSGKLRGQRAKSMKFVDGLMIHSGDPVNYYVDTAVRHVLLRQGVLGIKVKIMLPWDPTGKIGPKKPLPDHVSIVEPKDEILPTTPISEQKGGKPEPPAMPQPVPTA

SEQ ID NO: 18702 - protein, 639 aa, Homo sapiens
MLLWLLLLILTPGREQSGVAPKAVLLLNPPWSTAFKGEKVALICSSISHSLAQGDTYWYHDEKLLKIKHDKIQITEPGNYQCKTRGSSLSDAVHVEFSPDWLILQALHPVFEGDNVILRCQGKDNKNTHQKVYYKDGKQLPNSYNLEKITVNSVSRDNSKYHCTAYRKFYILDIEVTSKPLNIQVQGVPVSNVNLEIRPTGGQLIEGENMVLICSVAQGSGTVTFSWHKEGRVRSLGRKTQRSLLAELHVLTVKESDAGRYYCAADNVHSPILSTWIRVTVRIPVSHPVLTFRAPRAHTVVGDLLELHCESLRGSPPILYRFYHEDVTLGNSSAPSGGGASFNLSLTAEHSGNYSCDADNGLGAQHSHGVSLRVTVPVSRPVLTLRAPGAQAVVGDLLELHCESLRGSFPILYWFYHEDDTLGNISAHSGGGASFNLSLTTEHSGNYSCEADNGLGAQHSKVVTLNVTGTSRNRTGLTAAGITGLVLSILVLAAAAALLHYARARRKPGGLSATGTSSHSPSECQEPSSSRPSRIDPQEPTHSKPLAPMELEPMYSNVNPGDSNPIYSQIWSIQHTKENSANCPMMHQEHEELTVLYSELKKTHPDDSAGEASSRGRAHEEDDEENYENVPRVLLASDH

SEQ ID NO: 18703 - protein, 921 aa, Homo sapiens
MRWGHHLPRASWGSGFRRALQRPDDRIPFLIHWSWPLQGERPFGPPRAFIRHHGSSVDSAPPPGRHGRLFPSASATEAIQRHRRNLAEWFSRLPREERQFGPTFALDTVHVDPVIRESTPDELLRPPAELALEHQPPQAGLPPLALSQLFNPDACGRRVQTVVLYGTVGTGKSTLVRKMVLDWCYGRLPAFELLIPFSCEDLSSLGPAPASLCQLVAQRYTPLKEVLPLMAAAGSHLLFVLHGLEHLNLDFRLAGTGLCSDPEEPQEPAAIIVNLLRKYMLPQASILVTTRPSAIGRIPSKYVGRYGEICGFSDTNLQKLYFQLRLNQPYCGYAVGGSGVSATPAQRDHLVQMLSRNLEGHHQIAAACFLPSYCWLVCATLHFLHAPTPAGQTLTSIYTSFLRLNFSGETLDSTDPSNLSLMAYAARTMGKLAYEGVSSRKTYFSEEDVCGCLEAGIRTEEEFQLLHIFRRDALRFFLAPCVEPGRAGTFVFTVPAMQEYLAALYIVLGLRKTTLQKVGKEVAELVGRVGEDVSLVLGIMAKLLPLRALPLLFNLIKVVPRVFGRMVGKSREAVAQAMVLEMFREEDYYNDDVLDQMGASILGVEGPRRHPDEPPEDEVFELFPMFMGGLLSAHNRAVLAQLGCPIKNLDALENAQAIKKKLGKLGRQVLPPSELLDHLFFHYEFQNQRFSAEVLSSLRQLNLAGVRMTPVKCTVVAAVLGSGRHALDEVNLASCQLDPAGLRTLLPVFLRARKLGLQLNSLGPEACKDLRDLLLHDQCQITTLRLSNNPLTAAGVAVLMEGLAGNTSVTHLSLLHTGLGDEGLELLAAQLDRNRQLQELNVAYNGAGDTAALALARAAREHPSLELLQGVAIQMCWKLPLLPYAHLWTPRMPSHWCFLLILMPPLPQWYDGLVAPRGRCT

SEQ ID NO: 18704 - protein, 378 aa, Homo sapiens
QKIRDQLPSWIDQERSWAVATLKIALPSLYQTLCFEDAALWRTYYNNSMCEQEFPSILAKKVSLFQQILVVQALRPDRLQSAMALFACKTLGLKEVSPLPLNLKRLYKETLEIEPILIIISPGADPSQELQELANAERSGECYHQVAMGQGQADLAIQMLKECARNGDWLCLKNLHLVVSWLPVLEKELNTLQPKDTFRLWLTAEVHPNFTPILLQSSLKITYESPPGLKKNLMRTYESWTPEQISKKDNTHRAHALFSLAWFHAACQERRNYIPQGWTKFYEFSLSDLRAGYNIIDRLFDGAKDVQWEFVHGLLENAIYGGRIDNYFDLRVLQSYLKQFFNSSVIDVFNQRNKKSIFPYSVSLPQSCSILVGLSCCH

SEQ ID NO: 18705 - protein, 751 aa, Homo sapiens
MAFLIILITCFVIILATSQPCQTPDDFVAATSPGHIIIGGLFAIHEKMLSSEDSPRRPQIQECVGFEISVFLQTLAMIHSIEMINNSTLLPGVKLGYEIYDTCTEVTVAMAATLRFLSKFNCSRETVEFKCDYSSYMPRVKAVIGSGYSEITMAVSRMLNLQLMPQVGYESTAEILSDKIRFPSFLRTVPSDFHQIKAMAHLIQKSGWNWIGIITTDDDYGRLALNTFIIQAEANNVCIAFKEVLPAFLSDNTIEVRINRTLKKIILEAQLLGVLKNVTFTDGWNSFHFDAHGDLNTGYDVVLWKEINGHMTVTKMAEYDLQNDVFIIPDQETKNEFRNLKQIQSKCSKECSPGQMKKTTRSQHICCYECQNCPENHYTNQTDMPHCLLCNNKTHWAPVRSTMCFEKEVEYLNWNDSLAILLLILSLLGIIFVLVVGIIFTRNLNTPVVKSSGGLRVCYVILLCHFLNFASTSFFIGEPQDFTCKTRQTMFGVSFTLCISCILTKSLKILLAFSFDPKLQKFLKCLYRPILIIFTCTGIQVVICTLWLIFAAPTVEVNVSLPRVIILECEEGSILAFGTMLGYIAILAFICFIFAFKGKYENYNEAKFITFGMLIYFIAWITFIPIYATTFGKYVPAVEIIVILISNYGILYCTFIPKCYVIICKQEINTKSAFLKMIYSYSSHSVSSIALSPASLDSMSGNVTMTNPSSSGKSATWQKSKDLQAQAFAHICRENATSVSKTLPRKRMSSI

SEQ ID NO: 18706 - protein, 752 aa, Homo sapiens
DALFMDLPTGPRGQQAQPQRAEKNGMLPASYGPGEQNGTGGYQRAFPPRTNPEKHSQRKSNLAQVEHWARAQKGDSRSLPLDQTLPRQGPGQSLSFPENYQTLPKSTRHPSGGSSPPPRNLPSDYKYAQDRASHLKMSSEERRAHRDGTVWQLYEWQQRQQFRHGSPTAPICLGSPEFTDQGRSRSMLEVPRSISVPPSPSDIPPPGPPRVFPPRRPHTPAERVTVKPPDQRRSVDISLGDSPRRARGHAVKNSSHVDRRSMPSMGYMTHTVSAPSLHGKSADDTYLQLKKDLEYLDLKMTGRDLLKDRSLKPVKIAESDTDVKLSIFCEQDRVLQDLEDKIRALKENKDQLESVLEVLHRQMEQYRDQPQHLEKIAYQQKLLQEDLVHIRAELSRESTEMENAWNEYLKLENDVEQLKQTLQEQHRRAFFFQEKSQIQKDLWRIEDVTAGLSANKENFRILVESVKNPERKTVPLFPHPPVPSLSTSESKPPPQPSPPTSPVRTPLEVRLFPQLQTYVPYRPHPPQLRKVTSPLQSPTKAKPKVQEDEAPPRPPLPELYSPEDQPPAVPPLPREATIIRHTSVRGLKRQSDERKRDRELGQCVNGDSRVELRSYVSEPELATLSGDMAQPSLGLVGPESRYQTLPGRGLSGSTSRLQQSSTIAPYVTLRRGLNAESSKATFPRPKSALERLYSGDHQRGKMSAEEQLERMKRHQKALVRERKRTLGQGERTGLPSSRYLSRPLPGDLGSVC

SEQ ID NO: 18707 - protein, 1005 aa, Homo sapiens
MAPQEAKPQGSREAGPATRGRGGRPVARGLGRAAWGAARCTGVRGPGAGASHDAPPRPPTLLLGLLLLAALLEHGQADPGTDNLQMNVTRTPESFPPGKLLPISPTWPFTEVRSSSAADRIKTVLGQSSDNTSLPQSARTPASKTHHRTRAHADFSSSLYQGSGHSASLEPSKDSTESLVQPGPKGGQEAADVSADTVSSKVQPTAAAAVTLFLRKSSPPALSAALVAKGTSSSPLAVASGPAKSSSMTTLAKNVTNKAASGPKRTPGAVHTAFPFTPTYMYARTGHTTSTHTAMQGNMDTASGLLSTTYLPRKPQAMHTGLPNPTNLEMPRASTPRPLTVTAALTSITASVKATRLPPLRAENTDAVLPAASAAVVTTGKMASNLECQMSSKLLVKTVLFLTQRRVQISESLKFSIAKGLTQALRKAFHQNDVSAHVDILEYSHNVTVGYYATKGKLVYLPAVVIEMLGVYGVSNVTADLKQHTPHLQSVAVLASPWNPQPAGYFQLKTVLQFVSQADNIQSCKFAQTMEQRLQKAFQDAERKVLNTKSNLTIQIVSTSNASQAVTLVYVVGNQSTFLNGTVASSLLSQLSAELVGFYLTYPPLTIAEPLEYPNLDISETTRDYWVITVLQGVDNSLVGLHNQSFARVMEQRLAQLFMMSQQQGRRFKRATTLGSYTVQMVKMQRVPGPKDPAELTYYTLYNGKPLLGTAAAKILSTIDSQRMALTLHHVVLLQADPVVKNPPNNLWIIAAVLAPIAVVTVIIIIITAVLCRKNKNDFKPDTMINLPQRAKPVQGFDYAKQHLGQQGADEEVIPVTQETVVLPLPIRDAPQERDVAQDGSTIKTAKSTETRKSRSPSENGSVISNESGKPSSGRRSPQNVMAQQKVTKEEARKRNVPASDEEEGAVLFDNSSKVAAEPFDTSSGSVQLIAIKPTALPMVPPTSDRSQESSAVLNGEVNKALKQKSDIEHYRNKLRLKAKRKGYYDFPAVETSKGLTERKKMYEK

SEQ ID NO: 18708 - protein, 1203 aa, Homo sapiens
MEESKTLKSENHEPKKNVICEESKAVQVIGNQTLKARNDKSVKEIENSSPNRNSSKKNKQNDICIEKTEVKSCKVNAANLPGPKDLGLVLRDQSHCKAKKFPNSPVKAEKATISQAKSEKATSLQAKAEKSPKSPNSVKAEKASSYQMKSEKVPSSPAEAEKGPSLLLKDMRQKTELQQIGKKIPSSFTSVDKVNIEAVGGEKCALQNSPRSQKQQTCTDNTGDSDDSASGIEDVSDDLSKMKNDESNKENSSEMDYLENATVIDESALTPEQRLGLKQAEERLERDHIFRLEKRSPEYTNCRYLCKLCLIHIENIQGAHKHIKEKRHKKNILEKQEESELRSLPPPSPAHLAALSVAVIELAKEHGITDDDLRVRQEIVEEMSKVITTFLPECSLRLYGSSLTRFALKSSDVNIDIKFPPKMNHPDLLIKVLGILKKNVLYVDVESDFHAKVPVVVCRDRKSGLLCRVSAGNDMACLTTDLLTALGKIEPVFIPLVLAFRYWAKLCYIDSQTDGGIPSYCFALMVMFFLQQRKPPLLPCLLGSWSPLALETPNRVSLGQLWLELLKFYTLDFALEEYVICVRIQDILTRENKNWPKRRIAIEDPFSVKRNVARSLNSQLVYEYVVERFRAAYRYFACPQTKGGNKSTVDFKKREKGKISNKKPVKSNNMATNGCILLGETTEKINAEREQPVQCDEMDCTSQRCIIDNNNLLVNELDFADHGQDSSSLSTSKSSEIEPKLDKKQDDLAPSETCLKKELSQCNCIDLSKSPDPDKSTGTDCRSNLETESSHQSVCTDTSATSCNCKATEDASDLNDDDNLPTQELYYVFDKFILTSGKPPTIVCSICKKDGHSKNDCPEDFRKIDLKPLPPMTNRFREILDLVCKRCFDELSPPCSEQHNREQILIGLEKFIQKEYDEKARLCLFGSSKNGFGFRDSDLDICMTLEGHENAEKLNCKEIIENLAKILKRHPGLRNILPITTAKVPIVKFEHRRSGLEGDISLYNTLAQHNTRMLATYAAIDPRVQYLGYTMKVFAKRCDIGDASRGSLSSYAYILMVLYFLQQRKPPVIPVLQEIFDGKQIPQRMVDGWNAFFFDKTEELKKRLPSLGKNTESLGELWLGLLRFYTEEFDFKEYVISIRQKKLLTTFEKQWTSKCIAIEDPFDLNHNLGAGVSRKMTNFIMKAFINGRKLFGTPFYPLIGREA

SEQ ID NO: 18709 - protein, 354 aa, Homo sapiens
MKAAVDLKPTLTIIKTEKVDLELFPSPDMECADVPLLTPSSKEMMSQALKATFSGFTKEQQRLGIPKDPRQWTETHVRDWVMWAVNEFSLKGVDFQKFCMNGAALCALGKDCFLELAPDFVGDILWEHLEILQKEDVKPYQVNGVNPAYPESRYTSDYFISYGIEHAQCVPPSEFSEPSFITESYQTLHPISSEELLSLKYENDYPSVILRDPLQTDTLQNDYFAIKQEVVTPDNMCMGRTSRGSGPIQLWQFLLELLTDKSCQSFISWTGDGWEFKLSDPDEVARRWGKRKNKPKMNYEKLSRGLRYYYDKNIIHKTAGKRYVYRFVCDLQSLLGYTPEELHAMLDVKPDADE

SEQ ID NO: 18710 - protein, 752 aa, Homo sapiens
MGRSNSRSHSSRSKSRSQSSSRSRSRSHSRKKRYSSRSRSRTYSRSRSRDRMYSRDYRRDYRNNRGMRRPYGYRGRGRGYYQGGGGRYHRGGYRPVWNRRHSRSPRRGRSRSRSPKRRSVSSQRSRSRSRRSYRSSRSPRSSSSRSSSPYSKSPVSKRRGSQEKQTKKAEGEPQEESPLKSKSQEEPKDTFEHDPSESIDEFNKSSATSGDIWPGLSAYDNSPRSPHSPSPIATPPSQSSSCSDAPMLSTVHSAKNTPSQHSHSIQHSPERSGSGSVGNGSSRYSPSQNSPIHHIPSRRSPAKTIAPQNAPRDESRGRSSFYPDGGDQETAKTGKFLKRFTDEESRVFLLDRGNTRDKEASKEKGSEKGRAEGEWEDQEALDYFSDKESGKQKFNDSEGDDTEETEDYRQFRKSVLADQGKSFATASHRNTEEEGLKYKSKVSLKGNRESDGFREEKNYKLKETGYVVERPSTTKDKHKEEDKNSERITVKKETQSPEQVKSEKLKDLFDYSPPLHKNLDAREKSTFREESPLRIKMIASDSHRPEVKLKMAPVPLDDSNRPASLTKDRLLASTLVHSVKKEQEFRSIFDHIKLPQASKSTSESFIQHIVSLVHHVKEQYFKSAAMTLNERFTSYQKATEEHSTRQKSPEIHRRIDISPSTLRKHTRLAGEERVFKEENQKGDKKLRCDSADLRHDIDRRRKERSKERGDSKGSRESSGSRKQEKTPKDYKEYKSYKDDSKNVFVFYTAYGG

SEQ ID NO: 18711 - protein, 589 aa, Homo sapiens
MELENIVANTVLLKAREGGGGNRKGKSKKWRQMLQFPHISQCEELRLSLERDYHSLCERQPIGRLLFREFCATRPELSRCVAFLDGVAEYEVTPDDKRKACGRQLTQNFLSHTGPDLIPEVPRQLVTNCTQRLEQGPCKDLFQELTRLTHEYLSVAPFADYLDSIYFNRFLQWKWLERQPVTKNTFRQYRVLGKGGFGEVCACQVRATGKMYACKKLEKKRIKKRKGEAMALNEKQILEKVNSRFVVSLAYAYETKDALCLVLTLMNGGDLKFHIYHMGQAGFPEARAVFYAAEICCGLEDLHRERIVYRDLKPENILLDDHGHIRISDLGLAVHVPEGQTIKGRVGTVGYMAPEVVKNERYTFSPDWWALGCLLYEMIAGQSPFQQRKKKIKREEVERLVKEVPEEYSERFSPQARSLCSQLLCKDPAERLGCRGGSAREVKEHPLFKKLNFKRLGAGMLEPPFKPDPQAIYCKDVLDIEQFSTVKGVELEPTDQDFYQKFATGSVPIPWQNEMVETECFQELNVFGLDGSVPPDLDWKGQPPAPPKKGLLQRLFSRQRIAVETAATARKSSPPASSPQPEAPTSSWR

SEQ ID NO: 18712 - protein, 231 aa, Homo sapiens
VRELLTMQLVDWHQLQADSFIQDERLRIFALLAGKPVWQLSEKKQINVCSQLDWKRSLAIHLWYLLPPTASISRALSMYEEAFQNTSDSDRYACSPLPSYLEGSGCVIAEEQNSQTPLRDVCFHLLKLYSDRHYDLNQLLEPRSITADPLDYRLSWHLWEVLRALNYTHLSAQCEAYVRRLFESCLPGTASCWRPLNLGLKRLSLPRSSVYLPNGSTRPKLCEHTWNLTST

SEQ ID NO: 18713 - protein, 418 aa, Homo sapiens
MDELFPLIFPAEPAQASGPYVEIIEQPKQRGMRFRYKCEGRSAGSIPGERSTDTTKTHPTIKVWMSGPLYFGQINGYTGPGTVRISLVTKDPPHRPHPHELVGKDCRDGFYEAELCPDRCIHSFQNLGIQCVKKRDLEQAISQRIQTNNNPFQVPIEEQRGDYDLNAVRLCFQVTVRDPSGRPLRLPPVLSHPIFDNRAPNTAELKICRVNRNSGSCLGGDEIFLLCDKVQKEDIEVYFTGPGWEARGSFSQADVHRQVAIVFRTPPYADPSLQAPVRVSMQLRRPSDRELSEPMEFQYLPDTDDRHRIEEKRKRTYETFKSIMKKSPFSGPTDPRPPPRRIAVPSRSSASVPKPAPQPYPFTSSLSTINYDEFPTMVFPSGQISQASALAPAPPQVLPQAPAPAPAPAMVSALAQAP

SEQ ID NO: 18714 - protein, 600 aa, Homo sapiens
MTMYLWLKLLAFGFAFLDTEVFVTGQSPTPSPTGVSSVQTPHLPTHADSQTPSAGTDTQTFSGSAANAKLNPTPGSNAISDAYLNASETTTLSPSGSAVISTTTIATTPSKPTCDEKYANITVDYLYNKETKLFTAKLNVNENVECGNNTCTNNEVHNLTECKNASVSISHNSCTAPDKTLILDVPPGVEKFQLHDCTQVEKADTTICLKWKNIETFTCDTQNITYRFQCGNMIFDNKEIKLENLEPEHEYKCDSEILYNNHKFTNASKIIKTDFGSPGEPQIIFCRSEAAHQGVITWNPPQRSFHNFTLCYIKETEKDCLNLDKNLIKYDLQNLKPYTKYVLSLHAYIIAKVQRNGSAAMCHFTTKSAPPSQVWNMTVSMTSDNSMHVKCRPPRDRNGPHERYHLEVEAGNTLVRNESHKNCDFRVKDLQYSTDYTFKAYFHNGDYPGEPFILHHSTSYNSKALIAFLAFLIIVTSIALLVVLYKIYDLHKKRSCNLDEQQELVERDDEKQLMNVEPIHADILLETYKRKIADEGRLFLAEFQSIPRVFSKFPIKEARKPFNQNKNRYVDILPYDYNRVELSEINGDAGSNYINASYID

SEQ ID NO: 18715 - protein, 445 aa, Homo sapiens
MENQAHNTMGTSPCEAELQELMEQIDIMVSNKKMDWERKMRALETRLDLRDQELANAQTCLDQKGQEVGLLRQKLDSLEKCNLAMTQNYEGQLQSLKAQFSKLTNNFEKLRLHQMKQNKVPRKELPHLKEEIPFELSNLNQKLEEFRAKSREWDKQEILYQTHLISLDAQQKLLSEKCNQFQKQAQSYQTQLNGKKQCLEDSSSEIPRLICDPDPNCEINERDEFIIEKLKSAVNEIALSRNKLQDENQKLLQELKMYQRQCQAMEAGLSEVKSELQSRDDLLRIIEMERLQLHRELLKIGECQNAQGNKTRLESSYLPSIKEPERKIKELFSVMQDQPNHEKELNKIRSQLQQVEEYHNSEQERMRNEISDLTEELHQKEITIATVTKKAALLEKQLKMELEIKEKMLAKQKVSDMKYKAVRTENTHLKGMMGDLDPGEYMVIC

SEQ ID NO: 18716 - protein, 2833 aa, Homo sapiens
MSGGAAEKQSSTPGSLFLSPPAPAPKNGSSSDSSVGEKLGAAAADAVTGRTEEYRRRRHTMDKDSRGAAATTTTTEHRFFRRSVICDSNATALELPGLPLSLPQPSIPAAVPQSAPPEPHREETVTATATSQVAQQPPAAAAPGEQAVAGPAPSTVPSSTSKDRPVSQPSLVGSKEEPPPARSGSGGGSAKEPQEERSQQQDDIEELETKAVGMSNDGRFLKFDIEIGRGSFKTVYKGLDTETTVEVAWCELQDRKLTKSERQRFKEEAEMLKGLQHPNIVRFYDSWESTVKGKKCIVLVTELMTSGTLKTYLKRFKVMKIKVLRSWCRQILKGLQFLHTRTPPIIHRDLKCDNIFITGPTGSVKIGDLGLATLKRASFAKSVIGTPEFMAPEMYEEKYDESVDVYAFGMCMLEMATSEYPYSECQNAAQIYRRVTSGVKPASFDKVAIPEVKEIIEGCIRQNKDERYSIKDLLNHAFFQEETGVRVELAEEDDGEKIAIKLWLRIEDIKKLKGKYKDNEAIEFSFDLERDVPEDVAQEMVESGYVCEGDHKTMAKAIKDRVSLIKRKREQRQLVREEQEKKKQEESSLKQQVEQSSASQTGIKQLPSASTGIPTASTTSASVSTQVEPEEPEADQHQQLQYQQPSISVLSDGTVDSGQGSSVFTESRVSSQQTVSYGSQHEQAHSTGTVPGHIPSTVQAQSQPHGVYPPSSVPQSMAHPCGGTPTYPESQIFFPTIHERPVSFSPPPTCPPKVAISQRRKSTSFLEAQTHHFQPLLRTVGQSLLPPGGSPTNWTPEAVVMLGTTASRVTGESCEIQVHPMFEPSQVYSDYRPGLVLPEEAHYFIPQEAVYVAGVHYQARVAEQYEGIPYNSSVLSSPMKQIPEQKPVQGGPTSSSVFEFPSGQAFLVGHLQNLRLDSGLGPGSPLSSISAPISTDATRLKFHPVFVPHSAPAVLTHNNESRSNCVFEFHVHTPSSSSGEGGGILPQRVYRNRQVAVDLNQEELPPQSVGLHGYLQPVTEEKHNYHAPELTVSVVEPIGQNWPIGSPEYSSDSSQITSSDPSDFQSPPPTGGAAAPFGSDVSMPFIHLPQTVLQESPLFFCFPQGTTSQQVLTASFSSGGSALHPQAQGQSQGQPSSSSLTGVSSSQPIQHPQQQQGIQQTAPPQQTVQYSLSQTSTSSEATTAQPVSQPQAPQVLPQVSAGKQLPVSQPVPTIQGEPQIPVATQPSVVPVHSGAHFLPVGQPLPTPLLPQYPVSQIPISTPHVSTAQTGFSSLPITMAAGITQPLLTLASSATTAAIPGVSTVVPSQLPTLLQPVTQLPSQVHPQLLQPAVQSMGIPANLGQAAEVPLSSGDVLYQGFPPRLPPQYPGDSNIAPSSNVASVCIHSTVLSPPMPTEVLATPGYFPTVVQPYVESNLLVPMGGVGGQVQVSQPGGSLAQAPTTSSQQAVLESTQGVSQVAPAEPVAVAQTQATQPTTLASSVDSAHSDVASGMSDGNENVPSSSGRHEGRTTKRHYRKSVRSRSRHEKTSRPKLRILNVSNKGDRVVECQLETHNRKMVTFKFDLDGDNPEEIATIMVNNDFILAIERESFVDQVREIIEKADEMLSEDVSVEPEGDQGLESLQGKDDYGFSGSQKLEGEFKQPIPASSMPQQIGIPTSSLTQVVHSAGRRFIVSPVPESRLRESKVFPSEITDTVAASTAQSPGMNLSHSASSLSLQQAFSELRRAQMTEGPNTAPPNFSHTGPTFPVVPPFLSSIAGVPTTAAATAPVPATSSPPNDISTSVIQSEVTVPTEEGIAGVATSTGVVTSGGLPIPPVSESPVLSSVVSSITIPAVVSISTTSPSLQVPTSTSEIVVSSTALYPSVTVSATSASAGGSTATPGPKPPAVVSQQAAGSTTVGATLTSVSTTTSFPSTASQLCIQLSSSTSTPTLAETVVVSAHSLDKTSHSSTTGLAFSLSAPSSSSSPGAGVSSYISQPGGLHPLVIPSVIASTPILPQAAGPTSTPLLPQVPSIPPLVQPVANVPAVQQTLIHSQPQPALLPNQPHTHCPEVDSDTQPKAPGIDDIKTLEEKLRSLFSEHSSSGAQHASVSLETSLVIESTVTPGIPTTAVAPSKLLTSTTSTCLPPTNLPLGTVALPVTPVVTPGQVSTPVSTTTSGVKPGTAPSKPPLTKAPVLPVGTELPAGTLPSEQLPPFPGPSLTQSQQPLEDLDAQLRRTLSPEMITVTSAVGPVSMAAPTAITEAGTQPQKGVSQVKEGPVLATSSGAGVFKMGRFQVSVAADGAQKEGKNKSEDAKSVHFESSTSESSVLSSSSPESTLVKPEPNGITIPGISSDVPESAHKTTASEAKSDTGQPTKVGRFQVTTTANKVGRFSVSKTEDKITDTKKEGPVASPPFMDLEQAVLPAVIPKKEKPELSEPSHLNGPSSDPEAAFLSRDVDDGSGSPHSPHQLSSKSLPSQNLSQSLSNSFNSSYMSSDNESDIEDEDLKLELRRLRDKHLKEIQDLQSRQKHEIESLYTKLGKVPPAVIIPPAAPLSGRRRRPTKSKGSKSSRSSSLGNKSPQLSGNLSGQSAASVLHPQQTLHPPGNIPESGQNQLLQPLKPSPSSDNLYSAFTSDGAISVPSLSAPGQGCAKFNCASEQVTFKPGGRRTRFLRKMVKKVCPCNQLCRTSSTNTVGATVNSQAAQAQPPAMTSSRKGTFTDDLHKLVDNWARDAMNLSGRRGSKGHMNYEGPGMARKFSAPGQLCISMTSNLGGSAPISAASATSLGHFTKSMCPPQQYGFPATPFGAQWSGTGGPAPQPLGQFQPVGTASLQNFNISNLQKSISNPPGSNLRTT

SEQ ID NO: 18717 - protein, 615 aa, Homo sapiens
CAQWLIHCKVLPTNHRVTWDSAQVFDLAQTLRDGVLLCQLLNNLRAHSINLKEINLRPQMSQFLCLKNIRTFLTACCETFGMRKSELFEAFDLFDVRDFGKVIETLSRLSRTPIALATGIRPFPTEESINDEDIYKGLPDLIDETLVEDEEDLYDCVYGEDEGGEVYEDLMKAEEAHQPKCPENDIRSCCLAEIKQTEEKYTETLESIEKYFMAPLKRFLTAAEFDSVFINIPELVKLHRNLMQEIHDSIVNKNDQNLYQVFINYKERLVIYGQYCSGVESAISSLDYISKTKEDVKLKLEECSKRANNGKFTLRDLLVVPMQRVLKYHLLLQELVKHTTDPTEKANLKLALDAMKDLAQYVNEVKRDNETLREIKQFQLSIENLNQPVLLFGRPQGDGEIRITTLDKHTKQERHIFLFDLAVIVCKRKGDNYEMKEIIDLQQYKIANNPTTDKENKKWSYGFYLIHTQGQNGLEFYCKTKDLKKKWLEQFEMALSNIRPDYADSNFHDFKMHTFTRVTSCKVCQMLLRGTFYQGYLCFKCGARAHKECLGRVDNCGRVNSGEQGTLKLPEKRTNGLRRTPKQVDPDVPCLLHFFISMAPATRSIVKSQKKNKKF

SEQ ID NO: 18718 - protein, 754 aa, Homo sapiens
MNTQKGSLTINVHRGSLAMSIQRGSLVPRDMDSSGRDMQLRVIPAEVKFLDTMAGRVYRLPITVHNICRWNQKIRFKEPVKPQFKLMLTSLDKELASGLQMTAMVEYHPDKDEDTFDRLLISIENKTTEIPLIGLIPSCQLEIESVVNFGTLVANSKVYSKEITITNHGKAPGIFKAEYHGQLPILIFPTSGIVDAKSSMVIKVDFCADQPRIVDEEAIVILQGQPEMLLSIKAHVVEQIIELLSMSSDRRLECIHFGPVFFGSSKIKHARVYNNSPEPINWVAIIQDDAVGEELGTDIQQRTDIALNNLTYIRKIKNIDTTIIISCLPNEGTLQPYQKTVITFCFTPKLMAVGKKDIGPSYRQDYALFLRFESVGSKDGFLRDDDYKTIKSERFQKVELALTGTGLPVLLQFDPGPVLNFKPCFMGERSEIQCIIKNQCELLPVTYHFKKTANFEIDPEKGKITGGGMVDVMCSFVPHQLGVFKVKQMIEIIGLVAEEDLQSLSVKSFHHVYLAFNSICKASTKKVVMKFDPGILPSIRNPTGKFVVKDLAKRKNYAPVAMLQSAMTRTHNHRSCEEPVKDMLLAFPNDRAATIRSKDHHKHFRPIFTKVPRFNYVNHDFAYTTFEKQQKKLHENYYAMYLKYLRSVRLQKKQAERERMYSYDDTDIGLEPGSGLKSPSLSEAEIEEELSSAANSIRANRLLTTRGIASQEEESVRRKVLKGLKSEPSTPQEKHDCSLMLTPKQIHQVIVVRY

SEQ ID NO: 18719 - protein, 838 aa, Homo sapiens
MFWKFDLHSSSHIDTLLEREDVTLKELMDEEDVLQECKAQNRKLIEFLLKAECLEDLVSFIIEEPPQDMDEKIRYKYPNISCELLTSDVSQMNDRLGEDESLLMKLYSFLLNDSPLNPLLASFFSKVLSILISRKPEQIVDFLKKKHDFVDLIIKHIGTSAIMDLLLRLLTCIEPPQPRQDVLNWLNEEKIIQRLVEIVHPSQEEDRHSNASQSLCEIVRLSRDQMLQIQNSTEPDPLLATLEKQEIIEQLLSNIFHKEKNESAIVSAIQILLTLLETRRPTFEGHIEICPPGMSHSACSVNKSVLEAIRGRLGSFHELLLEPPKKSVMKTTWGVLDPPVGNTRLNVIRLISSLLQTNTSSINGDLMELNSIGVILNMFFKYTWNNFLHTQVEICIALILASPFENTENATITDQDSTGDNLLLKHLFQKCQLIERILEAWEMNEKKQAEGGRRHGYMGHLTRIANCIVHSTDKGPNSALVQQLIKDLPDEVRERWETFCTSSLGETNKRNTVDLMQQMTSNFIDQFGFNDEKFADQDDIGNVSFDRVSDINFTLNTNESGNIALFEACCKERIQQFDDGGSDEEDIWEEKHIAFTPESQRRSSSGSTDSEESTDSEEEDGAKQDLFEPSSANTEDKMEVDLSEPPNWSANFDVPMETTHGAPLDSVGSDVWSTEEPMPTKETGWASFSEFTSSLSTKDSLRSNSPVEMETSTEPMDPLTPSAAALAVQPEAAGSVAMEASSDGEEDAESTDKVTETVMNGGMKETLSLTVDAKTETAVFKSEEGKLSTSQDAACKDAEECPETAEAKCAAPRPPSSSPEQRTGQPSAPGDTSVNGPV

SEQ ID NO: 18720 - protein, 911 aa, Homo sapiens
MASSWKLMLFLSVTMCLSEYSKSLPGLSTSYAALLRIKKSSSSSLFGSKTRPRYSSPSLGTLSASSPSWLGAAQNYYSPINLYHSSDAFKQDESVDYGPVFVQEPDDIIFPTDSDEKKVALNCEVRGNPVPSYRWLRNGTEIDLESDYRYSLIDGTFIISNPSEAKDSGHYQCLATNTVGSILSREATLQFAYLGNFSGRTRSAVSVREGQGVVLMCSPPPHSPEIIYSWVFNEFPSFVAEDSRRFISQETGNLYISKVQTSDVGSYICLVKNTVTNARVLSPPTPLTLRNDGVMGEYEPKIEVHFPFTVTAAKGTTVKMECFALGNPVPTITWMKVNGYIPSKARLRKSQAVLEIPNVQLDDAGIYECRAENSRGKNSFRGQLQVYTYPHWVEKLNDTQLDSGSPLRWECKATGKPRPTYRWLKNGVPLSPQSRVEMVNGVLMIHNVNQSDAGMYQCLAENKYGAIYASAELKILASAPTFALNQLKKTIIVTKDQEVVIECKPQGSPKPTISWKKGDRAVRENKRIAILPDGSLRILNASKSDEGKYVCRGENVFGSAEIIASLSVKEPTRIELTPKRTELTVGESIVLNCKAIHDASLDVTFYWTLKGQPIDFEEEGGHFESIRAQASSADLMIRNILLMHAGRYGCRVQTTADSVSDEAELLVRGPPGPPGIVIVEEITESTATLSWSPAADNHSPISSYNLQARSPFSLGWQTVKTVPEIITGDMESAMAVDLNPWVEYEFRVVATNPIGTGDPSTPSRMIRTNEAVPKTAPTNVSGRSGRRHELVIAWEPVSEEFQNGEGFGYIVAFRPNGTRGWKEKMVTSSEASKFIYRDESVPPLTPFEVKVGVYNNKGDGPFSQIVVICSAEGEPSAAPTDVKATSVSVSEILVAWKHIKESLGRPQGFEV

SEQ ID NO: 18721 - protein, 222 aa, Homo sapiens
MSSVQSQQEQLSQSDPSPSPNSCSSFELIDMDAGSLYEPVSPHWFYCKIIDSKETWIPFNSEDSQQLEEAYSSGKGCNGRVVPTDGGRYDVHLGERMRYAVYWDELASEVRRCTWFYKGDKDNKYVPYSESFSQVLEETYMLAVTLDEWKKKLESPNREIIILHNPKLMVHYQPVAGSDDWGSTPTEQGRPRTVKRGVENISVDIHCVNDFRSVSLNLLQTH

SEQ ID NO: 18722 - protein, 627 aa, Homo sapiens
MSKGPAVGIDLGTTYSCVGVFQHGKVEIIANDQGNRTTPSYVAFTDTERLIGDAAKNQVAMNPTNTVFDAKRLIGRRFDDAVVQSDMKHWPFMVVNDAGRPKVQVEYKGETKSFYPEEVSSMVLTKMKEIAEAYLGKATKDAGTIAGLNVLRIINEPTAAAIAYGLDKKVGAERNVLIFDLGGGTFDVSILTIEDGIFEVKSTAGDTHLGGEDFDNRMVNHFIAEFKRKHKKDISENKRAVRRLRTACERAKRTLSSSTQASIEIDSLYEGIDFYTSITRARFEELNADLFRGTLDPVEKALRDAKLDKSQIHDIVLVGGSTRIPKIQKLLQDFFNGKELNKSINPDEAVAYGAAVQAAILSGDKSENVQDLLLLDVTPLSLGIETAGGVMTVLIKRNTTIPTKQTQTFTTYSDNQPGVLIQVYEGERAMTKDNNLLGKFELTGIPPAPRGVPQIEVTFDIDANGILNVSAVDKSTGKENKITITNDKGRLSKEDIERMVQEAEKYKAEDEKQRDKVSSKNSLESYAFNMKATVEDEKLQGKINDEDKQKILDKCNEIINWLDKNQTAEKEEFEHQQKELEKVCNPIITKLYQSAGGMPGGMPGGFPGGGAPPSGGASSGPTIEEVD

SEQ ID NO: 18723 - protein, 1313 aa, Homo sapiens
AAGALERSFVELSGAERERPRHFREFTVCSIGTANAVAGAVKYSESAGGFYYVESGKLFSVTRNRFIHWKTSGDTLELMEESLDINLLNNAIRLKFQNCSVLPGGVYVSETQNRVIILMLTNQTVHRLLLPHPSRMYRSELVVDSQMQSIFTDIGKVDFTDPCNYQLIPAVPGISPNSTASTAWLSSDGEALFALPCASGGIFVLKLPPYDIPGMVSVVELKQSSVMQRLLTGWMPTAIRGDQSPSDRPLSLAVHCVEHDAFIFALCQDHKLRMWSYKEQMCLMVADMLEYVPVKKDLRLTAGTGHKLRLAYSPTMGLYLGIYMHAPKRGQFCIFQLVSTESNRYSLDHISSLFTSQETLIDFALTSTDIWALWHDAENQTVVKYINFEHNVAGQWNPVFMQPLPEEEIVIRDDQDPREMYLQSLFTPGQFTNEALCKALQIFCRGTERNLDLSWSELKKEVTLAVENELQGSVTEYEFSQEEFRNLQQEFWCKFYACCLQYQEALSHPLALHLNPHTNMVCLLKKGYLSFLIPSSLVDHLYLLPYENLLTEDETTISDDVDIARDVICLIKCLRLIEESVTVDMSVIMEMSCYNLQSPEKAAEQILEDMITIDVENVMEDICSKLQEIRNPIHAIGLLIREMDYETEVEMEKGFNPAQPLNIRMNLTQLYGSNTAGYIVCRGVHKIASTRFLICRDLLILQQLLMRLGDAVIWGTGQLFQAQQDLLHRTAPLLLSYYLIKWGSECLATDVPLDTLESNLQHLSVLELTDSGALMANRFVSSPQTIVELFFQEVARKHIISHLFSQPKAPLSQTGLNWPEMITAITSYLLQLLWPSNPGCLFLECLMGNCQYVQLQDYIQLLHPWCQVNVGSCRFMLGRCYLVTGEGQKALECFCQAASEVGKEEFLDRLIRSEDGEIVSTPRLQYYDKVLRLLDVIGLPELVIQLATSAITEAGDDWKSQATLRTCIFKHHLDLGHNSQAYEALTQIPDSSRQLDCLRQLVVVLCERSQLQDLVEFPYVNLHNEVVGIIESRARAVDLMTHNYYELLYAFHIYRHNYRKAGTVMFEYGMRLGREVRTLRGLEKQGNCYLAALNCLRLIRPEYAWIVQPVSGAVYDRPGASPKRNHDGECTAAPTNRQIEILELEDLEKECSLARIRLTLAQHDPSAVAVAGSSSAEEMVTLLVQAGLFDTAISLCQTFKLPLTPVFEGLAFKCIKLQFGGEAAQAEAWAWLAANQLSSVITTKESSATDEAWRLLSTYLERYKVQNNLYHHCVINKLLSHGVPLPNWLINSYKDYQQKVDKATRDLLYRRTL

SEQ ID NO: 18724 - protein, 2365 aa, Homo sapiens
MSSTLSPTDFDSLEIQGQYSDINNRWDLPDSDWDNDSSSARLFERSRIKALADEREAVQKKTFTKWVNSHLARVTCRVGDLYSDLRDGRNLLRLLEVLSGEILPKPTKGRMRIHCLENVDKALQFLKEQKVHLENMGSHDIVDGNHRLTLGLVWTIILRFQIQDISVETEDNKEKKSAKDALLLWCQMKTAGYPNVNVHNFTTSWRDGLAFNAIVHKHRPDLLDFESLKKCNAHYNLQNAFNLAEKELGLTKLLDPEDVNVDQPDEKSIITYVATYYHYFSKMKALAVEGKRIGKVLDHAMEAERLVEKYESLASELLQWIEQTIVTLNDRQLANSLSGVQNQLQSFNSYRTVEKPPKFTEKGNLEVLLFTIQSKLRANNQKVYTPREGRLISDINKAWERLEKAEHERELALRTELIRQEKLEQLAARFDRKAAMRETWLSENQRLVSQDNFGLELAAVEAAVRKHEAIETDIVAYSGRVQAVDAVAAELAAERYHDIKRIAARQHNVARLWDFLRQMVAARRERLLLNLELQKVFQDLLYLMDWMEEMKGRLQSQDLGRHLAGVEDLLQLHELVEADIAVQAERVRAVSASALRFCNPGKEYRPCDPQLVSERVAKLEQSYEALCELAAARRARLEESRRLWRFLWEVGEAEAWVREQQHLLASADTGRDLTGALRLLNKHTALRGEMSGRLGPLKLTLEQGQQLVAEGHPGASQASARAAELQAQWERLEALAEERAQRLAQAASLYQFQADANDMEAWLVDALRLVSSPELGHDEFSTQALARQHRALEEEIRSHRPTLDALREQAAALPPTLSRTPEVQSRVPTLERHYEELQARAGERARALEAALALYTMLSEAGACGLWVEEKEQWLNGLALPERLEDLEVVQQRFETLEPEMNTLAAQITAVNDIAEQLLKANPPGKDRIVNTQEQLNHRWQQFRRLADGKKAALTSALSIQNYHLECTETQAWMREKTKVIESTQGLGNDLAGVLALQRKLAGTERDLEAIAARVGELTREANALAAGHPAQAVAINARLREVQTGWEDLRATMRRREESLGEARRLQDFLRSLDDFQAWLGRTQTAVASEEGPATLPEAEALLAQHAALRGEVERAQSEYSRLRALGEEVTRDQADPQCLFLRQRLEALGTGWEELGRMWESRQGRLAQAHGFQGFLRDARQAEGVLSSQEYVLSHTEMPGTLQAADAAIKKLEDFMSTMDANGERIHGLLEAGRQLVSEGNIHADKIREKADSIERRHKKNQDAAQQFLGRLRDNREQQHFLQDCHELKLWIDEKMLTAQDVSYDEARNLHTKWQKHQAFMAELAANKDWLDKVDKEGRELTLEKPELKALVSEKLRDLHRRWDELETTTQAKARSLFDANRAELFAQSCCALESWLESLQAQLHSDDYGKDLTSVNILLKKQQMLEWEMAVREKEVEAIQAQAKALAQEDQGAGEVERTSRAVEEKFRALCQPMRERCRRLQASREQHQFHRDVEDEILWVTERLPMASSMEHGKDLPSVQLLMKKNQTLQKEIQGHEPRIADLRERQRALGAAAAGPELAELQEMWKRLGHELELRGKRLEDALRAQQFYRDAAEAEAWMGEQELHMMGQEKAKDELSAQAEVKKHQVLEQALADYAQTIHQLAASSQDMIDHEHPESTRISIRQAQVDKLYAGLKELAGERRERLQEHLRLCQLRRELDDLEQWIQEREVVAASHELGQDYEHVTMLRDKFREFSRDTSTIGQERVDSANALANGLIAGGHAARATVAEWKDSLNEAWADLLELLDTRGQVLAAAYELQRFLHGARQALARVQHKQQQLPDGTGRDLNAAEALQRRHCAYEHDIQALSPQVQQVQDDGHRLQKAYAGDKAEEIGRHMQAVAEAWAQLQGSSAARRQLLLDTTDKFRFFKAVRELMLWMDEVNLQMDAQERPRDVSSADLVIKNQQGIKAEIEARADRFSSCIDMGKELLARSHYAAEEISEKLSQLQARRQETAEKWQEKMDWLQLVLEVLVFGRDAGMAEAWLCSQEPLVRSAELGCTVDEVESLIKRHEAFQKSAVAWEERFCALEKLTALEEREKERKRKREEEERRKQPPAPEPTASVPPGDLVGGQTASDTTWDGTQPRPPPSTQAPSVNGVCTDGEPSQPLLGQQRLEHSSFPEGPGPGSGDEANGPRGERQTRTRGPAPSAMPQSRSTESAHAATLPPRGPEPSAQEQMEGMLCRKQEMEAFGKKAANRSWQNVYCVLRRGSLGFYKDAKAASAGVPYHGEVPVSLARAQGSVAFDYRKRKHVFKLGLQDGKEYLFQAKDEVSCPSCSSLSVPFQKLPAADSPSFPVLPLFPGLVLCGKTGCVRRPHQAALPV

SEQ ID NO: 18725 - protein, 311 aa, Homo sapiens
TVWDEAEQDGIGEEVLKMSTEEIIQRTRLLDSEIKIMKSEVLRVTHELQAMKDKIKENSEKIKVNKTLPYLVSNVIELLDVDPNDQEEDGANIDLDSQRKGKCAVIKTSTRQTYFLPVIGLVDAEKLKPGDLVGVNKDSYLILETLPTEYDSRVKAMELVEAIVLPMNHKEKFENLGIQPPKGVLMYGPPGTGKTLLARACAAQTKATFLKLAGPQLVQMFIGDGAKLVRDAFALAKEKAPSIIFIDELDAIGTKRFDSEKAGDREVQRTMLELLNQLDGFQPNTQVKVIAATNRVDILDPALLRSGRLDR

SEQ ID NO: 18726 - protein, 175 aa, Homo sapiens
MNGPEDLPKSYDYDLIIIGGGSGGLAAAKEAAQYGKKVMVLDFVTPTPLGTRWGLGGTCVNVGCIPKKLMHQAALLGQALQDSRNYGWKVEETVKHDWDRMIEAVQNHIGSLNWGYRVALREKKVVYENAYGQFIGPHRIKATNNKGKEKIYSAERFLIATGERPRYLGIPGDKE

SEQ ID NO: 18727 - protein, 81 aa, Homo sapiens
MASPGKPGADEAQEEEGELEGGSAGPRAAILEQAEELFLLCDKEAKGFITKHDLQGLQSDLPLTPEQLEAVFESLDRAHTG

SEQ ID NO: 18728 - protein, 891 aa, Homo sapiens
MDQPEAPCSSTGPRLAVARELLLAALEELSQEQLKRFRHKLRDVGPDGRSIPWGRLERADAVDLAEQLAQFYGPEPALEVARKTLKRADARDVAAQLQERRLQRLGLGSGTLLSVSEYKKKYREHVLQLHARVKERNARSVKITKRFTKLLIAPESAAPEEAMGPAEEPEPGRARRSDTHTFNRLFRRDEEGRRPLTVVLQGPAGIGKTMAAKKILYDWAAGKLYQGQVDFAFFMPCGELLERPGTRSLADLILDQCPDRGAPVPQMLAQPQRLLFILDGADELPALGGPEAAPCTDPFEAASGARVLGGLLSKALLPTALLLVTTRAAAPGRLQGRLCSPQCAEVRGFSDKDKKKYFYKYFRDERRAERAYRFVKENETLFALCFVPFVCWIVCTVLRQQLELGRDLSRTSKTTTSVYLLFITSVLSSAPVADGPRLQGDLRNLCRLAREGVLGRRAQFAEKELEQLELRGSKVQTLFLSKKELPGVLETEVTYQFIDQSFQEFLAALSYLLEDGGVPRTAAGGVGTLLRGDAQPHSHLVLTTRFLFGLLSAERMRDIERHFGCMVSERVKQEALRWVQGQGQGCPGVAPEVTEGAKGLEDTEEPEEEEEGEEPNYPLELLYCLYETQEDAFVRQALCRFPELALQRVRFCRMDVAVLSYCVRCCPAGQALRLISCRLVAAQEKKKKSLGKRLQASLGGGSSQGTTKQLPASLLHPLFQAMTDPLCHLSSLTLSHCKLPDAVCRDLSEALRAAPALTELGLLHNRLSEAGLRMLSEGLAWPQCRVQTVRVQLPDPQRGLQYLVGMLRQSPALTTLDLSGCQLPAPMVTYLCAVLQHQGCGLQTLSLASVELSEQSLQELQAVKRAKPDLVITHPALDGHPQPPKELISTF

SEQ ID NO: 18729 - protein, 583 aa, Homo sapiens
MMCEVMPTISEAEGPPGGGGGHGSGSPSQPDADSHFEQLMVSMLEERDRLLDTLRETQETLALTQGKLHEVGHERDSLQRQLNTALPQEFAALTKELNVCREQLLEREEEIAELKAERNNTRLLLEHLECLVSRHERSLRMTVVKRQAQSPAGVSSEVEVLKALKSLFEHHKALDEKVRERLRVALERCSLLEEELGATHKELMILKEQNNQKKTLTDGVLDINHEQENTPSTSGKRSSDGSLSHEEDLAKVIELQEIISKQSREQSQMKERLASLSSHVTELEEDLDTARKDLIKSEEMNTKLQRDVREAMAQKEDMEERITTLEKRYLAAQREATSVHDLNDKLENEIANKDSMHRQTEDKNRQLQERLELAEQKLQQTLRKAETLPEVEAELAQRVAALSKAEERHGNIEERLRQMEAQLEEKNQELQRARQREKMNEEHNKRLSDTVDKLLSESNERLQLHLKERMAALEDKNSLLREVESAKKQLEETQHDKDQLVLNIEALRAELDHMRLRADPTWAVSQISGSPWQTATQTPTAPVQCCGAHRKAGWQPCEMSLPRYKLLMSRIGNVPSKLVSWQM

SEQ ID NO: 18730 - protein, 1231 aa, Homo sapiens
MPVVWPTLLDLSRDECKRILRKLELEAYAGVISALRAQGDLTKEKKDLLGELSKVLSISTERHRAEVRRAVNDERLTTIAHKMNLSLYLGERPSYSMSGPNSSSEWSIEGRRLVPLMPRLVPQTAFTVTANAVANAAIQHNASLPVPAETGSKEVVCYSYTSTTSTPTSTPVPSGSIATVKSPRPASPASNVVVLPSGSTVYVKSVSCSDEDEKPRKRRRTNSSSSSPVVLKEVPKAVVPVSKTITVPVSGSPKMSNIMQSIANSLPPHMSPVKITFTKPSTQTTNTTTQKVIIVTTSPSSTFVPNILSKSHNYAAVTKLVPTSVIASTTQKPPVVITASQSSLVSNSSSGSSSSTPSPIPNTVAVTAVVSSTPSVVMSTVAQGVSTSAIKMASTRLPSPKSLVSAPTQILAQFPKQHQQSPKQQLYQVQQQTQQQVAQPSPVSHQQQPQQSPLPPGIKPTIQIKQESGVKIITQQVQPSKILPKPVTATLPTSSNSPIMVVSSNGAIMTTKLVTTPTGTQATYTRPTVSPSIGRMAATPGAATYVKTTSGSIITVVPKSLATLGGKIISSNIVSGTTTKITTIPMTSKPNVIVVQKTTGKGTTIQGLPGKNVVTTLLNAGGEKTIQTVPTGAKPAILTATRPITKMIVTQPKGIGSTVQPAAKIIPTKIVYGQQGKTQVLIKPKPVTFQATVVSEQTRQLVTETLQQASRVAEAGNSSIQEGKEEPQNYTDSSSSSTESSQSSQDAVVISGEISSPPLFSVSHRSQPQQPSQPQRTLLQHVAQSQTATQTSVVVKSIPASSPGAITHIMQQALSSHTAFTKHSEELGTEEGEVEEMDTLDPQTGLFYRSALTQSQSAKQQKLSQPPLEQTQLQVKTLQCFQTKQKQTIHLQADQLQHKLPQMPQLSIRHQKLTPLQQEQAQPKPDVQHTQHPMVAKDRQLPTLMAQPPQTVVQVLAVKTTQQLPKLQQAPNQPKIYVQPQTPQSQMSLPASSEKQTASQVEQPIITQGSSVTKITFEGRQPPTVTKITGGSSVPKLTSPVTSISPIQASEKTAVSDILKMSLMEAQIDTNVEHMIVDPPKKALATSMLTGEAGSLPSTHMVVAGMANSTPQQQKCRESCSSPSTVGSSLTTRKIDPPAVPATGQFMRIQNVGQKKAEESPAEIIIQAIPQYAIPCHSSSNVVVEPSGLLELNNFTSQQLDDEETAMEQDIDSSTEDGTEPSPSQSSAERS

SEQ ID NO: 18731 - protein, 203 aa, Homo sapiens
QKYFRVASRDLQQLDDTTQLPLLSHFAETVEGLTTIRAFRYEARFQQKLLEYTDSNNIASLFLTAANRWLEVRMEYIGACVVLIAAVTSISNSLHRELSAGLVGLGLTYALMVSNYLNWMVRNLADMELQLGAVKRIHGLLKTEAESYEGLLARPPAPSLIPKNWPDQGKIQIQNLSVRYDSSLKPVLKHVNALIAPGQKIGI

SEQ ID NO: 18732 - protein, 431 aa, Homo sapiens
AHVPLSQRRKAVSRKPVPPLEEALKQIQESNLKSEVNLPFSRRPTINWRSIPACPAVSTPDPYLPDQLSPPRVPLRSHHFQILPSYPTVSPARQPHILPIHPSVPSTLPKTFAPVPLLPYPIKYHPCPPTPATSSISSSFPRLPAPIPSCPPGHPPHAPQSSPIIPDPESQHKLFYKTFRPKHFLPAQHSTAATLMPTLVRRSLPAPLVVSPTPLEPLPVLKPSCLSSHPPYPPVPTLSYVTPLPAHPASLDPFQSVQQSVPQATALSNQPEAFADHPPASVLSLASPCHSPSSSLPSSPSTSTSFSSACILFSSSSSILSSSSTSCSTSPSLPPSSIPLFSSPLHSSSSPGLPPTYLAFPSPVSPVSSSFMISSSFPPILHSPSVSTSPSPFIPIHPFNPPHWGKKVEKRREESGVEKKGIEKKVETRQL

SEQ ID NO: 18733 - protein, 579 aa, Homo sapiens
MDDSKQESTTSKEEETNIISSIVPSTQDIYQRQNSSDVHKSLLPAVDETTCGHTHFQQMIDKYINEANLIPEKTDLQELEHIFPNLHHQLFKPLEPHPDFDLSSSSSGISPDNRDFYQRSDSSSESHCATGLSKSTVYFTALRRTSMHSSLNTSPNQQPDTNLAHVGAHSFATENIIGGSEQCFEQLQPEYSSQEESQHADLPSIFSIEARDSSQGMKNQNYPSEEHTEILQNKKKIVHFQLSIGNLSSVYSSSDEANVFDQLNVQHSTPCGSNSSECSTKHQLESRKESMGFEELSKRGVVTMLQSQGLIEDNKNETCRVLDINPQVEETDSRLCVRTVEMGTSIQAPYSLTTQNEKYFENSAETDIPKITKKLSQLGESELFASSGSFSLQSSIPVWETETGHGIMEEPELTLISTTDTSIAEMDFANLTLEEKSENEAKCFFQVSEFLPLVSATEASDYPAVSELSIEKPRTASTAETPRRLTPVPGSLQEAFIKRKKSFMERSHQRQKEIRNKIHVSENSQIKTVKEKPSISSSVSRLKGVNKVRASFPEDRKTTQALRHQRGLRLYNQLAEVKQ

SEQ ID NO: 18734 - protein, 528 aa, Homo sapiens
MAQEGKEENSLIPVSPASIHLQALNPNEPHPRQKSGLLSYPVPLLAVQRLLTWGLPVSCSWFLWRQPGEFPVTALLLGAGAGGLLAIGLFQLLVNPMNIYEEQKIMFLYSLVGLGAMGWGTSPHIRCASLLLVPKMLGKEGRLFVLGYALAAIYVGPVANLRHNLNNVIASLGCTVELQINNTRAAWRISTAPLRAMFKDLLSSKELLRAETRNISATFEDLDAQVNSETGYTPEDTMDSGETAQGREARQAPASRLHLSTQKMYELKTKLRCSYVVNQAILSCRRWFDRKHEQCMKHIWVPLLTHLLCLPMKFKFFCGIAKVMEVWCRNRIPVEGNFGQTYDSLNQSIRGLDGEFSANIDFKEEKQAGVLGLNTSWERVSTEVRDYVYRQEARLEWALGLLHVLLSCTFLLVLHASFSYMDSYNHDIRFDNIYISTYFCQIDDRRKKLGKRTLLPLRKAEEKTVIFPCKPTIQASEMSNVVRELLETLPILLLLVVLCGLDWALYSIFDTIRHHSFLQYSFRSRRQS

SEQ ID NO: 18735 - protein, 1134 aa, Homo sapiens
MVATLDTQIADDAELQKYSKLLPIHTLRLGVEVDSFDGHHYISSIVSGGPVDTLGLLQPEDELLEVNGMQLYGKSRREAVSFLKEVPPPFTLVCCRRLFDDEASVDEPRRTETSLPETEVDHNMDVNTEEDDDGELALWSPEVKIVELVKDCKGLGFSILDYQDPLDPTRSVIVIRSLVADGVAERSGGLLPGDRLVSVNEYCLDNTSLAEAVEILKAVPPGLVHLGICKPLVEDNEEESCYILHSSSNEDKTEFSGTIHDINSSLILEAPKGFRDEPYFKEELVDEPFLDLGKSFHSQQKEIEQSKEAWEMHEFLTPRLQEMDEEREILVDEEYELYQDPSPSMELYPLSHIQEATPVPSVNELHFGTQWLHDNEPSESQEARTGRTVYSQEAQPYGYCPENVMKENFVMESLPSVPSTEGNSQQGRFDDLENLNSLAKTSLDLGMIPNDVQGPSLLIDLPVVAQRREQEDLPLYQHQATRVISKASAYTGMLSSRYATDTCELPEREEGEGEETPNFSHWGPPRIVEIFREPNVSLGISIVGGQTVIKRLKNGEELKGIFIKQVLEDSPAGKTNALKTGDKILEVSGVDLQNASHSEAVEAIKNAGNPVVFIVQSLSSTPRVIPNVHNKANKITGNQNQDTQEKKEKRQGTAPPPMKLPPPYKALTDDSDENEEEDAFTDQKIRQRYADLPGELHIIELEKDKNGLGLSLAGNKDRSRMSIFVVGINPEGPAAADGRMRIGDELLEINNQILYGRSHQNASAIIKTAPSKVKLVFIRNEDAVNQMAVTPFPVPSSSPSSIEDQSGTEPISSEEDGSVEVGIKQLPESESFKLAVSQMKQQKYPTKVSFSSQEIPLAPASSYHSTDADFTGYGGFQAPLSVDPATCPIVPGQEMIIEISKGRSGLGLSIVGGKDTPLNAIVIHEVYEEGAAARDGRLWAGDQILEVNGVDLRNSSHEEAITALRQTPQKVRLVVYRDEAHYRDEENLEIFPVDLQKKAGRGLGLSIVGKRNGSGVFISDIVKGGAADLDGRLIQGDQILSVNGEDMRNASQETVATILKCAQGLVQLEIGRLRAGSWTSARTTSQNSQSAECTQQLSSLLRSCHHWPAKPGWHKKSFRSFPEKFRHRYGTKDC

SEQ ID NO: 18736 - protein, 1225 aa, Homo sapiens
MRGPVGTEEELPRLFAEEMENEDEMSEEEDGGLEAFDDFFPVEPVSLPKKKKPKKLKENKCKGKRKKKEGSNDELSENEEDLEEKSESEGSDYSPNKKKKKKLKDKKEKKAKRKKKDEDEDDNDDGCLKEPKSSGQLMAEWGLDDVDYLFSEEDYHTLTNYKAFSQFLRPLIAKKNPKIPMSKMMTVLGAKWREFSANNPFKGSSAAAAAAAVAAAVETVTISPPLAVSPPQVPQPVPIRKAKTKEGKGPGVRKKIKGSKDGKKKGKGKKTAGLKFRFGGISNKRKKGSSSEEDEREESDFDSASIHSASVRSECSAALGKKSKRRRKKKRIDDGDGYETDHQDYCEVCQQGGEIILCDTCPRAYHLVCLDPELEKAPEGKWSCPHCEKEGIQWEPKDDDDEEEEGGCEEEEDDHMEFCRVCKDGGELLCCDACPSSYHLHCLNPPLPEIPNGEWLCPRCTCPPLKGKVQRILHWRWTEPPAPFMVGLPGPDVEPSLPPPKPLEGIPEREFFVKWAGLSYWHCSWVKELQLELYHTVMYRNYQRKNDMDEPPPFDYGSGDEDGKSEKRKNKDPLYAKMEERFYRYGIKPEWMMIHRILNHSFDKKGDVHYLIKWKDLPYDQCTWEIDDIDIPYYDNLKQAYWGHRELMLGEDTRLPKRLLKKGKKLRDDKQEKPPDTPIVDPTVKFDKQPWYIDSTGGTLHPYQLEGLNWLRFSWAQGTDTILADEMGLGKTVQTIVFLYSLYKEGHSKGPYLVSAPLSTIINWEREFEMWAPDFYVVTYTGDKESRSVIRENEFSFEDNAIRSGKKVFRMKKEVQIKFHVLLTSYELITIDQAILGSIEWACLVVDEAHRLKNNQSKFFRVLNSYKIDYKLLLTGTPLQNNLEELFHLLNFLTPERFNNLEGFLEEFADISKEDQIKKLHDLLGPHMLRRLKADVFKNMPAKTELIVRVELSQMQKKYYKFILTRNFEALNSKGGGNQVSLLNIMMDLKKCCNHPYLFPVAAVEAPVLPNGSYDGSSLVKSSGKLMLLQKMLKKLRDEGHRVLIFSQMTKMLDLLEDFLEYEGYKYERIDGGITGGLRQEAIDRFNAPGAQQFCFLLSTRAGGLGINLATADTVIIYDSDWNPHNDIQAFSRAHRIGQTKWKPSWATWMRKTPGHRSQGSPWKSRPFQPPWIEWRVRTSTRAQPARREPERSGQRRRRRPRPPRSSCRERRCFLRRRRSWTSWS

SEQ ID NO: 18737 - protein, 1498 aa, Homo sapiens
MVALRGLGSGLQPWCPLDLRLEWVDTVWELDFTETEPLDPSIEAEIIETGLAAFTKLYESLLPFATGEHGSMESIWTFFIENNVSHSTLVALFYHFVQIVHKKNVSVQYREYGLHAAGLYFLLLEVPGSVANQVFHPVMFDKCIQTLKKSWPQESNLNRKRKKEQPKSSQANPGRHRKRGKPPRREDIEMDEIIEEQEDENICFSARDLSQIRNAIFHLLKNFLRLLPKFSLKEKPQCVQNCIEVFVSLTNFEPVLHECHVTQARALNQAKYIPELAYYGLYLLCSPIHGEGDKVISCVFHQMLSVILMLEVGEGSHRAPLAVTSQVINCRNQAVQFISALVDELKESIFPVVRILLQHICAKVVDKSEYRTFAAQSLVQLLSKLPCGEYAMFIAWLYKYSRSSKIPHRVFTLDVVLALLELPEREVDNTLSLEHQKFLKHKFLVQEIMFDRCLDKAPTVRSKALSSFAHCLELTVTSASESILELLINSPTFSVIESHPGTLLRNSSAFSYQRQTSNRSEPSGEINIDSSGETVGSGERCVMAMLRRRIRDEKTNVRKSALQVLVSILKHCDVSGMKEDLWILQDQCRDPAVSVRKQALQSLTELLMAQPRCVQIQKAWLRGVVPVVMDCESTVQEKALEFLDQLLLQNIRHHSHFHSGDDSQVLAWALLTLLTTESQELSRYLNKAFHIWSKKEKFSPTFINNVISHTGTEHSAPAWMLLSKIAGSSPRLDYSRIIQSWEKISSQQNPNSNTLGHILCVIGHIAKHLPKSTRDKVTDAVKCKLNGFQWSLEVISSAVDALQRLCRASAETPAEEQELLTQVCGDVLSTCEHRLSNIVLKENGTGNMDEDLLVKYIFTLGDIAQLCPARVEKRIFLLIQSVLASSADADHSPSSQGSSEAPASQPPPQVRGSVMPSVIRAHAIITLGKLCLQHEDLAKKSIPALVRELEVCEDVAVRNNVIIVMCDLCIRYTIMVDKYIPNISMCLKDSDPFIRKQTLILLTNLLQEEFVKWKGSLFFRFVSTLIDSHPDIASFGEFCLAHLLLKRNPVMFFQHFIECIFHFNNYEKHEKYNKFPQSEREKRLFSLKGKSNKERRMKIYKFLLEHFTDEQRFNITSKICLSILACFADGILPLDLDASELLSDTFEVLSSKEIKLLAMRSKPDKDLLMEEDDMALANVVMQEAQKKLISQVQKRNFIENIIPIIISLKTVLEKNKIPALRELMHYLREVMQDYRDELKDFFAVDKQLASELEYDMKKYQEQLVQEQELAKHADVAGTAGGAEVAPVAQVALCLETVPVPAGQENPAMSPAVSQPCTPRASAGHVAVSSPTPETGPLQRLLPKARPMSLSTIAILNSVKKAVESKSRHRSRSLGVLPFTLNSGSPEKTCSQVSSYSLEQESNGEIEHVTKRAISTPEKSISDVTFGAGVSYIGTPRTPSSAKEKIEGRSQGNDILCLSLPDKPPPQPQQWNVRSPARNKDTPACSRRSLRKTPLKTAN

SEQ ID NO: 18738 - protein, 940 aa, Homo sapiens
MPMWAGGVGSPRRGMAPASTDDLFARKLRQPARPPLTPHTFEPRPVRGPLLRSGSDAGEARPPTPASPRARAHSHEEASRPAATSTRLFTDPLALLGLPAEEPEPAFPPVLEPRWFAHYDVQSLLFDWAPRSQGMGSHSEASSGTLASAEDQAASSDLLHGAPGFVCELGGEGELGLGGPASPPVPPALPNAAVSILEEPQNRTSAYSLEHADLGAGYYRKYFYGKEHQNFFGMDESLGPVAVSLRREEKEGSGGGTLHSYRVIVRTTQLRTLRGTISEDALPPGPPRGLSPRKLLEHVAPQLSPSCLRLGSASPKVPRTLLTLDEQVLSFQRKVGILYCRAGQGSEEEMYNNQEAGPAFMQFLTLLGDVVRLKGFESYRAQLDTKTDSTGTHSLYTTYQDHEIMFHVSTMLPYTPNNQQQLLRKRHIGNDIVTIVFQEPGSKPFCPTTIRSHFQHVFLVVRAHTPCTPHTTYRVAVSRTQDTPAFGPALPAGGGPFAANADFRAFLLAKALNGEQAAGHARQFHAMATRTRQQYLQDLATNEQLDLYHGRGEAITLRFDGSPGQAVGEVVARLQLVSRGCETRELALPRDGQGRLGFEVDAEGFVTHVERFTFAETAGLRPGARLLRVCGQTLPSLRPEAAAQLLRSAPKVCVTVLPPDESGRPRRSFSELYTLSLQEPSRRGAPDPVQDEVQGVTLLPTTKQLLHLCLQDGGSPPGPGDLAEERTEFLHSQNSLSPRSSLSDEAPVLPNTTPDLLLATTAKPSVPSADSETPLTQDRPGSPSGSEDKGNPAPELRASFLPRTLSLRNSISRIMSEAGSGTLEDEWQAISEIASTCNTILESLSREGQPIPESGDPKGTPKSDAEPEPGNLSEKVSHLESMLRKLQEDLQKEKADRAALEEEVRSLRHNNRRLQAESESAATRLLLASKQLGSPTADLA

SEQ ID NO: 18739 - protein, 435 aa, Homo sapiens
MLRSTSTVTLLSGGAARTPGAPSRRANVCRLRLTVPPESPVPEQCEKKIERKEQLLDLSNGEPTRKLPQGVVYGVVRRSDQNQQKEMVVYGWSTSQLKEEMNYIKDVSHAQQEYLENHIQTQSSALDRFNAMNSALASDSIGLQKTLVDVTLENSNIKDQIRNLQQTYEASMDKLREKQRQLEVAQVENQLLKMKVESSQEANAEVMREMTKKLYSQYEEKLQEEQRKHSAEKEALLEETNSFLKAIEEANKKMQAAEISLEEKDQRIGELDRLIERMEKERHQLQLQLLEHETEMSGELTDSDKERYQQLEEASASLRERIRHLDDMVHCQQKKVKQMVEEIESLKKKLQQKQLLILQLLEKISFLEGENNELQSRLDYLTETQAKTEVETREIGVGCDLLPSQTGRTREIVMPSRNYTPYTRVLELTMKKTLT

SEQ ID NO: 18740 - protein, 483 aa, Homo sapiens
MSTARTENPVIMGLSSQNGQLRGPVKPTGGPGGGGTQTQQQMNQLKNTNTINNGTQQQAQSMTTTIKPGDDWKKTLKLPPKDLRIKTSDVTSTKGNEFEDYCLKRELLMGIFEMGWEKPSPIQEESIPIALSGRDILARAKNGTGKSGAYLIPLLERLDLKKDNIQAMVIVPTRELALQVSQICIQVSKHMGGAKVMATTGGTNLRDDIMRLDDTVHVVIATPGRILDLIKKGVAKVDHVQMIVLDEADKLLSQDFVQIMEDIILTLPKNRQILLYSATFPLSVQKFMNSHLQKPYEINLMEELTLKGVTQYYAYVTERQKVHCLNTLFSRLQINQSIIFCNSSQRVELLAKKISQLGYSCFYIHAKMRQEHRNRVFHDFRNGLCRNLVCTDLFTRGIDIQAVNVVINFDFPKLAETYLHRIGRSGRFGHLGLAINLITYDDRFNLKSIEEQLGTEIKPIPSNIDKSLYVAEYHSEPVEDEKP

SEQ ID NO: 18741 - protein, 587 aa, Homo sapiens
LSRRERSKDASPINRWSPTRRRSRSPIRRRSRSPLRRSRSPRRRSRSPRRRDRGRRSRSRLRRRSRSRGGRRRRSRSKVKEDKFKGSLSEGMKVEQESSSDDNLEDFDVEEEDEEALIEQRRIQRQAIVQKYKYLAEDSNMSVPSEPSSPQSSTRTRSPSPDDILERVAADVKEYERENVDTFEASVKAKHNLMTVEQNNGSSQKKLLAPDMFTESDDMFAAYFDSARLRAAGIGKDFKENPNLRDNWTDAEGYYRVNIGEVLDKRYNVYGYTGQGVFSNVVRARDNARANQEVAVKIIRNNELMQKTGLKELEFLKKLNDADPDDKFHCLRLFRHFYHKQHLCLVFEPLSMNLREVLKKYGKDVGLHIKAVRSYSQQLFLALKLLKRCNILHADIKPDNILVNESKTILKLCDFGSASHVADNDITPYLVSRFYRAPEIIIGKSYDYGIDMWSVGCTLYELYTGKILFPGKTNNHMLKLAMDLKGKMPNKMIRKGVFKDQHFDQNLNFMYIEVDKVTEREKVTVMSTINPTKDLLADLIGCQRLPEDQRKKVHQLKDLLDQILMLDPAKRISINQALQHAFIQEKI

SEQ ID NO: 18742 - protein, 1536 aa, Homo sapiens
VLAEKFGDLDPSSAEFFLQEERLTQMRNEYERQCRVLQDQVDELQSELEEYRAQGRVLRLPLKNSPSEEVEANSGGIEPEHGLGSEECNPLNMSIEAELVIEQMKEQHHRDICCLRLELEDKVRHYEKQLDETVVSCKKAQENMKQRHENETHTLEKQISDLKNEIAELQGQAAVLKEAHHEATCRHEEEKKQLQVKLEEEKTHLQEKLRLQHEMELKARLTQAQASFEREREGLQSSAWTEEKVRGLTQELEQFHQEQLTSLVEKHTLEKEELRKELLEKHQRELQEGREKMETECNRRTSQIEAQFQSDCQKVTERCESALQSLEGRYRQELKDLQEQQREEKSQWEFEKDELTQECAEAQELLKETLKREKTTSLVLTQEREMLEKTYKEHLNSMVVERQQLLQDLEDLRNVSETQQSLLSDQILELKSSHKRELREREEVLCQAGASEQLASQRLERLEMEHDQERQEMMSKLLAMENIHKATCETADRERAEMSTEISRLQSKIKEMQQATSPLSMLQSGCQVIGEEEVEGDGALSLLQQGEQLLEENGDVLLSLQRAHEQAVKENVKMATEISRLQQRLQKLEPGLVMSSCLDEPATEFFGNTAEQTEQFLQQNRTKQVEGVTRRHVLSDLEDDEVRDLGSTGTSSVQRQEVKIEESEASVEGFSELENSEETRTESWELKNQISQLQEQLMMLCADCDRASEKKQDLLFDVSVLKKKLKMLERIPEASPKYKLLYEDVSRENDCLQEELRMMETRYDEALENNKELTAEVFRLQDELKKMEEVTETFLSLEKSYDEVKIENEGLNVLVLRLQGKIEKLQESVVQRCDCCLWEASLENLEIEPDGNILQLNQTLEECVPRVRSVHHVIEECKQENQYLEGNTQLLEKVKAHEIAWLHGTIQTHQERPRVQNQVILEENTTLLGFQDKHFQHQATIAELELEKTKLQELTRKLKERVTILVKQKDVLSHGEKEEELKAMMHDLQITCSEMQQKVELLRYESEKLQQENSILRNEITTLNEEDSISNLKLGTLNGSQEEMWQKTETVKQENAAVQKMVENLKKQISELKIKNQQLDLENTELSQKNSQNQEKLQELNQRLTEMLCQKEKEPGNSALEEREQEKFNLKEELERCKVQSSTLVSSLEAELSEVKIQTHIVQQENHLLKDELEKMKQLHRCPDLSDFQQKISSVLSYNEKLLKEKEALSEELNSCVDKLAKSSLLEHRIATMKQEQKSWEHQSASLKSQLVASQEKVQNLEDTVQNVNLQMSRMKSDLRVTQQEKEALKQEVMSLHKQLQNAGGKSWAPEIATHPSGLHNQQKRLSWDKLDHLMNEEQQLLWQENERLQTMVQNTKAELTHSREKVRQLESNLLPKHQKHLNPSGTMNPTEQEKLSLKRECDQFQKEQSPANRKVSQMNSLEQELETIHLENEGLKKKQVKLDEQLMEMQHLRSTATPSPSPHAWDLQLLQQQACPMVPREQFLQLQRQLLQAERINQHLQEELENRTSETNTPQALLPEQRAVHADSYRRIGHL

SEQ ID NO: 18743 - protein, 144 aa, Homo sapiens
MKYWSCCRRKTSDFNTFLAQEGCTKGKHMWTKKDAGKKVVPCRHDWHQTGGEVTISVYAKNSLPELSRVEANSTLLNVHIVFEGEKEFDQNVKLWGVIDVKRSYVTMTATKIEITMRKAEPMQWASLELPAAKKQEKQKDATTD

SEQ ID NO: 18744 - protein, 210 aa, Homo sapiens
MNRFLLLMSLYLLGSARGTSSQPNELSGSIDHQTSVQQLPGEPAATEHAEGEHTVGEQPSGEQPSGEHLSGEQPLSELESGEQPSDEQPSGEHGSGEQPSGEQASGEQPSGEHASGEQASGAPISSTSTGTILNCYTCAYMNDQGKCLRGEGTCITQNSQQCMLKKIFEGGKLQFMVQGCENMCPSMNLFSHGTRMQIICCRNQSFCNKI

SEQ ID NO: 18745 - protein, 610 aa, Homo sapiens
MGDVVEKSLEGPLAPSTDEPSQKTGDLVEILNGEKVKFDDAGLSLILQNGLETLRMENALTDVILCVDIQEFSCHRVVLAAASNYFRAMFCNDLKEKYEKRIIIKGVDAETMHTLLDYTYTSKALITKQNVQRVLEAANLFQFLRMVDACASFLTEALNPENCVGILRLADTHSLDSLKKQVQSYIIQNFVQILNSEEFLDLPVDTLHHILKSDDLYVTEEAQVFETVMSWVRHKPSERLCLLPYVLENVRLPLLDPWYFVETVEADPLIRQCPEVFPLLQEARMYHLSGNEIISERTKPRMHEFQSEVFMIIGGCTKDERFVAEVTCLDPLRRSRLEVAKLPLTEHELESENKKWVEFACVTLKNEVYISGGKETQHDVWKYNSSINKWIQIEYLNIGRWRHKMVVLGGKVYVIGGFDGLQRINNVETYDPFHNCWSEAAPLLVHVSSFAATSHKKKLYVIGGGPNGKLATDKTQCYDPSTNKWSLKAAMPVEAKCINAVSFRDRIYVVGGAMRALYAYSPLEDSWCLVTQLSHERASCGIAPCNNRLYITGGRDEKNEVIATVLCWDPEAQKLTEECVLPRGVSHHGSVTIRKSYTHIRRIVPGAVSV

SEQ ID NO: 18746 - protein, 278 aa, Homo sapiens
MTKKRIAVIGGGVSGLSSIKCCVEEGLEPVCFERTDDIGGLWRFQENPEEGRASIYKSVIINTSKEMMCFSDYPIPDHYPNFMHNAQVLEYFRMYAKEFDLLKYIRFKTTVCSVKKQPDFATSGQWEVVTESEGKKEMNVFDGVMVCTGHHTNAHLPLESFPGIEKFKGQYFHSRDYKNPEGFTGKRVIIIGIGNSGGDLAVEISQTAKQVFLSTRRGAWILNRVGDYGYPADVLFSSRLTHFIWKICGQSLANKYLEKKINQRFDHEMFGLKPKHRL

SEQ ID NO: 18747 - protein, 581 aa, Homo sapiens
MARRPRHSIYSSDEDDEDFEMCDHDYDGLLPKSGKRHLGKTRWTREEDEKLKKLVEQNGTDDWKVIANYLPNRTDVQCQHRWQKVLNPELIKGPWTKEEDQRVIELVQKYGPKRWSVIAKHLKGRIGKQCRERWHNHLNPEVKKTSWTEEEDRIIYQAHKRLGNRWAEIAKLLPGRTDNAIKNHWNSTMRRKVEQEGYLQESSKASQPAVATSFQKNSHLMGFAQAPPTAQLPATGQPTVNNDYSYYHISEAQNVSSHVPYPVALHVNIVNVPQPAAAAIQRHYNDEDPEKEKRIKELELLLMSTENELKGQQVLPTQNHTCSYPGWHSTTIADHTRPHGDSAPVSCLGEHHSTPSLPADPGSLPEESASPARCMIVHQGTILDNVKNLLEFAETLQFIDSFLNTSSNHENSDLEMPSLTSTPLIGHKLTVTTPFHRDQTVKTQKENTVFRTPAIKRSILESSPRTPTPFKHALAAQEIKYGPLKMLPQTPSHLVEDLQDVIKQESDESGIVAEFQENGPPLLKKIKQEVNTQPFGSNKLRILPPLFLVCSLMCLPLALCNTTTFRARFSYKVQRKGTARL

SEQ ID NO: 18748 - protein, 240 aa, Homo sapiens
MRAAGVGLVDCHCHLSAPDFDRDLDDVLEKAKKANVVALVAVAEHSGEFEKIMQLSERYNGFVLPCLGVHPVQGLPPEDQRSVTLKDLDVALPIIENYKDRLLAIGEVGLDFSPRFAGTGEQKEEQRQVLIRQIQLAKRLNLPVNVHSRSAGRPTINLLQEQGAEKVLLHAFDGRPSVAMEGVRAGYFFSIPPSIIRSGQLLSLFSKKQKLVKQLPLTSICLETDSPALGPEKQQNILPR

SEQ ID NO: 18749 - protein, 705 aa, Homo sapiens
MDADKEKDLQKFLKNVDEISNLIQEMNSDDPVVQQKAVLETEKRLLLMEEDQEEDECRTTLNKTMISPPQTAMKSAEEINSEAFLASVEKDAKERAKRRRENKVLADALKEKGNEAFAEGNYETAILRYSEGLEKLKDMKVLYTNRAQAYMKLEDYEKALVDCEWALKCDEKCTKAYFHMGKANLALKNYSVSRECYKKILEINPKLQTQVKGYLNQVDLQEKADLQEKEAHELLDSGKNTAVTTKNLLETLSKPDQIPLFYAGGIEILTEMINECTEQTLFRMHNGFSIISDNEVIRRCFSTAGNDAVEEMVCVSVLKLWQAVCSRNEENQRVLVIHHDRARLLAALLSSKVLAIRQQSFALLLHLAQTESGRSLIINHLDLTRLLEALVSFLDFSDKEANTAMGLFTDLALEERFQVWFQANLPGVLPALTGVLKTDPKVSSSSALCQCIAIMGNLSAEPTTRRHMAACEEFGDGCLSLLARCEEDVDLFREVIYTLLGLMMNLCLQAPFVSEVWAVEVSRRCLSLLNSQDGGILTRAAGVLSRTLSSSLKIVEEALRAGVVKKMMKFLKTGGETASRYAIKILAICTNSYHEAREEVIRLDKKLSVMMKLLSSEDEVLVGNAALCLGNCMEVPNVASSLLKTDLLQVLLKLAGSDTQKTAVQVNAGIALGKLCTAEPRFAAQLRKLHGLEILNSTMKYISDS

SEQ ID NO: 18750 - protein, 712 aa, Homo sapiens
MESTSQDRRATHVITIKPNETVLTAFPYRPHSSLLDFLKGEPRVLGATQILLALIIVGFGTIFALNYIGFSQRLPLVVLTGYPFWGALIFILTGYLTVTDKKSKLLGQGVTGMNVISSLVAITGITFTILSYRHQDKYCQMPSFEEICVFSRTLFIGILLILLIISIAELSISVTIASFRSKCWTQSDEVLFFLPSDVTQNSEQPAPEENDQLQFVLQEEFSSDDSTTNAQSVIFGGYAFFKLTLSRSPLVSQPGNKGREFVPDEQKQSILPSPKFSEEEIEPLPPTLEKKPSENMSIQLDSTFKQMKDEDLQSAIVQPSQMQTKLLQDQAASLQVFPSHSALKLEDISPEDLPSQALPVEGLSEQTMPSKSTSSHVKQSSNLTANDLPPQGILSQDTSSQDMLFHDMTSQDMQSLDMLSQDTPSHAMPPQDIPSQDMLSQALSAHAILPEASTSHIVQFPEIQHLLQQPPDLQPENTEPQNQQILQMSYQDIRSEVMEETKEWKSEEELHRRKSSRRHSLNQQTKALQYLRRHSLDVQAKGQKSSKRHSLDQQSKGWQSPKQKSLDQQIKDWLSPKRHSVDKQAQLNQTKEQLPDQQAEDQQAKGEQYPEGQSKDGQVKDQQTDKEQNSKKQTQDQQTEDQPAQEKKSPKGQFQNVQAEGQQAQVEKVPKLLCQDSESQIQQYQFWQFHKGNLQAGQPRTVNLLAKNPLTG

SEQ ID NO: 18751 - protein, 769 aa, Homo sapiens
MPASWTSPQKSSALAPEDHGSSYEGSVSFRDVAIDFSREEWRHLDLSQRNLYRDVMLETYSHLLSVGYQVPKPEVVMLEQGKEPWALQGERPRHSCPGEKLWDHNQHRKIIGYKPASSQDQKIYSGEKSYECAEFGKSFTWKSQFKVHLKVPTGEKLYVCIECGRAFVQKPEFITHQKTHMREKPYKCNECGKSFFQVSSLFRHHRIHTGEKLYECSECGKGFPYNSDLSIHEKIHTGERHHECTDCGKAFTQKSTLKIHQKIHTGERSYICIECGQAFIQKTQLIAHRRIHSGEKPYECNNCGKSFISKSQLQVHQRVHTRVKPYICTEYGKVFSNNSNLITHEKIQSREKSSICTECGKAFTYRSELIIHQRIHTGEKPYECSDCGRAFTQKSALTVHQRIHTGEKSYICMKCGLAFIRKAHLITHQIIHTGEKPYKCGHCGKLFTSKSQLHVHKRIHTGEKPYVCNKCGKAFTNRSNLITHQKTHTGEKSYICSKCGKAFTQRSDLITHQRIHTGEKPYECNTCGKAFTQKSNLNIHQKIHTGERQYECHECGKAFNQKSILIVHQKIHTGEKPYVCTECGRAFIRKSNFITHQRIHTGEKPYECSDCGKSFTSKSQLLVHQPVHTGEKPYVCAECGKAFSGRSNLSKHQKTHTGEKPYICSECGKTFRQKSELITHHRIHTGEKPYECSDCGKSFTKKSQLQVHQRIHTGEKPYVCAECGKAFSNRSNLNKHQTTHTGDKPYKCGICGKGFVQKSVFSVHQSSHA

SEQ ID NO: 18752 - protein, 410 aa, Homo sapiens
MAAMETETAPLTLESLPTDPLLLILSFLDYRDLINRRLSQLSSHDPLWRRHCKKYWLISEEEKTQKNQCWKSLFIDTYSDVGRYIDHYAAIKKAWDDLKKYLEPRCPRMVLSLKEGAREEDLDAVEAQIGCKLPDDYRCSYRIHNGQKLVVPGLLGSMALSNHYRSEDLLDVDTAAGGFQQRQGLKYCLPLTFCIHTGLSQYIAVEAAEGRNKNEVFYQCPDQMARNPAAIDMFIIGATFTDWFTSYVKNVVSGGFPIIRDQIFRYVHDPECVATTGDITVSVSTSFLPELSSVHPPHYFFTYRIRIEMSKDALPEKACQLDSRYWRITNAKGDVEEVQGPGVVGEFPIISPGRVYEYTSCTTFSTTSGYMEGYYTFHFLYFKDKIFNVAIPRFHMACPTFRVSIARLVS

SEQ ID NO: 18753 - protein, 356 aa, Homo sapiens
MTSRKNGGGAHSWQETPWEQRRALGLQRAEMTMTANKNSSITHGAGGTKAPRGTLSRKSFEFEDASSLQSLYPSSPTENGTENQPKFGSKSTLEENAYEDIVGDLPKENPYEDVDLKSRRAGRKSQQLSENSLDSLHRMWSPQDRKYNSPPTQLSLKPNSQSLRSGNWSERKSHRLPRLPKRHSHDDMLLLAQLSLPSSPSSLNEDSLSTTSELLSSRRARRIPKLVQRINSIYNAKRGKKRLKKLSMSSIETASLRDENSESESDSDDRFKAHTQRLVHIQSMLKRAPSYRTLELELLEWQERELFEYFVVVSLKKKPSRNTYLPEVSYQFPKECAFSSSSRGCWLLLISQALLK

SEQ ID NO: 18754 - protein, 69 aa, Homo sapiens
MNRPAPVEISYENMRFLITHNPTNATLNKFTEELKKYGVTTLVRVCDATYDKAPVEKEGIHVLVHFREY

SEQ ID NO: 18755 - protein, 1623 aa, Homo sapiens
MAGQGDCCVKVAVRIRPQLSKEKIEGCHICTSVTPGEPQVLLGKDKAFTYDFVFDLDTWQEQIYSTCVSKLIEGCFEGYNATVLAYGQTGAGKTYTMGTGFDMATSEEEQGIIPRAIAHLFGGIAERKRRAQEQGVAGPEFKVSAQFLELYNEEILDLFDSTRDPDTRHRRSNIKIHEDANGGIYTTGVTSRLIHSQEELIQCLKQGALSRTTASTQMNVQSSRSHAIFTIHLCQMRMCTQPDLVNEAVTGLPDGTPPSSEYETLTAKFHFVDLAGSERLKRTGATGERAKEGISINCGLLALGNVISALGDQSKKVVHVPYRDSKLTRLLQDSLGGNSQTIMIACVSPSDRDFMETLNTLKYANRARNIKNKVVVNQDKTSQQISALRAEIARLQMELMEYKAGKRVIGEDGAEGYSDLFRENAMLQKENGALRLRVKAMQEAIDAINNRVTQLMSQEANLLLAKAGDGNEAIGALIQNYIREIEELRTKLLESEAMNESLRRSLSRASARSPYSLGASPAAPAFGGSPASSMEDASEVIRRAKQDLERLKKKEVRQRRKSPEKEAFKKRAKLQQENSEETDENEAEEEEEERDESGCEEEEGREDEDEDSGSEESLVDSDSDPEEKEVNFQADLADLTCEIEIKQKLIDELENSQRRLQTLKHQYEEKLILLQNKIRDTQLERDRVLQNLSTMECYTEEKANKIKADYEKRLREMNRDLQKLQAAQKEHARLLKNQSRYERELKKLQAEVAEMKKAKVALMKQMREEQQRRRLVETKRNREIAQLKKEQRRQEFQIRALESQKRQQEMVLRRKTQEVSALRRLAKPMSERVAGRAGLKPPMLDSGAEVSASTTSSEAESGARSVSSIVRQWNRKINHFLGDHPAPTVNGTRPARKKFQKKGASQSFSKAARLKWQSLERRIIDIVMQRMTIVNLEADMERLIKKREELFLLQEALRRKRERLQAESPEEEKGLQELAEEIEVLAANIDYINDGITDCQATIVQLEETKEELDSTDTSVVISSCSLAEARLLLDNFLKASIDKGLQVAQKEAQIRLLEGRLRQTDMAGSSQNHLLLDALREKAEAHPELQALIYNVQQENGYASTDEEISEFSEGSFSQSFTMKGSTSHDDFKFKSEPKLSAQMKAVSAECLGPPLDISTKNITKSLASLVEIKEDGVGFSVRDPYYRDRVSRTVSLPTRGSTFPRQSRATETSPLTRRKSYDRGQPIRSTDVGFTPPSSPPTRPRNDRNVFSRLTSNQSQGSALDKSDDSDSSLSEVLRGIISPVGGAKGARTAPLQCVSMAEGHTKPILCLDATDELLFTGSKDRSCKMWNLVTGQEIAALKGHPNNVVSIKYCSHSGLVFSVSTSYIKVWDIRDSAKCIRTLTSSGQVISGDACAATSTRAITSAQGEHQINQIALSPSGTMLYAASGNAVRIWELSRFQPVGKLTGHIGPVMCLTVTQTASQHDLVVTGSKDHYVKMFELGECVTGTIGPTHNFEPPHYDGIECLAIQGDILFSGSRDNGIKKWDLDQQELIQQIPNAHKDWVCALAFIPGRPMLLSACRAGVIKVWNVDNFTPIGEIKGHDSPINAICTNAKHIFTASSDLTVKFWSVRRLPHSGPP

SEQ ID NO: 18756 - protein, 248 aa, Homo sapiens
MLRNNKTIIIKYFLNLINGAFLVLGLLFMGFGAWLLLDRNNFLTAFDENNHFIVPISQILIGMGSSTVLFCLLGYIGIHNEIRWLLIVYAVLITWTFAVQVVLSAFIITKKEEVQQLWHDKIDFVISEYGSKDKPEDITKWTILNALQKTLQCCGQHNYTDWIKNKNKENSGQVPCSCTKSTLRKWFCDEPLNATYLEGCENKISAWYNVNVLTLIGINFGLLTSEVFQVSLTVCFFKNIKNIIHAEM

SEQ ID NO: 18757 - protein, 243 aa, Homo sapiens
MAVQISKKRKFVADGIFKAELNEFLTRELAEDGYSGVEVRVTPTRTEIIILATRTQNVLGEKGRRIRELTAVVQKRFGFPEGSVELYAEKVATRGLCAIAQAESLRYKLLGGLAVRRACYGVLRFIMESGAKGCEVVVSGKLRGQRAKSMKFVDGLMIHSGDPVNYYVDTAVRHVLLRQGVLGIKVKIMLPWDPTGKIGPKKPLPDHVSIVEPKDEILPTTPISEQKGGKPEPPAMPQPVPTA

SEQ ID NO: 18758 - protein, 816 aa, Homo sapiens
MELRCGGLLFSSRFDSGNLAHVEKVESLSSDGEGVGGGASALTSGIASSPDYEFNVWTRPDCAETEFENGNRSWFYFSVRGGMPGKLIKINIMNMNKQSKLYSQGMAPFVRTLPTRPRWERIRDRPTFEMTETQFVLSFVHRFVEGRGATTFFAFCYPFSYSDCQELLNQLDQRFPENHPTHSSPLDTIYYHRELLCYSLDGLRVDLLTITSCHGLREDREPRLEQLFPDTSTPRPFRFAGKRIFFLSSRVHPGETPSSFVFNGFLDFILRPDDPRAQTLRRLFVFKLIPMLNPDGVVRGHYRTDSRGVNLNRQYLKPDAVLHPAIYGAKAVLLYHHVHSRLNSQSSSEHQPSSCLPPDAPVSDLEKANNLQNEAQCGHSADRHNAEAWKQTEPAEQKLNSVWIMPQQSAGLEESAPDTIPPKESGVAYYVDLHGHASKRGCFMYGNSFSDESTQVENMLYPKLISLNSAHFDFQGCNFSEKNMYARDRRDGQSKEGSGRVAIYKASGIIHSYTLECNYNTGRSVNSIPAACHDNGRASPPPPPAFPSRYTVELFEQVGRAMAIAALDMAECNPWPRIVLSEHSSLTNLRAWMLKHVRNSRGLSSTLNVGVNKKRGLRTPPKSHNGLPVSCSENTLSRARSFSTGTSAGGSSSSQQNSPQMKNSPSFPFHGSRPAGLPGLGSSTQKVTHRVLGPVREPRSQDRRRQQQPLNHRPAGSLAPSPAPTSSGPASSHKLGSCLLPDSFNIPGSSCSLLSSGDKPEAVMVIGKGLLGTGARMPCIKTRLQTCPRRVSARRGPGFPRLGPGWAGAHRRLAEG

SEQ ID NO: 18759 - protein, 811 aa, Homo sapiens
MQRPSVSRAENYQLLWDTIASLKQCEQAMQHAFIPASPAPIIVNTDTLDTIPYVNGTEIEYEFEEITLERGNSGLGFSIAGGTDNPHIGDDPGIFITKIIPGGAAAEDGRLRVNDCILRVNEVDVSEVSHSKAVEALKEAGSIVRLYVRRRRPILETVVEIKLFKGPKGLGFSIAGGVGNQHIPGDNSIYVTKIIDGGAAQKDGRLQVGDRLLMVNNYSLEEVTHEEAVAILKNTSEVVYLKVGKPTTIYMTDPYGPPDITHSYSPPMENHLLSGNNGTLEYKTSLPPISPGRYSPIPKHMLVDDDYTRPPEPVYSTVNKLCDKPASPRHYSPVECDKSFLLSAPYSHYHLGLLPDSEMTSHSQHSTATRQPSMTLQRAVSLEGEPRKVVLHKGSTGLGFNIVGGEDGEGIFVSFILAGGPADLSGELQRGDQILSVNGIDLRGASHEQAAAALKGAGQTVTIIAQYQPEDYARFEAKIHDLREQMMNHSMSSGSGSLRTNQKRSLYVRAMFDYDKSKDSGLPSQGLSFKYGDILHVINASDDEWWQARRVMLEGDSEEMGVIPSKRRVERKERARLKTVKFNAKPGVIDSKGSFNDKRKKSFIFSRKFPFYKNKEQSEQETSDPERGQEDLILSYEPVTRQEINYTRPVIILGPMKDRINDDLISEFPDKFGSCVPHTTRPKRDYEVDGRDYHFVISREQMEKDIQEHKFIEAGQYNDNLYGTSVQSVRFVAERGKHCILDVSGNAIKRLQVAQLYPIAIFIKPRSLEPLMEMNKRLTEEQAKKTYDRAIKLEQEFGEYFTGKFTFTLVV

SEQ ID NO: 18760 - protein, 899 aa, Homo sapiens
FSRTPGNCQNSANEVDLLGPNQNGSEGLAQLTSTNGAKPVEDFSNMESQSVPLDPMEHVGMEPLQFDYSGTQVPVDSAAATVGLFDYNSQQQLFQRPNALAVQQLTAAQQQQYALAAAHQPHIGMFSAGLAPAAFVPNPYIISAAPPGTDPYTAGLAAAATLGPAVVPHQYYGVTPWGVYPASLFQQQAAAAAAATNSANQQTTPQAQQGQQQVLRGGASQRPLTPNQNQQGQQTDPLVAAAAVNSALAFGQGLAAGMPGYPVLAPAAYYDQTGALVVNAGARNGLGAPVRLVAPAPVIISSSAAQAAVAAAAASANGAAGGLAGTTNGPFRPLGTQQPQPQPQQQPNNNLASSSFYGNNSLNSNSQSSSLFSQGSAQPANTSLGFGSSSSLGATLGSALGGFGTAVANSNTGSGSRRDSLTGSSDLYKRTSSSLTPIGHSFYNGLSFSSSPGPVGMPLPSQGPGHSQTPPPSLSSHGSSSSLNLGGLTNGSGRYISAAPGAEAKYRSASSASSLFSPSSTLFSSSRLRYGMSDVMPSGRSRLLEDFRNNRYPNLQLREIAGHIMEFSQDQHGSRFIQLKLERATPAERQLVFNEILQAAYQLMVDVFGNYVIQKFFEFGSLEQKLALAERIRGHVLSLALQMYGCRVIQKALEFIPSDQQVINEMVRELDGHVLKCVKDQNGNHVVQKCIECVQPQSLQFIIDAFKGQVFALSTHPYGCRVIQRILEHCLPDQTLPILEELHQHTEQLVQDQYGNYVIQHVLEHGRPEDKSKIVAEIRGNVLVLSQHKFASNVVEKCVTHASRTERAVLIDEVCTMNDGPHSALYTMMKDQYANYVVQKMIDVAEPGQRKIVMHKIRPHIATLRKYTYGKHILAKLEKYYMKNGVDLGPICGPPNGII

SEQ ID NO: 18761 - protein, 479 aa, Homo sapiens
MLTSKGQGFLHGGLCLWLCVFTPFFKGCVGCATEERLFHKLFSHYNQFIRPVENVSDPVTVHFEVAITQLANVIWNDYKLRWDPMEYDGIETLRVPADKIWKPDIVLYNNAVGDFQVEGKTKALLKYNGMITWTPPAIFKSSCPMDITFFPFDHQNCSLKFGSWTYDKAEIDLLIIGSKVDMNDFWENSEWEIIDASGYKHDIKYNCCEEIYTDITYSFYIRRLPMFYTINLIIPCLFISFLTVLVFYLPSDCGEKVTLCISVLLSLTVFLLVITETIPSTSLVVPLVGEYLLFTMIFVTLSIVVTVFVLNIHYRTPTTHTMPRWVKTVFLKLLPQVLLMRWPLDKTRGTGSDAVPRGLARRPAKGKLASHGEPRHLKECFHCHKSNELATSKRRLSHQPLQWVVENSEHSPEVEDVINSVQFIAENMKSHNETKEVEDDWKYVAMVVDRVFLWVFIIVCVFGTAGLFLQPLLGNTGKS

SEQ ID NO: 18762 - protein, 590 aa, Homo sapiens
MEHKTLKITDFGLAREWHKTTQMSAAGTYAWMAPEVIKASTFSKGSDVWSFGVLLWELLTGEVPYRGIDCLAVAYGVAVNKLTLPIPSTCPEPFAQLMADCWAQDPHRRPDFASILQQLEALEAQVLREMPRDSFHSMQEGWKREIQGLFDELRAKEKELLSREEELTRAAREQRSQAEQLRRREHLLAQWELEVFERELTLLLQQVDRERPHVRRRRGTFKRSKLRARDGGERISMPLDFKHRITVQASPGLDRRRNVFEVGPGDSPTFPRFRAIQLEPAEPGQAWGRQSPRRLEDSSNGERRACWAWGPSSPKPGEAQNGRRRSRMDEATWYLDSDDSSPLGSPSTPPALNGNPPRPSLEPEEPKRPVPAERGSSSGTPKLIQRALLRGTALLASLGLGRDLQPPGGPGRERGESPTTPPTPTPAPCPTEPPPSPLICFSLKTPDSPPTPAPLLLDLGIPVGQRSAKSPRREEEPRGGTVSPPPGTSRSAPGTPGTPRSPPLGLISRPRPSPLRSRIDPWSFVSAGPRPSPLPSPQPAPRRAPWTLFPDSDPFWDSPPANPFQGGPQDCRAQTKDMGAQAPWVPEAGP

SEQ ID NO: 18763 - protein, 47 aa, Homo sapiens
MEASVLSPTSWEKRRAWLRQSRNWQTQVLEEEAAAALQDVPDPEPSS

SEQ ID NO: 18764 - protein, 583 aa, Homo sapiens
MAHVRGLQLPGCLALAALCSLVHSQHVFLAPQQARSLLQRVRRANTFLEEVRKGNLERECVEETCSYEEAFEALESSTATDVFWAKYTACETARTPRDKLAACLEGNCAEGLGTNYRGHVNITRSGIECQLWRSRYPHKPEINSTTHPGADLQENFCRNPDSSTTGPWCYTTDPTVRRQECSIPVCGQDQVTVAMTPRSEGSSVNLSPPLEQCVPDRGQQYQGRLAVTTHGLPCLAWASAQAKALSKHQDFNSAVQLVENFCRNPDGDEEGVWCYVAGKPGDFGYCDLNYCEEAVEEETGDGLDEDSDRAIEGRTATSEYQTFFNPRTFGSGEADCGLRPLFEKKSLEDKTERELLESYIDGRIVEGSDAEIGMSPWQVMLFRKSPQELLCGASLISDRWVLTAAHCLLYPPWDKNFTENDLLVRIGKHSRTRYERNIEKISMLEKIYIHPSLLQAGYKGRVTGWGNLKETWTANVGKGQPSVLQVVNLPIVERPVCKDSTRIRITDNMFCAGYKPDEGKRGDACEGDSGGPFVMKSPFNNRWYQMGIVSWGEGCDRDGKYGFYTHVFRLKKWIQKVIDQFGE

SEQ ID NO: 18765 - protein, 230 aa, Homo sapiens
MAALSKSIPHNCYEIGHTWHPSCRVSFLQITGGALEESLKIYAPLYLIAAILRKRKLDYYLHKLLPEILQSASFLTANGALYMAFFCILRKILGKFYSWTPGFGAALPASYVAILIERKSRRGLLTIYMANLTESRFVAQAGVQWCDLSSLQPAPPGFKRFLFLSHLSSWDYRFVPPCLANFCIFVEMRFHHVSQAGLEFLALSDPPALASQSAEITGVSHCAWPKNKIF

SEQ ID NO: 18766 - protein, 1559 aa, Homo sapiens
MEEAGGPMARAKARVVSATLTWRQRPPTQEEIKHGFHKVSLVSGAQMEAPQKEMFEFSRREEVEVNGFATQEEETVNCQGPRDTAGSKNFQSHGPIFSKKYIPPPKEKRPEGRLKEAVDQSDGSRQAPRTEPPCVGAMARTELLVPLPGPREPSPHPGVGLTSGSSRSLEEYRVTRTVRTTTVVGGHVDRRMSSSVTVRPVSSGEALPRGRQVSRMVPPVVVGSPPGSPSRSQAVKVLSNLVPAGHSPPASHLPRPTAGGPRSTGLGSTVGAALRQLPETGTAELKDSSALASTGIPASAHLPKNQDAPAACPDRDQGRAPDARACELWQVLGAPSSTELPLQTSQGQASVPSSPRLETHVPSPGLTHPAKQPVVPTHPGARLTPLVLPPKKKDGPVDPPAATVLPMVRSEHVTVPGQPPAPSTTRRKDVPSPGGLSAPSSPRNKFVQNSENVPVLPFTQREVVKGPGAPAASSPTRKEVVQGSSASAASSPTWKEVVKGPGAPAASSPTQKEVVQGSSAPAALFPTWKEVVKGPGAPDASFPTWKEVVKGPGAPAASSPTQKEVVQGSGAPAALSTTPKEVVKGPGAPAASSPTQKEVVKGPCAPAASSPTQKEVVQGSGAPAALSPKSTEVVQGPKGSSSIQKEAVQGIAGSLAPPLTKEETVQGPIAPATSLPKQDKGVQDSEGSPISSLTQKEVVQDPDALPAPSSSVDRVSPSPGGTPAPVPTGAEASTESQLVSDPTEGKTCTETSREEDEVALAADLEIFLDTLRSMEPPEILRTHRLPRAPRSSYLSMYATLPAIEEDQLGPWVLGPGPQEVPSLEEKEEEEEEEPENPYLSDDEKLQRRQEKAGPSPSRDLHPARPTQVSCSPLEMMKKHVAGTKGPHSELGLELQGGSRPTSRLGGSLLFGSLVPTAKEASTPEPLGTKLSALLPHGAPGLRKVPGQLPLLCSERSSPTEKLACSLPLEGWSPALKTQGKLNTRPGKVIFFSESGCQGSGREVWGDIVDASGWAPVASIRVVRGCWVLYEEPEFRGQKLVLPEGDMELRTPGTKWSPQGIGSLRRVVWDYSTPEISLFSEEGLKGEQVKLTEALKNSQGLEKPLQVASATVSAGLWLLYPKPLFEDTPYILEPGEYPTSEAWGTSDPSVGSLKPMRLGCPSVEKPGEPRAVVYEAPGFQGRSWEVSRDIYNLQQPEDSQSPHLASVGSLRVLGGCWVGYEKEGFRGHQYLLEEGEYPDWSHWGGYDELLTSLRVIRTDFGDPAVVLFEAMDFEGHGVEVSKALPDVELVQHGPSTQAIHVLSGVWVAYQEVGFSGEQYVLEKGVYRNCEDWGAGNSTLASLQPVLQVGEHDLHFVSKIQLFSRPDFLGDHFSFEDDQAALPASFRPQSCRVHGGSWILFDETNFEGDQHILSEGEFPTLTAMGCLASTVLGSLQKVSLHFSEPSIFLYGLECFEGKEIELSREVRSLQAEGFNNHVLSVRIKGGIWVLCEHSDFRGRQWLVGSCEITNWLTYSGTQRVGSLYPIKQRRVYFRLWNAALGGFLAVPDHVEDMKAGRVVVA

SEQ ID NO: 18767 - protein, 1376 aa, Homo sapiens
MALKNINYLLIFYLSFSLLIYIKNSFCNKNNTRCLSNSCQNNSTCKDFSKDNDCSCSDTANNLDKDCDNMKDPCFSNPCQGSATCVNTPGERSFLCKCPPGYSGTICETTIGSCGKNSCQHGGICHQDPIYPVCICPAGYAGRFCEIDHDECASSPCQNGAVCQDGIDGYSCFCVPGYQGRHCDLEVDECASDPCKNEATCLNEIGRYTCICPHNYSGVNCELEIDECWSQPCLNGATCQDALGAYFCDCAPGFLGDHCELNTDECASQPCLHGGLCVDGENRYSCNCTGSGFTGTHCETLMPLCWSKPCHNNATCEDSVDNYTCHCWPGYTGAQCEIDLNECNSNPCQSNGECVELSSEKQYGRITGLPSSFSYHEASGYVCICQPGFTGIHCEEDVNECSSNPCQNGGTCENLPGNYTCHCPFDNLSRTFYGGRDCSDILLGCTHQQCLNNGTCIPHFQDGQHGFSCLCPSGYTGSLCEIATTLSFEGDGFLWVKSGSVTTKGSVCNIALRFQTVQPMALLLFRSNRDVFVKLELLSGYIHLSIQVNNQSKVLLFISHNTSDGEWHFVEVIFAEAVTLTLIDDSCKEKCIAKAPTPLESDQSICAFQNSFLGGLPVGMTSNGVALLNFYNMPSTPSFVGCLQDIKIDWNHITLENISSGSSLNVKAGCVRKDWCESQPCQSRGRCINLWLSYQCDCHRPYEGPNCLREYVAGRFGQDDSTGYVIFTLDESYGDTISLSMFVRTLQPSGLLLALENSTYQYIRVWLERGRLAMLTPNSPKLVVKFVLNDGNVHLISLKIKPYKIELYQSSQNLGFISASTWKIEKGDVIYIGGLPDKQETELNGGFFKGCIQDVRLNNQNLEFFPNPTNNASLNPVLVNVTQGCAGDNSCKSNPCHNGGVCHSRWDDFSCSCPALTSGKACEEVQWCGFSPCPHGAQCQPVLQGFECIANAVFNGQSGQILFRSNGNITRELTNITFGFRTRDANVIILHAEKEPEFLNISIQDSRLFFQLQSGNSFYMLSLTSLQSVNDGTWHEVTLSMTDPLSQTSRWQMEVDNETPFVTSTIATGSLNFLKDNTDIYVGDRAIDNIKGLQGCLSTIEIGGIYLSYFENVHGFINKPQEEQFLKISTNSVVTGCLQLNVCNSNPCLHGGNCEDIYSSYHCSCPLGWSGKHCELNIDECFSNPCIHGNCSDRVAAYHCTCEPGYTGVNCEVDIDNCQSHQCANGATCISHTNGYSCLCFGNFTGKFCRQSRLPSTVCGNEKTNLTCYNGGNCTEFQTELKCMCRPGFTGEWCEKDIDECASDPCVNGGLCQDLLNKFQCLCDVAFAGERCEVDVSSLSFYVSLLFWQNLFQLLSYLILRMNDEPVVEWGEQEDY

SEQ ID NO: 18768 - protein, 482 aa, Homo sapiens
MNGPEDLPKSYDYDLIIIGGGSGGLAAAKEAAQYGKKVMVLDFVTPTPLGTRWGLGGTCVNVGCIPKKLMHQAALLGQALQDSRNYGWKVEETVKHDWDRMIEAVQNHIGSLNWGYRVALREKKVVYENAYGQFIGPHRIKATNNKGKEKIYSAERFLIATGERPRYLGIPGDKEYCISSDDLFSLPYCPGKTLVVGASYVALECAGFLAGIGLDVTVMVRSILLRGFDQDMANKIGEHMEEHGIKFIRQFVPIKVEQIEAGTPGRLRVVAQSTNSEEIIEGEYNTVMLAIGRDACTRKIGLETVGVKINEKTGKIPVTDEEQTNVPYIYAIGDILEDKVELTPVAIQAGRLLAQRLYAGSTVKCDYENVPTTVFTPLEYGACGLSEEKAVEKFGEENIEVYHSYFWPLEWTIPSRDNNKCYAKIICNTKDNERVVGFHVLGPNAGEVTQGFAAALKCGLTKKQLDSTIGIHPVCAEFFSFI

SEQ ID NO: 18769 - protein, 1274 aa, Homo sapiens
LHFAKEESALMCKKLTKLAKENDSMKEELLKYRSLYGDLDSALSAEELADAPHSRETELKVHLKLVEEEANLLSRRIVELEVENRGLRAEMDDMKDHGGGCGGPEARLAFSALGGGECGESLAELRRHLQFVEEEAELLRRSSAELEDQNKLLLNELAKFRSEHELDVALSEDSCSVLSEPSQEELAAAKLQIGELSGKVKKLQYENRVLLSNLQRCDLASCQSTRPMLETDAEAGDSAQCVPAPLGETHESHAVRLCRAREAEVLPGLREQAALVSKAIDVLVADANGFTAGLRLCLDNECADFRLHEAPDNSEGPRDTKLIHAILVRLSVLQQELNAFTRKADAVLGCSVKEQQESFSSLPPLGSQGLSKEILLAKDLGSDFQPPDFRDLPEWEPRIREAFRTGDLDSKPDPSRSFRPYRAEDNDSYASEIKELQLVLAEAHDSLRGLQEQLSQERQLRKEEADNFNQKMVQLKEDQQRALLRREFELQSLSLQRRLEQKFWSQEKNMLVQESQQFKHNFLLLFMKLRWFLKRWRQGKVLPSEGDDFLEVNSMKELYLLMEEEEINAQHSDNKACTGDSWTQNTPNEYIKTLADMKVTLKELCWLLRDERRGLTELQQQFAKAKATWETERAELKGHTSQMELKTGKGAGERAGPDWKAALQREREEQQHLLAESYSAVMELTRQLQISERNWSQEKLQLVERLQGEKQQVEQQVKELQNRLSQLQKAADPWVLKHSELEKQDNSWKETRSEKIHDKEAVSEVELGGNGLKRTKSVSSMSEFESLLDCSPYLAGGDARGKKLPNNPAFGFVSSEPGDPEKDTKEKPGLSSRDCNHLGALACQDPPGRQMQRSYTAPDKTGIRVYYSPPVARRLGVPVVHDKEGKIIIEPGFLFTTAKPKESAEADGLAESSYGRWLCNFSRQRLDGGSAGSPSAAGPGFPAALHDFEMSGNMSDDMKEITNCVRQAMRSGSLERKVKSTSSQTVGLASVGTQTIRTVSVGLQTDPPRSSLHGKAWSPRSSSLVSVRSKQISSSLDKVHSRIERPCCSPKYGSPKLQRRSVSKLDSSKDRSLWNLHQGKQNGSAWARSTTTRDSPVLRNINDGLSSLFSVVEHSGSTESVWKLGMSETRAKPEPPKYGIVQEFFRNVCGRAPSPTSSAGEEGTKKPEPLSPASYHQPEGVARILNKKAAKLGSSEEVRLTMLPQVGKDGVLRDGDGAVVLPNEDAVCDCSTQSLTSCFARSSRSAIRHSPSKCRLHPSESSWGGEERALPPSE

SEQ ID NO: 18770 - protein, 533 aa, Homo sapiens
MFAMKVYGAYLLSSEADFSSSSSTGSISAPEVHMSTAGSKRSSSSRNRGPHGRSNGASSHKPGSSPSSPREKDLLSMLCRNQLSPVNIHPSYAPSSPSSSNSGSYKGSDCSPIMRRSGRYMSCGENHGVRPPNPEQYLTPLQQKEVTVRHLKTKLKESERRLHERESEIVELKSQLARMREDWIEEECHRVEAQLALKEARKEIKQLKQVIETMRSSLADKDKGIQKYFVDINIQNKKLESLLQSMEMAHSGSLRDELCLDFPCDSPEKSLTLNPPLDTMADGLSLEEQVTGEGADRELLVGDSIANSTDLFDEIVTATTTESGDLELVHSTPGANVLELLPIVMGQEEGSVVVERAVQTDVVPYSPAISELIQSVLQKLQDPCPSSLASPDESEPDSMESFPESLSALVVDLTPRNPNSAILLSPVETPYANVDAEVHANRLMRELDFAACVEERLDGVIPLARGGVVRQYWSSSFLVDLLAVAAPVVPTVLWAFSTQRGGTDPVYNIGALLRGCCVVALHSLRRTAFRIKT

SEQ ID NO: 18771 - protein, 867 aa, Homo sapiens
MAADVVGDVYVLVEHPFEYTGKDGRRVAIRPNERYRLLRRSTEHWWHVRREPGGRPFYLPAQYVRELPALGNPAAAAPPGPHPSPAAPEPLAYDYRFVSAAATAGPDGAPEESGGRASSLCGPAQRGAATQRSSLAPGLPACLYLRPAAPVRPAQSLNDLACAAVSPPAGLLGSSGSFKACSVAGSWVCPRPLARSDSENVYEVIQDLHVPPPEESAEQVDDPPEPVYANIERQPRATSPGAAAAPLPSPVWETHTDAGTGRPYYYNPDTGVTTWESPFEAAEGAASPATSPASVDSHVSLETEWGQYWDEESRRVFFYNPLTGETAWEDEAENEPEEELEMQPGLSPGSPGDPRPPTPETDYPESLTSYPEEDYSPVGSFGEPGPTSPLTTPPGWSCHVSQDKQMLYTNHFTQEQWVRLEDPHGKPYFYNPEDSSVRWELPQVPVPAPRSIHKSSQDGDTPAQASPPEEKTKTLDKAGVLHRTKTADKGKRLRKKHWSASWTVLEGGVLTFFKDSKTSAAGGLRQPSKFSTPEYTVELRGATLSWAPKDKSSRKNVLELRSRDGSEYLIQHDSEAIISTWHKAIAQGIQELSAELPPEESESSRVDFGSSERLGSWQEKEEDARPNAAAPALGPVGLESDLSKVRHKLRKFLQRRPTLQSLREKGYIKDQVFGCALAALCERERSRVPRFVQQCIRAVEARGLDIDGLYRISGNLATIQKLRYKVDHDERLDLDDGRWEDVHVITGALKLFFRELPEPLFPFSHFRQFIAAIKLQDQARRSRCVRDLVRSLPAPNHDTLRMLFQHLCRVIEHGEQNRMSVQSVAIVFGPTLLRPEVEETSMPMTMVFQNQVVELILQQCADIFPPH

SEQ ID NO: 18772 - protein, 708 aa, Homo sapiens
MSSDSELAVFGEAAPFLRKSERERIEAQNRPFDAKTSVFVAEPKESFVKGTIQSREGGKVTVKTEGGATLTVKDDQVFPMNPPKYDKIEDMAMMTHLHEPAVLYNLKERYAAWMIYTYSGLFCVTVNPYKWLPVYKPEVVTAYRGKKRQEAPPHIFSISDNAYQFMLTDRENQSILITGESGAGKTVNTKRVIQYFATIAVTGEKKKEEITSGKIQGTLEDQIISANPLLEAFGNAKTVRNDNSSRFGKFIRIHFGTTGKLASADIETYLLEKSRVVFQLKAERSYHIFYQITSNKKPELIEMLLITTNPYDYPFVSQGEISVASIDDQEELMATDSAIDILGFTNEEKVSIYKLTGAVMHYGNLKFKQKQREEQAEPDGTEVADKAAYLQSLNSADLLKALCYPRVKVGNEYVTKGQTVEQVSNAVGALAKAVYEKMFLWMVARINQQLDTKQPRQYFIGVLDIAGFEIFDFNSLEQLCINFTNEKLQQFFNHHMFVLEQEEYKKEGIEWTFIDFGMDLAACIELIEKPMGIFSILEEECMFPKATDTSFKNKLYDQHLGKSANFQKPKVVKGKAEAHFALIHYAGVVDYNITGWLEKNKDPLNETVVGLYQKSAMKTLAQLFSGAQTAEGEGAGGGAKKGGKKKGSSFQTVSALFREEQSNTNLAKFRKLQHELEEAEERADIAESQVNKLRVKSREVHTKVISEE

SEQ ID NO: 18773 - protein, 1269 aa, Homo sapiens
MKVVPEKNAVRILWGRERGARAMGAQRLLQELVEDKTRWMKWEGKRVELPDSPRSTFLLAFSPDRTLLASTHVNHNIYITEVKTGKCVHSLIGHRRTPWCVTFHPTISGLIASGCLDGEVRIWDLHGGSESWFTDSNNAIASLAFHPTAQLLLIATANEIHFWDWSRREPFAVVKTASEMERVRLVRFDPLGHYLLTAIVNPSNQQGDDEPEIPIDGTELSHYRQRALLQSQPVRRTPLLHNFLHMLSSRSSGIQVGEQSTVQDSATPSPPPPPPQPSTERPRTSAYIRLRQRVSYPTAECCQHLGILCLCSRCSGTRVPSLLPHQDSVPPASARATTPSFSFVQTEPFHPPEQASSTQQDQGLLNRPSAFSTVQSSTAGNTLRNLSLGPTRRSLGGPLSSHPSRYHREIAPGLTGSEWTRTVLSLNSRSEAESMPPPRTSASSVSLLSVLRQQEGGSQASVYTSATEGRGFPASGLATESDGGNGSSQNNSGSIRHELQCDLRRFFLEYDRLQELDQSLSGEAPQTQQAQEMLNNNIESERPGPSHQPTPHSSENNSNLSRGHLNRCRACHNLLTFNNDTLRWERTTPNYSSGEASSSWQVPSSFESVPSSGSQLPPLERTEGQTPSSSRLELSSSASPQEERTVGVAFNQETGHWERIYTQSSRSGTVSQEALHQDMPEESSEEDSLRRLSPAAYYAQRMIQYLSRRDSIRQRSMRYQQNRLRSSTSSSSSDNQGPSVEGTDLEFEDFEDNGDRSRHRAPRNARMSAPSLGRFVPRRFLLPEYLPYAGIFHERGQPGLATHSSVNRVLAGAVIGDGQSAVASNIANTTYRLQWWDFTKFDLPEISNASVNVLVQNCKIYNDASCDISADGQLLAAFIPSSQRGFPDEGILAVYSLAPHNLGEMLYTKRFGPNAISVSLSPMGRYVMVGLASRRILLHPSTEHMVAQVFRLQQAHGGETSMRRVFNVLYPMPADQRRHVSINSARWLPEPGLGLAYGTNKGDLVICRPEALNSGVEYYWDQLNETVFTVHSNSRSSERPGTSRATWRTDRDMGLMNAIGLQPRNPATSVTSQGTQTLALQLQNAETQTEREVPEPGTAASGPGEGEGSEYGASGEDALSRIQRLMAEGGMTAVVQREQSTTMASMGGFGNNIIVSHRIHRSSQTGTEPGAAHTSSPQPSTSRGLLPEAGQLAERGLSPRTASWDQPGTPGREPTQPTLPSSSPVPIPVSLPSAEGPTLHCELTNNNHLLDGGSSRGDAAGPRGEPRNR

SEQ ID NO: 18774 - protein, 90 aa, Homo sapiens
MTSPEIASLSWGQMKVKGSNTTYKDCKVWPGGSRTWDWRETGTEVPSSTVEYLKKHGIDVRVLQTEQAVKEYNALVAQGVRVGGVFHSTC

SEQ ID NO: 18775 - protein, 934 aa, Homo sapiens
MGENEDEKQAQAGQVFENFVQASTCKGTLQAFNILTRHLDLDPLDHRNFYSKLKSKVTTWKAKALWYKLDKRGSHKEYKRGKSCTNTKCLIVGGGPCGLRTAIELAYLGAKVVVVEKRDSFSRNNVLHLWPFTIHDLRGLGAKKFYGKFCAGSIDHISIRQLQLILFKVALMLGVEIHVNVEFVKVLEPPEDQENQKIGWRAEFLPTDHSLSEFEFDVIIGADGRRNTLEGFRRKEFRGKLAIAITANFINRNSTAEAKVEEISGVAFIFNQKFFQDLKEETGIDLENIVYYKDCTHYFVMTAKKQSLLDKGVIINDYIDTEMLLCAENVNQDNLLSYAREAADFATNYQLPSLDFAMNHYGQPDVAMFDFTCMYASENAALVRERQAHQLLVALVGDSLLEPFWPMGTGCARGFLAAFDTAWMVKSWNQGTPPLELLAERESLYRLLPQTTPENINKNFEQYTLDPGTRYPNLNSHCVRPHQVKHLYITKELEHYPLERLGSVRRSVNLSRKESDIRPSKLLTWCQQQTEGYQHVNVTDLTTSWRSGLALCAIIHRFRPELINFDSLNEDDAVENNQLAFDVAEREFGIPPVTTGKEMASAQEPDKLSMVMYLSKFYELFRGTPLRPVDSWRKNYGENADLSLAKSSISNNYLNLTFPRKRTPRVDGQTGENDMNKRRRKGFTNLDEPSNFSSRSLGSNQECGSSKEGGNQNKVKSMANQLLAKFEESTRNPSLMKQEKKSPSGFHFHPSHLRTVHPQLTVGKVSSGIGAAAEVLVNLYMNDHRPKAQATSPDLESMRKSFPLNLGGSDTCYFCKKRVYVMERLSAEGHFFHRECFRCSICATTLRLAAYTFDCDEGKFYCKPHFIHCKTNSKQRKRRAELKQQREEEATWQEQEAPRRDTPTESSCAVAAIGTLEGSPPVHFSLPVLHPLLG

SEQ ID NO: 18776 - protein, 815 aa, Homo sapiens
MSGLGRLFGKGKKEKGPTPEEAIQKLKETEKILIKKQEFLEQKIQQELQTAKKYGTKNKRAALQALRRKKRFEQQLAQTDGTLSTLEFQREAIENATTNAEVLRTMELAAQSMKKAYQDMDIDKVDELMTDITEQQEVAQQISDAISRPMGFGDDVDEDELLEELEELEQEELAQELLNVGDKEEEPSVKLPSVPSTHLPAGPGSTALRMTVVGNPRSWSCQWLPILILLLGTGHGPGVEGVTHYKAGDPVILYVNKVGPYHNPQETYHYYQLPVCCPEKIRHKSLSLGEVLDGDRMAESLYEIRFRENVEKRILCHMQLSSAQVEQLRQAIEELYYFEFVVDDLPIRGFVGYMEESGFLPHSHKIGLWTHLDFHLEFHGDRIIFANVSVRDVKPHSLDGLRPDEFLGLTHTYSVRWSETSVERRSDRRRGDDGGFFPRTLEIHWLSIINSMVLVFLLVGFVAVILMRVLRNDLARYNLDEETTSAGSGDDFDQGDNGWKIIHTDVFRFPPYRGLLCAVLGVGAQFLALGTGIIVMALLGMFNVHRHGAINSAAILLYALTCCISGYVSSHFYRQIGGERWVWNIILTTSLFSVPFFLTWSVVNSVHWANGSTQALPATTILLLLTVWLLVGFPLTVIGGIFGKNNASPFDAPCRTKNIAREIPPQPWYKSTVIHMTVGGFLPFSAISVELYYIFATVWGREQYTLYGILFFVFAILLSVGACISIALTYFQLSGEDYRWWWRSVLSVGSTGLFIFLYSVFYYARRSNMSGAVQTVEFFGYSLLTGYVFFLMLGTISFFSSLKFIRYIYVNLKMD

SEQ ID NO: 18777 - protein, 3447 aa, Homo sapiens
MSGEDAEVRAVSEDVSNGSSGSPSPGDTLPWNLGKTQRSRRSGGGAGSNGSVLDPAERAVIRIADERDRVQKKTFTKWVNKHLIKAQRHISDLYEDLRDGHNLISLLEVLSGDSLPREKGRMRFHKLQNVQIALDYLRHRQVKLVNIRNDDIADGNPKLTLGLIWTIILHFQISDIQVSGQSEDMTAKEKLLLWSQRMVEGYQGLRCDNFTSSWRDGRLFNAIIHRHKPLLIDMNKVYRQTNLENLDQAFSVAERDLGVTRLLDPEDVDVPQPDEKSIITYVSSLYDAMPRVPDVQDGVRANELQLRWQEYRELVLLLLQWMRHHTAAFEERRFPSSFEEIEILWSQFLKFKEMELPAKEADKNRSKGIYQSLEGAVQAGQLKVPPGYHPLDVEKEWGKLHVAILEREKQLRSEFERLECLQRIVTKLQMEAGLCEEQLNQADALLQSDVRLLAAGKVPQRAGEVERDLDKADSMIRLLFNDVQTLKDGRHPQGEQMYRRVYRLHERLVAIRTEYNLRLKAGVAAPATQVAQVTLQSVQRRPELEDSTLRYLQDLLAWVEENQHRVDGAEWGVDLPSVEAQLGSHRGLHQSIEEFRAKIERARSDEGQLSPATRGAYRDCLGRLDLQYAKLLNSSKARLRSLESLHSFVAAATKELMWLNEKEEEEVGFDWSDRNTNMTAKKESYSALMRELELKEKKIKELQNAGDRLLREDHPARPTVESFQAALQTQWSWMLQLCCCIEAHLKENAAYFQFFSDVREAEGQLQKLQEALRRKYSCDRSATVTRLEDLLQDAQDEKEQLNEYKGHLSGLAKRAKAVVQLKPRHPAHPMRGRLPLLAVCDYKQVEVTVHKGDECQLVGPAQPSHWKVLSSSGSEAAVPSVCFLVPPPNQEAQEAVTRLEAQHQALVTLWHQLHVDMKSLLAWQSLRRDVQLIRSWSLATFRTLKPEEQRQALHSLELHYQAFLRDSQDAGGFGPEDRLMAEREYGSCSHHYQQLLQSLEQGAQEESRCQRCISELKDIRLQLEACETRTVHRLRLPLDKEPARECAQRIAEQQKAQAEVEGLGKGVARLSAEAEKVLALPEPSPAAPTLRSELELTLGKLEQVRSLSAIYLEKLKTISLVIRGTQGAEEVLRAHEEQLKEAQAVPATLPELEATKASLKKLRAQAEAQQPTFDALRDELRGAQEVGERLQQRHGERDVEVERWRERVAQLLERWQAVLAQTDVRQRELEQLGRQLRYYRESADPLGAWLQDARRRQEQIQAMPLADSQAVREQLRQEQALLEEIERHGEKVEECQRFAKQYINAIKDYELQLVTYKAQLEPVASPAKKPKVQSGSESVIQEYVDLRTHYSELTTLTSQYIKFISETLRRMEEEEMQTVQQEQLLQETQALQQSFLSEKDSLLQRERFIEQEKAKLEQLFQDEVAKAQQLREEQQRQQQQMEQERQRLVASMEEARRRQHEAEEGVRRKQEELQQLEQQRRQQEELLAEENQRLREQLQLLEEQHRAALAHSEEVTASQVAATKTLPNGRDALDGPAAEAEPEHSFDGLRRKVSAQRLQEAGILSAEELQRLAQGHTTVDELARREDVRHYLQGRSSIAGLLLKATNEKLSVYAALQRQLLSPGTALILLEAQAASGFLLDPVRNRRLTVNEAVKEGVVGPELHHKLLSAERAVTGYKDPYTGQQISLFQAMQKGLIVREHGIRLLEAQIATGGVIDPVHSHRVPVDVAYRRGYFDEEMNRVLADPSDDTKGFFDPNTHENLTYLQLLERCVEDPETGLCLLPLTDKAAKGGELVYTDSEARDVFEKATVSAPFGKFQGKTVTIWEIINSEYFTAEQRRDLLRQFRTGRITVEKIIKIIITVVEEQEQKGRLCFEGLRSLVPAAELLESRVIDRELYQQLQRGERSVRDVAEVDTVRRALRGANVIAGVWLEEAGQKLSIYNALKKDLLPSDMAVALLEAQAGTGHIIDPATSARLTVDEAVRAGLVGPEFHEKLLSAEKAVTGYRDPYTGQSVSLFQALKKGLIPREQGLRLLDAQLSTGGIVDPSKSHRVPLDVACARGCLDEETSRALSAPRADAKAYSDPSTGEPATYGELQQRCRPDQLTGLSLLPLSEKAARARQEELYSELQARETFEKTPVEVPVGGFKGRTVTVWELISSEYFTAEQRQELLRQFRTGKVTVEKVIKILITIVEEVETLRQERLSFSGLRAPVPASELLASGVLSRAQFEQLKDGKTTVKDLSELGSVRTLLQGSGCLAGIYLEDTKEKVSIYEAMRRGLLRATTAALLLEAQAATGFLVDPVRNQRLYVHEAVKAGVVGPELHEQLLSAEKAVTGYRDPYSGSTISLFQAMQKGLVLRQHGIRLLEAQIATGGIIDPVHSHRVPVDVAYQRGYFSEEMNRVLADPSDDTKGFFDPNTHENLTYRQLLERCVEDPETGLRLLPLKGAEKAEVVETTQVYTEEETRRAFEETQIDIPGGGSHGGSTMSLWEVMQSDLIPEEQRAQLMADFQAGRVTKERMIIIIIEIIEKTEIIRQQGLASYDYVRRRLTAEDLFEARIISLETYNLLREGTRSLREALEAESAWCYLYGTGSVAGVYLPGSRQTLSIYQALKKGLLSAEVARLLLEAQAATGFLLDPVKGERLTVDEAVRKGLVGPELHDRLLSAERAVTGYRDPYTEQTISLFQAMKKELIPTEEALRLLDAQLATGGIVDPRLGFHLPLEVAYQRGYLNKDTHDQLSEPSEVRSYVDPSTDERLSYTQLLRRCRRDDGTGQLLLPLSDARKLTFRGLRKQITMEELVRSQVMDEATALQLREGLTSIEEVTKNLQKFLEGTSCIAGVFVDATKERLSVYQAMKKGIIRPGTAFELLEAQAATGYVIDPIKGLKLTVEEAVRMGIVGPEFKDKLLSAERAVTGYKDPYSGKLISLFQAMKKGLILKDHGIRLLEAQIATGGIIDPEESHRLPVEVAYKRGLFDEEMNEILTDPSDDTKGFFDPNTEENLTYLQLMERCITDPQTGLCLLPLKEKKRERKTSSKSSVRKRRVVIVDPETGKEMSVYEAYRKGLIDHQTYLELSEQECEWEEITISSSDGVVKSMIIDRRSGRQYDIDDAIAKNLIDRSALDQYRAGTLSITEFADMLSGNAGGFRSRSSSVGSSSSYPISPAVSRTQLASWSDPTEETGPVAGILDTETLEKVSITEAMHRNLVDNITGQRLLEAQACTGGIIDPSTGERFPVTDAVNKGLVDKIMVDRINLAQKAFCGFEDPRTKTKMSAAQALKKGWLYYEAGQRFLEVQYLTGGLIEPDTPGRVPLDEALQRGTVDARTAQKLRDVGAYSKYLTCPKTKLKISYKDALDRSMVEEGTGLRLLEAAAQSTKGYYSPYSVSGSGSTAGSRTGSRTGSRAGSRRGSFDATGSGFSMTFSSSSYSSSGYGRRYASGSSASLGGPESAVA

SEQ ID NO: 18778 - protein, 1005 aa, Homo sapiens
MRGGKCNMLSSLGCLLLCGSITLALGNAQKLPKGKRPNLKVHINTTSDSILLKFLRPSPNVKLEGLLLGYGSNVSPNQYFPLPAEGKFTEAIVDAEPKYLIVVRPAPPPSQKKSCSGKTRSRKPLQLVVGTLTPSSVFLSWGFLINPHHDWTLPSHCPNDRFYTIRYREKDKEKKWIFQICPATETIVENLKPNTVYEFGVKDNVEGGIWSKIFNHKTVVGSKKVNGKIQSTYDQDHTVPAYVPRKLIPITIIKQVIQNVTHKDSAKSPEKAPLGGVILVHLIIPGLNETTVKLPASLMFEISDALKTQLAKNETLALPAESKTPEVEKISARPTTVTPETVPRSTKPTTSSALDVSETTLVLSKRTPETLQTILIPQFELPLSTLAPKSLPEFPEAKTPFPFEKPRGTLASSEKPWIVPTAKISEDSKVLQPQTATYDVFSSPTTSDEPEISDSYTATSDRILDSIPPKTSRTLEQPRATLAPSETPFVPQKLEIFTSPEMQPTTPAPQQTTSIPSTPKRRPRPKPPRTKPERTTSAGTITPKISKSPEPTWTTPAPGKTQFISLKPKIPLSPEVTHTKPAPEPQTLLPSQSTIGPETPGTKPSTTLAPRKTKRPGRRPRPRPRPKTTPSPEVPKSKPALEPATIQPEPLVPTTASKPSERPKTTHRPDAPQIQPGSKPPKQLLPKPQTTAEPDMPPTKSVSEPVPFETEAPSMTIVPTTDIEPVTVRTEATVTTLAPKTSQRTRTRRPRPKHKTTPRPETLQTKLDFGPITPGTSSAPTTTTKRTRRPHPKPKTTPHPEVPQTKLATKTSKRTRPPRPRPKTTPSPQAPETKPVPATVLEPVTLRPEASTTLASKTSQRTRRPRLRTKTTPRPEAPESKPVPTAELKPVTLRTETWVTTQAPKTSQRTRRPRPKTKTTPSPEVPQTKLVPSTDLEPGTLRTEAPKTMVVTTVLEPDTFRTKFPETTLAPKTQRTRRPRPRPKTTSSPEVPQNKSGKCMNPWLK

SEQ ID NO: 18779 - protein, 127 aa, Homo sapiens
MSFPPHLNRPPMGIPALPPGIPPPQFPGFPPPVPPGTPMIPVPMSIMAPAPTVLVPTVSMVGKHLGARKDHPGLKAKENDENCGPTTTVFVGNISEKASDMLIRQLLAKCGLVLSWKRVQGASGKLQ

SEQ ID NO: 18780 - protein, 503 aa, Homo sapiens
MALAPERAAPRVLFGEWLLGEISSGCYEGLQWLDEARTCFRVPWKHFARKDLSEADARIFKAWAVARGRWPPSSRGGGPPPEAETAERAGWKTNFRCALRSTRRFVMLRDNSGDPADPHKVYALSRELCWREGPGTDQTEAEAPAAVPPPQGGPPGPFLAHTHAGLQAPGPLPAPAGDKGDLLLQAVQQSCLADHLLTASWGADPVPTKAPGEGQEGLPLTGACAGGPGLPAGELYGWAVETTPSPGPQPAALTTGEAAAPESPHQAEPYLSPSPSACTAVQEPSPGALDVTIMYKGRTVLQKVVGHPSCTFLYGPPDPAVRATDPQQVAFPSPAELPDQKQLRYTEELLRHVAPGLHLELRGPQLWARRMGKCKVYWEVGGPPGSASPSTPACLLPRNCDTPIFDFRVFFQELVEFRARQRRGSPRYTIYLGFGQDLSAGRPKEKSLVLVKLEPWLCRVHLEGTQREGVSSLDSSSLSLCLSSANSLYDDIECFLMELEQPA

SEQ ID NO: 18781 - protein, 902 aa, Homo sapiens
MSGQWFYEAKAKRHRDKIHGADIIRASMRKKRPQIAAEQSKDRENGAKESWVNNVNKDAFLPPELAGVVEEPEEDAAPASPSSSVVNPASSVIDMSQENTRKPNVSPEKRKNPFNSSKLPEGHSSQQTKNEQSKNGRTGLFQTSKEDELSESKEKSTVADTSIQKLEKSKQTLPGLSNGSQIKAPIPKARKMIYKSTDLNKDDNQSFPRQRTDSLKARGAPRGILKRNSSSSSTDSETLRYNHNFEPKSKIVSPGLTIHERISEKEHSLEDNSSPNSLEPLKHVRFSAVKDELPQSPGLIHGREVGEFSVLESDRLKNGMEDAGDTEEFQSDPKPSQYRKPSLFHQSTSSPYVSKSETHQPMTSGSFPINGLHSHSEVLTARPQSMENSPTINEPKDKSSELTRLESVLPRSPADELSHCVEPEPSQVPGGSSRDRQQGSEEEPSPVLKTLERSAARKMPSKSLEDISSDSSNQAKVDNQPEELVRSAEDDEKPDQKPVTNECVPRISTVPTQPDNPFSHPDKLKRMSKSVPAFLQDESDDRETDTASESSYQLSRHKKSPSSLTNLSSSSGMTSLSSVSGSVMSVYSGDFGNLEVKGNIQFAIEYVESLKELHVFVAQCKDLAAADVKKQRSDPYVKAYLLPDKGKMGKKKTLVVKKTLNPVYNEILRYKIEKQILKTQKLNLSIWHRDTFKRNSFLGEVELDLETWDWDNKQNKQLRWYPLKRKTAPVALEAENRGEMKLALQYVPEPVPGKKLPTTGEVHIWVKECLDLPLLRGSHLNSFVKCTILPDTSRKSRQKTRAVGKTTNPIFNHTMVYDGFRPEDLMEACVELTVWDHYKLTNQFLGGLRIGFGTGKSYGTEVDWMDSTSEEVALWEKMVNSPNTWIEATLPLRMLLIAKISK

SEQ ID NO: 18782 - protein, 1495 aa, Homo sapiens
MGTALLQRGGCFLLCLSLLLLGCWAELGSGLEFPGAEGQWTRFPKWNACCESEMSFQLKTRSARGLVLYFDDEGFCDFLELILTRGGRLQLSFSIFCAEPATLLADTPVNDGAWHSVRIRRQFRNTTLFIDQVEAKWVEVKSKRRDMTVFSGLFVGGLPPELRAAALKLTLASVREREPFKGWIRDVRVNSSQVLPVDSGEVKLDDEPPNSGGGSPCEAGEEGEGGVCLNGGVCSVVDDQAVCDCSRTGFRGKDCSQEDNNVEGLAHLMMGDQGKEEYIATFKGSEYFCYDLSQNPIQSSSDEITLSFKTLQRNGLMLHTGKSADYVNLALKNGAVSLVINLGSGAFEALVEPVNGKFNDNAWHDVKVTRNLRQVTISVDGILTTTGYTQEDYTMLGSDDFFYVGGSPSTADLPGSPVSNNFMGCLKEVVYKNNDVRLELSRLAKQGDPKMKIHGVVAFKCENVATLDPITFETPESFISLPKWNAKKTGSISFDFRTTEPNGLILFSHGKPRHQKDAKHPQMIKVDFFAIEMLDGHLYLLLDMGSGTIKIKALLKKVNDGEWYHVDFQRDGRSGTISVNTLRTPYTAPGESEILDLDDELYLGGLPENKAGLVFPTEVWTALLNYGYVGCIRDLFIDGQSKDIRQMAEVQSTAGVKPSCSKETAKPCLSNPCKNNGMCRDGWNRYVCDCSGTGYLGRSCEREATVLSYDGSMFMKIQLPVVMHTEAEDVSLRFRSQRAYGILMATTSRDSADTLRLELDAGRVKLTVNLDCIRINCNSSKGPETLFAGYNLNDNEWHTVRVVRRGKSLKLTVDDQQAMTGQMAGDHTRLEFHNIETGIITERRYLSSVPSNFIGHLQSLTFNGMAYIDLCKNGDIDYCELNARFGFRNIIADPVTFKTKSSYVALATLQAYTSMHLFFQFKTTSLDGLILYNSGDGNDFIVVELVKGYLHYVFDLGNGANLIKGSSNKPLNDNQWHNVMISRDTSNLHTVKIDTKITTQITAGARNLDLKSDLYIGGVAKETYKSLPKLVHAKEGFQGCLASVDLNGRLPDLISDALFCNGQIERGCEGPSTTCQEDSCSNQGVCLQQWDGFSCDCSMTSFSGPLCNDPGTTYIFSKGGGQITYKWPPNDRPSTRADRLAIGFSTVQKEAVLVRVDSSSGLGDYLELHIHQGKIGVKFNVGTDDIAIEESNAIINDGKYHVVRFTRSGGNATLQVDSWPVIERYPAGNNDNERLAIARQRIPYRLGRVVDEWLLDKGRQLTIFNSQATIIIGGKEQGQPFQGQLSGLYYNGLKVLNMAAENDANIAIVGNVRLVGEVPSSMTTESTATAMQSEMSTSIMETTTTLATSTARRGKPPTKEPISQTTDDILVASAECPSDDEDIDPCEPSSGGLANPTRAGGREPYPGSAEVIRESSSTTGMVVGIVAAAALCILILLYAMYKYRNRDEGSYHVDESRNYISNSAQSNGAVVKEKQPSSAKSSNKNKKNKDKEYYV

SEQ ID NO: 18783 - protein, 727 aa, Homo sapiens
MSGRKRSFTFGAYGGVDKSFTSRRSVWRSDGQNQHFPQALDLSRVNLVPSYTPSLYPKNTDLFEMIEKMQGSRMDEQRCSFPPPLKTEEDYIPYPSVHEVLGREGPFPLILLPQFGGYWIEGTNHEITSIPETEPLQSPTTKVKLECNPTARIYRKHFLGKEHFNYYSLDAALGHLVFSLKYDVIGDQEHLRLLLRTKCRTYHDVIPISCLTEFPNVVQMAKLVCEDVNVDRFYPVLYPKASRLIVTFDEHVISNNFKFGVIYQKLGQTSEEELFSTNEESPAFVEFLEFLGQKVKLQDFKGFRGGLDVTHGQTGTESVYCNFRNKEIMFHVSTKLPYTEGDAQQLQRKRHIGNDIVAVVFQDENTPFVPDMIASNFLHAYVVVQAEGGGPDGPLYKVSVTARDDVPFFGPPLPDPAVFRKGPEFQEFLLTKLINAEYACYKAEKFAKLEERTRAALLETLYEELHIHSQSMMGLGGDEDKMENGSGGGGFFESFKRVIRSRSQSMDAMGLSNKKPNTVSTSHSGSFAPNNPDLAKAAGISLIVPGKSPTRKKSGPFGSRRSSAIGIENIQEVQEKRESPPAGQKTPDSGHVSQEPKSENSSTQSSPEMPTTKNRAETAAQRAEALKDFSRSSSSASSFASVVEETEGVDGEDTGLESVSSSGTPHKRDSFIYSTWLEDSVSTTSGGSSPGPSRSPHPDAGKLGDPACPEIKIQLEASEQHMPQLGC

SEQ ID NO: 18784 - protein, 79 aa, Homo sapiens
ASVLSPTSWEKRRAWLRQSRNWQTQVLEEEAAAALQDVPDPEPSSLDDVFQEGNPINKIEDWLQDCGKLNTTDSHWKRI

SEQ ID NO: 18785 - protein, 147 aa, Homo sapiens
MDSLQKQDLRRPKIHGAVQASPYQPPTLASLQRLLWVRQAATLNHIDEVWPSLFLGDAYAARDKSKLIQLGITHVVNAAAGRVLVHCAMGVSRSATLVLAFLMICENMTLVEAIQTVQAHRNICPNSGFLRQLQVLDNRLGRETGRF

SEQ ID NO: 18786 - protein, 348 aa, Homo sapiens
MTSELDIFVGNTTLIDEDVYRLWLDVTDAVALRVRSGILEQTGATAAVLQSDTMDHYRTFHMLERLLHAPPKLLHQLIFQIPPSRQALLIERYYAFDEAFVREVLGKKLSKGTKKDLDDISTKTGITLKSCRRQFDNFKRVFKVVEEMRGSLVDNIQQHFLLSDRLARDYAAIVFFANNRFETGKKKLQYLSFGDFAFCAELMIQNWTLGAVDSQMDDMDMDLDKEFLQDLKELKVLVADKDLLDLHKSLVCTALRGKLGVFSEMEANFKNLSRGLVNVAAKLTHNKDYSLGPAVCGTLPLRPLATQRRAVLPESVFSVCPLPRWLPTPGPLGPLHGHPPRLPPAPVS

SEQ ID NO: 18787 - protein, 513 aa, Homo sapiens
MEVGITIQHAYEKQHPWIDLTSIGFSYVIDFNTMGQINRQTQRQRRVRRRLDLIYPMVTGTLPKAQSWPVSPGPATSPPMSPCSCPQCVLVMSVKAAVVNGSTGPLQLPVTRKNMPPPGVVKLPPLPGSGAKPLDSTGTIRGPLKTAPSQVIRRQASSMPTGTTMGSPASPPGPNSKTGRVALATLNRTNLQRLAIAQSRVLIASGVPTVPVKNLNGSSPVNPALAGITGILMSAAGLPVCLTRPPKLVLHPPPVSKSEIKSIPGVSNTSRKTTKKQAKKGKTPEEVLKKYLQKVRHPPDEDCTICMERLTAPSGYKGPQPTVKPDLVGKLSRCGHVYHIYCLVAMYNNGNKDGSLQCPTCKTIYGVKTGTQPPGKMEYHLIPHSLPGHPDCKTIRIIYSIPPGIQGPEHPNPGKSFSARGFPRHCYLPDSEKGRKVLKLLLVAWDRRLIFAIGTSSTTGESDTVIWNEVHHKTEFGSNLTGHGYPDANYLDNVLAELAAQGISEDSTAQEKD

SEQ ID NO: 18788 - protein, 766 aa, Homo sapiens
MKPFQLDLLFVCFFLFSQELGLQKRGCCLVLGYMAKDKFRRMNEGQVYSFSQQPQDQVVVSGQPVTLLCAIPEYDGFVLWIKDGLALGVGRDLSSYPQYLVVGNHLSGEHHLKILRAELQDDAVYECQAIQAAIRSRPARLTVLVPPDDPVILGGPVISLRAGDPLNLTCHADNAKPAASIIWLRKGEVINGATYSKTLLRDGKRESIVSTLFISPGDVENGQSIVCRATNKAIPGGKETSVTIDIQHPPLVNLSVEPQPVLEDNVVTFHCSAKANPAVTQYRWAKRGQIIKEASGEVYRTTVDYTYFSEPVSCEVTNALGSTNLSRTVDVYFGPRMTTEPQSLLVDLGSDAIFSCAWTGNPSLTIVWMKRGSGVVLSNEKTLTLKSVRQEDAGKYVCRAVVPRVGAGEREVTLTVNGPPIISSTQTQHALHGEKGQIKCFIRSTPPPDRIAWSWKENVLESGTSGRYTVETISTEEGVISTLTISNIVRADFQTIYNCTAWNSFGSDTEIIRLKEQESVPMAVIIGVAVGAGVAFLVLMATIVAFCCARSQRNLKGVVSAKNDIRVEIVHKEPASGREGEEHSTIKQLMMDRGEFQQDSVLKQLEVLKEEEKEFQNLKDPTNGYYSVNTFKEHHSTPTISLSSCQPDLRPAGKQRVPTGMSFTNIYSTLSGQGRLYDYGQRFVLGMGSSSIELCEREFQRGSLSDSSSFLDTQCDSSVSSSGKQDGYVQFDKASKASASSSHHSQSSSQNSDPSRPLQRRMQTHV

SEQ ID NO: 18789 - protein, 824 aa, Homo sapiens
MLFSWREDPGAQCLLLSLLLLAASEVGSGQLHYSVSEEAKHGTFVGRIAQDLGLELAELVPRLFRVASKRHGDLLEVNLQNGILFVNSRIDREELCGRSAECSIHLEVIVDRPLQVFHVEVEVKDINDNAPVFPMAVKNLFISESRQPGSRFSLEGASDADIGTNSLLTYSLDSTEYFTLDVKRNDEEIKSLGLVLKKNLNREDTPKHYLLITAIDGGKPELTGTTQLKITVLDVNDNAPAFERTIYKVRLLENAPNGTLVVTVNATDLDEGVNKDIAYSFNTDMSADILSKFHLDPVNGQISVKGNIDFEESKSYEIQVEATDKGNPPMSDHCTVLLEIVDINDNVPELVIQSLSLPVLEDSPLSTVIALISVSDRDSGVNGQVTCSLTPHVPFKLVSTFKNYYSLVLDSPLDRESVSAYELVVTARDGGSPSLWATASVSVEVADVNDNAPAFSQSEYTVFVKENNPPGCHIFTVSARDADAQENALVSYSLVERRVGERALSSYVSVHAESGKVYALQPLDHEELELLQFQVSARDAGVPPLGSNVTLQVFVLDENDNAPALLMPRVGGIGGAVSELVPRSVGAGHVVAKVRAVDADSGYNAWLSYELQPGTGGARIPFRVGLYTGEISTTRALDEVDAPRHRLLVLVKDHGEPSLTATATVLVSLVESGQAPKASSQASAGATGPEAALVDVNVYLIVAICAVSSLLVLTLLLYTALRCSAPPTEGDCGPGKPTLVCSSAVGSWSYSQQRQQRVCSGEGLPKTDLMAFSPSLPPCPISRDREEKQDVDVDLSAKVSNFYLFFPKCLCFSFLNVSTPLEIH

SEQ ID NO: 18790 - protein, 172 aa, Homo sapiens
MAAMETETAPLTLESLPTDPLLLILSFLDYRDLINCCYVSRRLSQLSSHDPLWRRHCKKYWLISEEEKTQKNQCWKSLFIDTYSDVGRYIDHYAAIKKAWDDLKKYLEPRCPRMVLSLKEGAREEDLDAVEAQIGCKLPDDYRCSYRIHNGQKLVVPGTKWLEIQLLLTCLL

SEQ ID NO: 18791 - protein, 568 aa, Homo sapiens
MDRPAAAAAAGCEGGGGPNPGPAGGRRPPRAAGGATAGSRQPSVETLDSPTGSHVEWCKQLIAATISSQISGSVTSENVSRDYKALRDGNKLAQMEEAPLFPGESIKAIVKDVMYICPFMGAVSGTLTVTDFKLYFKNVERDPHFILDVPLGVISRVEKIGAQSHGDNSCGIEIVCKDMRNLRLAYKQEEQSKLGIFENLNKHAFPLSNGQALFAFSYKEKFPINGWKVYDPVSEYKRQGLPNESWKISKINSNYEFCDTYPAIIVVPTSVKDDDLSKVAAFRAKGRVPVLSWIHPESQATITRCSQPLVGPNDKRCKEDEKYLQTIMDANAQSHKLIIFDARQNSVADTNKTKGGGYESESAYPNAELVFLEIHNIHVMRESLRKLKEIVYPSIDEARWLSNVDGTHWLEYIRMLLAGAVRIADKIESGKTSVVVHCSDGWDRTAQLTSLAMLMLDSYYRTIKGFETLVEKEWISFGHRFALRVGHGNDNHADADRSPIFLQFVDCVWQMTRQFPSAFEFNELFLITILDHLYSCLFGTFLCNCEQQRFKEAWGAGTQRARGSLRSR

SEQ ID NO: 18792 - protein, 686 aa, Homo sapiens
MVFTPEDRLGKQCLLLPLLLLAAWKVGSGQLHYSVPEEAKHGTFVGRIAQDLGLELAELVPRLFRMASKDREDLLEVNLQNGILFVNSRIDREELCGRSAECSIHLEVIVDRPLQVFHVDVEVRDINDNPPLFPVEEQRVLIYESRLPDSVFPLEGASDADVGSNSILTYKLSSSEYFGLDVKINSDDNKQIGLLLKKSLDREEAPAHNLFLTATDGGKPELTGTVQLLVTVLDVNDNAPTFEQSEYEVRIFENADNGTTVIRLNASDRDEGANGAISYSFNSLVAAMVIDHFSIDRNTGEIVIRGNLDFEQENLYKILIDATDKGHPPMAGHCTVLVRILDKNDNVPEIALTSLSLPVREDAQFGTVIALISVNDLDSGANGQVNCSLTPHVPFKLVSTFKNYYSLVLDSALDRESVSAYELVVTARDGGSPSLWATASLSVEVADMNDNAPAFAQPEYTVFVKENNPPGCHIFTVSARDADAQENALVSYSLVERRVGERALSSYISVHAESGKVYALQPLDHEELELLQFQPRQPNPDWRYSASLRAGMHSSVHLEEAGILRAGPGGPDQQWPTVSSATPEPEAGEVSPPVGAGVNSNSWTFKYGPGNPKQSGPGELPDKFIIPGSPAIISIRQEPTNSQIDKSDFITFGKKEETKKKKKKKKGNKTQEKKEKGNSTTDNSDQ

SEQ ID NO: 18793 - protein, 481 aa, Homo sapiens
SPLHSPLDSSRSTRHHGLVERVQRDPRRMVSPLRRYTRHIDSSPYSPAYLSPPPESSWRRTMAWGNFPAEKGQLFRLPSALNRTSSDSALHTSVMNPSPQDTYPGPTPPSILPSRRGGILDGEMDPKVFLFQVPAIEENLLDDKHLLKPWDAKKLSSSSSRPRSCEVPGINIFPSPDQPANVPVLPPAMNTGGSLPDLTNLHFPPPLPTPLDPEETAYPSLSGGNSTSNLTHTMTHLGISRGMGLGPGYDAPGLHSPLSHPSLQSSLSNPNLQASLSSPQPQLQGSHSHPSLPASSLARHVLPTTSLGHPSLSAPALSSSSSSSSTSSPVLGAPSYPASTPGASPHHRRVPLSPLSLLAGPADARRSQQQLPKQFSPTMSPTLSSITQGVPLDTSKLSTDQRLPPYPYSSPSLVLPTQPHTPKSLQQPGLPSQSCSVQSSGGQPPGRQSHYGTPYPPGPSGHGQQSYHRPMSDFNLGNLAL

SEQ ID NO: 18794 - protein, 1173 aa, Homo sapiens
MQDVQGPRPGSPGDAEDRRELGLHRGEVNFGGSGKKRGKFVRVPSGVAPSVLFDLLLAEWHLPAPNLVVSLVGEEQPFAMKSWLRDVLRKGLVKAAQSTGAWILTSALRVGLARHVGQAVRDHSLASTSTKVRVVAVGMASLGRVLHRRILEEAQEDFPVHYPEDDGGSQGPLCSLDSNLSHFILVEPGPPGKGDGLTELRLRLEKHISEQRAGYGGTGSIEIPVLCLLVNGDPNTLERISRAVEQAAPWLILVGSGGIADVLAALVNQPHLLVPKVAEKQFKEKFPSKHFSWEDIVRWTKLLQNITSHQHLLTVYDFEQEGSEELDTVILKALVKACKSHSQEPQDYLDELKLAVAWDRVDIAKSEIFNGDVEWKSCDLEEVMVDALVSNKPEFVRLFVDNGADVADFLTYGRLQELYRSVSRKSLLFDLLQRKQEEARLTLAGLGTQQAREPPAGPPAFSLHEVSRVLKDFLQDACRGFYQDGRPGDRRRAEKGPAKRPTGQKWLLDLNQKSENPWRDLFLWAVLQNRHEMATYFWAMGQEGVAAALAACKILKEMSHLETEAEAARATREAKYERLALDLFSECYSNSEARAFALLVRRNRCWSKTTCLHLATEADAKAFFAHDGVQAFLTRIWWGDMAAGTPILRLLGAFLCPALVYTNLITFSEEAPLRTGLEDLQDLDSLDTEKSPLYGLQSRVEELVEAPRAQGDRGPRAVFLLTRWRKFWGAPVTVFLGNVVMYFAFLFLFTYVLLVDFRPPPQGPSGPEVTLYFWVFTLVLEEIRQGFFTDEDTHLVKKFTLYVGDNWNKCDMVAIFLFIVGVTCRMLPSAFEAGRTVLAMDFMVFTLRLIHIFAIHKQLGPKIIVVERMMKDVFFFLFFLSVWLVAYGVTTQALLHPHDGRLEWIFRRVLYRPYLQIFGQIPLDEIDEARVNCSTHPLLLEDSPSCPSLYANWLVILLLVTFLLVTNVLLMNLLIAMFSYTFQVVQGNADMFWKFQRYNLIVEYHERPALAPPFILLSHLSLTLRRVFKKEAEHKREHLERDLPDPLDQKVVTWETVQKENFLSKMEKRRRDSEGEVLRKTAHSLTTCSCRRVDFIAKYLGGLREQEKRIKCLESQINYCSVLVSSVADVLAQGGGPRSSQHCGEGSQLVAADHRGGLDGWEQPGAGQPPSDT

SEQ ID NO: 18795 - protein, 408 aa, Homo sapiens
MADLEAVLADVSYLMAMEKSKATPAARASKKILLPEPSIRSVMQKYLEDRGEVTFEKIFSQKLGYLLFRDFCLNHLEEARPLVEFYEEIKKYEKLETEEERVARSREIFDSYIMKELLACSHPFSKSATEHVQGHLGKKQVPPDLFQPYIEEICQNLRGDVFQKFIESDKFTRFCQWKNVELNIHLTMNDFSVHRIIGRGGFGEVYGCRKADTGKMYAMKCLDKKRIKMKQGETLALNERIMLSLVSTGDCPFIVCMSYAFHTPDKLSFILDLMNGGDLHYHLSQHGVFSEADMRFYAAEIILGLEHMHNRFVVYRDLKPANILLDEHGHVRISDLGLACDFSKKKPHASVGTHGYMAPEVLQKGSRCLCGVAPSPPRGWVGAPSPPVYSFPGAFLCRFLNVILKSEK

SEQ ID NO: 18796 - protein, 450 aa, Homo sapiens
MDPGQQPPPQPAPQGQGQPPSQPPQGQGPPSGPGQPAPAATQAAPQAPPAGHQIVHVRGDSETDLEALFNAVMNPKTANVPQTVPMRLRKLPDSFFKPPEPKSHSRQASTDAGTAGALTPQHVRAHSSPASLQLGAVSPGTLTPTGVVSGPAATPTAQHLRQSSFEIPDDVPLPAGWEMAKTSSGQRYFLNHIDQTTTWQDPRKAMLSQMNVTAPTSPPVQQNMMNSASAMNQRISQSAPVKQPPPLAPQSPQGGVMGGSNSNQQQQMRLQQLQMEKERLRLKQQELLRQELALRSQLPTLEQDGGTQNPVSSPGMSQELRTMTTNSSDPFLNSGTYHSRDESTDSGLSMSSYSVPRTPDDFLNSVDEMDTGDTINQSTLPSQQNRFPDYLEAIPGTNVDLGTLEGDGMNIEGEELMPSLQEALSSDILNDMESVLAATKLDKESFLTWL

SEQ ID NO: 18797 - protein, 204 aa, Homo sapiens
MEAQAQGLLETEPLQGTDEDAVASADFSSMLSEEEKEELKAELVQLEDEITTLRQVLSAKERHLVEIKQKLGMNLMNELKQNFSKSWHDMQTTTAYKKTHETLSHAGQKATAAFSNVGTAISKKFGDMSYSIRHSISMPAMRNSPTFKSFEERVETTVTSLKTKVGGTNPNGGSFEEVLSSTAHASAQSLAGGSRRTKEEELQC

SEQ ID NO: 18798 - protein, 477 aa, Homo sapiens
MCRPGQPPGSESVCFEVLGFDILLDRKLKPWLLEINRAPSFGTDQKIDYDVKRGVLLNALKLLNIRTSDKRRNLAKQKAEAQRRLYGQNSIKRLLPGSSDWEQQRHQLERRKEELKERLAQVRKQISREEHENRHMGNYRRIYPPEDKALLEKYENLLAVAFQTFLSGRAASFQRELNNPLKRMKEEDILDLLEQCEIDDEKLMGKTTKTRGPKPLCSMPESTEIMKRPKYCSSDSSYDSSSSSSESDENEKEEYQNKKREKQVTYNLKPSNHYKLIQQPSSIRRSVSCPRSISAQSPSSGDTRPFSAQQMISVSRPTSASRSHSLNRASSYMRHLPHSNDACSTNSQVSESLRQLKTKEQEDDLTSQTLFVLKDMKIRFPGKSDAESELLIEDIIDNWKYHKTKVASYWLIKLDSVKQRKVLDIVKTSIRTVLPRIWKVPDVEEVNLYRIFNRVFNRLLWSRGQGLWNCFCDSGYV

SEQ ID NO: 18799 - protein, 1084 aa, Homo sapiens
MVALRGLGSGLQPWCPLDLRLEWVDTVWELDFTETEPLDPSIEAEIIETGLAAFTKLYESLLPFATGEHGSMESIWTFFIENNVSHSTLVALFYHFVQIVHKKNVSVQYREYGLHAAGLYFLLLEVPGSVANQVFHPVMFDKCIQTLKKSWPQESNLNRKRKKEQPKSSQANPGRHRKRGKPPRREDIEMDEIIEEQEDENICFSARDLSQIRNAIFHLLKNFLRLLPKFSLKEKPQCVQNCIEVFVSLTNFEPVLHECHVTQARALNQAKYIPELAYYGLYLLCSPIHGEGDKVISCVFHQMLSVILMLEVGEGSHRAPLAVTSQVINCRNQAVQFISALVDELKESIFPVVRILLQHICAKVVDKSEYRTFAAQSLVQLLSKLPCGEYAMFIAWLYKYSRSSKIPHRVFTLDVVLALLELPEREVDNTLSLEHQKFLKHKFLVQEIMFDRCLDKAPTVRSKALSSFAHCLELTVTSASESILELLINSPTFSVIESHPGTLLRNSSAFSYQRQTSNRSEPSGEINIDSSGETVGSGERCVMAMLRRRIRDEKTNVRKSALQVLVSILKHCDVSGMKEDLWILQDQCRDPAVSVRKQALQSLTELLMAQPRCVQIQKAWLRGVVPVVMDCESTVQEKALEFLDQLLLQNIRHHSHFHSGDDSQVLAWALLTLLTTESQELSRYLNKAFHIWSKKEKFSPTFINNVISHTGTEHSAPAWMLLSKIAGSSPRLDYSRIIQSWEKISSQQNPNSNTLGHILCVIGHIAKHLPKSTRDKVTDAVKCKLNGFQWSLEVISSAVDALQRLCRASAETPAEEQELLTQVCGDVLSTCEHRLSNIVLKENGTGNMDEDLLVKYIFTLGDIAQLCPARVEKRIFLLIQSVLASSADADHSPSSQGSSEAPASQPPPQVRGSVMPSVIRAHAIITLGKLCLQHEDLAKKSIPALVRELEVCEDVAVRNNVIIVMCDLCIRYTIMVDKYIPNISMCLKDSDPFIRKQTLILLTNLLQEEFVKWKGSLFFRFVSTLIDSHPDIASFGEFCLAHLLLKRNPVMFFQHFIECIFHFNNYEKHEKYNKFPQSERALHR

SEQ ID NO: 18800 - protein, 503 aa, Homo sapiens
MWIQVRTIDGSKTCTIEDVSRKATIEELRERVWALFDVRPECQRLFYRGKQLENGYTLFDYDVGLNDIIQLLVRPDPDHLPGTSTQIEAKPCSNSPPKVKKAPRVGPSNQPSTSARARLIDPGFGIYKVNELVDARDVGLGAWFEAHIHSVTRASDGQSRGKTPLKNGSSCKRTNGNIKHKSKENTNKLDSVPSTSNSDCVAADEDVIYHIQYDEYPESGTLEMNVKDLRPRARTILKWNELNVGDVVMVNYNVESPGQRGFWFDAEITTLKTISRTKKELRVKIFLGGSEGTLNDCKIISVDEIFKIERPGAHPLSFADGKFLRRNDPECDLCGGDPEKKCHSCSCRVCGGKHEPNMQLLCDECNVAYHIYCLNPPLDKVPEEEYWYCPSCKTDSSEVVKAGERLKMSKKKAKMPSASTESRRDWGRGMACVGRTRECTIVPSNHYGPIPGIPVGSTWRFRVQVSEAGVHRPHVGGIHGRSNDGAYSLVLAGGFADEVLTEL

SEQ ID NO: 18801 - protein, 529 aa, Homo sapiens
MLKFRTVHGGLRLLGIRRTSTAPAASPNVRRLEYKPIKKVMVANRGEIAIRVFRACTELGIRTVAIYSEQDTGQMHRQKADEAYLIGRGLAPVQAYLHIPDIIKVAKENNVDAVHPGYGFLSERADFAQACQDAGVRFIGPSPEVVRKMGDKVEARAIAIAAGVPVVPGTDAPITSLHEAHEFSNTYGFPIIFKAAYGGGGRGMRVVHSYEELEENYTRAYSEALAAFGNGALFVEKFIEKPRHIEVQILGDQYGNILHLYERDCSIQRRHQKVVEIAPAAHLDPQLRTRLTSDSVKLAKQVGYENAGTVEFLVDRHGKHYFIEVNSRLQVEHTVTEEITDVDLVHAQIHVAEGRSLPDLGLRQENIRINGCAIQCRVTTEDPARSFQPDTGRIEVFRSGEGMGIRLDNASAFQGAVISPHYDSLLVKVIAHGKDHPTAATKMSRALAEFRVRGVKVRRHQAQPLAAALGRPCGQEARRPQAAVTAPTGPGSPTLVRVPPAARVLSSRLGGPSQTTPETSTEVSPTILL

SEQ ID NO: 18802 - protein, 90 aa, Homo sapiens
MQPILLLLAFLLLPRADAGEIIGGHEAKPHSRPYMAYLMIWDQKSLKRCGGFLIRDDFVLTAAHCWGSWRERPSGPELCSPSGYLATRPR

SEQ ID NO: 18803 - protein, 294 aa, Homo sapiens
MSWIKEGELSLWERFCANIIKAGPMPKHIAFIMDGNRRYAKKCQVERQEGHSQGFNKLAETLRWCLNLGILEVTVYAFSIENFKRSKSEVDGLMDLARQKFSRLMEEKCFLNVCFAYTSRHEISNAVREMAWGVEQGLLDPSDISESLLDKCLYTNRSPHPDILIRTSGEVRLSDFLLWQTSHSCLVFQPVLWPEYTFWNLFEAILQFQMNHSVLQKARDMYAEERKRQQLERDQATVTEQLLREGLQASGDAQLRRTRLHKLSARREERVQGFLQALELKRADWLARLGTASA

SEQ ID NO: 18804 - protein, 797 aa, Homo sapiens
MRLALLWALGLLGAGSPLPSWPLPNIGGTEEQQAESEKAPREPLEPQVLQDDLPISLKKVLQTSLPEPLRIKLELDGDSHILELLQNRELVPGRPTLVWYQPDGTRVVSEGHTLENCCYQGRVRGYAGSWVSICTCSGLRGLVVLTPERSYTLEQGPGDLQGPPIISRIQDLHLPGHTCALSWRESVHTQKPPEHPLGQRHIRRRRDVVTETKTVELVIVADHSEAQKYRDFQHLLNRTLEVALLLDTFFRPLNVRVALVGLEAWTQRDLVEISPNPAVTLENFLHWRRAHLLPRLPHDSAQLVTGTSFSGPTVGMAIQNSICSPDFSGGVNMDHSTSILGVASSIAHELGHSLGLDHDLPGNSCPCPGPAPAKTCIMEASTDFLPGLNFSNCSRRALEKALLDGMGSCLFERLPSLPPMAAFCGNMFVEPGEQCDCGFLDDCVDPCCDSLTCQLRPGAQCASDGPCCQNCQLRPSGWQCRPTRGDCDLPEFCPGDSSQCPPDVSLGDGEPCAGGQAVCMHGRCASYAQQCQSLWGPGAQPAAPLCLQTANTRGNAFGSCGRNPSGSYVSCTPRDAICGQLQCQTGRTQPLLGSIRDLLWETIDVNGTELNCSWVHLDLGSDVAQPLLTLPGTACGPGLVCIDHRCQRVDLLGAQECRSKCHGHGVCDSNRHCYCEEGWAPPDCTTQLKATSSLTTGLLLSLLVLLVLVMLGASYWYRARLHQRLCQLKGPTCQYRAAQSGPSERPGPPQRALLARGTKAELADRPNPPTRPLPADPVVRSPKVTVGGEKGTASPPT

SEQ ID NO: 18805 - protein, 2039 aa, Homo sapiens
MFNLMKKDKDKDGGRKEKKEKKEKKERMSAAELRSLEEMSLRRGFFNLNRSSKRESKTRLEISNPIPIKVASGSDLHLTDIDSDSNRGSVILDSGHLSTASSSDDLKGEEGSFRGSVLQRAAKFGSLAKQNSQMIVKRFSFSQRSRDESASETSTPSEHSAAPSPQVEVRTLEGQLVQHPGPGIPRPGHRSRAPELVTKKFPVDLRLPPVVPLPPPTLRELELQRRPTGDFGFSLRRTTMLDRGPEGQACRRVVHFAEPGAGTKDLALGLVPGDRLVEINGHNVESKSRDEIVEMIRQSGDSVRLKVQPIPELSELSRSWLRSGEGPRREPSDAKTEEQIAAEEAWNETEKVWLVHRDGFSLASQLKSEELNLPEGKVRVKLDHDGAILDVDEDDVEKANAPSCDRLEDLASLVYLNESSVLHTLRQRYGASLLHTYAGPSLLVLGPRGAPAVYSEKVMHMFKGCRREDMAPHIYAVAQTAYRAMLMSRQDQSIILLGSSGSGKTTSCQHLVQYLATIAGISGNKVFSVEKWQALYTLLEAFGNSPTIINGNATRFSQILSLDFDQAGQVASASIQTMLLEKLRVARRPASEATFNVFYYLLACGDGTLRTELHLNHLAENNVFGIVPLAKPEEKQKAAQQFSKLQAAMKVLGISPDEQKACWFILAAIYHLGAAGATKEAAEAGRKQFARHEWAQKAAYLLGCSLEELSSAIFKHQHKGGTLQRSTSFRQGPEESGLGDGTGPKLSALECLEGMAAGLYSELFTLLVSLVNRALKSSQHSLCSMMIVDTPGFQNPEQGGSARGASFEELCHNYTQDRLQRLFHERTFVQELERYKEENIELAFDDLEPPTDDSVAAVDQASHQSLVRSLARTDEARGLLWLLEEEALVPGASEDTLLERLFSYYGPQEGDKKGQSPLLHSSKPHHFLLGHSHGTNWVEYNVTGWLNYTKQNPATQNAPRLLQDSQKKIISNLFLGRAGSATVLSGSIAGLEGGSQLALRRATSMRKTFTTGMAAVKKKSLCIQMKLQVDALIDTIKKSKLHFVHCFLPVAEGWAGEPRSASSRRVSSSSELDLPSGDHCEAGLLQLDVPLLRTQLRGSRLLDAMRMYRQGYPDHMVFSEFRRRFDVLAPHLTKKHGRNYIVVDERRAVEELLECLDLEKSSCCMGLSRVFFRAGTLARLEEQRDEQTSRNLTLFQAACRGYLARQHFKKRKIQDLAIRCVQKNIKKNKGVKDWPWWKLFTTVRPLIEVQLSEEQIRNKDEEIQQLRSKLEKAEKERNELRLNSDRLESRISELTSELTDERNTGESASQLLDAETAERLRAEKEMKELQTQYDALKKQMEVMEMEVMEARLIRAAEINGEVDDDDAGGEWRLKYERAVREVDFTKKRLQQEFEDKLEVEQQNKRQLERRLGDLQADSEESQRALQQLKKKCQRLTAELQDTKLHLEGQQVRNHELEKKQRRFDSELSQAHEEAQREKLQREKLQREKDMLLAEAFSLKQQLEEKDMDIAGFTQKVVSLEAELQDISSQESKDEASLAKVKKQLRDLEAKVKDQEEELDEQAGTIQMLEQAKLRLEMEMERMRQTHSKEMESRDEEVEEARQSCQKKLKQMEVQLEEEYEDKQKVLREKRELEGKLATLSDQVNRRDFESEKRLRKDLKRTKALLADAQLMLDHLKNSAPSKREIAQLKNQLEESEFTCAAAVKARKAMEVEIEDLHLQIDDIAKAKTALEEQLSRLQREKNEIQNRLEEDQEDMNELMKKHKAAVAQASRDLAQINDLQAQLEEANKEKQELQEKLQALQSQVEFLEQSMVDKSLVSRQEAKIRELETRLEFERTQVKRLESLASRLKENMEKLTEERDQRIAAENREKEQNKRLQRQLRDTKEEMGELARKEAEASRKKHELEMDLESLEAANQSLQADLKLAFKRIGDLQAAIEDEMESDENEDLINSEGDSDVDSELEDRVDGVKSWLSKNKGPSKAASDDGSLKSSSPTSYWKSLAPDRSDDEHDPLDNTSRPRYSHSYLSDSDTEAKLTETNA

SEQ ID NO: 18806 - protein, 757 aa, Homo sapiens
MLSSVCVSSFRGRQGASKQQPAPPPQPPESPPPPPLPPQQQQPAQPGPAASPAGPPAPRGPGDRRAEPCPGLPAAAMGRHGGGGGDSGKIVINVGGVRHETYRSTLRTLPGTRLAGLTEPEAAARFDYDPGADEFFFDRHPGVFAYVLNYYRTGKLHCPADVCGPLFEEELGFWGIDETDVEACCWMTYRQHRDAEEALDSFEAPDPAGAANAANAAGAHDGGLDDEAGAGGGGLDGAGGELKRLCFQDAGGGAGGPPGGAGGAGGTWWRRWQPRVWALFEDPYSSRAARYVAFASLFFILISITTFCLETHEGFIHISNKTVTQASPIPGAPPENITNVEVETEPFLTYVEGVCVVWFTFEFLMRITFCPDKVEFLKSSLNIIDCVAILPFYLEVGLSGLSSKAAKDVLGFLRVVRFVRILRIFKLTRHFVGLRVLGHTLRASTNEFLLLIIFLALGVLIFATMIYYAERIGADPDDILGSNHTYFKNIPIGFWWAVVTMTTLGYGDMYPKTWSGMLVGALCALAGVLTIAMPVPVIVNNFGMYYSLAMAKQKLPKKKNKHIPRPPQPGSPNYCKPDPPPPPPPHPHHGSGGISPPPPITPPSMGVTVAGAYPAGPHTHPGLLRGGAGGLGIMGLPPLPAPGEPCPLAQEEVIEINRADPRPNGDPAAAALAHEDCPAIDQPAMSPEDKSPITPGSRGRYSRDRACFLLTDYAPSPDGSIRKATGAPPLPPQDWRKPGPPSFLPDLNANAAAWISP

SEQ ID NO: 18807 - protein, 311 aa, Homo sapiens
MADKVLKEKRKLFIRSMGEAPQAVQDNPAMPTSSGSEGNVKLCSLEEAQRIWKQKSAEIYPIMDKSSRTRLALIICNEEFDSIPRRTGAEVDITGMTMLLQNLGYSVDVKKNLTASDMTTELEAFAHRPEHKTSDSTFLVFMSHGIREGICGKKHSEQVPDILQLNAIFNMLNTKNCPSLKDKPKVIIIQACRGDSPGVVWFKDSVGVSGNLSLPTTEEFEDDAIKKAHIEKDFIAFCSSTPDNVSWRHPTMGSVFIGRLIEHMQEYACSCDVEEIFRKVRFSFEQPDGRAQMPTTERVTLTRCFYLFPGH

SEQ ID NO: 18808 - protein, 754 aa, Homo sapiens
SDLFSYCDIESTKKVVVNGRVLELFRAAQLPNDVVLQIMELCGATRLGYFGRSQFYIALKLVAVAQSGFPLRVESINTVKDLPLPRFVASKNEQESRHAASYSSDSENQGSYSGVIPPPPGRGQVKKGSVSHDTVQPRTSADAQEPASPVVSPQQSPPTSPHTWRKHSRHPSGGNSERPLAGPGPFWSPFGEAQSGSSAGDAVWSGHSPPPPQENWVSFADTPPTSTLLTMHPASVQDQTTVRTVASATTAIEIRRQSSSYDDPWKITDEQRQYYVNQFKTIQPDLNGFIPGSAAKEFFTKSKLPILELSHIWELSDFDKDGALTLDEFCAAFHLVVARKNGYDLPEKLPESLMPKLIDLEDSADVGDQPGEVGYSGSPAEAPPSKSPSMPSLNQTWPELNQSSEDTAIVHPVPIRMTPSKIHMQEMELKRTGSDHTNPTSPLLVKPSDLLEENKINSSVKFASGNTVDGYSSSDSFTSDPEQIGSNVTRQRSHSGTSPDNTAPPPPPPRPQPSHSRSSSLDMNRTFTVTTGQQQAGVVAHPPAVPPRPQPSQAPGPAVHRPVDADGLITHTSTSPQQIPEQPNFADFSQFEVFAASNVNDEQDDEAEKHPEVLPAEKASDPASSLRVAKTDSKTEEKTAASAPANVSKGTTPLAPPPKPVRRRLKSEDELRPEVDEHTQKTGVLAAVLASQPSIPRSVGKDKKAIQASIRRNKETNTVLARLNSELQQQLKDVLEERISLEVQLEQLRPFSHL

SEQ ID NO: 18809 - protein, 301 aa, Homo sapiens
MEKVKRENATVMDKTRALIDSVIPKGAQACQICITYICEEDSYLAGTLGLSADQTSGNYLNMQDSQGVLSSFPAPQAVQDNPAMPTSSGSEGNVKLCSLEEAQRIWKQKSAEIYPIMDKSSRTRLALIICNEEFDSIPRRTGAEVDITGMTMLLQNLGYSVDVKKNLTASDMTTELEAFAHRPEHKTSDSTFLVFMSHGIREGICGKKHSEQVPDILQLNAIFNMLNTKNCPSLKDKPKVIIIQACRGDSPGVVWFKDSVGVSGNLSLPTTEEFEDDAIKKAHIEKDFIAFCSSTPGKSQS

SEQ ID NO: 18810 - protein, 517 aa, Homo sapiens
MGLWGKKGTVAPHDQSPRRRPKKGLIKKKMVKREKQKRNMEELKKEVVMDDHKLTLEELSTKYSVDLTKGHSHQRAKEILTRGGPNTVTPPPTTPEWVKFCKQLFGGFSLLLWTGAILCFVAYSIQIYFNEEPTKDNLYLSIVLSVVVIVTGCFSYYQEAKSSKIMESFKNMVPQQALVIRGGEKMQINVQEVVLGDLVEIKGGDRVPADLRLISAQGCKVDNSSLTGESEPQSRSPDFTHENPLETRNICFFSTNCVEGTARGIVIATGDSTVMGRIASLTSGLAVGQTPIAAEIEHFIHLITVVAVFLGVTFFALSLLLGYGWLEAIIFLIGIIVANVPEGLLATVTVCLTLTAKRMARKNCLVKNLEAVETLGSTSTICSDKTGTLTQNRMTVAHMWFDMTVYEADTTEEQTGKTFTKSSDTWFMLARIAGLCNRADFKANQEILPIAKRATTGDASESALLKFIEQSYSSVAEMREKNPKVAEIPFNSTNKYQVQNPQRCPSTFGRTAPRPTY

SEQ ID NO: 18811 - protein, 531 aa, Homo sapiens
MDRVLLRWISLFWLTAMVEGLQVTVPDKKKVAMLFQPTVLRCHFSTSSHQPAVVQWKFKSYCQDRMGESLGMSSTRAQSLSKRNLEWDPYLDCLDSRRTVRVVASKQGSTVTLGDFYRGREITIVHDADLQIGKLMWGDSGLYYCIITTPDDLEGKNEDSVELLVLGRTGLLADLLPSFAVEIMPVRKGYRIQADKERDSMKVLYYVEKELAQFDPARRMRGRYNNTISELSSLHEEDSNFRQSFHQMRSKQFPVSGDLESNPDYWSGVMGGSSGASRGPSAMEYNKEDRESFRHSQPRSKSEMLSRKNFATGVPAVSMDELAAFADSYGQRPRRADGNSHEARGGSRFERSESRAHSGFYQDDSLEEYYGQRSRSREPLTDADRGWAFSPARRRPAEDAHLPRLVSRTPGTAPKYDHSYLGSARERQARPEGASRGGSLETPSKRSAQLGPRSASYYAWSPPGTYKAGSSQDDQEDASDDALPPYSELELTRGPSYRGRDLPYHSNSEKKRKKEPAKKTNDFPTRMSLVV

SEQ ID NO: 18812 - protein, 567 aa, Homo sapiens
MERDSHGNASPARTPSAGASPAQASPAGTPPGRASPAQASPAQASPAGTPPGRASPAQASPAGTPPGRASPGRASPAQASPAQASPARASPALASLSRSSSGRSSSARSASVTTSPTRVYLVRATPVGAVPIRSSPARSAPATRATRESPGTSLPKFTWREGQKQLPLIGCVLLLIALVVSLIILFQFWQGHTGIRYKEQRESCPKHAVRCDGVVDCKLKSDELGCVRFDWDKSLLKIYSGSSHQWLPICSSNWNDSYSEKTCQQLGFESAHRTTEVAHRDFANSFSILRYNSTIQESLHRSECPSQRYISLQCSHCGLRAMTGRIVGGALASDSKWPWQVSLHFGTTHICGGTLIDAQWVLTAAHCFFVTREKVLEGWKVYAGTSNLHQLPEAASIAEIIINSNYTDEEDDYDIALMRLSKPLTLSAHIHPACLPMHGQTFSLNETCWITGFGKTRETDDKTSPFLREVQVNLIDFKKCNDYLVYDSYLTPRMMCAGDLRGGRDSCQGDSGGPLVCEQNNRWYLAGVTSWGTGCGQRNKPGVYTKVTEVLPWIYSKMESEVRFRKS

SEQ ID NO: 18813 - protein, 87 aa, Homo sapiens
MTNTKGKRRGTRYMFSRPFRKHGVVPLATYMRIYKKGDIVDIKGMGTVQKGMPHKCYHGKTGRVYNVTQHAVGIVVNKQGQDSCQEN

SEQ ID NO: 18814 - protein, 387 aa, Homo sapiens
MTVKTEAAKGTLTYSRMRGMVAILIAFMKQRRMGLNDFIQKIANNSYACKHPEVQSILKISQPQEPELMNANPSPPPSPSQQINLGPSSNPHAKPSDFHFLKVIGKGSFGKVLLARHKAEEVFYAVKVLQKKAILKKKELFYHLQRERCFLEPRARFYAAEIASALGYLHSLNIVYRDLKPENILLDSQGHIVLTDFGLCKENIEHNSTTSTFCGTPEYLAPEVLHKQPYDRTVDWWCLGAVLYEMLYGLPPFYSRNTAEMYDNILNKPLQLKPNITNSARHLLEGLLQKDRTKRLGAKDDFMEIKSHVFFSLINWDDLINKKITPPFNPNVSGPNDLRHFDPEFTEEPVPNSIGKSPDSVLVTASVKEAAEAFLGFSYAPPTDSFL

SEQ ID NO: 18815 - protein, 484 aa, Homo sapiens
MAEGERTECAEPPRDEPPADGALKRAEELKTQANDYFKAKDYENAIKFYSQAIELNPSNAIYYGNRSLAYLRTECYGYALGDATRAIELDKKYIKGYYRRAASNMALGKFRAALRDYETVVKVKPHDKDAKMKYQECNKIVKQKAFERAIAGDEHKRSVVDSLDIESMTIEDEYSGPKLEDGKVTISFMKELMQWYKDQKKLHRKCAYQILVQVKEVLSKLSTLVETTLKETEKITVCGDTHGQFYDLLNIFELNGLPSETNPYIFNGDFVDRGSFSVEVILTLFGFKLLYPDHFHLLRGNHETDNMNQIYGFEGEVKAKYTAQMYELFSEVFEWLPLAQCINGKVLIMHGGLFSEDGVTLDDIRKIERNRQPPDSGPMCDLLWSDPQPQNGRSISKRGVSCQFGPDVTKAFLEENNLDYIIRSHEVKAEGYEVAHGGRCVTVFSAPNYCDQMGNKASYIHLQGSDLRPQFHQFTAVGRPSSGS

SEQ ID NO: 18816 - protein, 243 aa, Homo sapiens
MSFPPHLNRPPMGIPALPPGIPPPQFPGFPPPVPPGTPMIPVPMSIMAPAPTVLVPTVSMVGKHLGARKDHPGLKAKENDENCGPTTTVFVGNISEKASDMLIRQLLAKCGLVLSWKRVQGASGKLQAFGFCEYKEPESTLRALRLLHDLQIGEKKLLVKVDAKTKAQLDEWKAKKKASNGNARPETVTNDDEEALDEETKRRDQMIKGAIEVLIREYSSELNAPSQESDSHPRKKKKEKKED

SEQ ID NO: 18817 - protein, 1843 aa, Homo sapiens
MWLVTFLLLLDSLHKARPEDVGTSLYFVNDSLQQLPCTASGYPIPAIRWLKDGRPLPADSRWTKRITGLTISDLRTEDSGTYICEVTNTFGSAEATGILMVIDPLHVTLTPKKLKTGIGSTVILSCALTGSPEFTIRWYRNTELVLPDEAISIRGLSNETLLITSAQKSHSGAYQCFATRKAQTAQDFAIIALEDGTPRIVSSFSEKVVNPGEQFSLMCAAKGAPPPTVTWALDDEPIVRDGSHRTNQYTMSDGTTISHMNVTGPQIRDGGVYRCTARNLVGSAEYQARINVRGPPSIRAMRNITAVAGRDTLINCRVIGYPYYSIKWYKDALLLPDNHRQVVFENGTLKLTDVQKGMDEGEYLCSVLIQPQLSISQSVHVAVKVPPLIQPFEFPPASIGQLLYIPCVVSSGDMPIRITWRKDGQVIISGSGVTIESKEFMSSLQISSVSLKHNGNYTCIASNAAATVSRERQLIVRVPPRFVVQPNNQDGIYGKAGVLNCSVDGYPPPKVMWKHAKGSGNPQQYHPVPLTGRIQILPNSSLLIRHVLEEDIGYYLCQASNGVGTDISKSMFLTVKIPAMITSHPNTTIAIKGHAKELNCTARGERPIIIRWEKGDTVIDPDRVMRYAIATKDNGDEVVSTLKLKPADRGDSVFFSCHAINSYGEDRGLIQLTVQEPPDPPELEIREVKARSMNLRWTQRFDGNSIITGFDIEYKNKSDSWDFKQSTRNISPTINQANIVDLHPASVYSIRMYSFNKIGRSEPSKELTISTEEAAPDGPPMDVTLQPVTSQSIQVTWKAPKKELQNGVIRGYQIGYRENSPGSNGQYSIVEMKATGDSEVYTLDNLKKFAQYGVVVQAFNRAGTGPSSSEINATTLEDVPSQPPENVRALSITSDVAVISWSEPPRSTLNGVLKGYRVIFWSLYVDGEWGEMQNITTTRERVELRGMEKFTNYSVQVLAYTQAGDGVRSSVLYIQTKEDVPGPPAGIKAVPSSASSVVVSWLPPTKPNGVIRKYTIFCSSPGSGQPAPSEYETSPEQLFYRIAHLNRGQQYLLWVAAVTSAGRGNSSEKVTIEPAGKAPAKIISFGGTVTTPWMKDVRLPCNSVGDPAPAVKWTKDSEDSAIPVSMDGHRLIHTNGTLLLRAVKAEDSGYYTCTATNTGGFDTIIVNLLVQVPPDQPRLTVSKTSASSITLTWIPGDNGGSSIRGFVLQYSVDNSEEWKDVFISSSERSFKLDSLKCGTWYKVKLAAKNSVGSGRISEIIEAKTHGREPSFSKDQHLFTHINSTHARLNLQGWNNGGCPITAIVLEYRPKGTWAWQGLRANSSGEVFLTELREATWYELRMRACNSAGCGNETAQFATLDYDGSTIPPIKSAQGEGDDVKKLFTIGCPVILATLGVALLFIVRKKRKEKRLKRLRDAKSLAEMLISKNNRSFDTPVKGPPQGPRLHIDIPRVQLLIEDKEGIKQLGDDKATIPVTDAEFSQAVNPQSFCTGVSLHHPTLIQSTGPLIDMSDIRPGTNPVSRKNVKSAHSTRNRYSSQWTLTKCQASTPARTLTSDWRTVGSQHGVTVTESDSYSASLSQDTDKGRNSMVSTESASSTYEELARAYEHAKLEEQLQHAKFEITECFISDSSSDQMTTGTNENADSMTSMSTPSEPGICRFTASPPKPQDADRGKNVAVPIPHRANKSDYCNLPLYAKSEAFFRKADGREPCPVVPPREASIRNLARTYHTQARHLTLDPASKSLGLPHPGAPAAASTATLPQRTLAMPAPPAGTAPPAPGPTPAEPPTAPSAAPPAPSTEPPRAGGPHTKMGGSRDSLLEMSTSGVGRSQKQGAGAYSKSYTLV

SEQ ID NO: 18818 - protein, 332 aa, Homo sapiens
MCPAGWKLLAMLALVLVVMVWYSISREDRYIELFYFPIPEKKEPCLQGEAESKASKLFGNYSRDQPIFLRLEDYFWVKTPSAYELPYGTKGSEDLLLRVLAITSSSIPKNIQSLRCRRCVVVGNGHRLRNSSLGDAINKYDVVIRLNNAPVAGYEGDVGSKTTMRLFYPESAHFDPKVENNPDTLLVLVAFKAMDFHWIETILSDKKRVRKGFWKQPPLIWDVNPKQIRILNPFFMEIAADKLLSLPMQQPRKIKQKPTTGLLAITLALHLCDLVHIAGFGYPDAYNKKQTIHYYEQITLKSMAGSGHNVSQEALAIKRMLEMGAIKNLTSF

SEQ ID NO: 18819 - protein, 94 aa, Homo sapiens
MEEGARHRNNTEKKHPGGGESDASPEAGSGGGGVALKKEIGLVSACGIIVGNIIGSGIFVSPKGVLENAGSVGLALIVWIVTGFITVVGALCYA

SEQ ID NO: 18820 - protein, 402 aa, Homo sapiens
MPRYGASLRQSCPRSGREQGQDGTAGAPGLLWMGLVLALALALALALALSDSRVLWAPAEAHPLSPQGHPARLHRIVPRLRDVFGWGNLTCPICKGLFTAINLGLKKEPNVARVGSVAIKLCNLLKIAPPAVCQSIVHLFEDDMVEVWRRSVLSPSEACGLLLGSTCGHWDIFSSWNISLPTVPKPPPKPPSPPAPGAPVSRILFLTDLHWDHDYLEGTDPDCADPLCCRRGSGLPPASRPGAGYWGEYSKCDLPLRTLESLLSGLGPAGPFDMVYWTGDIPAHDVWHQTRQDQLRALTTVTALVRKFLGPVPVYPAVGNHESTPVNSFPPPFIEGNHSSRWLYEAMAKAWEPWLPAEALRTLRYLSSVETQEGKRKNWGVLCSFPIPRSPPHLSQYEFLFP

SEQ ID NO: 18821 - protein, 135 aa, Homo sapiens
MASGVQVADEVCRIFYDMKVRKCSTPEEIKKRKKAVIFCLSADKKCIIVEEGKEILVGDVGVTITDPFKHFVGMLPEKDCRYALYDASFETKESRKEELMFFLWAPELAPLKSKMIYASSKDAIKKKFQGKCTHS

SEQ ID NO: 18822 - protein, 797 aa, Homo sapiens
MDCSAPKEMNKLPANSPEAAAAQGHPDGPCAPRTSPEQELPAAAAPPPPRVPRSASTGAQTFQSADARACEAERPGVGSCKLSSPRAQAASAALRDLREAQGAQASPPPGSSGPGNALHCKIPFLRGPEGDANVSVGKGTLERNNTPVVGWVNMSQSTVVLATDGITSVLPGSVATVATQEDEQGDENKARGNWSSKLDFILSMVGYAVGLGNVWRFPYLAFQNGGGAFLIPYLMMLALAGLPIFFLEVSLGQFASQGPVSVWKAIPALQGCGIAMLIISVLIAIYYNVIICYTLFYLFASFVSVLPWGSCNNPWNTPECKDKTKLLLDSCVISDHPKIQIKNSTFCMTAYPNVTMVNFTSQANKTFVSGSEEYFKYFVLKISAGIEYPGEIRWPLALCLFLAWVIVYASLAKGIKTSGKVVYFTATFPYVVLVILLIRGVTLPGAGAGIWYFITPKWEKLTDATVWKDAATQIFFSLSAAWGGLITLSSYNKFHNNCYRDTLIVTCTNSATSIFAGFVIFSVIGFMANERKVNIENVADQGPGIAFVVYPEALTRLPLSPFWAIIFFLMLLTLGLDTMFATIETIVTSISDEFPKYLRTHKPVFTLGCCICFFIMGFPMITQGGIYMFQLVDTYAASYALVIIAIFELVGISYVYGLQRFCEDIEMMIGFQPNIFWKVCWAFVTPTILTFILCFSFYQWEPMTYGSYRYPNWSMVLGWLMLACSVIWIPIMFVIKMHLAPGRFIERLKLVCSPQPDWGPFLAQHRGERYKNMIDPLGTSSLGLKLPVKDLELGTQC

SEQ ID NO: 18823 - protein, 84 aa, Homo sapiens
MRPKTGQVGCETPEELGPGPRQRWPLLLLGLAMVAHGLLRPMVAPQSGDPDPGASVGSSRSSLRSLWGRSAQGQPHCHSVPALL

SEQ ID NO: 18824 - protein, 1159 aa, Homo sapiens
PGSPGDAEDRRELGLHRGEVNFGGSGKKRGKFVRVPSGVAPSVLFDLLLAEWHLPAPNLVVSLVGEEQPFAMKSWLRDVLRKGLVKAAQSTGAWILTSALRVGLARHVGQAVRDHSLASTSTKVRVVAVGMASLGRVLHRRILEEAQVHEDFPVHYPEDDGGSQGPLCSLDSNLSHFILVEPGPPGKGDGLTELRLRLEKHISEQRAGYGGTGSIEIPVLCLLVNGDPNTLERISRAVEQAAPWLILVGSGGIADVLAALVNQPHLLVPKVAEKQFKEKFPSKHFSWEDIVRWTKLLQNITSHQHLLTVYDFEQEGSEELDTVILKALVKACKSHSQEPQDYLDELKLAVAWDRVDIAKSEIFNGDVEWKSCDLEEVMVDALVSNKPEFVRLFVDNGADVADFLTYGRLQELYRSVSRKSLLFDLLQRKQEEARLTLAGLGTQQAREPPAGPPAFSLHEVSRVLKDFLQDACRGFYQDGRPGDRRRAEKGPAKRPTGQKWLLDLNQKSENPWRDLFLWAVLQNRHEMATYFWAMGQEGVAAALAACKILKEMSHLETEAEAARATREAKYERLALDLFSECYSNSEARAFALLVRRNRCWSKTTCLHLATEADAKAFFAHDGVQAFLTRIWWGDMAAGTPILRLLGAFLCPALVYTNLITFSEEAPLRTGLEDLQDLDSLDTEKSPLYGLQSRVEELVEAPRAQGDRGPRAVFLLTRWRKFWGAPVTVFLGNVVMYFAFLFLFTYVLLVDFRPPPQGPSGPEVTLYFWVFTLVLEEIRQGFFTDEDTHLVKKFTLYVGDNWNKCDMVAIFLFIVGVTCRMLPSAFEAGRTVLAMDFMVFTLRLIHIFAIHKQLGPKIIVVERMMKDVFFFLFFLSVWLVAYGVTTQALLHPHDGRLEWIFRRVLYRPYLQIFGQIPLDEIDEARVNCSTHPLLLEDSPSCPSLYANWLVILLLVTFLLVTNVLLMNLLIAMFSYTFQVVQGNADMFWKFQRYNLIVEYHERPALAPPFILLSHLSLTLRRVFKKEAEHKREHLERDLPDPLDQKVVTWETVQKENFLSKMEKRRRDSEGEVLRKTAHRVDFIAKYLGGLREQEKRIKCLESQINYCSVLVSSVADVLAQGGGPRSSQHCGEGSQLVAADHRGGLDGWEQPGAGQPPSDT

SEQ ID NO: 18825 - protein, 252 aa, Homo sapiens
MDLHKQWENTETNWHKEKMELLDQFDNERKEWESQWKIMQKKIEEASTLVLLSTELSLCREVKLWRKININESAKIIDLYHEKTIPEKVIESSPNYPDLGQSEFIRTNHKDGLRKENKREQSLVSGGNQMCKEQKATKKSKVGFLDPLATDNQKECEAWPDLRTSEEDSKSCSGALSTALEELAKVSEELCSFQEEIRKRSNHRRMKSDSFLQEMPNVTNIPHGDPMINNDQCILPISLEKEKQKNRKNLSC

SEQ ID NO: 18826 - protein, 519 aa, Homo sapiens
MAESLYEIRFRENVEKRILCHMQLSSAQVEQLRQAIEELYYFEFVVDDLPIRGFVGYMEESGFLPHSHKIGLWTHLDFHLEFHGDRIIFANVSVRDVKPHSLDGLRPDEFLGLTHTYSVRWSETSVERRSDRRRGDDGGFFPRTLEIHWLSIINSMVLVFLLVGFVAVILMRVLRNDLARYNLDEETTSAGSGDDFDQGDNGWKIIHTDVFRFPPYRGLLCAVLGVGAQFLALGTGIIVMALLGMFNVHRHGAINSAAILLYALTCCISGYVSSHFYRQIGGERWVWNIILTTSLFSVPFFLTWSVVNSVHWANGSTQALPATTILLLLTVWLLVGFPLTVIGGIFGKNNASPFDAPCRTKNIAREIPPQPWYKSTVIHMTVGGFLPFSAISVELYYIFATVWGREQYTLYGILFFVFAILLSVGACISIALTYFQLSGEDYRWWWRSVLSVGSTGLFIFLYSVFYYARRSNMSGAVQTVEFFGYSLLTGYVFFLMLGTISFFSSLKFIRYIYVNLKMD

SEQ ID NO: 18827 - protein, 197 aa, Homo sapiens
WFGSAVPTHSPSLSDSLGNPHLHTDCHIGPRGFLRCLTLCALSSFMFGWHVHEKAILLAILPMSLLSVGKAGDASIFLILTTTGHYSLFPLLFTAPELPIKILLMLLFTIYSISSLKTLFRKEKPLFNWMETFYLLGLGPLEVCCEFVFPFTSWKVKYPFIPLLLTSVYCAVGITYAWFKLYVSVLIDSAIGKTKKQ

SEQ ID NO: 18828 - protein, 192 aa, Homo sapiens
MEYHPDLENLDEDGYTQLHFDSQSNTRIAVVSEKGSCAASPPWRLIAVILGILCLVILVIAVVLGTMAIWRSNSGSNTLENGYFLSRNKENHSQPTQSSLEDSVTPTKAVKTTGVLSSPCPPNWIIYEKSCYLFSMSLNSWDGSKRQCWQLGSNLLKIDSSNELSLTLLPKLECSEAATSQAQVILPPQLPE

SEQ ID NO: 18829 - protein, 215 aa, Homo sapiens
RDRIKLLFFDILVFLSVFLLFLLFLVDIMANNTTSLGSPWPENFWEDLIMSFTVSMAIGLVLGGFIWAVFICLSRRRRASAPISQWSSSRRSRSSYTHGLNRTGFYRHSGCERRSNLSLASLTFQRQASLEQANSFPRKSSFRASTFHPFLQCPPLPVETESQLVTLPSSNISPTISTSHSLSRPDYWSSNSLRVGLSTPPPPAYESIIKAFPDS

SEQ ID NO: 18830 - protein, 512 aa, Homo sapiens
MEGVSSHRTLSYSRWSYDSVLDDEGRNLRQQKLDRQRALLEQKQKKKRQEPLMVQANADGRPRSRRARQSEEQAPLVESYLSSSGSTSYQVQEADSLASVQLGATRPTAPASAKRTKAAATAGGQGGAARKEKKGKHKGTSGPAALAEDKSEAQGPVQILTVGQSDHAQDAGETAAGGGERPSGQDLRATMQRKGISSSMSFDEDEEDEEENSSSSSQLNSNTRPSSATSRKSVREAASAPSPTAPEQPVDVEVQDLEEFALRPAPQGITIKCRITRDKKGMDRGMYPTYFLHLDREDGKKVFLLAGRKRKKSKTSNYLISVDPTDLSRGGDSYIGKLRSNLMGTKFTVYDNGVNPQKASSSTLESGTLRQELAAVCYETNVLGFKGPRKMSVIVPGMNMVHERVSIRPRNEHETLLARWQNKNTESIIELQNKTPVWNDDTQSYVLNFHGRVTQASVKNFQIIHGNDPDYIVMQFGRVAEDVFTMDYNYPLCALQAFAIALSSFDSKLACE

SEQ ID NO: 18831 - protein, 614 aa, Homo sapiens
MTFLISYWGEQIGQKIRKITDCFHCHVFPFLQQEEARLGALQQLQQQSQELQEVLGETERFLSQVLGRVLQLLPPGQVQVHKMKAVYLALNQCSVSTTHKCLIAEAWCSVRDLPALQEALRDSSMEEGVSAVAHRIPCRDMPPTLIRTNRFTASFQGIVDAYGVGRYQEVNPAPYTIITFPFLFAVMFGDVGHGLLMFLFALAMVLAENRPAVKAAQNEIWQTFFRGRYLLLLMGLFSIYTGFIYNECFSRATSIFPSGWSVAAMANQSGWSDAFLAQHTMLTLDPNVTGVFLGPYPFGIDPIWSLAANHLSFLNSFKMKMSVILGVVHMAFGVVLGVFNHVHFGQRHRLLLETLPELTFLLGLFGYLVFLVIYKWLCVWAARAASAPSILIHFINMFLFSHSPSNRLLYPRQEVVQATLVVLALAMVPILLLGTPLHLLHRHRRRLRRRPADRQEENKAGLLDLPDASVNGWSSDEEKAGGLDDEEEAELVPSEVLMHQAIHTIEFCLGCVSNTASYLRLWALSLAHAQLSEVLWAMVMRIGLGLGREVGVAAVVLVPIFAAFAVMTVAILLVMEGLSAFLHALRLHWVEFQNKFYSGTGYKLSPFTFAATDD

SEQ ID NO: 18832 - protein, 1065 aa, Homo sapiens
MFNSMTPPPISSYGEPCCLRPLPSQGAPSVGTEVKLTKKRALSISPLSDASLDLQTVIRTSPSSLVAFINSRCTSPGGSYGHLSIGTMSPSLGFPAQMNHQKGPSPSFGVQPCGPHDSARGGMIPHPQSRGPFPTCQLKSELDMLVGKCREEPLEGDMSSPNSTGIQDPLLGMLDGREDLEREEKREPESVYETDCRWDGCSQEFDSQEQLVHHINSEHIHGERKEFVCHWGGCSRELRPFKAQYMLVVHMRRHTGEKPHKCTFEGCRKSYSRLENLKTHLRSHTGEKPYMCEHEGCSKAFSNASDRAKHQNRTHSNEKPYVCKLPGCTKRYTDPSSLRKHVKTVHGPDAHVTKRHRGDGPLPRAPSISTVEPKREREGGPIREESRLTVPEGAMKPQPSPGAQSSCSSDHSPAGSAANTDSGVEMTGNAGGSTEDLSSLDEGPCIAGTGLSTLRRLENLRLDQLHQLRPIGTRGLKLPSLSHTGTTVSRRVGPPVSLERRSSSSSSISSAYTVSRRSSLASPFPPGSPPENGASSLPGLMPAQHYLLRARYASARGGGTSPTAASSLDRIGGLPMPPWRSRAEYPGYNPNAGVTRRASDPAQAADRPAPARVQRFKSLGCVHTPPTVAGGGQNFDPYLPTSVYSPQPPSITENAAMDARGLQEEPEVGTSMVGSGLNPYMDFPPTDTLGYGGPEGAAAEPYGARGPGSLPLGPGPPTNYGPNPCPQQASYPDPTQETWGEFPSHSGLYPGPKALGGTYSQCPRLEHYGQVQVKPEQGCPVGSDSTGLAPCLNAHPSEGPPHPQPLFSHYPQPSPPQYLQSGPYTQPPPDYLPSEPRPCLDFDSPTHSTGQLKAQLVCNYVQSQQELLWEGGGREDAPAQEPSYQSPKFLGGSQVSPSRAKAPVNTYGPGFGPNLPNHKSGSYPTPSPCHENFVVGANRASHRAAAPPRLLPPLPTCYGPLKVGGTNPSCGHPEVGRLGGGPALYPPPEGQVCNPLDSLDLDNTQLDFVAILDEPQGLSPPPSHDQRGSSGHTPPPSGPPNMAVGNMSVLLRSLPGETEFLNSSA

SEQ ID NO: 18833 - protein, 176 aa, Homo sapiens
MCSKPEDPVEYLESCLQKVKELGGCDKVKWDTFVSQEKKTLPPLNGGQSRRSFLRNVMPENSNFPYRRYDRLPPIHQFSIESDTDLSETAELIEEYEVFDPTRPRPKIILVIGGPGSGKGTQSLKIAERYGFQYISVGELLRKKIHSTSSNRKWSLIAKIITTGELAPQETTITEI

SEQ ID NO: 18834 - protein, 218 aa, Homo sapiens
MNATGGDDPRNAAGGCEREPQSLTRVDLSSSVLPGDSVGLAVILHTDSRKDSPPAGSPAGRSIYNSFYVYCKGPCQRVQPGKLRVQCSTCRQATLTLTQGPSCWDDVLIPNRMSGECQSPHCPGTSAEFFFKCGAHPTSDKETSVALHLIATNSRNITCITCTDVRSPVLVFQCNSRHVICLDCFHLYCVTRLNDRQFVHDPQLGYSLPCVVCLLPGM

SEQ ID NO: 18835 - protein, 2459 aa, Homo sapiens
MSAVGLVLLVLALRLRATTVKPEEGSFCSNSQVAFRDACYEFVPLGRTFRDAQSWCEGQGGHLVFIQDEGTQWFLQKHISQDREWWIGLTWNLARNGTTEGPGTWLDTSNVTYSNWHGGQAAAAPDTCGHIGRGPSSEWVTSDCAQTFAFMCEFRVGQSLACEGLNATVHCGLGQVIQVQDAVYGRQNPHFCTQDAGRPSDLEQGCSWANVKEEVAGQCQELQSCQVAADETYFGNLCPTQGSYLWVQYQCREALQLMVSSESFIFDNVTISLTWLLSPYIGNLSCIISTGDSHTFDPYNPPSVSSNVTHQFTSPGEFTVFAECTTSEWHVTAQRQVTVRDKMETLSVTACSGLSQSGAGPLCQAVFGDPLWIQVELDGGTGVTYTVLLGDITLAESTTQKGSLPYNLILDRETQKLMGPGRHRLEIQATGNTTTSTISRNITVHLVELLSGLQASWASDHLELGQDLLITISLAQGTPEELTFEVAGLNATFSHEQVSFGEPFGICRLAVPVEGTFLVTMLVRNAFSNLSLEIGNITITAPSGLQEPSGMNAEGKSKDKGDMEVYIQPGPYVDPFTTVTLGWPDNDKELRFQWSCGSCWALWSSCVERQLLRTDQRELVVPASCLPPPDSAVTLRLAVLRGQELENRAEQCLYVSAPWELRPRVSCERNCRPVNASKDILLRVTMGEDSPVAMFSWYLDNTPTEQAEPLLDACRLRGFWPRSLTLLQSNTSTLLLNSSFLQSRGEVIRIRATALTRHAYGEDTYVISTVPPREVPACTIAPEEGTVLTSFAIFCNASTALGPLEFCFCLESGSCLHCGPEPALPSVYLPLGEENNDFVLTVVISATNRAGDTQQTQAMAKVALGDTCVEDVAFQAAVSEKIPTALQGEGGPEQLLQLAKAVSSMLNQEHESQGSGQSLSIDVRQKVREHVLGSLSAVTTGLEDVQRVQELAEVLREVTCRSKELTPSAQWEASLALQHASEALLTVSAKARPEDQRRQAATRDLFQAVGSVLEASLSNRPEEPAEASSSQIATVLRLLRVMEHVQTTLLLGKLPGGLPAMLATPSISVYTNRIQPWSWQGSSLRPDAADSATFMLPAASSLSSLEGGQEPVDIKIMSFPKSPFPARSHFDVSGTVGGLRVTSPSGQLIPVKNLSENIEILLPRHSQRHSQPTVLNLTSPEALWVNVTSGEATLGIQLHWRPDIALTLSLGYGYHPNKSSYDAQTHLVPMVAPDELPTWILSPQDLRFGEGVYYLTVVPESDLEPAPGRDLTVGITTFLSHCVFWDEVQETWDDSGCQVGPRTSPYQTHCLCNHLTFFGSTFLVMSNAINIHQTAELFATFEDNPVVVTTVGCLCVVYVLVVIWARRKDAQDQAKVKVTVLEDNDPFAQYHYLVTVYTGHRRGAATSSKVTVTLYGLDGEREPHHLADPDTPVFERGAVDAFLLSTLFPLGELRSLRLWHDNSGDRPSWYVSRVLVYDLVMDRKWYFLCNSWLSINVGDCVLDKVFPVATEQDRKQFSHLFFMKTSAGFQDGHIWYSIFSRCARSSFTRVQRVSCCFSLLLCTMLTSIMFWGVPKDPAEQKMDLGKIEFTWQEVMIGLESSILMFPINLLIVQIFQNTRPRVAKEQNTGKWDRGSPNLTPSPQPMEDGLLTPEAVTKDVSRIVSSLFKALKVPSPALGWDSVNLMDINSLLALVEDVIYPQNTSGQVFWEEAKKREDPVTLTLGSSEMKEKSQCPKPKAARSGPWKDSAYRQCLYLQLEHVEQELRLVGPRGFSQPHSHAQALRQLQTLKGGLGVQPGTWAPAHASALQVSKPPQGLPWWCILVGWLLVAATSGVAAFFTMLYGLHYGRASSLRWLISMAVSFVESMFVTQPLKVLGFAAFFALVLKRVDDEEDTVAPLPGHLLGPDPYALFRARRNSSRDVYQPPLTAAIEKMKTTHLKEQKAFALIREILAYLGFLWMLLLVAYGQRDPSAYHLNRHLQHSFTRGFSGVLGFREFFKWANTTLVSNLYGHPPGFITDGNSKLVGSAQIRQVRVQESSCPLAQQPQAYLNGCRAPYSLDAEDMADYGEGWNATTLSNGSTRARTNVKGIPSGANSLCTGEEATWSPWGLIAKARQEFSAISLTTPGWTPUPELCLWSPLSTTPTSTCSALSRURURPALWAPFLRTRPCRASACTPSPTAGTPSWURQSSSTSSSSSTTWWCRASAUVKRRGAISAASGTFWSWPSSWPAGAPWRCLURGLSWPKGTSSAAGTTGRKASASVRQQQPMPPLATSLPSWYSCPQUSFGICSGUIPKUTUSRQPYAVPGATFQALULSSLPCSWLTPSRQTUYLVGNSVPTKPSLMRRRRWSAFSWESSTTRRSWTIAQCLAPSSLDPALFLUHLWCUTCLSLSSWWPSVRSKNTISCRRKGRSUICCUUKYSVSWALSLRERSLEAAGSSLGLCPRLATLDQHKLCPRT

SEQ ID NO: 18836 - protein, 581 aa, Homo sapiens
MARRPRHSIYSSDEDDEDFEMCDHDYDGLLPKSGKRHLGKTRWTREEDEKLKKLVEQNGTDDWKVIANYLPNRTDVQCQHRWQKVLNPELIKGPWTKEEDQRVIELVQKYGPKRWSVIAKHLKGRIGKQCRERWHNHLNPEVKKTSWTEEEDRIIYQAHKRLGNRWAEIAKLLPGRTDNAIKNHWNSTMRRKVEQEGYLQESSKASQPAVATSFQKNSHLMGFAQAPPTAQLPATGQPTVNNDYSYYHISEAQNVSSHVPYPVALHVNIVNVPQPAAAAIQRHYNDEDPEKEKRIKELELLLMSTENELKGQQVLPTQNHTCSYPGWHSTTIADHTRPHGDSAPVSCLGEHHSTPSLPADPGSLPEESASPARCMIVHQGTILDNVKNLLEFAETLQFIDSFLNTSSNHENSDLEMPSLTSTPLIGHKLTVTTPFHRDQTVKTQKENTVFRTPAIKRSILESSPRTPTPFKHALAAQEIKYGPLKMLPQTPSHLVEDLQDVIKQESDESGIVAEFQENGPPLLKKIKQEVNTQPFGSNKLRILPPLFLVCSLMCLPLALCNTTTFRARFSYKVQRKGGISN

SEQ ID NO: 18837 - protein, 687 aa, Homo sapiens
MDEGTGLQPGAGEQLEAPATAEAVQERCEPETLRSKSLPVLSSASCRPSLSPTSGDANPAFGCVDSSGHQELKQGPNPLAPSPSAPSTSAGLGDCNHRVDLSKTFSVSSALAMLQERRCLYVVLTDSRCFLVCMCFLTFIQALMVSGYLSSVITTIERRYSLKSSESGLLVSCFDIGNLVVVVFVSYFGGRGRRPLWLAVGGLLIAFGAALFALPHFISPPYQIQELNASAPNDGLCQGGNSTATLEPPACPKDSGGNNHWVYVALFICAQILIGMGSTPIYTLGPTYLDDNVKKENSSLYLAIMYVMGALGPAVGYLLGGLLIGFYVDPRNPVHLDQNDPRFIGNWWSGFLLCAIAMFLVIFPMFTFPKKLPPRHKKKKKKKFSVDAVSDDDVLKEKSNNSEQADKKVSSMGFGKDVRDLPRAAVRILSNMTFLFVSLSYTAESAIVTAFITFIPKFIESQFGIPASNASIYTGVIIVPSAGVGIVLGGYIIKKLKLGARESAKLAMICSGVSLLCFSTLFIVGCESINLGGINIPYTTGPSLTMPHRNLTGSCNVNCGCKIHEYEPVCGSDGITYFNPCLAGCVNSGNLSTGIRNYTECTCVQSRQVITPPTVGQRSQLRVVIVKTYLNENGYAVSGKCKRTCNTLIPFLVFLFIVTFITACAQPSAIIVTLSIHSYSNLLWSSH

SEQ ID NO: 18838 - protein, 101 aa, Homo sapiens
MRAAGVGLVDCHCHLSAPDFDRDLDDVLEKAKKANVVALVAVAEHSGEFEKIMQLSERYNGFVLPCLGVHPVQGLPPEDQRSVTLKVLRRYCCMHLMVGHL

SEQ ID NO: 18839 - protein, 249 aa, Homo sapiens
MSVFRDRAEWADIDPVPQNDGPNPVVQIIYSDKFRDVYDYFRAVLQRDERSERAFKLTRDAIELNAANYTVWHFRRVLLKSLQKDLHEEMNYITAIIEEQPKNYQVWHHRRVLVEWLRDPSQELEFIADILNQDAKNYHAWQHRQWVIQEFKLWDNELQYVDQLLKEDVRNNSVWNQRYFVISNTTGYNDRAVLEREVQYTLEMIKLVPHNESAWNYLKGILQDRGLSKYPNLLNQLLDLQPSHSSPYL

SEQ ID NO: 18840 - protein, 521 aa, Homo sapiens
MAAEPNKTEIQTLFKRLRAVPTNKACFDCGAKNPSWASITYGVFLCIDCSGVHRSLGVHLSFIRSTELDSNWNWFQLRCMQVGGNANATAFFRQHGCTANDANTKYNSRAAQMYREKIRQLGSAALARHGTDLWIDNMSSAVPNHSPEKKDSDFFTEHTQPPAWDAPATEPSGTQQPAPSTESSGLAQPEHGPNTDLLGTSPKASLELKSSIIGKKKPAAAKKGLGAKKGLGAQKVSSQSFSEIERQAQVAEKLREQQAADAKKQAEESMVASMRLAYQELQIDRKKEEKKLQNLEGKKREQAERLGMGLVSRSSVSHSVLSEMQVIEQETPVSAKSSRSQLDLFDDVGTFASGPPKYKDNPFSLGESFGSRWDTDAAWGMDRVEEKEPEVTISSIRPISERATNRREVESRSSGLESSEARQKFAGAKAISSDMFFGREVDAEYEARSRLQQLSGSSAISSSDLFGDMDGAHGAGSVSLGNVLPTADIAQFKQGVKSVAGKMAVLANGVMNSLQDRYGSY

SEQ ID NO: 18841 - protein, 112 aa, Homo sapiens
MLKEEQEVAMLGVPHNPAPPMSTVIHIRSETSVPDHVVWSLFNTLFMNTCCLGFIAFAYSVKSRDRKMVGDVTGAQAYASTAKCLNIWALILGIFMTILLIIIPVLVVQAQR

SEQ ID NO: 18842 - protein, 164 aa, Homo sapiens
MSFPPHLNRPPMGIPALPPGIPPPQFPGFPPPVPPGTPMIPVPMSIMAPAPTVLVPTVSMVGKHLGARKDHPGLKAKENDENCGPTTTVFVGNISEKASDMLIRQLLAPSDSVSTRSQNLPSVHSDYYMTCKLERKSYSLKLMQRQRHSWMNGKQRRKLLMGLG

SEQ ID NO: 18843 - protein, 459 aa, Homo sapiens
MSSQSSSLSEACSREAYSSHNWALPPASRSNPQPAYPWATRRMKEEAIKPPLKAFMKQRRMGLNDFIQKIANNSYACKHPEVQSILKISQPQEPELMNANPSPPPSPSQQINLGPSSNPHAKPSDFHFLKVIGKGSFGKVLLARHKAEEVFYAVKVLQKKAILKKKEEKHIMSERNVLLKNVKHPFLVGLHFSFQTADKLYFVLDYINGGELFYHLQRERCFLEPRARFYAAEIASALGYLHSLNIVYRDLKPENILLDSQGHIVLTDFGLCKENIEHNSTTSTFCGTPEYLAPEVLHKQPYDRTVDWWCLGAVLYEMLYGLPPFYSRNTAEMYDNILNKPLQLKPNITNSARHLLEGLLQKDRTKRLGAKDDFMEIKSHVFFSLINWDDLINKKITPPFNPNVSGPNDLRHFDPEFTEEPVPNSIGKSPDSVLVTASVKEAAEAFLGFSYAPPTDSFL

SEQ ID NO: 18844 - protein, 963 aa, Homo sapiens
MAAHLKKRVYEEFTKVVQPQEEIATKKLRLTKPSKSAALHIDLCKATSPADALQYLLQFARKPVEAESVEGVVRILLEHYYKENDPSVRLKIASLLGLLSKTAGFSPDCIMDDAINILQNEKSHQVLAQLLDTLLAIGTKLPENQAIQMRLVDVACKHLTDTSHGVRNKCLQLLGNLGSLEKSVTKDAEGLAARDVQKIIGDYFSDQDPRVRTAAIKAMLQLHERGLKLHQTIYNQACKLLSDDYEQVRSAAVQLIWVVSQLYPESIVPIPSSNEEIRLVDDAFGKICHMVSDGSWVVRVQAAKLLGSMEQVSSHFLEQTLDKKLMSDLRRKRTAHERAKELYSSGEFSSGRKWGDDAPKEEVDTGAVNLIESGACGAFVHGLEDEMYEVRIAAVEALCMLAQSSPSFAEKCLDFLVDMFNDEIEEVRLQSIHTMRKISNNITLREDQLDTVLAVLEDSSRDIREALHELLCCTNVSTKEGIHLALVELLKNLTKYPTDRDSIWKCLKFLGSRHPTLVLPLVPELLSTHPFFDTAEPDMDDPAYIAVLVLIFNAAKTCPTMPALFSDHTFRHYAYLRDSLSHLVPALRLPGRKLVSSAVSPSIIPQEDPSQQFLQQSLERVYSLQHLDPQGAQELLEFTIRDLQRLGELQSELAGVADFSATYLRCQLLLIKALQEKLWNVAAPLYLKQSDLASAAAKQIMEETYKMEFMYSGVENKQVVIIHHMRLQAKALQLIVTARTTRGLDPLFGMCEKFLQEVDFFQRYFIADLPHLQDSFVDKLLDLMPRLMTSKPAEVVKILQTMLRQSAFLHLPLPEQIHKASATIIEPAGESDNPLRFTSGLVVALDVDATLEHVQDPQNTVKVQVLYPDGQAQMIHPKPADFRNPGPGRHRLITQVYLSHTAWTEACQVEVRLLLAYNSSARIPKCPWMEGGEMSPQVETSIEGTIPFSKPVKVYIMPKPARR

SEQ ID NO: 18845 - protein, 559 aa, Homo sapiens
MVSNPVHGLPFLPGTSFKDSTKTAFHRSQTLSYRNGYAIVRRPTVGIGGDRLQFNQLSQAELDELASKAPVLTYGQPKQAPPADFIPAHVAFDKKVLKFDAYFQEDVPMSTEEQYRIRQVNIYYYLEDDSMSVIEPVVENSGILQGKLIKRQRLAKNDRGDHYHWKDLNRGINITIYGKTFRVVDCDQFTQVFLESQGIELNPPEKMALDPYTELRKQPLRKYVTPSDFDQLKQFLTFDKQVLRFYAIWDDTDSMYGECRTYIIHYYLMDDTVEIREVHERNDGRDPFPLLMNRQRVPKVLVENAKNFPQCVLEISDQEVLEWYTAKDFIVGKSLTILGRTFFIYDCDPFTRRYYKEKFGITDLPRIDVSKREPPPVKQELPPYNGFGLVEDSAQNCFALIPKAPKKDVIKMLVNDNKVLRYLAVLESPIPEDKDRRFVFSYFLATDMISIFEPPVRNSGIIGGKYLGRTKVVKPYSTVDNPVYYGPSDFFIGAVIEVFGHRFIILDTDEYVLKYMESNAAQYSPEALASIQNHVRKREAPAPEAERISLCTQAGMQCQ

SEQ ID NO: 18846 - protein, 379 aa, Homo sapiens
MLRSTSTVTLLSGGAARTPGAPSRRANVCRLRLTVPPESPVPEQCEKKIERKEQLLDLSNGEPTRKLPQGVVYGVVRRSDQNQQKEMVVYGWSTSQLKEEMNYIKDVRATLEKVRKRMYGDYDEMRQKIRQLTQELSVSHAQQEYLENHIQTQSSALDRFNAMNSALASDSIGLQKTLVDVTLENSNIKDQIRNLQQTYEASMDKLREKQRQLEVAQVENQLLKMKVESSQEANAEVMREMTKKLYSQYEEKLQEEQRKHSAEKEALLEETNSFLKAIEEANKKMQAAEISLEEKDQRIGELDRLIERMEKERHQLQLQLLEHETEMSGELTDSDKERYQQLEEASASLRERIRHLDDMVHCQQKKVKQMVEEVTFSTK

SEQ ID NO: 18847 - protein, 186 aa, Homo sapiens
MHQTYSRHCRPEESTFSAAMTTMQGMEQAMPGAGPGVPQLGNMAVIHSHLWKGLQEKFLKGEPKVLGVVQILTALMSLSMGITMMCMASNTYGSNPISVYIGYTIWGSVMFIISGSLSIAAGIRTTKGLGLDGMVLLLSVLEFCIAVSLSAFGCKVLCCTPGGVVLILPSHSHMAETASPTPLNEV

SEQ ID NO: 18848 - protein, 1189 aa, Homo sapiens
MKSEEQPMDLENRSTANVLEETTVKKEKEDEKELVKLPVIVKLEKPLPENEEKKIIKEESDSFKENVKPIKVEVKECRADPKDTKSSMEKPVAQEPERIEFGGNIKSSHEITEKSTEETEKLKNDQQAKIPLKKREIKLSDDFDSPVKGPLCKSVTPTKEFLKDEIKQEEETCKRISTITALGHEGKQLVNGEVSDERVAPNFKTEPIETKFYETKEESYSPSKDRNIITEGNGTESLNSVITSMKTGELEKETAPLRKDADSSISVLEIHSQKAQIEEPDPPEMETSLDSSEMAKDLSSKTALSSTESCTMKGEEKSPKTKKDKRPPILECLEKLEKSKKTFLDKDAQRLSPIPEEVPKSTLESEKPGSPEAAETSPPSNIIDHCEKLASEKEVVECQSTSTVGGQSVKKVDLETLKEDSEFTKVEMDNLDNAQTSGIEEPSETKGSMQKSKFKYKLVPEEETTASENTEITSERQKEGIKLTIRISSRKKKPDSPPKVLEPENKQEKTEKEEEKTNVGRTLRRSPRISRPTAKVAEIRDQKADKKRGEGEDEVEEESTALQKTDKKEILKKSEKDTNSKVSKVKPKGKVRWTGSRTRGRWKYSSNDESEGSGSEKSSAASEEEEEKESEEAILADDDEPCKKCGLPNHPELILLCDSCDSGYHTACLRPPLMIIPDGEWFCPPCQHKLLCEKLEEQLQDLDVALKKKERAERRKERLVYVGISIENIIPPQEPDFSEDQEEKKKDSKKSKANLLERRSTRTRKCISYRFDEFDEAIDEAIEDDIKEADGGGVGRGKDISTITGHRGKDISTILDEERKENKRPQRAAAARRKKRRRLNDLDSDSNLDEEESEDEFKISDGSQDEFVVSDENPDESEEDPPSNDDSDTDFCSRRLRRHPSRPMRQSRRLRRKTPKKKYSDDDEEEESEENSRDSESDFSDDFSDDFVETRRRRSRRNQKRQINYKEDSESDGSQKSLRRGKEIRRVHKRRLSSSESEESYLSKNSEDDELAKESKRSVRKRGRSTDEYSEADEEEEEEEGKPSRKRLHRIETDEEESCDNAHGDANQPARDSQPRVLPSEQESTKKPYRIESDEEEDFENVGKVGSPLDYSLVDLPSTNGQSPGKAIENLIGKPTEKSQTPKDNSTASASLASNGTSGGQEAGAPEEEEDELLRVTDLVDYVCNSEQL

SEQ ID NO: 18849 - protein, 633 aa, Homo sapiens
MVGEGPYLISDLDQRGRRRSFAERYDPSLKTMIPVRPCARLAPNPVDDAGLLSFATFSWLTPVMVKGYRQRLTVDTLPPLSTYDSSDTNAKRFRVLWDEEVARVGPEKASLSHVVWKFQRTRVLMDIVANILCIIMAAIGPTVLIHQILQQTERTSGKVWVGIGLCIALFATEFTKVFFWALAWAINYRTAIRLKVALSTLVFENLVSFKTLTHISVGEVLNILSSDSYSLFEAALFCPLPATIPILMVFCAAYAFFILGPTALIGISVYVIFIPVQMFMAKLNSAFRRSAILVTDKRVQTMNEFLTCIRLIKMYAWEKSFTNTIQDIRRRERKLLEKAGFVQSGNSALAPIVSTIAIVLTLSCHILLRRKLTAPVAFSVIAMFNVMKFSIAILPFSIKAMAEANVSLRRMKKILIDKSPPSYITQPEDPDTVLLLANATLTWEHEASRKSTPKKLQNQKRHLCKKQRSEAYSERSPPAKGATGPEEQSDSLKSVLHSISFVVRKGKILGICGNVGSGKSSLLAALLGQMQLQKGVVAVNGTLAYVSQQAWIFHGNVRENILFGEKYDHQRLGSGASTSLGGRGRGLAWPALSTPTVSSTCWTTPCRPWTPTWGSTSLRSALRRRSGERQSSW

SEQ ID NO: 18850 - protein, 917 aa, Homo sapiens
MDGAAGPGDGPAREALQSLSQRLRVQEQEMELVKAALAEALRLLRLQVPPSSLQGSGTPAPPGDSLAAPPGLPPTCTPSLVSRGTQTETEVELKSSPGPPGLSNGPPAPQGASEEPSGTQSEGGGSSSSGAGSPGPPGILRPLQPPQRADTPRRNSSSSSSPSERPRQKLSRKAISSANLLVRSGSTESRGGKDPLSSPGGPGSRRSNYNLEGISVKMFLRGRPITMYIPSGIRSLEELPSGPPPETLSLDWVYGYRGRDSRSNLFVLRSGEVVYFIACVVVLYRPGGGPGGPGGGGQRHYRGHTDCVRCLAVHPDGVRVASGQTAGVDKDGKPLQPVVHIWDSETLLKLQEIGLGAFERGVGALAFSAADQGAFLCVVDDSNEHMLSVWDCSRGMKLAEIKSTNDSVLAVGFNPRDSSCIVTSGKSHVHFWNWSGGVGVPGNGTLTRKQGVFGKYKKPKFIPCFVFLPDGDILTGDSEGNILTWGRSPSDSKTPGRGGAKETYGIVAQAHAHEGSIFALCLRRDGTVLSGGGRDRRLVQWGPGLVALQEAEIPEHFGAVRAIAEGLGSELLVGTTKNALLRGDLAQGFSPVIQGHTDELWGLCTHPSQNRFLTCGHDRQLCLWDGESHALAWSIDLKETGLCADFHPSGAVVAVGLNTGRWLVLDTETREIVSDVIDGNEQLSVVRYSPDGLYLAIGSHDNVIYIYSVSSDGAKSSRFGRCMGHSSFITHLDWSKDGNFIMSNSGDYEILYWDVAGGCKQLKNRYESRDREWATYTCVLGFHVYVPVRSCQGAEPHVRGPRQPRDQRPIHARRLAPRLAGRQGRQHLPVASAGRWGRGAGARHALSNPLPVPRLLPRRLIAAWRDRLARRRGPAPPCPSLAQSPTTRGRLFPGLTSRHSRSRIFLEGANGAPAHTV

SEQ ID NO: 18851 - protein, 404 aa, Homo sapiens
GESIKAIVKDVMYICPFMGAVSGTLTVTDFKLYFKNVERDPHFILDVPLGVISRVEKIGAQSHGDNSCGIEIVCKDMRNLRLAYKQEEQSKLGIFENLNKHAFPLSNGQALFAFSYKEKFPINGWKVYDPVSEYKRQGLPNESWKISKINSNYEFCDTYPAIIVVPTSVKDDDLSKVAAFRAKGRVPVLSWIHPESQATITRCSQPLVGPNDKRCKEDEKYLQTIMDANAQSHKLIIFDARQNSVADTNKMLLAGAVRIADKIESGKTSVVVHCSDGWDRTAQLTSLAMLMLDSYYRTIKGFETLVEKEWISFGHRFALRVGHGNDNHADADRSPIFLQFVDCVWQMTRQFPSAFEFNELFLITILDHLYSCLFGTFLCNCEQQRFKEAWGAGTQRARGSLRSR

SEQ ID NO: 18852 - protein, 504 aa, Homo sapiens
MAGQGLPLHVATLLTGLLECLGFAGVLFGWPSLVFVFKNEDYFKDLCGPDAGPIGNATGQAGRLGCMGDLFSTPDCKAQDERFSLIFTLGSFMNNFMTFPTGYIFDRFKTTVARLIAIFFYTTATLIIAFTSAGSAVLLFLAMPMLTIGGILFLITNLQIGNLFGQHRSTIITLYNGAFDSSSAVFLIIKLLYEKGISLRASFIFISVCSTWHVARTFLLMPRGHIPYPLPPNYSYGLCPGNGTTKEEKETAEHENRELQSKEFLSAKEETPGAGQKQELRSFWSYAFSRRFAWHLVWLSVIQLWHYLFIGTLNSLLTNMAGGDMARVSTYTNAFAFTQFGVLCAPWNGLLMDRLKQKYQKEARKTGSSTLAVALCSTVPSLALTSLLCLGFALCASVPILPLQYLTFILQVISRSFLYGSNAAFLTLAFPSEHFGKLFGLVMALSAVVSLLQFPIFTLIKGSLQNDPFYVNVMFMLAILLTFFHPFLVYRECRTWKESPSAIA

SEQ ID NO: 18853 - protein, 649 aa, Homo sapiens
MGCAEGKAVAAAAPTELQTKGKNGDGRRRSAKDHHPGKTLPENPAGFTSTATADSRALLQAYIDGHSVVIFSRSTCTRCTEVKKLFKSLCVPYFVLELDQTEDGRALEGTLSELAAETDLPVVFVKQRKIGGHGPTLKAYQEGRLQKLLKMNGPEDLPKSYDYDLIIIGGGSGGLAAAKEAAQYGKKVMVLDFVTPTPLGTRWGLGGTCVNVGCIPKKLMHQAALLGQALQDSRNYGWKVEETVKHDWDRMIEAVQNHIGSLNWGYRVALREKKVVYENAYGQFIGPHRIKATNNKGKEKIYSAERFLIATGERPRYLGIPGDKEYCISSDDLFSLPYCPGKTLVVGASYVALECAGFLAGIGLDVTVMVRSILLRGFDQDMANKIGEHMEEHGIKFIRQFVPIKVEQIEAGTPGRLRVVAQSTNSEEIIEGEYNTVMLAIGRDACTRKIGLETVGVKINEKTGKIPVTDEEQTNVPYIYAIGDILEDKVELTPVAIQAGRLLAQRLYAGSTVKCDYENVPTTVFTPLEYGACGLSEEKAVEKFGEENIEVYHSYFWPLEWTIPSRDNNKCYAKIICNTKDNERVVGFHVLGPNAGEVTQGFAAALKCGLTKKQLDSTIGIHPVCAEVFTTLSVTKRSGASILQAGCUG

SEQ ID NO: 18854 - protein, 998 aa, Homo sapiens
MSEQTPAEAGAAGAREDACRDYQSSLEDLTFNSKPHINMLTILAEENLPFAKEIVSLIEAQTAKAPSSEKLPVMYLMDSIVKNVGREYLTAFTKNLVATFICVFEKVDENTRKSLFKLRSTWDEIFPLKKLYALDVRVNSLDPAWPIKPLPPNVNTSSIHVNPKFLNKSPEEPSTPGTVVSSPSISTPPIVPDIQKNLTQEQLIRQQLLAKQKQLLELQQKKLELELEQAKAQLAVSLSVQQETSNLGPGSAPSKLHVSQIPPMAVKAPHQVPVQSEKSRPGPSLQIQDLKGTNRDPRLNRISQHSHGKDQSHRKEFLMNTLNQSDTKTSKTIPSEKLNSSKQEKSKSGEKITKKELDQLDSKSKSKSKSPSPLKNKLSHTKDLKNQESESMRLSDMNKRDPRLKKHLQDKTDGKDDDVKEKRKTAEKKDKDEHMKSSEHRLAGSRNKIINGIVQKQDTITEESEKQGTKPGRSSTRKRSRSRSPKSRSPIIHSPKRRDRRSPKRRQRSMSPTSTPKAGKIRQSGAKQSHMEEFTPPSREDRNAKRSTKQDIRDPRRMKKTEEERPQETTNQHSTKSGTEPKENVENWQSSKSAKRWKSGWEENKSLQQVDEHSKPPHLRHRESWSSTKGILSPRAPKQQQHRLSVDANLQIPKELTLASKRELLQKTSERLASGEITQDDFLVVVHQIRQLFQYQEGKHRCNVRDSPTEENKGGLKKKPLLSDAELTYYEHKAKLKRTQVQHSFPRLDLLDPDIFDYPLTDALLSGIECEPSKSKHASRNSGAQFDRKEQFSERARRLSPISGSRTYAENLSPHEGRRRHDEQVSAKGVREEQRSPFNDRFPLKRPRYEDSDKPFVDSPASRFAGLDTNQRLTALAEDRPLFDGPSRPSVARDGPTKMIFEGPNKLSPRIDGPPTPASLRFDGSPGQMGGGGPLRFEGPQGQLGGGCPLRFEGPPGPVGTPLRFEGPIGQAGGGGFRFEGSPGLRFEGSPGGLRFEG

SEQ ID NO: 18855 - protein, 193 aa, Homo sapiens
NLMNAIMGSGILGLAYVLANTGVFGFSFLLLTVALLASYSVHLLLSMCIQTAMSSYLLIIKTELPAAIAEFLTGDYSRYWYLDGQTLLIIICVGIVFPLALLPKIGFLGYTSSLSFFFMMFFALVVIIKKWSIPCPLTLNYVEKGFQISNVTDDCKPKLFHFSKESAYALPTMAFSFLCHTSILPIYCELQSP

SEQ ID NO: 18856 - protein, 1156 aa, Homo sapiens
MGDTAPPQAPAGGLGGASGAGLLGGGSVTPRVHSAIVERLRARIAVCRQHHLSCEGRYERGRAESSDRERESTLQLLSLVQHGQGARKAGKHTKATATAATTTAPPPPPAAPPAASQAAATAAPPPPPDYHHHHQQHLLNSSNNGGSGGINGEQQPPASTPGDQRNSALIALQGSLKRKQVVNLSPANSKRPNGFVDNSFLDIKRIRVGENLSAGQGGLQINNGQSQIMSGTLPMSQAPLRKTNTLPSHTHSPGNGLFNMGLKEVKKEPGETLSCSKHMDGQMTQENIFPNRYGDDPGEQLMDPELQELFNELTNISVPPMSDLELENMINATIKQDDPFNIDLGQQSQRSTPRPSLPMEKIVIKSEYSPGLTQGPSGSPQLRPPSAGPAFSMANSALSTSSPIPSVPQSQAQPQTGSGASRALPSWQEVSHAQQLKQIAANRQQHARMQQHQQQHQPTNWSALPSSAGPSPGPFGQEKIPSPSFGQQTFSPQSSPMPGVAGGSGQSKVMANYMYKAGPSAQGGHLDVLMQQKPQDLSRSFINNPHPAMEPRQGNTKPLFHFNSDQANQQMPSVLPSQNKPSLLHYTQQQQQQQQQQQQQQQQQQQQQQQQQQQQQQQQQQSSISAQQQQQQQSSISAQQQQQQQQQQQQQQQQQQQQQQQQQQQPSSQPAQSLPSQPLLRSPLPLQQKLLLQQMQNQPIAGMGYQVSQQQRQDQHSVVGQNTGPSPSPNPCSNPNTGSGYMNSQQSLLNQQLMGKKQTLQRQIMEQKQQLLLQQQMLADAEKIAPQDQINRHLSRPPPDYKDQRRNVGNMQPTAQYSGGSSTISLNSNQALANPVSTHTILTPNSSLLSTSHGTRMPSLSTAVQNMGMYGNLPCNQPNTYSVTSGMNQLTQQRNPKQLLANQNNPMMPRPPTLGPSNNNNVATFGAGSVGNSQQLRPNLTHSMASMPPQRTSNVMITSNTTAPNWASQEGTSKQQEALTSAGVRFPTGTPAAYTPNQSLQQAVGSQQFSQRAVAPPNQLTPAVQMRPMNQMSQTLNGQTMGPLRGLNLRPNQLSTQILPNLNQSGTGLNQSRTGINQPPSLTPSNFPSPNQSSRAFQGTDHSSDLAFDFLSQQNDNMGPALNSDADFIDSLLKTEPGNDDWMKDINLDEILGNNS

SEQ ID NO: 18857 - protein, 492 aa, Homo sapiens
MVTPSPPGNHSLSLEAPRLHTASDLLDPWSLERPRFCLLSKEEGKSFGFHLQQELGRAGHVVCRVDPGTSAQRQGLQEGDRILAVNNDVVEHEDYAVVVRRIRASSPRVLLTVLARHAHDVARAQLGEDAHLCPTLGPGVRPRLCHIVKDEGGFGFSVTHGNQGPFWLVLSTGGAAERAGVPPGARLLEVNGVSVEKFTHNQLTRKLWQSGQQVTLLVAGPEVEEQCRQLGLPLAAPLAEGWALPTKPRCLHLEKGPQGFGFLLREEKGLDGRPGQFLWEVDPGLPAKKAGMQAGDRLVAVAGESVEGLGHEETVSRIQGQGSCVSLTVVDPEADRFFSMVRLSPLLFLENTEAPASPRGSSSASLVETEDPSLEDTSVPSVPLGSRQCFLYPGPGGSYGFRLSCVASGPRLFISQVTPGGSAARAGLQVGDVILEVNGYPVGGQNDLERLQQLPEAEPPLCLKLAARSLRGLEAWIPPGAAEDWALASDLL

SEQ ID NO: 18858 - protein, 193 aa, Homo sapiens
MTRAGLSSTRRPVLARTHVQGRVYNFLERPTGWKCFVYHFAVFLIVLVCLIFSVLSTIEQYAALATGTLFWMEIVLVVFFGTEYVVRLWSAGCRSKYVGLWGRLRFARKPISIIDLIVVVASMVVLCVGSKGQVFATSAIRGIRFLQILRMLHVDRQGGTWRLLGSVVFIHRQELITTLYIGFLGLIFSSYFV

SEQ ID NO: 18859 - protein, 176 aa, Homo sapiens
MSLKPFTYPFPETRFLHAGPNVYKFKIRYGKSIRGEEIENKEVITQELEVPVEKKAVGAVMRKRKHMDEPSSPSRPGLDRAKIGTSSQGPSKKKPPVETRRNRERKTQQGLQETLASDITDVQKQDSEWGHSLPGRIVPPLQHNSPPPKERAATGFFGFLSSLFPFRYFFRKSSHS

SEQ ID NO: 18860 - protein, 947 aa, Homo sapiens
MSQPPIGGAAPATAAASPAAAATEARLHPEGSSRKQQRAQSPARPRDSSLRQTIAATRSPVGAGTKLNSVRQQQLQQQQQQGNKTGSRTGPPASIRGGGGGAEKATPLAPKGAAPGAVQPVAGAEAAPAATLAALGGRRPGPPEEPPRELESVPSKLGEPPPLGEGGGGGGEGGGAGGGSGEREGGAPQPPPPRGWRGKGVRAQQRGGSGGEGASPSPSSSSAGKTPGTGSRNSGSGVAGGGSGGGGSYWKEGCLQSELIQFHLKKERAAAAAAAAQMHAKNGGGSSSRSSPVSGPPAVCETLAVASASPMAAAAEGPQQSAEGSASGGGMQAAAPPSSQPHPQQLQEQEEMQEEMEKLREENETLKNEIDELRTEMDEMRDTFFEEDACQLQEMRHELERANKNCRILQYRLRKAERKRLRYAQTGEIDGELLRSLEQDLKVAKDVSVRLHHELENVEEKRTTTEDENEKLRQQLIEVEIAKQALQNELEKMKELSLKRRGSKDLPKSEKKAQQTPTEEDNEDLKCQLQFVKEEAALMRKKMAKIDKEKDRFEHELQKYRSFYGDLDSPLPKGEAGGPPSTREAELKLRLRLVEEEANILGRKIVELEVENRGLKAELDDLRGDDFNGSANPLMREQSESLSELRQHLQLVEDETELLRRNVADLEEQNKRITAELNKYKYKSGGHDSARHHDNAKTEALQEELKAARLQINELSGKVMQLQYENRVLMSNMQRYDLASHLGIRGSPRDSDAESDAGKKESDDDSRPPHRKREGPIGGESDSEEVRNIRCLTPTRSFYPAPGPWPKSFSDRQQMKDIRSEAERLGKTIDRLIADTSTIITEARIYVANGDLFGLMDEEDDGSRIREHELLYRINAQMKAFRKELQTFIDRLEVPKSADDRGAEEPISVSQMFQPIILLILILVLFSSLSYTTIFKLVFLFTLFFVL

SEQ ID NO: 18861 - protein, 852 aa, Homo sapiens
MTTEVGSVSEVKKDSSQLGTDATKEKPKEVAENQQNQSSDPEEEKGSQPPPAAESQSSLRRQKREKETSESRGISRFIPPWLKKQKSYTLVVAKDGGDKKEPTQAVVEEQVLDKEEPLPEEQRQAKGDAEEMAQKKQEIKVEVKEEKPSVSKEEKPSVSKVEMQPTELVSKEREEKVKETQEDKLEGGAAKRETKEVQTNELKAEKASQKVTKKTKTVQCKVTLLDGTEYSCDLEKHAKGQVLFDKVCEHLNLLEKDYFGLLFQESPEQKNWLDPAKEIKRQLRNLPWLFTFNVKFYPPDPSQLTEDITRYFLCLQLRQDIASGRLPCSFVTHALLGSYTLQAELGDYDPEEHGSIDLSEFQFAPTQTKELEEKVAELHKTHRGLSPAQADSQFLENAKRLSMYGVDLHHAKDSEGVDIKLGVCANGLLIYKDRLRINRFAWPKILKISYKRSNFYIKVRPAELEQFESTIGFKLPNHRAAKRLWKVCVEHHTFYRLVSPEQPPKAKFLTLGSKFRYSGRTQAQTRQASTLIDRPAPHFERTSSKRVSRSLDGAPIGVMDQSLMKDFPGAAGEISAYGPGLVSIAVVQDGDGRREVRSPTKAPHLQLIEGKSSHETLNIVEEKKRAEVGKDERVITEEMNGKEISPGSGPGEIRKVEPVTQKDSTSLSSESSSSSSESEEEDVGEYRPHHRVTEGTIREEQEYEEEVEEEPRPAAKPPVVKTEMVTISDASQRTEISTKEVPIVQTETKTITYESPQIDGGAGGDSGTLLTAQTITSESVSTTTTTHITKTVKGGISETRIEKRIVITGDGDIDHDQALAQAIREAREQHPDMSVTRVVVHKETELAEEGED

SEQ ID NO: 18862 - protein, 615 aa, Homo sapiens
MAKVNITRDLIRRQIKERGALSFERRYHVTDPFIRRLGLEAELQGHSGCVNCLEWNEKGDLLASGSDDQHTIVWDPLHHKKLLSMHTGHTANIFSVKFLPHAGDRILITGAADSKVHVHDLTVKETIHMFGDHTNRVKRIATAPMWPNTFWSAAEDGLIRQYDLRENSKHSEVLIDLTEYCGQLVEAKCLTVNPQDNNCLAVGASGPFVRLYDIRMIHNHRKSMKQSPSAGVHTFCDRQKPLPDGAAQYYVAGHLPVKLPDYNNRLRVLVATYVTFSPNGTELLVNMGGEQVYLFDLTYKQRPYTFLLPRKCHSSGEVQNGKMSTNGVSNGVSNGLHLHSNGFRLPESRGHVSPQVELPPYLERVKQQANEAFACQQWTQAIQLYSKAVQRAPHNAMLYGNRAAAYMKRKWDGDHYDALRDCLKAISLNPCHLKAHFRLARCLFELKYVAEALECLDDFKGKFPEQAHSSACDALGRDITAALFSKNDGEEKKGPGGGAPVRLRSTSRKDSISEDEMVLRERSYDYQFRYCGHCNTTTDIKEANFFGRRPPTWSVCSKGMSPLSTACSHTPATASWPPVASILLCGSGTPDQRVKTSQAESWKIWRVLHRPTSGA

SEQ ID NO: 18863 - protein, 4570 aa, Homo sapiens
MSGEDAEVRAVSEDVSNGSSGSPSPGDTLPWNLGKTQRSRRSGGGAGSNGSVLDPAERAVIRIADERDRVQKKTFTKWVNKHLIKAQRHISDLYEDLRDGHNLISLLEVLSGDSLPREKGRMRFHKLQNVQIALDYLRHRQVKLVNIRNDDIADGNPKLTLGLIWTIILHFQISDIQVSGQSEDMTAKEKLLLWSQRMVEGYQGLRCDNFTSSWRDGRLFNAIIHRHKPLLIDMNKVYRQTNLENLDQAFSVAERDLGVTRLLDPEDVDVPQPDEKSIITYVSSLYDAMPRVPDVQDGELQLRWQEYRELVLLLLQWMRHHTAAFEERRFPSSFEEIEILWSQFLKFKEMELPAKEADKNRSKGIYQSLEGAVQAGQLKVPPGYHPLDVEKEWGKLHVAILEREKQLRSEFERLECLQRIVTKLQMEAGLCEEQLNQADALLQSDVRLLAAGKVPQRAGEVERDLDKADSMIRLLFNDVQTLKDGRHPQGEQMYRRVYRLHERLVAIRTEYNLRLKAGVAAPATQVAQVTLQSVQRRPELEDSTLRYLQDLLAWVEENQHRVDGAEWGVDLPSVEAQLGSHRGLHQSIEEFRAKIERARSDEGQLSPATRGAYRDCLGRLDLQYAKLLNSSKARLRSLESLHSFVAAATKELMWLNEKEEEEVGFDWSDRNTNMTAKKESYSALMRELELKEKKIKELQNAGDRLLREDHPARPTVESFQAALQTQWSWMLQLCCCIEAHLKENAAYFQFFSDVREAEGQLQKLQEALRRKYSCDRSATVTRLEDLLQDAQDEKEQLNEYKGHLSGLAKRAKAVVQLKPRHPAHPMRGRLPLLAVCDYKQVEVTVHKGDECQLVGPAQPSHWKVLSSSGSEAAVPSVCFLVPPPNQEAQEAVTRLEAQHQALVTLWHQLHVDMKSLLAWQSLRRDVQLIRSWSLATFRTLKPEEQRQALHSLELHYQAFLRDSQDAGGFGPEDRLMAEREYGSCSHHYQQLLQSLEQGAQEESRCQRCISELKDIRLQLEACETRTVHRLRLPLDKEPARECAQRIAEQQKAQAEVEGLGKGVARLSAEAEKVLALPEPSPAAPTLRSELELTLGKLEQVRSLSAIYLEKLKTISLVIRGTQGAEEVLRAHEEQLKEAQAVPATLPELEATKASLKKLRAQAEAQQPTFDALRDELRGAQEVGERLQQRHGERDVEVERWRERVAQLLERWQAVLAQTDVRQRELEQLGRQLRYYRESADPLGAWLQDARRRQEQIQAMPLADSQAVREQLRQEQALLEEIERHGEKVEECQRFAKQYINAIKDYELQLVTYKAQLEPVASPAKKPKVQSGSESVIQEYVDLRTHYSELTTLTSQYIKFISETLRRMEEEERLAEQQRAEERERLAEVEAALEKQRQLAEAHAQAKAQAEREAKELQQRMQEEVVRREEAAVDAQQQKRSIQEELQQLRQSSEAEIQAKARQAEAAERSRLRIEEEIRVVRLQLEATERQRGGAEGELQALRARAEEAEAQKRQAQEEAERLRRQVQDESQRKRQAEVELASRVKAEAEAAREKQRALQALEELRLQAEEAERRLRQAEVERARQVQVALETAQRSAEAELQSKRASFAEKTAQLERSLQEEHVAVAQLREEAERRAQQQAEAERAREEAERELERWQLKANEALRLRLQAEEVAQQKSLAQAEAEKQKEEAEREARRRGKAEEQAVRQRELAEQELEKQRQLAEGTAQQRLAAEQELIRLRAETEQGEQQRQLLEEELARLQREAAAATQKRQELEAELAKVRAEMEVLLASKARAEEESRSTSEKSKQRLEAEAGRFRELAEEAARLRALAEEAKRQRQLAEEDAARQRAEAERVLAEKLAAIGEATRLKTEAEIALKEKEAENERLRRLAEDEAFQRRRLEEQAAQHKADIEERLAQLRKASDSELERQKGLVEDTLRQRRQVEEEILALKASFEKAAAGKAELELELGRIRSNAEDTLRSKEQAELEAARQRQLAAEEERRRREAEERVQKSLAAEEEAARQRKAALEEVERLKAKVEEARRLRERAEQESARQLQLAQEAAQKRLQAEEKAHAFAVQQKEQELQQTLQQEQSVLDQLRGEAEAARRAAEEAEEARVQAEREAAQSRRQVEEAERLKQSAEEQAQARAQAQAAAEKLRKEAEQEAARRAQAEQAALRQKQAADAEMEKHKKFAEQTLRQKAQVEQELTTLRLQLEETDHQKNLLDEELQRLKAEATEAARQRSQVEEELFSVRVQMEELSKLKARIEAENRALILRDKDNTQRFLQEEAEKMKQVAEEAARLSVAAQEAARLRQLAEEDLAQQRALAEKMLKEKMQAVQEATRLKAEAELLQQQKELAQEQARRLQEDKEQMAQQLAEETQGFQRTLEAERQRQLEMSAEAERLKLRVAEMSRAQARAEEDAQRFRKQAEEIGEKLHRTELATQEKVTLVQTLEIQRQQSDHDAERLREAIAELEREKEKLQQEAKLLQLKSEEMQTVQQEQLLQETQALQQSFLSEKDSLLQRERFIEQEKAKLEQLFQDEVAKAQQLREEQQRQQQQMEQERQRLVASMEEARRRQHEAEEGVRRKQEELQQLEQQRRQQEELLAEENQRLREQLQLLEEQHRAALAHSEEVTASQVAATKTLPNGRDALDGPAAEAEPEHSFDGLRRKVSAQRLQEAGILSAEELQRLAQGHTTVDELARREDVRHYLQGRSSIAGLLLKATNEKLSVYAALQRQLLSPGTALILLEAQAASGFLLDPVRNRRLTVNEAVKEGVVGPELHHKLLSAERAVTGYKDPYTGQQISLFQAMQKGLIVREHGIRLLEAQIATGGVIDPVHSHRVPVDVAYRRGYFDEEMNRVLADPSDDTKGFFDPNTHENLTYLQLLERCVEDPETGLCLLPLTDKAAKGGELVYTDSEARDVFEKATVSAPFGKFQGKTVTIWEIINSEYFTAEQRRDLLRQFRTGRITVEKIIKIIITVVEEQEQKGRLCFEGLRSLVPAAELLESRVIDRELYQQLQRGERSVRDVAEVDTVRRALRGANVIAGVWLEEAGQKLSIYNALKKDLLPSDMAVALLEAQAGTGHIIDPATSARLTVDEAVRAGLVGPEFHEKLLSAEKAVTGYRDPYTGQSVSLFQALKKGLIPREQGLRLLDAQLSTGGIVDPSKSHRVPLDVACARGCLDEETSRALSAPRADAKAYSDPSTGEPATYGELQQRCRPDQLTGLSLLPLSEKAARARQEELYSELQARETFEKTPVEVPVGGFKGRTVTVWELISSEYFTAEQRQELLRQFRTGKVTVEKVIKILITIVEEVETLRQERLSFSGLRAPVPASELLASGVLSRAQFEQLKDGKTTVKDLSELGSVRTLLQGSGCLAGIYLEDTKEKVSIYEAMRRGLLRATTAALLLEAQAATGFLVDPVRNQRLYVHEAVKAGVVGPELHEQLLSAEKAVTGYRDPYSGSTISLFQAMQKGLVLRQHGIRLLEAQIATGGIIDPVHSHRVPVDVAYQRGYFSEEMNRVLADPSDDTKGFFDPNTHENLTYRQLLERCVEDPETGLRLLPLKGAEKAEVVETTQVYTEEETRRAFEETQIDIPGGGSHGGSTMSLWEVMQSDLIPEEQRAQLMADFQAGRVTKERMIIIIIEIIEKTEIIRQQGLASYDYVRRRLTAEDLFEARIISLETYNLLREGTRSLREALEAESAWCYLYGTGSVAGVYLPGSRQTLSIYQALKKGLLSAEVARLLLEAQAATGFLLDPVKGERLTVDEAVRKGLVGPELHDRLLSAERAVTGYRDPYTEQTISLFQAMKKELIPTEEALRLLDAQLATGGIVDPRLGFHLPLEVAYQRGYLNKDTHDQLSEPSEVRSYVDPSTDERLSYTQLLRRCRRDDGTGQLLLPLSDARKLTFRGLRKQITMEELVRSQVMDEATALQLREGLTSIEEVTKNLQKFLEGTSCIAGVFVDATKERLSVYQAMKKGIIRPGTAFELLEAQAATGYVIDPIKGLKLTVEEAVRMGIVGPEFKDKLLSAERAVTGYKDPYSGKLISLFQAMKKGLILKDHGIRLLEAQIATGGIIDPEESHRLPVEVAYKRGLFDEEMNEILTDPSDDTKGFFDPNTEENLTYLQLMERCITDPQTGLCLLPLKEKKRERKTSSKSSVRKRRVVIVDPETGKEMSVYEAYRKGLIDHQTYLELSEQECEWEEITISSSDGVVKSMIIDRRSGRQYDIDDAIAKNLIDRSALDQYRAGTLSITEFADMLSGNAGGFRSRSSSVGSSSSYPISPAVSRTQLASWSDPTEETGPVAGILDTETLEKVSITEAMHRNLVDNITGQRLLEAQACTGGIIDPSTGERFPVTDAVNKGLVDKIMVDRINLAQKAFCGFEDPRTKTKMSAAQALKKGWLYYEAGQRFLEVQYLTGGLIEPDTPGRVPLDEALQRGTVDARTAQKLRDVGAYSKYLTCPKTKLKISYKDALDRSMVEEGTGLRLLEAAAQSTKGYYSPYSVSGSGSTAGSRTGSRTGSRAGSRRGSFDATGSGFSMTFSSSSYSSSGYGRRYASGSSASLGGPESAVA

SEQ ID NO: 18864 - protein, 26926 aa, Homo sapiens
MTTQAPTFTQPLQSVVVLEGSTATFEAHISGFPVPEVSWFRDGQVISTSTLPGVQISFSDGRAKLTIPAVTKANSGRYSLKATNGSGQATSTAELLVKAETAPPNFVQRLQSMTVRQGSQVRLQVRVTGIPTPVVKFYRDGAEIQSSLDFQISQEGDLYSLLIAEAYPEDSGTYSVNATNSVGRATSTAELLVQGEEEVPAKKTKTIVSTAQISESRQTRIEKKIEAHFDARSIATVEMVIDGAAGQQLPHKTPPRIPPKPKSRSPTPPSIAAKAQLARQQSPSPIRHSPSPVRHVRAPTPSPVRSVSPAARISTSPIRSVRSPLLMRKTQASTVATGPEVPPPWKQEGYVASSSEAEMRETTLTTSTQIRTEERWEGRYGVQEQVTISGAAGAAASVSASASYAAEAVATGAKEVKQDADKSAAVATVVAAVDMARVREPVISAVEQTAQRTTTTAVHIQPAQEQVRKEAEKTAVTKVVVAADKAKEQELKSRTKEVITTKQEQMHVTHEQIRKETEKTFVPKVVISAAKAKEQETRISEEITKKQKQVTQEAIMKETRKTVVPKVIVATPKVKEQDLVSRGREGITTKREQVQITQEKMRKEAEKTALSTIAVATAKAKEQETILRTRETMATRQEQIQVTHGKVDVGKKAEAVATVVAAVDQARVREPREPGHLEESYAQQTTLEYGYKERISAAKVAEPPQRPASEPHVVPKAVKPRVIQAPSETHIKTTDQKGMHISSQIKKTTDLTTERLVHVDKRPRTASPHFTVSKISVPKTEHGYEASIAGSAIATLQKELSATSSAQKITKSVKAPTVKPSETRVRAEPTPLPQFPFADTPDTYKSEAGVEVKKEVGVSITGTTVREERFEVLHGREAKVTETARVPAPVEIPVTPPTLVSGLKNVTVIEGESVTLECHISGYPSPTVTWYREDYQIESSIDFQITFQSGIARLMIREAFAEDSGRFTCSAVNEAGTVSTSCYLAVQVSEEFEKETTAVTEKFTTEEKRFVESRDVVMTDTSLTEEQAGPGEPAAPYFITKPVVQKLVEGGSVVFGCQVGGNPKPHVYWKKSGVPLTTGYRYKVSYNKQTGECKLVISMTFADDAGEYTIVVRNKHGETSASASLLEEADYELLMKSQQEMLYQTQVTAFVQEPKVGETAPGFVYSEYEKEYEKEQALIRKKMAKDTVVVRTYVEDQEFHISSFEERLIKEIEYRIIKTTLEELLEEDGEEKMAVDISESEAVESGFDSRIKNYRILEGMGVTFHCKMSGYPLPKIAWYKDGKRIKHGERYQMDFLQDGRASLRIPVVLPEDEGIYTAFASNIKGNAICSGKLYVEPAAPLGAPTYIPTLEPVSRIRSLSPRSVSRSPIRMSPARMSPARMSPARMSPARMSPGRRLEETDESQLERLYKPVFVLKPVSFKCLEGQTARFDLKVVGRPMPETFWFHDGQQIVNDYTHKVVIKEDGTQSLIIVPATPSDSGEWTVVAQNRAGRSSISVILTVEAVEHQVKPMFVEKLKNVNIKEGSRLEMKVRATGNPNPDIVWLKNSDIIVPHKYPKIRIEGTKGEAALKIDSTVSQDSAWYTATAINKAGRDTTRCKVNVEVEFAEPEPERKLIIPRGTYRAKEIAAPELEPLHLRYGQEQWEEGDLYDKEKQQKPFFKKKLTSLRLKRFGPAHFECRLTPIGDPTMVVEWLHDGKPLEAANRLRMINEFGYCSLDYGVAYSRDSGIITCRATNKYGTDHTSATLIVKDEKSLVEESQLPEGRKGLQRIEELERMAHEGALTGVTTDQKEKQKPDIVLYPEPVRVLEGETARFRCRVTGYPQPKVNWYLNGQLIRKSKRFRVRYDGIHYLDIVDCKSYDTGEVKVTAENPEGVIEHKVKLEIQQREDFRSVLRRAPEPRPEFHVHEPGKLQFEVQKVDRPVDTTETKEVVKLKRAERITHEKVPEESEELRSKFKRRTEEGYYEAITAVELKSRKKDESYEELLRKTKDELLHWTKELTEEEKKALAEEGKITIPTFKPDKIELSPSMEAPKIFERIQSQTVGQGSDAHFRVRVVGKPDPECEWYKNGVKIERSDRIYWYWPEDNVCELVIRDVTAEDSASIMVKAINIAGETSSHAFLLVQAKQLITFTQELQDVVAKEKDTMATFECETSEPFVKVKWYKDGMEVHEGDKYRMHSDRKVHFLSILTIDTSDAEDYSCVLVEDENVKTTAKLIVEGAVVEFVKELQDIEVPESYSGELECIVSPENIEGKWYHNDVELKSNGKYTITSRRGRQNLTVKDVTKEDQGEYSFVIDGKKTTCKLKMKPRPIAILQGLSDQKVCEGDIVQLEVKVSLESVEGVWMKDGQEVQPSDRVHIVIDKQSHMLLIEDMTKEDAGNYSFTIPALGLSTSGRVSVYSVDVITPLKDVNVIEGTKAVLECKVSVPDVTSVKWYLNDEQIKPDDRVQAIVKGTKQRLVINRTHASDEGPYKLIVGRVETNCNLSVEKIKIIRGLRDLTCTETQNVVFEVELSHSGIDVLWNFKDKEIKPSSKYKIEAHGKIYKLTVLNMMKDDEGKYTFYAGENMTSGKLTVAGGAISKPLTDQTVAESQEAVFECEVANPDSKGEWLRDGKHLPLTNNIRSESDGHKRRLIIAATKLDDIGEYTYKVATSKTSAKLKVEAVKIKKTLKNLTVTETQDAVFTVELTHPNVKGVQWIKNGVVLESNEKYAISVKGTIYSLRIKNCAIVDESVYGFRLGRLGASARLHVETVKIIKKPKDVTALENATVAFEVSVSHDTVPVKWFHKSVEIKPSDKHRLVSERKVHKLMLQNISPSDAGEYTAVVGQLECKAKLFVETLHITKTMKNIEVPETKTASFECEVSHFNVPSMWLKNGVEIEMSEKFKIVVQGKLHQLIIMNTSTEDSAEYTFVCGNDQVSATLTVTPIMITSMLKDINAEEKDTITFEVTVNYEGISYKWLKNGVEIKSTDKCQMRTKKLTHSLNIRNVHFGDAADYTFVAGKATSTATLYVEARHIEFRKHIKDIKVLEKKRAMFECEVSEPDITVQWMKDDQELQITDRIKIQKEKYVHRLLIPSTRMSDAGKYTVVAGGNVSTAKLFVEGRDVRIRSIKKEVQVIEKQRAVVEFEVNEDDVDAHWYKDGIEINFQVQERHKYVVERRIHRMFISETRQSDAGEYTFVAGRNRSSVTLYVNAPEPPQVLQELQPVTVQSGKPARFCAVISGRPQPKISWYKEEQLLSTGFKCKFLHDGQEYTLLLIEAFPEDAAVYTCEAKNDYGVATTSASLSVEVPEVVSPDQEMPVYPPAIITPLQDTVTSEGQPARFQCRVSGTDLKVSWYSKDKKIKPSRFFRMTQFEDTYQLEIAEAYPEDEGTYTFVASNAVGQVSSTANLSLEAPESILHERIEQEIEMEMKEFSSSFLSAEEEGLHSAELQLSKINETLELLSESPVYPTKFDSEKEGTGPIFIKEVSNADISMGDVATLSVTVIGIPKPKIQWFFNGVLLTPSADYKFVFDGDDHSLIILFTKLEDEGEYTCMASNDYGKTICSAYLKINSKGEGHKDTETESAVAKSLEKLGGPCPPHFLKELKPIRCAQGLPAIFEYTVVGEPAPTVTWFKENKQLCTSVYYTIIHNPNGSGTFIVNDPQREDSGLYICKAENMLGESTCAAELLVLLEDTDMTDTPCKAKSTPEAPEDFPQTPLKGPAVEALDSEQEIATFVKDTILKAALITEENQQLSYEHIAKANELSSQLPLGAQELQSILEQDKLTPESTREFLCINGSIHFQPLKEPSPNLQLQIVQSQKTFSKEGILMPEEPETQAVLSDTEKIFPSAMSIEQINSLTVEPLKTLLAEPEGNYPQSSIEPPMHSYLTSVAEEVLSPKEKTVSDTNREQRVTLQKQEAQSALILSQSLAEGHVESLQSPDVMISQVNYEPLVPSEHSCTEGGKILIESANPLENAGQDSAVRIEEGKSLRFPLALEEKQVLLKEEHSDNVVMPPDQIIESKREPVAIKKVQEVQGRDLLSKESLLSGIPEEQRLNLKIQICRALQAAVASEQPGLFSEWLRNIEKVEVEAVNITQEPRHIMCMYLVTSAKSVTEEVTIIIEDVDPQMANLKMELRDALCAIIYEEIDILTAEGPRIQQGAKTSLQEEMDSFSGSQKVEPITEPEVESKYLISTEEVSYFNVQSRVKYLDATPVTKGVASAVVSDEKQDESLKPSEEKEESSSESGTEEVATVKIQEAEGGLIKEDGPMIHTPLVDTVSEEGDIVHLTTSITNAKEVNWYFENKLVPSDEKFKCLQDQNTYTLVIDKVNTEDHQGEYVCEALNDSGKTATSAKLTVVKRAAPVIKRKIEPLEVALGHLAKFTCEIQSAPNVRFQWFKAGREIYESDKCSIRSSKYISSLEILRTQVVDCGEYTCKASNEYGSVSCTATLTVTVPGGEKKVRKLLPERKPEPKEEVVLKSVLRKRPEEEEPKVEPKKLEKVKKPAVPEPPPPKPVEEVEVPTVTKRERKIPEPTKVPEIKPAIPLPAPEPKPKPEAEVKTIKPPPVEPEPTPIAAPVTVPVVGKKAEAKAPKEEAAKPKGPIKGVPKKTPSPIEAERRKLRPGSGGEKPPDEAPFTYQLKAVPLKFVKEIKDIILTESEFVGSSAIFECLVSPSTAITTWMKDGSNIRESPKHRFIADGKDRKLHIIDVQLSDAGEYTCVLRLGNKEKTSTAKLVVEELPVRFVKTLEEEVTVVKGQPLYLSCELNKERDVVWRKDGKIVVEKPGRIVPGVIGLMRALTINDADDTDAGTYTVTVENANNLECSSCVKVVEVIRDWLVKPIRDQHVKPKGTAIFACDIAKDTPNIKWFKGYDEIPAEPNDKTEILRDGNHLYLKIKNAMPEDIAEYAVEIEGKRYPAKLTLGEREVELLKPIEDVTIYEKESASFDAEISEADIPGQWKLKGELLRPSPTCEIKAEGGKRFLTLHKVKLDQAGEVLYQALNAITTAILTVKEIELDFAVPLKDVTVPERRQARFECVLTREANVIWSKGPDIIKSSDKFDIIADGKKHILVINDSQFDDEGVYTAEVEGKKTSARLFVTGIRLKFMSPLEDQTVKEGETATFVCELSHEKMHVVWFKNDAKLHTSRTVLISSEGKTHKLEMKEVTLDDISQIKAQVKELSSTAQLKVLEADPYFTVKLHDKTAVEKDEITLKCEVSKDVPVKWFKDGEEIVPSPKYSIKADGLRRILKIKKADLKDKGEYVCDCGTDKTKANVTVEARLIKVEKPLYGVEVFVGETAHFEIELSEPDVHGQWKLKGQPLTASPDCEIIEDGKKHILILHNCQLGMTGEVSFQAANAKSAANLKVKELPLIFITPLSDVKVFEKDEAKFECEVSREPKTFRWLKGTQEITGDDRFELIKDGTKHSMVIKSAAFEDEAKYMFEAEDKHTSGKLIIEGIRLKFLTPLKDVTAKEKESAVFTVELSHDNIRVKWFKNDQRLHTTRSVSMQDEGKTHSITFKDLSIDDTSQIRVEAMGMSSEAKLTVLEGDPYFTGKLQDYTGVEKDEVILQCEISKADAPVKWFKDGKEIKPSKNAVIKADGKKRMLILKKALKSDIGQYTCDCGTDKTSGKLDIEDREIKLVRPLHSVEVMETETARFETEISEDDIHANWKLKGEALLQTPDCEIKEEGKIHSLVLHNCRLDQTGGVDFQAANVKSSAHLRVKPRVIGLLRPLKDVTVTAGETATFDCELSYEDIPVEWYLKGKKLEPSDKVVPRSEGKVHTLTLRDVKLEDAGEVQLTAKDFKTHANLFVKEPPVEFTKPLEDQTVEEGATAVLECEVSRENAKVKWFKNGTEILKSKKYEIVADGRVRKLVIHDCTPEDIKTYTCDAKDFKTSCNLNVVPPHVEFLRPLTDLQVREKEMARFECELSRENAKVKWFKDGAEIKKGKKYDIISKGAVRILVINKCLLDDEAEYSCEVRTARTSGMLTVLEEEAVFTKNLANIEVSETDTIKLVCEVSKPGAEVIWYKGDEEIIETGRYEILTEGRKRILVIQNAHLEDAGNYNCRLPSSRTDGKVKVHELAAEFISKPQNLEILEGEKAEFVCSISKESFPVQWKRDDKTLESGDKYDVIADGKKRVLVVKDATLQDMGTYVVMVGAARAAAHLTVIEKLRIVVPLKDTRVKEQQEVVFNCEVNTEGAKAKWFRNEEAIFDSSKYIILQKDLVYTLRIRDAHLDDQANYNVSLTNHRGENVKSAANLIVEEEDLRIVEPLKDIETMEKKSVTFWCKVNRLNVTLKWTKNGEEVPFDNRVSYRVDKYKHMLTIKDCGFPDEGEYIVTAGQDKSVAELLIIEAPTEFVEHLEDQTVTEFDDAVFSCQLSREKANVKWYRNGREIKEGKKYKFEKDGSIHRLIIKDCRLDDECEYACGVEDRKSRARLFVEEIPVEIIRPPQDILEAPGADVVFLAELNKDKVEVQWLRNNMVVVQGDKHQMMSEGKIHRLQICDIKPRDQGEYRFIAKDKEARAKLELAAAPKIKTADQDLVVDVGKPLTMVVPYDAYPKAEAEWFKENEPLSTKTIDTTAEQTSFRILEAKKGDKGRYKIVLQNKHGKAEGFINLKVIDVPGPVRNLEVTETFDGEVSLAWEEPLTDGGSKIIGYVVERRDIKRKTWVLATDRAESCEFTVTGLQKGGVEYLFRVSARNRVGTGEPVETDNPVEARSKYDVPGPPLNVTITDVNRFGVSLTWEPPEYDGGAEITNYVIELRDKTSIRWDTAMTVRAEDLSATVTDVVEGQEYSFRVRAQNRIGVGKPSAATPFVKVADPIERPSPPVNLTSSDQTQSSVQLKWEPPLKDGGSPILGYIIERCEEGKDNWIRCNMKLVPELTYKVTGLEKGNKYLYRVSAENKAGVSDPSEILGPLTADDAFVEPTMDLSAFKDGLEVIVPNPITILVPSTGYPRPTATWCFGDKVLETGDRVKMKTLSAYAELVISPSERSDKGIYTLKLENRVKTISGEIDVNVIARPSAPKELKFGDITKDSVHLTWEPPDDDGGSPLTGYVVEKREVSRKTWTKVMDFVTDLEFTVPDLVQGKEYLFKVCARNKCGPGEPAYVDEPVNMSTPATVPDPPENVKWRDRTANSIFLTWDPPKNDGGSRIKGYIVERCPRGSDKWVACGEPVAETKMEVTGLEEGKWYAYRVKALNRQGASKPSRPTEEIQAVDTQEAPEIFLDVKLLAGLTVKAGTKIELPATVTGKPEPKITWTKADMILKQDKRITIENVPKKSTVTIVDSKRSDTGTYIIEAVNVCGRATAVVEVNVLDKPGPPAAFDITDVTNESCLLTWNPPRDDGGSKITNYVVERRATDSEVWHKLSSTVKDTNFKATKLIPNKEYIFRVAAENMYGVGEPVQASPITAKYQFDPPGPPTRLEPSDITKDAVTLTWCEPDDDGGSPITGYWVERLDPDTDKWVRCNKMPVKDTTYRVKGLTNKKKYRFRVLAENLAGPGKPSKSTEPILIKDPIDPPWPPGKPTVKDVGKTSVRLNWTKPEHDGGAKIESYVIEMLKTGTDEWVRVAEGVPTTQHLLPGLMEGQEYSFRVRAVNKAGESEPSEPSDPVLCREKLYPPSPPRWLEVINITKNTADLKWTVPEKDGGSPITNYIVEKRDVRRKGWQTVDTTVKDTKCTVTPLTEGSLYVFRVAAENAIGQSDYTEIEDSVLAKDTFTTPGPPYALAVVDVTKRHVDLKWEPPKNDGGRPIQRYVIEKKERLGTRWVKAGKTAGPDCNFRVTDVIEGTEVQFQVRAENEAGVGHPSEPTEILSIEDPTSPPSPPLDLHVTDAGRKHIAIAWKPPEKNGGSPIIGYHVEMCPVGTEKWMRVNSRPIKDLKFKVEEGVVPDKEYVLRVRAVNAIGVSEPSEISENVVAKDPDCKPTIDLETHDIIVIEGEKLSIPVPFRAVPVPTVSWHKDGKEVKASDRLTMKNDHISAHLEVPKSVRADAGIYTITLENKLGSATASINVKVIGLPGPCKDIKASDITKSSCKLTWEPPEFDGGTPILHYVLERREAGRRTYIPVMSGENKLSWTVKDLIPNGEYFFRVKAVNKVGGGEYIELKNPVIAQDPKQPPDPPVDVEVHNPTAEAMTITWKPPLYDGGSKIMGYIIEKIAKGEERWKRCNEHLVPILTYTAKGLEEGKEYQFRVRAENAAGISEPSRATPPTKAVDPIDAPKVILRTSLEVKRGDEIALDASISGSPYPTITWIKDENVIVPEEIKKRAAPLVRRRKGEVQEEEPFVLPLTQRLSIDNSKKGESQLRVRDSLRPDHGLYMIKVENDHGIAKAPCTVSVLDTPGPPINFVFEDIRKTSVLCKWEPPLDDGGSEIINYTLEKKDKTKPDSEWIVVTSTLRHCKYSVTKLIEGKEYLFRVRAENRFGPGPPCVSKPLVAKDPFGPPDAPDKPIVEDVTSNSMLVKWNEPKDNGSPILGYWLEKREVNSTHWSRVNKSLLNALKANVDGLLEGLTYVFRVCAENAAGPGKFSPPSDPKTAHDPISPPGPPIPRVTDTSSTTIELEWEPPAFNGGGEIVGYFVDKQLVGTNEWSRCTEKMIKVRQYTVKEIREGADYKLRVSAVNAAGEGPPGETQPVTVAEPQEPPAVELDVSVKGGIQIMAGKTLRIPAVVTGRPVPTKVWTKEEGELDKDRVVIDNVGTKSELIIKDALRKDHGRYVITATNSCGSKFAAARVEVFDVPGPVLDLKPVVTNRKMCLLNWSDPEDDGGSEITGFIIERKDAKMHTWRQPIETERSKCDITGLLEGQEYKFRVIAKNKFGCGPPVEIGPILAVDPLGPPTSPERLTYTERTKSTITLDWKEPRSNGGSPIQGYIIEKRRHDKPDFERVNKRLCPTTSFLVENLDEHQMYEFRVKAVNEIGESEPSLPLNVVIQDDEVPPTIKLRLSVRGDTIKVKAGEPVHIPADVTGLPMPKIEWSKNETVIEKPTDALQITKEEVSRSEAKTELSIPKAVREDKGTYTVTASNRLGSVFRNVHVEVYDRPSPPRNLAVTDIKAESCYLTWDAPLDNGGSEITHYVIDKRDASRKKAEWEEVTNTAVEKRYGIWKLIPNGQYEFRVRAVNKYGISDECKSDKVVIQDPYRLPGPPGKPKVLARTKGSMLVSWTPPLDNGGSPITGYWLEKREEGSPYWSRVSRAPITKVGLKGVEFNVPRLLEGVKYQFRAMAINAAGIGPPSEPSDPEVAGDPIFPPGPPSCPEVKDKTKSSISLGWKPPAKDGGSPIKGYIVEMQEEGTTDWKRVNEPDKLITTCECVVPNLKELRKYRFRVKAVNEAGESEPSDTTGEIPATDIQEEPEVFIDIGAQDCLVCKAGSQIRIPAVIKGRPTPKSSWEFDGKAKKAMKDGVHDIPEDAQLETAENSSVIIIPECKRSHTGKYSITAKNKAGQKTANCRVKVMDVPGPPKDLKVSDITRGSCRLSWKMPDDDGGDRIKGYVIEKRTIDGKAWTKVNPDCGSTTFVVPDLLSEQQYFFRVRAENRFGIGPPVETIQRTTARDPIYPPDPPIKLKIGLITKNTVHLSWKPPKNDGGSPVTHYIVECLAWDPTGTKKEAWRQCNKRDVEELQFTVEDLVEGGEYEFRVKAVNAAGVSKPSATVGPVTVKDQTCPPSIDLKEFMEVEEGTNVNIVAKIKGVPFPTLTWFKAPPKKPDNKEPVLYDTHVNKLVVDDTCTLVIPQSRRSDTGLYTITAVNNLGTASKEMRLNVLGRPGPPVGPIKFESVSADQMTLSWFPPKDDGGSKITNYVIEKREANRKTWVHVSSEPKECTYTIPKLLEGHEYVFRIMAQNKYGIGEPLDSEPETARNLFSVPGAPDKPTVSSVTRNSMTVNWEEPEYDGGSPVTGYWLEMKDTTSKRWKRVNRDPIKAMTLGVSYKVTGLIEGSDYQFRVYAINAAGVGPASLPSDPATARDPIAPPGPPFPKVTDWTKSSADLEWSPPLKDGGSKVTGYIVEYKEEGKEEWEKGKDKEVRGTKLVVTGLKEGAFYKFRVRAVNIAGIGEPGEVTDVIEMKDRLVSPDLQLDASVRDRIVVHAGGVIRIIAYVSGKPPPTVTWNMNERTLPQEATIETTAISSSMVIKNCQRSHQGVYSLLAKNEAGERKKTIIVDVLDVPGPVGTPFLAHNLTNESCKLTWFSPEDDGGSPITNYVIEKRESDRRAWTPVTYTVTRQNATVQGLIQGKAYFFRIAAENSIGMGPFVETSEALVIREPITVPERPEDLEVKEVTKNTVTLTWNPPKYDGGSEIINYVLESRLIGTEKFHKVTNDNLLSRKYTVKGLKEGDTYEYRVSAVNIVGQGKPSFCTKPITCKDELAPPTLHLDFRDKLTIRVGEAFALTGRYSGKPKPKVSWFKDEADVLEDDRTHIKTTPATLALEKIKAKRSDSGKYCVVVENSTGSRKGFCQVNVVDRPGPPVGPVSFDEVTKDYMVISWKPPLDDGGSKITNYIIEKKEVGKDVWMPVTSASAKTTCKVSKLLEGKDYIFRIHAENLYGISDPLVSDSMKAKDRFRVPDAPDQPIVTEVTKDSALVTWNKPHDGGKPITNYILEKRETMSKRWARVTKDPIHPYTKFRVPDLLEGCQYEFRVSAENEIGIGDPSPPSKPVFAKDPIAKPSPPVNPEAIDTTCNSVDLTWQPPRHDGGSKILGYIVEYQKVGDEEWRRANHTPESCPETKYKVTGLRDGQTYKFRVLAVNAAGESDPAHVPEPVLVKDRLEPPELILDANMAREQHIKVGDTLRLSAIIKGVPFPKVTWKKEDRDAPTKARIDVTPVGSKLEIRNAAHEDGGIYSLTVENPAGSKTVSVKVLVLDKPGPPRDLEVSEIRKDSCYLTWKEPLDDGGSVITNYVVERRDVASAQWSPLSATSKKKSHFAKHLNEGNQYLFRVAAENQYGRGPFVETPKPIKALDPLHPPGPPKDLHHVDVDKTEVSLVWNKPDRDGGSPITGYLVEYQEEGTQDWIKFKTVTNLECVVTGLQQGKTYRFRVKAENIVGLGLPDTTIPIECQEKLVPPSVELDVKLIEGLVVKAGTTVRFPAIIRGVPVPTAKWTTDGSEIKTDEHYTVETDNFSSVLTIKNCLRRDTGEYQITVSNAAGSKTVAVHLTVLDVPGPPTGPINILDVTPEHMTISWQPPKDDGGSPVINYIVEKQDTRKDTWGVVSSGSSKTKLKIPHLQKGCEYVFRVRAENKIGVGPPLDSTPTVAKHKFSPPSPPGKPVVTDITENAATVSWTLPKSDGGSPITGYYMERREVTGKWVRVNKTPIADLKFRVTGLYEGNTYEFRVFAENLAGLSKPSPSSDPIKACRPIKPPGPPINPKLKDKSRETADLVWTKPLSDGGSPILGYVVECQKPGTAQWNRINKDELIRQCAFRVPGLIEGNEYRFRIKAANIVGEGEPRELAESVIAKDILHPPEVELDVTCRDVITVRVGQTIRILARVKGRPEPDITWTKEGKVLVREKRVDLIQDLPRVELQIKEAVRADHGKYIISAKNSSGHAQGSAIVNVLDRPGPCQNLKVTNVTKENCTISWENPLDNGGSEITNFIVEYRKPNQKGWSIVASDVTKRLIKANLLANNEYYFRVCAENKVGVGPTIETKTPILAINPIDRPGEPENLHIADKGKTFVYLKWRRPDYDGGSPNLSYHVERRLKGSDDWERVHKGSIKETHYMVDRCVENQIYEFRVQTKNEGGESDWVKTEEVVVKEDLQKPVLDLKLSGVLTVKAGDTIRLEAGVRGKPFPEVAWTKDKDATDLTRSPRVKIDTRADSSKFSLTKAKRSDGGKYVVTATNTAGSFVAYATVNVLDKPGPVRNLKIVDVSSDRCTVCWDPPEDDGGCEIQNYILEKCETKRMVWSTYSATVLTPGTTVTRLIEGNEYIFRVRAENKIGTGPPTESKPVIAKTKYDKPGRPDPPEVTKVSKEEMTVVWNPPEYDGGKSITGYFLEKKEKHSTRWVPVNKSAIPERRMKVQNLLPDHEYQFRVKAENEIGIGEPSLPSRPVVAKDPIEPPGPPTNFRVVDTTKHSITLGWGKPVYDGGAPIIGYVVEMRPKIADASPDEGWKRCNAAAQLVRKEFTVTSLDENQEYEFRVCAQNQVGIGRPAELKEAIKPKEILEPPEIDLDASMRKLVIVRAGCPIRLFAIVRGRPAPKVTWRKVGIDNVVRKGQVDLVDTMAFLVIPNSTRDDSGKYSLTLVNPAGEKAVFVNVRVLDTPGPVSDLKVSDVTKTSCHVSWAPPENDGGSQVTHYIVEKREADRKTWSTVTPEVKKTSFHVTNLVPGNEYYFRVTAVNEYGPGVPTDVPKPVLASDPLSEPDPPRKLEVTEMTKNSATLAWLPPLRDGGAKIDGYITSYREEEQPADRWTEYSVVKDLSLVVTGLKEGKKYKFRVAARNAVGVSLPREAEGVYEAKEQLLPPKILMPEQITIKAGKKLRIEAHVYGKPHPTCKWKKGEDEVVTSSHLAVHKADSSSILIIKDVTRKDSGYYSLTAENSSGTDTQKIKVVVMDAPGPPQPPFDISDIDADACSLSWHIPLEDGGSNITNYIVEKCDVSRGDWVTALASVTKTSCRVGKLIPGQEYIFRVRAENRFGISEPLTSPKMVAQFPFGVPSEPKNARVTKVNKDCIFVAWDRPDSDGGSPIIGYLIERKERNSLLWVKANDTLVRSTEYPCAGLVEGLEYSFRIYALNKAGSSPPSKPTEYVTARMPVDPPGKPEVIDVTKSTVSLIWARPKHDGGSKIIGYFVEACKLPGDKWVRCNTAPHQIPQEEYTATGLEEKAQYQFRAIARTAVNISPPSEPSDPVTILAENVPPRIDLSVAMKSLLTVKAGTNVCLDATVFGKPMPTVSWKKDGTLLKPAEGIKMAMQRNLCTLELFSVNRKDSGDYTITAENSSGSKSATIKLKVLDKPGPPASVKINKMYSDRAMLSWEPPLEDGGSEITNYIVDKRETSRPNWAQVSATVPITSCSVEKLIEGHEYQFRICAENKYGVGDPVFTEPAIAKNPYDPPGRCDPPVISNITKDHMTVSWKPPADDGGSPITGYLLEKRETQAVNWTKVNRKPIIERTLKATGLQEGTEYEFRVTAINKAGPGKPSDASKAAYARDPQYPPGPPAFPKVYDTTRSSVSLSWGKPAYDGGSPIIGYLVEVKRADSDNWVRCNLPQNLQKTRFEVTGLMEDTQYQFRVYAVNKIGYSDPSDVPDKHYPKDILIPPEGELDADLRKTLILRAGVTMRLYVPVKGRPPPKITWSKPNVNLRDRIGLDIKSTDFDTFLRCENVNKYDAGKYILTLENSCGKKEYTIVVKVLDTPGPPVNVTVKEISKDSAYVTWEPPIIDGGSPIINYVVQKRDAERKSWSTVTTECSKTSFRVANLEEGKSYFFRVFAENEYGIGDPGETRDAVKASQTPGPVVDLKVRSVSKSSCSIGWKKPHSDGGSRIIGYVVDFLTEENKWQRVMKSLSLQYSAKDLTEGKEYTFRVSAENENGEGTPSEITVVARDDVVAPDLDLKGLPDLCYLAKENSNFRLKIPIKGKPAPSVSWKKGEDPLATDTRVSVESSAVNTTLIVYDCQKSDAGKYTITLKNVAGTKEGTISIKVVGKPGIPTGPIKFDEVTAEAMTLKWAPPKDDGGSEITNYILEKRDSVNNKWVTCASAVQKTTFRVTRLHEGMEYTFRVSAENKYGVGEGLKSEPIVARHPFDVPDAPPPPNIVDVRHDSVSLTWTDPKKTGGSPITGYHLEFKERNSLLWKRANKTPIRMRDFKVTGLTEGLEYEFRVMAINLAGVGKPSLPSEPVVALDPIDPPGKPEVINITRNSVTLIWTEPKYDGGHKLTGYIVEKRDLPSKSWMKANHVNVPECAFTVTDLVEGGKYEFRIRAKNTAGAISAPSESTETIICKDEYEAPTIVLDPTIKDGLTIKAGDTIVLNAISILGKPLPKSSWSKAGKDIRPSDITQITSTPTSSMLTIKYATRKDAGEYTITATNPFGTKVEHVKVTVLDVPGPPGPVEISNVSAEKATLTWTPPLEDGGSPIKSYILEKRETSRLLWTVVSEDIQSCRHVATKLIQGNEYIFRVSAVNHYGKGEPVQSEPVKMVDRFGPPGPPEKPEVSNVTKNTATVSWKRPVDDGGSEITGYHVERREKKSLRWVRAIKTPVSDLRCKVTGLQEGSTYEFRVSAENRAGIGPPSEASDSVLMKDAAYPPGPPSNPHVTDTTKKSASLAWGKPHYDGGLEITGYVVEHQKVGDEAWIKDTTGTALRITQFVVPDLQTKEKYNFRISAINDAGVGEPAVIPDVEIVEREMAPDFELDAELRRTLVVRAGLSIRIFVPIKGRPAPEVTWTKDNINLKNRANIENTESFTLLIIPECNRYDTGKFVMTIENPAGKKSGFVNVRVLDTPGPVLNLRPTDITKDSVTLHWDLPLIDGGSRITNYIVEKREATRKSYSTATTKCHKCTYKVTGLSEGCEYFFRVMAENEYGIGEPTETTEPVKASEAPSPPDSLNIMDITKSTVSLAWPKPKHDGGSKITGYVIEAQRKGSDQWTHITTVKGLECVVRNLTEGEEYTFQVMAVNSAGRSAPRESRPVIVKEQTMLPELDLRGIYQKLVIAKAGDNIKVEIPVLGRPKPTVTWKKGDQILKQTQRVNFETTATSTILNINECVRSDSGPYPLTARNIVGEVGDVITIQVHDIPGPPTGPIKFDEVSSDFVTFSWDPPENDGGVPISNYVVEMRQTDSTTWVELATTVIRTTYKATRLTTGLEYQFRVKAQNRYGVGPGITSACIVANYPFKVPGPPGTPQVTAVTKDSMTISWHEPLSDGGSPILGYHVERKERNGILWQTVSKALVPGNIFKSSGLTDGIAYEFRVIAENMAGKSKPSKPSEPMLALDPIDPPGKPVPLNITRHTVTLKWAKPEYTGGFKITSYIVEKRDLPNGRWLKANFSNILENEFTVSGLTEDAAYEFRVIAKNAAGAISPPSEPSDAITCRDDVEAPKIKVDVKFKDTVILKAGEAFRLEADVSGRPPPTMEWSKDGKELEGTAKLEIKIADFSTNLVNKDSTRRDSGAYTLTATNPGGFAKHIFNVKVLDRPGPPEGPLAVTEVTSEKCVLSWFPPLDDGGAKIDHYIVQKRETSRLAWTNVASEVQVTKLKVTKLLKGNEYIFRVMAVNKYGVGEPLESEPVLAVNPYGPPDPPKNPEVTTITKDSMVVCWGHPDSDGGSEIINYIVERRDKAGQRWIKCNKKTLTDLRYKVSGLTEGHEYEFRIMAENAAGISAPSPTSPFYKACDTVFKPGPPGNPRVLDTSRSSISIAWNKPIYDGGSEITGYMVEIALPEEDEWQIVTPPAGLKATSYTITGLTENQEYKIRIYAMNSEGLGEPALVPGTPKAEDRMLPPEIELDADLRKVVTIRACCTLRLFVPIKGRPAPEVKWARDHGESLDKASIESTSSYTLLIVGNVNRFDSGKYILTVENSSGSKSAFVNVRVLDTPGPPQDLKVKEVTKTSVTLTWDPPLLDGGSKIKNYIVEKRESTRKAYSTVATNCHKTSWKVDQLQEGCSYYFRVLAENEYGIGLPAETAESVKASERPLPPGKITLMDVTRNSVSLSWEKPEHDGGSRILGYIVEMQTKGSDKWATCATVKVTEATITGLIQGEEYSFRVSAQNEKGISDPRQLSVPVIAKDLVIPPAFKLLFNTFTVLAGEDLKVDVPFIGRPTPAVTWHKDNVPLKQTTRVNAESTENNSLLTIKDACREDVGHYVVKLTNSAGEAIETLNVIVLDKPGPPTGPVKMDEVTADSITLSWGPPKYDGGSSINNYIVEKRDTSTTTWQIVSATVARTTIKACRLKTGCEYQFRIAAENRYGKSTYLNSEPTVAQYPFKVPGPPGTPVVTLSSRDSMEVQWNEPISDGGSRVIGYHLERKERNSILWVKLNKTPIPQTKFKTTGLEEGVEYEFRVSAENIVGIGKPSKVSECYVARDPCDPPGRPEAIIVTRNSVTLQWKKPTYDGGSKITGYIVEKKELPEGRWMKASFTNIIDTHFEVTGLVEDHRYEFRVIARNAAGVFSEPSESTGAITARDEVDPPRISMDPKYKDTIVVHAGESFKVDADIYGKPIPTIQWIKGDQELSNTARLEIKSTDFATSLSVKDAVRVDSGNYILKAKNVAGERSVTVNVKVLDRPGPPEGPVVISGVTAEKCTLAWKPPLQDGGSDIINYIVERRETSRLVWTVVDANVQTLSCKVTKLLEGNEYTFRIMAVNKYGVGEPLESEPVVAKNPFVVPDAPKAPEVTTVTKDSMIVVWERPASDGGSEILGYVLEKRDKEGIRWTRCHKRLIGELRLRVTGLIENHDYEFRVSAENAAGLSEPSPPSAYQKACDPIYKPGPPNNPKVIDITRSSVFLSWSKPIYDGGCEIQGYIVEKCDVSVGEWTMCTPPTGINKTNIEVEKLLEKHEYNFRICAINKAGVGEHADVPGPIIVEEKLEAPDIDLDLELRKIINIRAGGSLRLFVPIKGRPTPEVKWGKVDGEIRDAAIIDVTSSFTSLVLDNVNRYDSGKYTLTLENSSGTKSAFVTVRVLDTPSPPVNLKVTEITKDSVSITWEPPLLDGGSKIKNYIVEKREATRKSYAAVVTNCHKNSWKIDQLQEGCSYYFRVTAENEYGIGLPAQTADPIKVAEVPQPPGKITVDDVTRNSVSLSWTKPEHDGGSKIIQYIVEMQAKHSEKWSECARVKSLQAVITNLTQGEEYLFRVVAVNEKGRSDPRSLAVPIVAKDLVIEPDVKPAFSSYSVQVGQDLKIEVPISGRPKPTITWTKDGLPLKQTTRINVTDSLDLTTLSIKETHKDDGGQYGITVANVVGQKTASIEIVTLDKPDPPKGPVKFDDVSAESITLSWNPPLYTGGCQITNYIVQKRDTTTTVWDVVSATVARTTLKVTKLKTGTEYQFRIFAENRYGQSFALESDPIVAQYPYKEPGPPGTPFATAISKDSMVIQWHEPVNNGGSPVIGYHLERKERNSILWTKVNKTIIHDTQFKAQNLEEGIEYEFRVYAENIVGVGKASKNSECYVARDPCDPPGTPEPIMVKRNEITLQWTKPVYDGGSMITGYIVEKRDLPDGRWMKASFTNVIETQFTVSGLTEDQRYEFRVIAKNAAGAISKPSDSTGPITAKDEVELPRISMDPKFRDTIVVNAGETFRLEADVHGKPLPTIEWLRGDKEIEESARCEIKNTDFKALLIVKDAIRIDGGQYILRASNVAGSKSFPVNVKVLDRPGPPEGPVQVTGVTSEKCSLTWSPPLQDGGSDISHYVVEKRETSRLAWTVVASEVVTNSLKVTKLLEGNEYVFRIMAVNKYGVGEPLESAPVLMKNPFVLPGPPKSLEVTNIAKDSMTVCWNRPDSDGGSEIIGYIVEKRDRSGIRWIKCNKRRITDLRLRVTGLTEDHEYEFRVSAENAAGVGEPSPATVYYKACDPVFKPGPPTNAHIVDTTKNSITLAWGKPIYDGGSEILGYVVEICKADEEEWQIVTPQTGLRVTRFEISKLTEHQEYKIRVCALNKVGLGEATSVPGTVKPEDKLEAPELDLDSELRKGIVVRAGGSARIHIPFKGRPTPEITWSREEGEFTDKVQIEKGVNYTQLSIDNCDRNDAGKYILKLENSSGSKSAFVTVKVLDTPGPPQNLAVKEVRKDSAFLVWEPPIIDGGAKVKNYVIDKRESTRKAYANVSSKCSKTSFKVENLTEGAIYYFRVMAENEFGVGVPVETVDAVKAAEPPSPPGKVTLTDVSQTSASLMWEKPEHDGGSRVLGYVVEMQPKGTEKWSIVAESKVCNAVVTGLSSGQEYQFRVKAYNEKGKSDPRVLGVPVIAKDLTIQPSLKLPFNTYSIQAGEDLKIEIPVIGRPRPNISWVKDGEPLKQTTRVNVEETATSTVLHIKEGNKDDFGKYTVTATNSAGTATENLSVIVLEKPGPPVGPVRFDEVSADFVVISWEPPAYTGGCQISNYIVEKRDTTTTTWHMVSATVARTTIKITKLKTGTEYQFRIFAENRYGKSAPLDSKAVIVQYPFKEPGPPGTPFVTSISKDQMLVQWHEPVNDGGTKIIGYHLEQKEKNSILWVKLNKTPIQDTKFKTTGLDEGLEYEFKVSAENIVGIGKPSKVSECFVARDPCDPPGRPEAIVITRNNVTLKWKKPAYDGGSKITGYIVEKKDLPDGRWMKASFTNVLETEFTVSGLVEDQRYEFRVIARNAAGNFSEPSDSSGAITARDEIDAPNASLDPKYKDVIVVHAGETFVLEADIRGKPIPDVVWSKDGKELEETAARMEIKSTIQKTTLVVKDCIRTDGGQYILKLSNVGGTKSIPITVKVLDRPGPPEGPLKVTGVTAEKCYLAWNPPLQDGGANISHYIIEKRETSRLSWTQVSTEVQALNYKVTKLLPGNEYIFRVMAVNKYGIGEPLESGPVTACNPYKPPGPPSTPEVSAITKDSMVVTWARPVDDGGTEIEGYILEKRDKEGVRWTKCNKKTLTDLRLRVTGLTEGHSYEFRVAAENAAGVGEPSEPSVFYRACDALYPPGPPSNPKVTDTSRSSVSLAWSKPIYDGGAPVKGYVVEVKEAAADEWTTCTPPTGLQGKQFTVTKLKENTEYNFRICAINSEGVGEPATLPGSVVAQERIEPPEIELDADLRKVVVLRASATLRLFVTIKGRPEPEVKWEKAEGILTDRAQIEVTSSFTMLVIDNVTRFDSGRYNLTLENNSGSKTAFVNVRVLDSPSAPVNLTIREVKKDSVTLSWEPPLIDGGAKITNYIVEKRETTRKAYATITNNCTKTTFRIENLQEGCSYYFRVLASNEYGIGLPAETTEPVKVSEPPLPPGRVTLVDVTRNTATIKWEKPESDGGSKITGYVVEMQTKGSEKWSTCTQVKTLEATISGLTAGEEYVFRVAAVNEKGRSDPRQLGVPVIARDIEIKPSVELPFHTFNVKAREQLKIDVPFKGRPQATVNWRKDGQTLKETTRVNVSSSKTVTSLSIKEASKEDVGTYELCVSNSAGSITVPITIIVLDRPGPPGPIRIDEVSCDSITISWNPPEYDGGCQISNYIVEKKETTSTTWHIVSQAVARTSIKIVRLTTGSEYQFRVCAENRYGKSSYSESSAVVAEYPFSPPGPPGTPKVVHATKSTMLVTWQVPVNDGGSRVIGYHLEYKERSSILWSKANKILIADTQMKVSGLDEGLMYEYRVYAENIAGIGKCSKSCEPVPARDPCDPPGQPEVTNITRKSVSLKWSKPHYDGGAKITGYIVERRELPDGRWLKCNYTNIQETYFEVTELTEDQRYEFRVFARNAADSVSEPSESTGPIIVKDDVEPPRVMMDVKFRDVIVVKAGEVLKINADIAGRPLPVISWAKDGIEIEERARTEIISTDNHTLLTVKDCIRRDTGQYVLTLKNVAGTRSVAVNCKVLDKPGPPAGPLEINGLTAEKCSLSWGRPQEDGGADIDYYIVEKRETSHLAWTICEGELQMTSCKVTKLLKGNEYIFRVTGVNKYGVGEPLESVAIKALDPFTVPSPPTSLEITSVTKESMTLCWSRPESDGGSEISGYIIERREKNSLRWVRVNKKPVYDLRVKSTGLREGCEYEYRVYAENAAGLSLPSETSPLIRAEDPVFLPSPPSKPKIVDSGKTTITIAWVKPLFDGGAPITGYTVEYKKSDDTDWKTSIQSLRGTEYTISGLTTGAEYVFRVKSVNKVGASDPSDSSDPQIAKEREEEPLFDIDSEMRKTLIVKAGASFTMTVPFRGRPVPNVLWSKPDTDLRTRAYVDTTDSRTSLTIENANRNDSGKYTLTIQNVLSAASLTLVVKVLDTPGPPTNITVQDVTKESAVLSWDVPENDGGAPVKNYHIEKREASKKAWVSVTNNCNRLSYKVTNLQEGAIYYFRVSGENEFGVGIPAETKEGVKITEKPSPPEKLGVTSISKDSVSLTWLKPEHDGGSRIVHYVVEALEKGQKNWVKCAVAKSTHHVVSGLRENSEYFFRVFAENQAGLSDPRELLLPVLIKEQLEPPEIDMKNFPSHTVYVRAGSNLKVDIPISGKPLPKVTLSRDGVPLKATMRFNTEITAENLTINLKESVTADAGRYEITAANSSGTTKAFINIVVLDRPGPPTGPVVISDITEESVTLKWEPPKYDGGSQVTNYILLKRETSTAVWTEVSATVARTMMKVMKLTTGEEYQFRIKAENRFGISDHIDSACVTVKLPYTTPGPPSTPWVTNVTRESITVGWHEPVSNGGSAVVGYHLEMKDRNSILWQKANKLVIRTTHFKVTTISAGLIYEFRVYAENAAGVGKPSHPSEPVLAIDACEPPRNVRITDISKNSVSLSWQQPAFDGGSKITGYIVERRDLPDGRWTKASFTNVTETQFIISGLTQNSQYEFRVFARNAVGSISNPSEVVGPITCIDSYGGPVIDLPLEYTEVVKYRAGTSVKLRAGISGKPAPTIEWYKDDKELQTNALVCVENTTDLASILIKDADRLNSGCYELKLRNAMGSASATIRVQILDKPGPPGGPIEFKTVTAEKITLLWRPPADDGGAKITHYIVEKRETSRVVWSMVSEHLEECIITTTKIIKGNEYIFRVRAVNKYGIGEPLESDSVVAKNAFVTPGPPGIPEVTKITKNSMTVVWSRPIADGGSDISGYFLEKRDKKSLGWFKVLKETIRDTRQKVTGLTENSDYQYRVCAVNAAGQGPFSEPSEFYKAADPIDPPGPPAKIRIADSTKSSITLGWSKPVYDGGSAVTGYVVEIRQGEEEEWTTVSTKGEVRTTEYVVSNLKPGVNYYFRVSAVNCAGQGEPIEMNEPVQAKDILEAPEIDLDVALRTSVIAKAGEDVQVLIPFKGRPPPTVTWRKDEKNLGSDARYSIENTDSSSLLTIPQVTRNDTGKYILTIENGVGEPKSSTVSVKVLDTPAACQKLQVKHVSRGTVTLLWDPPLIDGGSPIINYVIEKRDATKRTWSVVSHKCSSTSFKLIDLSEKTPFFFRVLAENEIGIGEPCETTEPVKAAEVPAPIRDLSMKDSTKTSVILSWTKPDFDGGSVITEYVVERKGKGEQTWSHAGISKTCEIEVSQLKEQSVLEFRVFAKNEKGLSDPVTIGPITVKELIITPEVDLSDIPGAQVTVRIGHNVHLELPYKGKPKPSISWLKDGLPLKESEFVRFSKTENKITLSIKNAKKEHGGKYTVILDNAVCRIAVPITVITLGPPSKPKGPIRFDEIKADSVILSWDVPEDNGGGEITCYSIEKRETSQTNWKMVCSSVARTTFKVPNLVKDAEYQFRVRAENRYGVSQPLVSSIIVAKHQFRIPGPPGKPVIYNVTSDGMSLTWDAPVYDGGSEVTGFHVEKKERNSILWQKVNTSPISGREYRATGLVEGLDYQFRVYAENSAGLSSPSDPSKFTLAVSPVDPPGTPDYIDVTRETITLKWNPPLRDGGSKIVGYSIEKRQGNERWVRCNFTDVSECQYTVTGLSPGDRYEFRIIARNAVGTISPPSQSSGIIMTRDENVPPIVEFGPEYFDGLIIKSGESLRIKALVQGRPVPRVTWFKDGVEIEKRMNMEITDVLGSTSLFVRDATRDHRGVYTVEAKNASGSAKAEIKVKVQDTPGKVVGPIRFTNITGEKMTLWWDAPLNDGCAPITHYIIEKRETSRLAWALIEDKCEAQSYTAIKLINGNEYQFRVSAVNKFGVGRPLDSDPVVAQIQYTVPDAPGIPEPSNITGNSITLTWARPESDGGSEIQQYILERREKKSTRWVKVISKRPISETRFKVTGLTEGNEYEFHVMAENAAGVGPASGISRLIKCREPVNPPGPPTVVKVTDTSKTTVSLEWSKPVFDGGMEIIGYIIEMCKADLGDWHKVNAEACVKTRYTVTDLQAGEEYKFRVSAINGAGKGDSCEVTGTIKAVDRLTAPELDIDANFKQTHVVRAGASIRLFIAYQGRPTPTAVWSKPDSNLSLRADIHTTDSFSTLTVENCNRNDAGKYTLTVENNSGSKSITFTVKVLDTPGPPGPITFKDVTRGSATLMWDAPLLDGGARIHHYVVEKREASRRSWQVISEKCTRQIFKVNDLAEGVPYYFRVSAVNEYGVGEPYEMPEPIVATEQPAPPRRLDVVDTSKSSAVLAWLKPDHDGGSRITGYLLEMRQKGSDFWVEAGHTKQLTFTVERLVEKTEYEFRVKAKNDAGYSEPREAFSSVIIKEPQIEPTADLTGITNQLITCKAGSPFTIDVPISGRPAPKVTWKLEEMRLKETDRVSITTTKDRTTLTVKDSMRGDSGRYFLTLENTAGVKTFSVTVVVIGRPGPVTGPIEVSSVSAESCVLSWGEPKDGGGTEITNYIVEKRESGTTAWQLVNSSVKRTQIKVTHLTKYMEYSFRVSSENRFGVSKPLESAPIIAEHPFVPPSAPTRPEVYHVSANAMSIRWEEPYHDGGSKIIGYWVEKKERNTILWVKENKVPCLECNYKVTGLVEGLEYQFRTYALNAAGVSKASEASRPIMAQNPVDAPGRPEVTDVTRSTVSLIWSAPAYDGGSKVVGYIIERKPVSEVGDGRWLKCNYTIVSDNFFTVTALSEGDTYEFRVLAKNAAGVISKGSESTGPVTCRDEYAPPKAELDARLHGDLVTIRAGSDLVLDAAVGGKPEPKIIWTKGDKELDLCEKVSLQYTGKRATAVIKFCDRSDSGKYTLTVKNASGTKAVSVMVKVLDSPGPCGKLTVSRVTQEKCTLAWSLPQEDGGAEITHYIVERRETSRLNWVIVEGECPTLSYVVTRLIKNNEYIFRVRAVNKYGPGVPVESEPIVARNSFTIPSPPGIPEEVGTGKEHIIIQWTKPESDGGNEISNYLVDKREKKSLRWTRVNKDYVVYDTRLKVTSLMEGCDYQFRVTAVNAAGNSEPSEASNFISCREPSYTPGPPSAPRVVDTTKHSISLAWTKPMYDGGTDIVGYVLEMQEKDTDQWYRVHTNATIRNTEFTVPDLKMGQKYSFRVAAVNVKGMSEYSESIAEIEPVERIEIPDLELADDLKKTVTIRAGASLRLMVSVSGRPPPVITWSKQGIDLASRAIIDTTESYSLLIVDKVNRYDAGKYTIEAENQSGKKSATVLVKVYDTPGPCPSVKVKEVSRDSVTITWEIPTIDGGAPVNNYIVEKREAAMRAFKTVTTKCSKTLYRISGLVEGTMYYFRVLPENIYGIGEPCETSDAVLVSEVPLVPAKLEVVDVTKSTVTLAWEKPLYDGGSRLTGYVLEACKAGTERWMKVVTLKPTVLEHTVTSLNEGEQYLFRIRAQNEKGVSEPRETVTAVTVQDLRVLPTIDLSTMPQKTIHVPAGRPVELVIPIAGRPPPAASWFFAGSKLRESERVTVETHTKVAKLTIRETTIRDTGEYTLELKNVTGTTSETIKVIILDKPGPPTGPIKIDEIDATSITISWEPPELDGGAPLSGYVVEQRDAHRPGWLPVSESVTRSTFKFTRLTEGNEYVFRVAATNRFGIGSYLQSEVIECRSSIRIPGPPETLQIFDVSRDGMTLTWYPPEDDGGSQVTGYIVERKEVRADRWVRVNKVPVTMTRYRSTGLTEGLEYEHRVTAINARGSGKPSRPSKPIVAMDPIAPPGKPQNPRVTDTTRTSVSLAWSVPEDEGGSKVTGYLIEMQKVDQHEWTKCNTTPTKIREYTLTHLPQGAEYRFRVLACNAGGPGEPAEVPGTVKVTEMLEYPDYELDERYQEGIFVRQGGVIRLTIPIKGKPFPICKWTKEGQDISKRAMIATSETHTELVIKEADRGDSGTYDLVLENKCGKKAVYIKVRVIGSPNSPEGPLEYDDIQVRSVRVSWRPPADDGGADILGYILERREVPKAAWYTIDSRVRGTSLVVKGLKENVEYHFRVSAENQFGISKPLKSEEPVTPKTPLNPPEPPSNPPEVLDVTKSSVSLSWSRPKDDGGSRVTGYYIERKETSTDKWVRHNKTQITTTMYTVTGLVPDAEYQFRIIAQNDVGLSETSPASEPVVCKDPFDKPSQPGELEILSISKDSVTLQWEKPECDGGKEILGYWVEYRQSGDSAWKKSNKERIKDKQFTIGGLLEATEYEFRVFAENETGLSRPRRTAMSIKTKLTSGEAPGIRKEMKDVTTKLGEAAQLSCQIVGRPLPDIKWYRFGKELIQSRKYKMSSDGRTHTLTVMTEEQEDEGVYTCIATNEVGEVETSSKLLLQATPQFHPGYPLKEKYYGAVGSTLRLHVMYIGRPVPAMTWFHGQKLLQNSENITIENTEHYTHLVMKNVQRKTHAGKYKVQLSNVFGTVDAILDVEIQDKPDKPTGPIVIEALLKNSAVISWKPPADDGGSWITNYVVEKCEAKEGAEWQLVSSAISVTTCRIVNLTENAGYYFRVSAQNTFGISDPLEVSSVVIIKSPFEKPGAPGKPTITAVTKDSCVVAWKPPASDGGAKIRNYYLEKREKKQNKWISVTTEEIRETVFSVKNLIEGLEYEFRVKCENLGGESEWSEISEPITPKSDVPIQAPHFKEELRNLNVRYQSNATLVCKVTGHPKPIVKWYRQGKEIIADGLKYRIQEFKGGYHQLIIASVTDDDATVYQVRATNQGGSVSGTASLEVEVPAKIHLPKTLEGMGAVHALRGEVVSIKIPFSGKPDPVITWQKGQDLIDNNGHYQVIVTRSFTSLVFPNGVERKDAGFYVVCAKNRFGIDQKTVELDVADVPDPPRGVKVSDVSRDSVNLTWTEPASDGGSKITNYIVEKCATTAERWLRVGQARETRYTVINLFGKTSYQFRVIAENKFGLSKPSEPSEPTITKEDKTRAMNYDEEVDETREVSMTKASHSSTKELYEKYMIAEDLGRGEFGIVHRCVETSSKKTYMAKFVKVKGTDQVLVKKEISILNIARHRNILHLHESFESMEELVMIFEFISGLDIFERINTSAFELNEREIVSYVHQVCEALQFLHSHNIGHFDIRPENIIYQTRRSSTIKIIEFGQARQLKPGDNFRLLFTAPEYYAPEVHQHDVVSTATDMWSLGTLVYVLLSGINPFLAETNQQIIENIMNAEYTFDEEAFKEISIEAMDFVDRLLVKERKSRMTASEALQHPWLKQKIERVSTKVIRTLKHRRYYHTLIKKDLNMVVSAARISCGGAIRSQKGVSVAKVKVASIEIGPVSGQIMHAVGEEGGHVKYVCKIENYDQSTQVTWYFGVRQLENSEKYEITYEDGVAILYVKDITKLDDGTYRCKVVNDYGEDSSYAELFVKGVREVYDYYCRRTMKKIKRRTDTMRLLERPPEFTLPLYNKTAYVGENVRFGVTITVHPEPHVTWYKSGQKIKPGDNDKKYTFESDKGLYQLTINSVTTDDDAEYTVVARNKYGEDSCKAKLTVTLHPPPTDSTLRPMFKRLLANAECQEGQSVCFEIRVSGIPPPTLKWEKDGQPLSLGPNIEIIHEGLDYYALHIRDTLPEDTGYYRVTATNTAGSTSCQAHLQVERLRYKKQEFKSKEEHERHVQKQIDKTLRMAEILSGTESVPLTQVAKEALREAAVLYKPAVSTKTVKGEFRLEIEEKKEERKLRMPYDVPEPRKYKQTTIEEDQRIKQFVPMSDMKWYKKIRDQYEMPGKLDRVVQKRPKRIRLSRWEQFYVMPLPRITDQYRPKWRIPKLSQDDLEIVRPARRRTPSPDYDFYYRPRRRSLGDISDEELLLPIDDYLAMKRTEEERLRLEEELELGFSASPPSRSPPHFELSSLRYSSPQAHVKVEETRKDFRYSTYHIPTKAEASTSYAELRERHAQAAYRQPKQRQRIMAEREDEELLRPVTTTQHLSEYKSELDFMSKEEKSRKKSRRQREVTEITEIEEEYEISKHAQRESSSSASRLLRRRRSLSPTYIELMRPVSELIRSRPQPAEEYEDDTERRSPTPERTRPRSPSPVSSERSLSRFERSARFDIFSRYESMKAALKTQKTSERKYEVLSQQPFTLDHAPRITLRMRSHRVPCGQNTRFILNVQSKPTAEVKWYHNGVELQESSKIHYTNTSGVLTLEILDCHTDDSGTYRAVCTNYKGEASDYATLDVTGGDYTTYASQRRDEEVPRSVFPELTRTEAYAVSSFKKTSEMEASSSVREVKSQMTETRESLSSYEHSASAEMKSAALEEKSLEEKSTTRKIKTTLAARILTKPRSMTVYEGESARFSCDTDGEPVPTVTWLRKGQVLSTSARHQVTTTKYKSTFEISSVQASDEGNYSVVVENSEGKQEAEFTLTIQKARVTEKAVTSPPRVKSPEPRVKSPEAVKSPKRVKSPEPSHPKAVSPTETKPTPTEKVQHLPVSAPPKITQFLKAEASKEIAKLTCVVESSVLRAKEVTWYKDGKKLKENGHFQFHYSADGTYELKINNLTESDQGEYVCEISGEGGTSKTNLQFMGQAFKSIHEKVSKISETKKSDQKTTESTVTRKTEPKAPEPISSKPVIVTGLQDTTVSSDSVAKFAVKATGEPRPTAIWTKDGKAITQGGKYKLSEDKGGFFLEIHKTDTSDSGLYTCTVKNSAGSVSSSCKLTIKAIKDTEAQKVSTQKTSEITPQKKAVVQEEISQKALRSEEIKMSEAKSQEKLALKEEASKVLISEEVKKSAATSLEKSIVHEEITKTSQASEEVRTHAEIKAFSTQMSINEGQRLVLKANIAGATDVKWVLNGVELTNSEEYRYGVSGSDQTLTIKQASHRDEGILTCISKTKEGIVKCQYDLTLSKELSDAPAFISQPRSQNINEGQNVLFTCEISGEPSPEIEWFKNNLPISISSNVSISRSRNVYSLEIRNASVSDSGKYTIKAKNFRGQCSATASLMVLPLVEEPSREVVLRTSGDTSLQGSFSSQSVQMSASKQEASFSSFSSSSASSMTEMKFASMSAQSMSSMQESFVEMSSSSFMGISNMTQLESSTSKMLKAGIRGIPPKIEALPSDISIDEGKVLTVACAFTGEPTPEVTWSCGGRKIHSQEQGRFHIENTDDLTTLIIMDVQKQDGGLYTLSLGNEFGSDSATVNIHIRSI

SEQ ID NO: 18865 - protein, 415 aa, Homo sapiens
MLRSTSTVTLLSGGAARTPGAPSRRANVCRLRLTVPPESPVPEQCEKKIERKEQLLDLSNGEPTRKLPQGVVYGVVRRSDQNQQKEMVVYGWSTSQLKEEMNYIKDVSHAQQEYLENHIQTQSSALDRFNAMNSALASDSIGLQKTLVDVTLENSNIKDQIRNLQQTYEASMDKLREKQRQLEVAQVENQLLKMKVESSQEANAEVMREMTKKLYSQYEEKLQEEQRKHSAEKEALLEETNSFLKAIEEANKKMQAAEISLEEKDQRIGELDRLIERMEKERHQLQLQLLEHETEMSGELTDSDKERYQQLEEASASLRERIRHLDDMVHCQQKKVKQMVEENNELQSRLDYLTETQAKTEVETREIGVGCDLLPRQSRKFEKVLNEFVQLLPLPHHLLWAFGNVCWRRHFGLLQ

SEQ ID NO: 18866 - protein, 926 aa, Homo sapiens
MAEPGHSHHLSARVRGRTERRIPRLWRLLLWAGTAFQVTQGTGPELHACKESEYHYEYTACDSTGSRWRVAVPHTPGLCTSLPDPIKGTECSFSCNAGEFLDMKDQSCKPCAEGRYSLGTGIRFDEWDELPHGFASLSANMELDDSAAESTGNCTSSKWVPRGDYIASNTDECTATLMYAVNLKQSGTVNFEYYYPDSSIIFEFFVQNDQCQPNADDSRWMKTTEKGWEFHSVELNRGNNVLYWRTTAFSVWTKVPKPVLTQLMYKWAKPKICSEDLEGAVKLPASGVKTHCPPCNPGFFKTNNSTCQPCPYGSYSNGSDCTRCPAGTEPAVGFEYKWWNTLPTNMETTVLSGINFEYKGMTGWEVAGDHIYTAAGASDNDFMILTLVVPGFRPPQSVMADTENKEVARITFVFETLCSVNCELYFMVGVNSRTNTPVETWKGSKGKQSYTYIIEENTTTSFTWAFQRTTFHEASRKYTNDVAKIYSINVTNVMNGVASYCRPCALEASDVGSSCTSCPAGYYIDRDSGTCHSCPTNTILKAHQPYGVQACVPCGPGTKNNKIHSLCYNDCTFSRNTPTRTFNYNFSALANTVTLAGGPSFTSKGLKYFHHFTLSLCGNQGRKMSVCTDNVTDLRIPEGESGFSKSITAYVCQAVIIPPEVTGYKAGVSSQPVSLADRLIGVTTDMTLDGITSPAELFHLESLGIPDVIFFYRSNDVTQSCSSGRSTTIRVRCSPQKTVPGSLLLPGTCSDGTCDGCNFHFLWESAAACPLCSVADYHAIVSSCVAGIQKTTYVWREPKLCSGGISLPEQRVTICKTIDFWLKVGISAGTCTAILLTVLTCYFWKKNQKLEYKYSKLVMNATLKDCDLPAADSCAIMEGEDVEDDLIFTSKKSLFGKIKSFTSKRTPDGFDSVPLKTSSGGLDMDL

SEQ ID NO: 18867 - protein, 931 aa, Homo sapiens
MAASFPPTLGLSSAPDEIQHPHIKFSEWKFKLFRVRSFEKTPEEAQKEKKDSFEGKPSLEQSPAVLDKADGQKPVPTQPLLKAHPKFSKKFHDNEKARGKAIHQANLRHLCRICGNSFRADEHNRRYPVHGPVDGKTLGLLRKKEKRATSWPDLIAKVFRIDVKADVDSIHPTEFCHNCWSIMHRKFSSAPCEVYFPRNVTMEWHPHTPSCDICNTARRGLKRKSLQPNLQLSKKLKTVLDQARQARQHKRRAQARISSKDVMKKIANCSKIHLSTKLLAVDFPEHFVKSISCQICEHILADPVETNCKHVFCRVCILRCLKVMGSYCPSCRYPCFPTDLESPVKSFLSVLNSLMVKCPAKECNEEVSLEKYNHHISSHKESKEIFVHINKGGRPRQHLLSLTRRAQKHRLRELKLQVKAFADKEEGGDVKSVCMTLFLLALRARNEHRQADELEAIMQGKGSGLQPAVCLAIRVNTFLSCSQYHKMYRTVKAITGRQIFQPLHALRNAEKVLLPGYHHFEWQPPLKNVSSSTDVGIIDGLSGLSSSVDDYPVDTIAKRFRYDSALVSALMDMEEDILEGMRSQDLDDYLNGPFTVVVKESCDGMGDVSEKHGSGPVVPEKAVRFSFTIMKITIAHSSQNVKVFEEAKPNSELCCKPLCLMLADESDHETLTAILSPLIAEREAMKSSELMLELGGILRTFKFIFRGTGYDEKLVREVEGLEASGSVYICTLCDATRLEASQNLVFHSITRSHAENLERYEVWRSNPYHESVEELRDRVKGVSAKPFIETVPSIDALHCDIGNAAEFYKIFQLEIGEVYKNPNASKEERKRWQATLDKHLRKKMNLKPIMRMNGNFARKLMTKETVDAVCELIPSEERHEALRELMDLYLKMKPVWRSSCPAKECPESLCQYSFNSQRFAELLSTKFKYRN

SEQ ID NO: 18868 - protein, 882 aa, Homo sapiens
PFSEVESILNQSFCSRRPLRLLVATKAKEIIKIPDQPDTLCFQIRGAAPPYVYAVGRGSEAMAAGLCAGQCILKVNGSNVMNDGAPEVLEHFQAFRSRREEALGLYQWIYHTHEDAQEARASQEASTEDPSGEQAQEEDQADSAFPLLSLGPRLSLCEDSPMVTLTVDNVHLEHGVVYEYVSTAGVRCHVLEKIVEPRGCFGLTAKILEAFAANDSVFVENCRRLMALSSAIVTMPHFEFRNICDTKLESIGQRIACYQEFAAQLKSRVSPPFKQAPLEPHPLCGLDFCPTNCHINLMEVSYPKTTPSVGRSFSIRFGRKPSLIGLDPEQGHLNPMSYTQHCITTMAAPSWKCLPAAEGDPQGQGLHDGSFGPASGTLGQEDRGLSFLLKQEDREIQDAYLQLFTKLDVALKEMKQYVTQINRLLSTITEPTSGGSCDASLAEEASSLPLVSEESEMDRSDHGGIKKVCFKVAEEDQEDSGHDTMSYRDSYSECNSNRDSVLSYTSVRSNSSYLGSDEMGSGDELPCDMRIPSDKQDKLHGCLEHLFNQVDSINALLKGPVMSRAFEETKHFPMNHSLQEFKQKEECTIRGRSLIQISIQEDPWNLPNSIKTLVDNIQRYVEDGKNQLLLALLKCTDTELQLRRDAIFCQALVAAVCTFSKQLLAALGYRYNNNGEYEESSRDASRKWLEQVAATGVLLHCQSLLSPATVKEERTMLEDIWVTLSELDNVTFSFKQLDENYVANTNVFYHIEGSRQALKVIFYLDSYHFSKLPSRLEGGASLRLHTALFTKGELQAWGREDHGGRAKATKHTGSQPPARPRHLPSQCWRTWRGCLLQAARPRRICSRTSTRSPWRKFSSITANSGHFTWSGLTCPRMPAPRR

SEQ ID NO: 18869 - protein, 1158 aa, Homo sapiens
MCDCPQGYQLKNNTCVKQENTCLRNQYRCSNGNCINSIWWCDFDNDCGDMSDERNCPTTICDLDTQFRCQESGTCIPLSYKCDLEDDCGDNSDESHCEMHQCRSDEYNCSSGMCIRSSWVCDGDNDCRDWSDEANCTAIYHTCEASNFQCRNGHCIPQRWACDGDTDCQDGSDEDPVNCEKKCNGFRCPNGTCIPSSKHCDGLRDCSDGSDEQHCEPLCTHFMDFVCKNRQQCLFHSMVCDGIIQCRDGSDEDAAFAGCSQDPEFHKVCDEFGFQCQNGVCISLIWKCDGMDDCGDYSDEANCENPTEAPNCSRYFQFRCENGHCIPNRWKCDRENDCGDWSDEKDCGDSHILPFSTPGPSTCLPNYYRCSSGTCVMDTWVCDGYRDCADGSDEEACPLLANVTAASTPTQLGRCDRFEFECHQPKTCIPNWKRCDGHQDCQDGRDEANCPTHSTLTCMSREFQCEDGEACIVLSERCDGFLDCSDESDEKACSDELTVYKVQNLQWTADFSGDVTLTWMRPKKMPSASCVYNVYYRVVGESIWKTLETHSNKTNTVLKVLKPDTTYQVKVQVQCLSKAHNTNDFVTLRTPEGLPDAPRNLQLSLPREAEGVIVGHWAPPIHTHGLIREYIVEYSRSGSKMWASQRAASNFTEIKNLLVNTLYTVRVAAVTSRGIGNWSDSKSITTIKGKVIPPPDIHIDSYGENYLSFTLTMESDIKVNGYVVNLFWAFDTHKQERRTLNFRGSILSHKVGNLTAHTSYEISAWAKTDLGDSPLAFEHVMTRGVRPPAPSLKAKAINQTAVECTWTGPRNVVYGIFYATSFLDLYRNPKSLTTSLHNKTVIVSKDEQYLFLVRVVVPYQGPSSDYVVVKMIPDSRLPPRHLHVVHTGKTSVVIKWESPYDSPDQDLLYAVAVKDLIRKTDRSYKVKSRNSTVEYTLNKLEPGGKYHIIVQLGNMSKDSSIKITTVSLSAPDALKIITENDHVLLFWKSLALKEKHFNESRGYEIHMFDSAMNITAYLGNTTDNFFKISNLKMGHNYTFTVQARCLFGNQICGEPAILLYDELGSGADASATQAARSTDVAAVVVPILFLILLSLGVGFAILYTKHRRLQSSFTAFANSHYSSRLGSAIFSSGDDLGEDDEDAPMITGFSDDVPMVIA

SEQ ID NO: 18870 - protein, 329 aa, Homo sapiens
MENQAHNTMGTSPCEAELQELMEQIDIMVSNKKMDWERKMRALETRLDLRDQELANAQTCLDQKGQEVGLLRQKLDSLEKCNLAMTQNYEGQLQSLKAQFSKLTNNFEKLRLHQMKQNKVPRKELPHLKEEIPFELSNLNQKLEEFRAKSREWDKQEILYQTHLISLDAQQKLLSEKCNQFQKQAQSYQTQLNGKKQCLEDSSSEIPRLICDPDPNCEINERDEFIIEKLKSAVNEIALSRNKLQDENQKLLQELKMYQRQCQAMEAGLSEVKSELQSRDDLLRIIEMERLQLHRELLKIGECQNAQGNKTRLESSYLPSIKEPERKIK

SEQ ID NO: 18871 - protein, 422 aa, Homo sapiens
MRWRRAPRRSGRPGPRAQRPGSAARSSPPLPLLPLLLLLGTAALAPGAAAGNEAAPAGASVCYSSPPSVGSVQELAQRAAVVIEGKVHPQRRQQGALDRKAAAAAGEAGAWGGDREPPAAGPRALGPPAEEPLLAANGTVPSWPTAPVPSAGEPGEEAPYLVKVHQVWAVKAGGLKKDSLLTVRLGTWGHPAFPSCGRLKEDSRYIFFMEPDANSTSRAPAAFRASFPPLETGRNLKKEVSRVLCKRCALPPRLKEMKSQESAAGSKLVLRCETSSEYSSLRFKWFKNGNELNRKNKPQNIKIQKKPGKSELRINKASLADSGEYMCKVISKLGNDSASANITIVESNATSTSTTGTSHLVKCAEKEKTFCVNGGECFMVKDLSNPSRYLCKCPNEFTGDRCQNYVMASFYSTSTPFLSLPE

SEQ ID NO: 18872 - protein, 1774 aa, Homo sapiens
MGEDSPVAMFSWYLDNTPTEQAEPLLDACRLRGFWPRSLTLLQSNTSTLLLNSSFLQSRGEVIRIRATALTRHAYGEDTYVISTVPPREVPACTIAPEEGTVLTSFAIFCNASTALGPLEFCFCLESGSCLHCGPEPALPSVYLPLGEENNDFVLTVVISATNRAGDTQQTQAMAKVALGDTCVEDVAFQAAVSEKIPTALQGEGGPEQLLQLAKAVSSMLNQEHESQGSGQSLSIDVRQKVREHVLGSLSAVTTGLEDVQRVQELAEVLREVTCRSKELTPSAQWEASLALQHASEALLTVSAKARPEDQRRQAATRDLFQAVGSVLEASLSNRPEEPAEASSSQIATVLRLLRVMEHVQTTLLLGKLPGGLPAMLATPSISVYTNRIQPWSWQGSSLRPDAADSATFMLPAASSLSSLEGGQEPVDIKIMSFPKSPFPARSHFDVSGTVGGLRVTSPSGQLIPVKNLSENIEILLPRHSQRHSQPTVLNLTSPEALWVNVTSGEATLGIQLHWRPDIALTLSLGYGYHPNKSSYDAQTHLVPMVAPDELPTWILSPQDLRFGEGVYYLTVVPESDLEPAPGRDLTVGITTFLSHCVFWDEVQETWDDSGCQVGPRTSPYQTHCLCNHLTFFGSTFLVMSNAINIHQTAELFATFEDNPVVVTTVGCLCVVYVLVVIWARRKDAQDQAKVKVTVLEDNDPFAQYHYLVTVYTGHRRGAATSSKVTVTLYGLDGEREPHHLADPDTPVFERGAVDAFLLSTLFPLGELRSLRLWHDNSGDRPSWYVSRVLVYDLVMDRKWYFLCNSWLSINVGDCVLDKVFPVATEQDRKQFSHLFFMKTSAGFQDGHIWYSIFSRCARSSFTRVQRVSCCFSLLLCTMLTSIMFWGVPKDPAEQKMDLGKIEFTWQEVMIGLESSILMFPINLLIVQIFQNTRPRVAKEQNTGKWDRGSPNLTPSPQPMEDGLLTPEAVTKDVSRIVSSLFKALKVPSPALGWDSVNLMDINSLLALVEDVIYPQNTSGQVFWEEAKKREDPVTLTLGSSEMKEKSQCPKPKAARSGPWKDSAYRQCLYLQLEHVEQELRLVGPRGFSQPHSHAQALRQLQTLKGGLGVQPGTWAPAHASALQVSKPPQGLPWWCILVGWLLVAATSGVAAFFTMLYGLHYGRASSLRWLISMAVSFVESMFVTQPLKVLGFAAFFALVLKRVDDEEDTVAPLPGHLLGPDPYALFRARRNSSRDVYQPPLTAAIEKMKTTHLKEQKAFALIREILAYLGFLWMLLLVAYGQRDPSAYHLNRHLQHSFTRGFSGVLGFREFFKWANTTLVSNLYGHPPGFITDGNSKLVGSAQIRQVRVQESSCPLAQQPQAYLNGCRAPYSLDAEDMADYGEGWNATTLSNGSTRARTNVKGIPSGANSLCTGEEATWSPWGLIAKARQEFSAISLTTPGWTPUPELCLWSPLSTTPTSTCSALSRURURPALWAPFLRTRPCRASACTPSPTAGTPSWURQSSSTSSSSSTTWWCRASAUVKRRGAISAASGTFWSWPSSWPAGAPWRCLURGLSWPKGTSSAAGTTGRKASASVRQQQPMPPLATSLPSWYSCPQUSFGICSGUIPKUTUSRQPYAVPGATFQALULSSLPCSWLTPSRQTUYLVGNSVPTKPSLMRRRRWSAFSWESSTTRRSWTIAQCLAPSSLDPALFLUHLWCUTCLSLSSWWPSVRSKNTISCRRKGRSUICCUUKYSVSWALSLRERSLEAAGSSLGLCPRLATLDQHKLCPRT

SEQ ID NO: 18873 - protein, 167 aa, Homo sapiens
MPHSAGGTAGVGLEAAEPTALLTRAEPPSEPTGVLSEEQIRLKKLKRQEEEQAHATSLPPRASSPPQILPQLSPEQLGMIEKLVAAQQQCNRRSFSDRLRVTVMLLETSRRYNPGSESITFLKDFSYNREDFAKAGLQVEFINPIFEFSRAMNELQLNDAEFALLIA

SEQ ID NO: 18874 - protein, 950 aa, Homo sapiens
MDYHWRGELGSWRLLLLLLLLAAWKVGSGQLHYSVPEEAKHGTFVGRIAQDLGLELAELVPRLFRVASKRHRDLLEVSLQNGILFVNSRIDREELCGRSAECSIHLEVIVDRPLQVFHVDVEVKDVNDNPPVFRVKDQKLFVSESRMPDSRFPLEGASDADVGANSVLTYRLSSHDYFMLDVNSKNDENKLVELVLRKSLDREDAPAHHLFLTATDGGKPELTGTVQLLVTVLDVNDNAPTFEQSEYEVRIFENADNGTTVIKLNASDPDEGANGAISYSFNSLVETMVIDHFSIDRNTGEIVIRGNLDFEQENLYKILIDATDKGHPPMAGHCTVLVRILDKNDNVPEIALTSLSLPVREDAQFGTVIALISVNDLDSGANGQVTCSLMPHVPFKLVSTFKNYYSLVLDSALDRERVSAYELVVTARDGGSPSLWATASLSVEVADVNDNAPAFAQPEYTVFVKENNPPGCHIFTVSARDADAQENALVSYSLVERRVGERSLSSYISVHTESGKVYALQPLDHEELELLQFQVSARDAGVPPLGSNVTLQVFVLDENDNAPALLEPRVGGTGGAASKLVPRSVGAGHVVAKVRAVDADSGYNAWLSYELQPAASSPRIPFRVGLYTGEISTTRVLDEADSPRHRLLVLVKDHGEPALTATATVLVSLVESGQAPKASSRQSAGVLGPEAALVDVNVYLIIAICAVSSLLVLTLLLYTALRCSALPTEGGCRAGKPTLVCSSAVGSWSYSQQQPQRVCSGEGPPKTDLMAFSPCLPPDLGSVDVGEEQDLNVDHGLKPRQPNPDWRYSASLRAGMHSSVHLEEAGILRAGPGGPDQQWPTVSSATPEPEAGEVSPPVGAGVNSNSWTFKYGPGNPKQSGPGELPDKFIIPGSPAIISIRQEPTNSQIDKSDFITFGKKEETKKKKKKKKGNKTQEKKEKGNSTTDNSDQ

SEQ ID NO: 18875 - protein, 111 aa, Homo sapiens
METNLWLRHIWNDYKLRWDPMEYDGIETLRVPADKIWKPDIVLYNNAVGDFQVEGKTKALLKYNGMITWTPPAIFKSSCPMDITFFPFDHQNCSLKFGSWTYDKAEIDLLI

SEQ ID NO: 18876 - protein, 145 aa, Homo sapiens
MSEREERRFVEIPRESVRLMAESTGLELSDEVAALLAEDVCYRLREATQNSSQFMKHTKRRKLTVEDFNRALRWSSVEAVCGYGSQEALPMRPAREGELYFPEDREVNLVELALATNIPKGCAETAVRVHVSYLDGKGNLAPQGS

SEQ ID NO: 18877 - protein, 502 aa, Homo sapiens
MPGVANSGPSTSSRETANPCSRKKVHFGSIHDAVRAGDVKQLSEIVVRGASINELDVLHKFTPLHWAAHSGSLECLHWLLWHGADITHVTTRGWTASHIAAIRGQDACVQALIMNGANLTAQDDRGCTPLHLAATHGHSFTLQIMLRSGVDPSVTDKREWRPVHYAAFHGRLGCLQLLVKWGCSIEDVDYNGNLPVHLAAMEGHLHCFKFLVSRMSSATQVLKAFNDNGENVLDLAQRFFKQNILQFIQGAEYEGKDLEDQETLAFPGHVAAFKGDLGMLKKLVEDGVININERADNGSTPMHKAAGQGHIECLQWLIKMGADSNITNKAGERPSDVAKRFAHLAAVKLLEELQKYDIDDENEIDENDVKYFIRHGVEGSTDAKDDLCLSDLDKTDARMRAYKKIVELRHLLEIAESNYKHLGGITEEDLKQKKEQLESEKTIKELQGQLEYERLRREKLECQLDEYRAEVDQLRETLEKIQVPNFVAMTALLVSQTKRRGE

SEQ ID NO: 18878 - protein, 328 aa, Homo sapiens
MCPAGWKLLAMLALVLVVMVWYSISREDSFYFPIPEKKEPCLQGEAESKASKLFGNYSRDQPIFLRLEDYFWVKTPSAYELPYGTKGSEDLLLRVLAITSSSIPKNIQSLRCRRCVVVGNGHRLRNSSLGDAINKYDVVIRLNNAPVAGYEGDVGSKTTMRLFYPESAHFDPKVENNPDTLLVLVAFKAMDFHWIETILSDKKRVRKGFWKQPPLIWDVNPKQIRILNPFFMEIAADKLLSLPMQQPRKIKQKPTTGLLAITLALHLCDLVHIAGFGYPDAYNKKQTIHYYEQITLKSMAGSGHNVSQEALAIKRMLEMGAIKNLTSF

SEQ ID NO: 18879 - protein, 616 aa, Homo sapiens
MIGEEVPSDQYYWAPLAQHERGSLASLDSLRKGGPPPPNWRQPELPEVIAMLGFRLDAVKSNAAAYLQHLCYRNDKVKTDVRKLKGIPVLVGLLDHPKKEVHLGACGALKNISFGRDQDNKIAIKNCDGVPALVRLLRKARDMDLTEVITGTLWNLSSHDSIKMEIVDHALHALTDEVIIPHSGWEREPNEDCKPRHIEWESVLTNTAGCLRNVSSERSEARRKLRECDGLVDALIFIVQAEIGQKDSDSKLVENCVCLLRNLSYQVHREIPQAERYQEAAPNVANNTGPHAASCFGAKKGKDEWFSRGKKPIEDPANDTVDFPKRTSPARGYELLFQPEVVRIYISLLKESKTPAILEASAGAIQNLCAGRWTYGRYIRSALRQEKALSAIADLLTNEHERVVKAASGALRNLAVDARNKELIGKHAIPNLVKNLPGGQQNSSWNFSEDTVISILNTINEVIAENLEAAKKLRETQGIEKLVLINKSGNRSEKEVRAAALVLQTIWGYKELRKPLEKEGWKKSDFQVNLNNASRSQSSHSYDDSTLPLIDRNQKSDKKPDREEIQMSNMGSNTKSLDNNYSTPNERGDHNRTLDRSGDLGDMEPLKGTTPLMQKI

SEQ ID NO: 18880 - protein, 331 aa, Homo sapiens
MVLEGNPEVGSPRTSDLQHRGNKGSCVLSSPGEDAQPGEEPIKYGELIVLGCCEEGGEETEAQRGEVTGPRAHSCYNGCLASGDKGRRRSRLALSRRSHANGVKPDVMHHISTPLVSKALSNRGQHSISYTLSRSHSVIVEYTHDSDTDMFQIGRSTENMIDFVVTDTSPGGGAAEGPSAQSTISRYACRILCDRRPPYTARIYAAGFDASSNIFLGERAAKWRTPDGLMDGLTTNGVLVMHPAGGFSEDSAPGVWREISVCGNVYTLRDSRSAQQRGKLVGGPLHSPPLSLPGPHKLPIPLPKPGDDLQSFCPREPQQAPYQGIPGPGGS

SEQ ID NO: 18881 - protein, 335 aa, Homo sapiens
MEERKHETMNPAHVLFDRFVQATTCKGTLKAFQELCDHLELKPKDYRSFYHKLKSKLNYWKAKALWAKLDKRGSHKDYKKGKACTNTKCLIIGAGPCGLRTAIDLSLLGAKVVVIEKRDAFSRNNVLHLWPFTIHDLRGLGAKKFYGKFCAGAIDHISIRQLQLILLKVALILGIEIHVNVEFQGLIQPPEDQENERIGWRALVHPKTHPVSEYEFEVIIGGDGRRNTLEGFRRKEFRGKLAIAITANFINRNTTAEAKVEEISGVAFIFNQKFFQELREATGLRRHRAPAFPRKRGPGGSAQLCQGGGRLLYPAAAAVSGFCHQSLWAARCGHV

SEQ ID NO: 18882 - protein, 396 aa, Homo sapiens
MSKISEAVKRARAAFSSGRTRPLQFRIQQLEALQRLIQEQEQELVGALAADLHKNEWNAYYEEVVYVLEEIEYMIQKLPEWAADEPVEKTPQTQQDELYIHSEPLGVVLVIGTWNYPFNLTIQPMVGAIAAGNSVVLKPSELSENMASLLATIIPQYLDKDLYPVINGGVPETTELLKERFDHILYTGSTGVGKIIMTAAAKHLTPVTLELGGKSPCYVDKNCDLDVACRRIAWGKFMNSGQTCVAPDYILCDPSIQNQIVEKLKKSLKEFYGEDAKKSRDYGRIISARHFQRVMGLIEGQKVAYGGTGDAATRYIAPTILTDVDPQSPVMQEEIFGPVLPIVCVRSLEEAIQFINQREKPLALYMFSSNDKGTAAWDPTMARRASRLSLTAALAW

SEQ ID NO: 18883 - protein, 425 aa, Homo sapiens
MASSTPSSSATSSNAGADPNTTNLRPTTYDTWCGVAHGCTRKLGLKICGFLQRTNSLEEKSRLVSAFKERQSSKNLLSCENSDRDARFRRTETDFSNLFARDLLPAKNGEEQTVQFLLEVVDILLNYVRKTFDRSTKVLDFHHPHQLLEGMEGFNLELSDHPESLEQILVDCRDTLKYGVRTGHPRFFNQLSTGLDIIGLAGEWLTSTANTNMFTYEIAPVFVLMEQITLKKMREIVGWSSKDGDGIFSPGGAISNMYSIMAARYKYFPEVKTKGMAAVPKLVLFTSEQSHYSIKKAGAALGFGTDNVILIKCNERGKIIPADFEAKILEAKQKGYVPFYVNATAGTTVYGAFDPIQEIADICEKYNLWLHVDGFNFSQLANRIICLATELMTNKGCVTWHPNYSVNMHHGCLGRWAAHVQEAPP

SEQ ID NO: 18884 - protein, 137 aa, Homo sapiens
MTMTANKNSSITHGAGGTKAPRGTLSRKSFEFEDASSLQSLYPSSPTENGTENQPKFGSKSTLEENAYEDIVGDLPKENPYEDVDLKSRRAGRKSQQLSENSLDSLHRMWSPQDRKYNSPPTQPVPAQWELVRKEEP

SEQ ID NO: 18885 - protein, 553 aa, Homo sapiens
VEAVPSQTPDKEKAWKVKDEKSGKDDTQIIKRDEWMTVDFMSVKTVSSSSLKAEKETMRKIEQEKNQALEQSKLMERELNPYWKDGGTGLPPEDCSVSSITKVSVVEDGGLSWLRKSYLRMKEQAEKQSRNFEDIVAERYGSMEIFQSKLEDAEKAASTKEDYRRERWRKPTYSDKAQNCQESRESDLVKYGNSSRDRYATTDTAKNSNNEKFIGDEKDKRPGSLETCRRESNPRQNQEFSFGNLRAKFLRPSDDEELSFHSKGRKFEPLSSSSALVAQGSLCSGFRKPTKNSEERLTSWSRSDGRGDKKHSNQKPSETSTDEHQHVPEDPREKSQDEVLRDDPPKKEHLRDTKSTFAGSPERESIHILSVDEKNKLGAKIIKAEMMGNMELAEQLKVQLEKANKFKETITQIPKKSGVENEDQQEVILVRTDQSGRVWPVNTPGKSLESQGGRRKRQMVSTHEERERVRYFHDDDNLSLNDLVKNEKMGTAENQNKLFMRMASKQLRENVLVKRKRTKGKKLLLSIGVLLHKWKNVCIVLTALNFPSILLLQ

SEQ ID NO: 18886 - protein, 197 aa, Homo sapiens
MTTDERKLFNHLKSPHLKYWVPFIWFGNLATKARNEGRIRDSVDLQSLMTEMNRYRSWCSLLFGYDWVGIPLVYTQVAEQLINPFGEDDDDFETNWCIDRNLQVSLLAVDEMHMSLPKMKKDIYWDDSAARPPYTLAAADYCIPSFLGSTVQMGRSRFNPVPFAECLLIPISDGLWHFSSKGASEAENLSRPKEKED

SEQ ID NO: 18887 - protein, 659 aa, Homo sapiens
SLLAVVVLLALPVAWGQCNAPEWLPFARPTNLTDEFEFPIGTYLNYECRPGYSGRPFSIICLKNSVWTGAKDRCRRKSCRNPPDPVNGMVHVIKGIQFGSQIKYSCTKGYRLIGSSSATCIISGDTVIWDNETPICDRIPCGLPPTITNGDFISTNRENFHYGSVVTYRCNPGSGGRKVFELVGEPSIYCTSNDDQVGIWSGPAPQCIIPNKCTPPNVENGILVSDNRSLFSLNEVVEFRCQPGFVMKGPRRVKCQALNKWEPELPSCSRVCQPPPDVLHAERTQRDKDNFSPGQEVFYSCEPGYDLRGAASMRCTPQGDWSPAAPTCEVKSCDDFMGQLLNGRVLFPVNLQLGAKVDFVCDEGFQLKGSSASYCVLAGMESLWNSSVPVCEQIFCPNPPAILNGRHTGTPFGDIPYGKEISYACDTHPDRGMTFNLIGESSIRCTSDPQGNGVWSSPAPRCELSVPAACPHPPKIQNGHYIGGHVSLYLPGMTISYICDPGYLLVGKGFIFCTDQGIWSQLDHYCKEVNCSFPLFMNGISKELEMKKVYHYGDYVTLKCEDGYTLEGSPWSQCQADDRWDPPLAKCTSRTHDALIVGTLSGTIFFILLIIFLSWIILKHRKGNNAHENPKEVAIHLHSQGGSSVHPRTLQTNEENSRY

SEQ ID NO: 18888 - protein, 707 aa, Homo sapiens
MLQQIEEPCSLGVHAAVVIPPTWILRARRPQNTLKASKKKKRASFKRKSSKKGPEEGRWRPFIIRPTPSPLMKPLLVFVNPKSGGNQGAKIIQSFLWYLNPRQVFDLSQGGPKEALEMYRKVHNLRILACGGDGTVGWILSTLDQLRLKPPPPVAILPLGTGNDLARTLNWGGGYTDEPVSKILSHVEEGNVVQLDRWDLHAEPNPEAGPEDRDEGATDRLPLDVFNNYFSLGFDAHVTLEFHESREANPEKFNSRFRNKMFYAGTAFSDFLMGSSKDLAKHIRVVCDGMDLTPKIQDLKPQCVVFLNIPRYCAGTMPWGHPGEHHDFEPQRHDDGYLEVIGFTMTSLAALQVGGHGERLTQCREVVLTTSKAIPVQVDGEPCKLAASRIRIALRNQATMVQKAKRRSAAPLHSDQQPVPEQLRIQVSRVSMHDYEALHYDKEQLKEASVPLGTVVVPGDSDLELCRAHIERLQQEPDGAGAKSPTCQKLSPKWCFLDATTASRFYRIDRAQEHLNYVTEIAQDEIYILDPELLGASARPDLPTPTSPLPTSPCSPTPRSLQGDAAPPQGEELIEAAKRNDFCKLQELHRAGGDLMHRDEQSRTLLHHAVSTGSKDVVRYLLDHAPPEILDAVEENGETCLHQAAALGQRTICHYIVEAGASLMKTDQQGDTPRQRAEKAQDTELAAYLENRQHYQMIQREDQETAV

SEQ ID NO: 18889 - protein, 758 aa, Homo sapiens
MARRPRHSIYSSDEDDEDFEMCDHDYDGLLPKSGKRHLGKTRWTREEDEKLKKLVEQNGTDDWKVIANYLPNRTDVQCQHRWQKVLNPELIKGPWTKEEDQRVIELVQKYGPKRWSVIAKHLKGRIGKQCRERWHNHLNPEVKKTSWTEEEDRIIYQAHKRLGNRWAEIAKLLPGRTDNAIKNHWNSTMRRKVEQEGYLQESSKASQPAVATSFQKNSHLMGFAQAPPTAQLPATGQPTVNNDYSYYHISEAQNVSSHVPYPVALHVNIVNVPQPAAAAIQRHYNDEDPEKEKRIKELELLLMSTENELKGQQTQNHTCSYPGWHSTTIADHTRPHGDSAPVSCLGEHHSTPSLPADPGSLPEESASPARCMIVHQGTILDNVKNLLEFAETLQFIDSDSSSWCDLSSFEFFEEADFSPSQHHTGKALQLQQREGNGTKPAGEPSPRVNKRMLSESSLDPPKVLPPARHSTIPLVILRKKRGQASPLATGDCSSFIFADVSSSTPKRSPVKSLPFSPSQFLNTSSNHENSDLEMPSLTSTPLIGHKLTVTTPFHRDQTVKTQKENTVFRTPAIKRSILESSPRTPTPFKHALAAQEIKYGPLKMLPQTPSHLVEDLQDVIKQESDESGIVAEFQENGPPLLKKIKQEVESPTDKSGNFFCSHHWEGDSLNTQLFTQTSPVADAPNILTSSVLMAPASEDEDNVLKAFTVPKNRSLASPLQPCSSTWEPASCGKMEEQMTSSSQARKYVNAFSARTLVM

SEQ ID NO: 18890 - protein, 1657 aa, Homo sapiens
MSSVGKVTQVPNGKAYQQIFQAEVQLVHSLAATRKRAAERSVTLKSGRIPMMKKVETPEGEVMSPRQQKWMHSLPNDWIMENPVLHREKERAKREKARESENTIAAREVRGLMDTIVPEKISTSTFQRQAEHKRKSYESALASFQEEIAQVGKEMEPLIVDTGGLFLKKLTESDEEMNRLFLKVENDTNLEDYTIQALLELWDKVAGRLLLRKQEIKELDEALHSLEFSRTDKLKSVLKKYAEVIEKTSYLMRPEVYRLINEEAMVMNYALLGNRKALAQLFVNLMESTLQQELDSRHRWQGLVDTWKALKKEALLQSFSEFMASESIHTPPAVTKELEVMLKTQNVLQQRRLKHLCTICDLLPPSYSKTQLTEWHSSLNSLNKELDTYHVDCMMRIRLLYEKTWQECLMHVQNCKKQLLDWKAFTEEEAETLVNQFFFQMVGALQGKVEEDLELLDKSFETLADQTEWQSSHLFKYFQEVVQLWEAHQSELLVQELELEKRMEQHRQKHSLESQVQEAHLDRLLDQLRQQSDKETLAFHLEKVKDYLKNMKSRYECFHTLLTKEVMEYPAIMLKELNSYSSALSQYFFVREIFEQNLAGEVIFKFRQPEAHEKPSQKRVKKLRKKQGSKEDMTRSEESISSGTSTARSVEEVEEENDQEMESFITEEVLGQQKKSPLHAKMDESKEGSIQGLEEMQVEREGSLNPSLNEENVKGQGEKKEESEEEDEKEEEEEEEKLEEEKEEKEAQEEQESLSVGEEEDKEEGLEEIYYEDMESFTISSGNTYFVFVPLEEEHCRKSHSTFSAMFINDTSSAKFIEQVTIPSRLILEIKKQLRAGFFEHLEKWFDQCSLNTRVTVATKINELDSELELHLHLHQPRAQQIEKDIHNVRAAELLLHQEQLDSHCAGVTETLKKKRLMFCQFQEEQNVRSKNFRLKIYDMEHIFLNATRSQKLVTLSNTLHQELLSYVDVTQVSLRSFRQYLEESLGKLRYSNIEFIKHCRLFSEGGNFSPKEINSLCSRLEKEAARIELVESVIMLNMEKLENEYLDQANDVINKFESKFHNLSVDLIFIEKIQRLLTNLQVKIKCQVAKSNSQTNGLNFSLQQLQNKIKTCQESRGEKTTVTTEELLSFVQTWKEKLSQRIQYLNCSLDRVSMTELVFTNTILKDQEEDSDILTSSEALEEEAKLDVVTPESFTQLSRVGKPLIEDPAVDVIRKLLQLPNTKWPTHHCDKDPSQTGRGAWACGSRGSSEAGAGGAVCSPPVLCSCPGPSSPKGFKRHRCQPENSGKKAVPSASATSAGSFTPHPKPNKMERKYRVLGDKPPPAAEDFKGIILTLLWESSENLLTVAEEFYRKEKRPVTRPDCMCDTFDQCAENISKKILEYQSQANKYHNSCLIELRIQIRRFEELLPQVCWLVMENFKEHHWKKFFTSVKEIRGQFEEQQKRLEKRKDKNAQKLHLNLGHPVHFQEMESLHLSEEERQEELDSMIRMNKEKLEECTRRNGQVFITNLATFTEKFLLQLDEVVTIDDVQVARMEPPKQKLSMLIRRKLAGLSLKEESEKPLIERGSRKWPGIKPTEVTIQNKILLQPTSSISTTKTTLGHLAAVEARDAVYLKYLASFEEELKRIQDDCTSQIKEAQRWKDSWKQSLHTIQGLYV

SEQ ID NO: 18891 - protein, 1426 aa, Homo sapiens
MDFSFSFMQGIMGNTIQQPPQLIDSANIRQEDAFDNNSDIAEDGGQTPYEATLQQGFQYPATTEDLPPLTNGYPSSISVYETQTKYQSYNQYPNGSANGFGAVRNFSPTDYYHSEIPNTRPHEILEKPSPPQPPPPPSVPQTVIPKKTGSPEIKLKITKTIQNGRELFESSLCGDLLNEVQASEHTKSKHESRKEKRKKSNKHDSSRSEERKSHKIPKLEPEEQNRPNERVDTVSEKPREEPVLKEEAPVQPILSSVPTTEVSTGVKFQVGDLVWSKVGTYPWWPCMVSSDPQLEVHTKINTRGAREYHVQFFSNQPERAWVHEKRVREYKGHKQYEELLAEATKQASNHSEKQKIRKPRPQRERAQWDIGIAHAEKALKMTREERIEQYTFIYIDKQPEEALSQAKKSVASKTEVKKTRRPRSVLNTQPEQTNAGEVASSLSSTEIRRHSQRRHTSAEEEEPPPVKIAWKTAAARKSLPASITMHKGSLDLQKCNMSPVVKIEQVFALQNATGDGKFIDQFVYSTKGIGNKTEISVRGQDRLIISTPNQRNEKPTQSVSSPEATSGSTGSVEKKQQRRSIRTRSESEKSTEVVPKKKIKKEQVETVPQATVKTGLQKGASEISDSCKPLKKRSRASTDVEMTSSAYRDTSDSDSRGLSDLQVGFGKQVDSPSATADADVSDVQSMDSSLSRRGTGMSKKDTVCQICESSGDSLIPCEGECCKHFHLECLGLASLPDSKFICMECKTGQHPCFSCKVSGKDVKRCSVGACGKFYHEACVRKFPTAIFESKGFRCPQHCCSACSMEKDIHKASKGRMMRCLRCPVAYHSGDACIAAGSMLVSSYILICSNHSKRSSNSSAVNVGFCFVCARGLIVQDHSDPMFSSYAYKSHYLLNESNRAELMKLPMIPSSSASKKKCEKGGRLLCCESCPASFHPECLSIEMPEGCWNCNDCKAGKKLHYKQIVWVKLGNYRWWPAEICNPRSVPLNIQGLKHDLGDFPVFFFGSHDYYWVHQGRVFPYVEGDKSFAEGQTSINKTFKKALEEAAKRFQELKAQRESKEALEIEKNSRKPPPYKHIKANKVIGKVQIQVADLSEIPRCNCKPADENPCGLESECLNRMLQYECHPQVCPAGDRCQNQCFTKRLYPDAEIIKTERRGWGLRTKRSIKKGEFVNEYVGELIDEEECRLRIKRAHENSDRIIDAGPKGNYSRFMNHSCNPNCETQKWTVNGDVRVGLFALCDIPAGMELTFNYNLDCLGNGRTECHCGADNCSGFLGVRPKSACASTNEEKAKNAKLKQKRRKIKTEPKQMHEDYCFQCGDGGELVMCDKKDCPKAYHLLCLNLTQPPYGKWECPWHQCDECSSAAVSFCEFCPHSFCKDHEKGALVPSALEGRLCCSEHDPMAPVSPEYWSKIKCKWESQDHGEEVKE

SEQ ID NO: 18892 - protein, 338 aa, Homo sapiens
MYHPAYWVVFSATTALLFIPGVPVRSGDATFPKAMDNVTVRQGESATLRCTIDDRVTRVAWLNRSTILYAGNDKWSIDPRVIILVNTPTQYSIMIQNVDVYDEGPYTCSVQTDNHPKTSRVHLIVQVPPQIMNISSDITVNEGSSVTLLCLAIGRPEPTVTWRHLSVKEGQGFVSEDEYLEISDIKRDQSGEYECSALNDVAAPDVRKVKITVNYPPYISKAKNTGVSVGQKGILSCEASAVPMAEFQWFKEETRLATGLDGMRIENKGRMSTLTFFNVSEKDYGNYTCVATNKLGNTNASITLYGPGAVIDGVNSASRALACLWLSGTLLAHFFIKF

SEQ ID NO: 18893 - protein, 303 aa, Homo sapiens
MAWWLIAFAHGDLAPSEGTAEPCVTSIHSFSSAFLFSIEVQVTIGFGGRMVTEECPLAILILIVQNIVGLMINAIMLGCIFMKTAQAHRRAETLIFSKHAVIALRHGRLCFMLRVGDLRKSMIISATIHMQVVRKTTSPEGEVVPLHQVDIPMENGVGGNSIFLVAPLIIYHVIDANSPLYDLAPSDLHHHQDLEIIVILEGVVETTGITTQARTSYLADEILWGQRFVPIVAEEDGRYSVDYSKFGNTVKVPTPLCTARQLDEDHSLLEALTLASARGPLRKRSVPMAKAKPKFSISPDSLS

SEQ ID NO: 18894 - protein, 319 aa, Homo sapiens
MSVCYRPPGNETLLSWKTSRATGTAFLLLAALLGLPGNGFVVWSLAGWRPARGRPLAATLVLHLALADGAVLLLTPLFVAFLTRQAWPLGQAGCKAVYYVCALSMYASVLLTGLLSLQRCLAVTRPFLAPRLRSPALARRLLLAVWLAALLLAVPAAVYRHLWRDRVCQLCHPSPVHAAAHLSLETLTAFVLPFGLMLGCYSVTLARLRGARWGSGRHGARVGRLVSAIVLAFGLLWAPYHAVNLLQAVAALAPPEGALAKLGGAGQAARAGTTALAFFSSSVNPVLYVFTAGDLLPRAGPRFLTRLFEGSGEARGGGR

SEQ ID NO: 18895 - protein, 512 aa, Homo sapiens
MTGTVLKMTDRSHRQKLQLKALDTVLFGPPLLTRHNHLKDFMLVVSIVIGVGGCWFAYIQNRYSKEHMKKMMKDLEGLHRAEQSLHDLQERLHKAQEEHRTVEVEKVHLEKKLRDEINLAKQEAQRLKELREGTENERSRQKYAEEELEQVREALRKAEKELESHSSWYAPEALQKWLQLTHEVEVQYYNIKKQNAEKQLLVAKEGAEKIKKKRNTLFGTFHVAHSSSLDDVDHKILTAKQALSEVTAALRERLHRWQQIEILCGFQIVNNPGIHSLVAALNIDPSWMGSTRPNPAHFIMTDDVDDMDEEIVSPLSMQSPSLQSSVRQRLTEPQHGLGSQRDLTHSDSESSLHMSDRQRVAPKPPQMSRAADEALNAMTSNGSHRLIEGVHPGSLVEKLPDSPALAKKALLALNHGLDKAHSLMELSPSAPPGGSPHLDSSRSHSPSSPDPDTPSPVGDSRALQASRNTRIPHLAGKKAVAEEDNGSIGEETDSSPGRKKFPLKIFKKPLKK

SEQ ID NO: 18896 - protein, 1037 aa, Homo sapiens
MGCFPTHLMPRPRVAMAEAEAGVAVEVRGLPPAVPDELLTLYFENRRRSGGGPVLSWQRLGCGGVLTFREPADAERVLAQADHELHGAQLSLRPAPPRAPARLLLQGLPPGTTPQRLEQHVQALLRASGLPVQPCCALASPRPDRALVQLPKPLSEADVRVLEEQAQNLGLEGTLVSLARVPQARAVRVVGDGASVDLLLLELYLENERRSGGGPLEDLQRLPGPLGTVASFQQWQVAERVLQQEHRLQGSELSLVPHYDILEPEELAENTSGGDHPSTQGPRATKHALLRTGGLVTALQGAGTVTMGSGEEPGQSGASLRTGPMVQGRGIMTTGSGQEPGQSGTSLRTGPMGSLGQAEQVSSMPMGSLEHEGLVSLRPVGLQEQEGPMSLGPVGSAGPVETSKGLLGQEGLVEIAMDSPEQEGLVGPMEITMGSLEKAGPVSPGCVKLAGQEGLVEMVLLMEPGAMRFLQLYHEDLLAGLGDVALLPLEGPDMTGFRLCGAQASCQAAEEFLRSLLGSISCHVLCLEHPGSARFLLGPEGQHLLQGLEAQFQCVFGTERLATATLDTGLEEVDPTEALPVLPGNAHTLWTPDSTGGDQEDVSLEEVRELLATLEGLDLDGEDWLPRELEEEGPQEQPEEEVTPGHEEEEPVAPSTVAPRWLEEEAALQLALHRSLEPQGQVAEQEEAAALRQALTLSLLEQPPLEAEEPPDGGTDGKAQLVVHSAFEQDVEELDRALRAALEVHVQEETVGPWRRTLPAELRARLERCHGVSVALRGDCTILRGFGAHPARAARHLVALLAGPWDQSLAFPLAASGPTLAGQTLKGPWNNLERLAENTGEFQEVVRAFYDTLDAARSSIRVVRVERVSHPLLQQQYELYRERLLQRCERRPVEQVLYHGTTAPAVPDICAHGFNRSFCGRNATVYGKGVYFARRASLSVQDRYSPPNADGHKAVFVARVLTGDYGQGRRGLRAPPLRGPGHVLLRYDSAVDCICQPSIFVIFHDTQALPTHLITCEHVPRASPDDPSGLPGRSPDT

SEQ ID NO: 18897 - protein, 383 aa, Homo sapiens
MADKVLKEKRKLFIRSMGEGTINGLLDELLQTRVLNKEEMEKVKRENATVMDKTRALIDSVIPKGAQACQICITYICEEDSYLAGTLGLSAAPQAVQDNPAMPTSSGSEGNVKLCSLEEAQRIWKQKSAEIYPIMDKSSRTRLALIICNEEFDSIPRRTGAEVDITGMTMLLQNLGYSVDVKKNLTASDMTTELEAFAHRPEHKTSDSTFLVFMSHGIREGICGKKHSEQVPDILQLNAIFNMLNTKNCPSLKDKPKVIIIQACRGDSPGVVWFKDSVGVSGNLSLPTTEEFEDDAIKKAHIEKDFIAFCSSTPDNVSWRHPTMGSVFIGRLIEHMQEYACSCDVEEIFRKVRFSFEQPDGRAQMPTTERVTLTRCFYLFPGH

SEQ ID NO: 18898 - protein, 419 aa, Homo sapiens
MARRPRHSIYSSDEDDEDFEMCDHDYDGLLPKSGKRHLGKTRWTREEDEKLKKLVEQNGTDDWKVIANYLPNRTDVQCQHRWQKVLNPELIKGPWTKEEDQRVIELVQKYGPKRWSVIAKHLKGRIGKQCRERWHNHLNPEVKKTSWTEEEDRIIYQAHKRLGNRWAEIAKLLPGRTDNAIKNHWNSTMRRKVEQEGYLQESSKASQPAVATSFQKNSHLMGFAQAPPTAQLPATGQPTVNNDYSYYHISEAQNVSSHVPYPVALHVNIVNVPQPAAAAIQRHYNDEDPEKEKRIKELELLLMSTENELKGQQTQNHTCSYPGWHSTTIADHTRPHGDSAPVSCLGEHHSTPSLPADPGSLPEESASPARILHHGVISAVLNSLKKQIFHLANITQAKPYSFSKERAMGLNLQENLAQG

SEQ ID NO: 18899 - protein, 253 aa, Homo sapiens
MRAAGVGLVDCHCHLSAPDFDRDLDDVLEKAKKANVVALVAVAEHSGEFEKIMQLSERYNGFVLPCLGVHPVQGLPPEDQRSVTLKVGLDFSPRFAGTGEQKEEQRQVLIRQIQLAKRLNLPVNVHSRSAGRPTINLLQEQGAEKVLLHAFDGRPSVAMEGVRAGYFFSIPPSIIRSGQKQKLVKQLPLTSICLETDSPALGPEKQVRNEPWNISISAEYIAQVKGISVEEVIEVTTQNALKLFPKLRHLLQK

SEQ ID NO: 18900 - protein, 938 aa, Homo sapiens
MDDSEVESTASILASVKEQEAQFEKLTRALEEERRHVSAQLERVRVSPQDANPLMANGTLTRRHQNGRFVGDADLERQKFSDLKLNGPQDHSHLLYSTIPRMQEPGQIVETYTEEDPEGAMSVVSVETSDDGTTRRTETTVKKVVKTVTTRTVQPVAMGPDGLPVDASSVSNNYIQTLGRDFRKNGNGGPGPYVGQAGTATLPRNFHYPPDGYSRHYEDGYPGGSDNYGSLSRVTRIEERYRPSMEGYRAPSRQDVYGPQPQVRVGGSSVDLHRFHPEPYGLEDDQRSMGYDDLDYGMMSDYGTARRTGTPSDPRRRLRSYEDMIGEEVPSDQYYWAPLAQHERGSLASLDSLRKGGPPPPNWRQPELPEVIAMLGFRLDAVKSNAAAYLQHLCYRNDKVKTDVRKLKGIPVLVGLLDHPKKEVHLGACGALKNISFGRDQDNKIAIKNCDGVPALVRLLRKARDMDLTEVITGTLWNLSSHDSIKMEIVDHALHALTDEVIIPHSGWEREPNEDCKPRHIEWESVLTNTAGCLRNVSSERSEARRKLRECDGLVDALIFIVQAEIGQKDSDSKLVENCVCLLRNLSYQVHREIPQAERYQEAAPNVANNTGPHAASCFGAKKGKDEWFSRGKKPIEDPANDTVDFPKRTSPARGYELLFQPEVVRIYISLLKESKTPAILEASAGAIQNLCAGRWTYGRYIRSALRQEKALSAIADLLTNEHERVVKAASGALRNLAVDARNKELIGKHAIPNLVKNLPGGQQNSSWNFSEDTVISILNTINEVIAENLEAAKKLRETQGIEKLVLINKSGNRSEKEVRAAALVLQTIWGYKELRKPLEKEGWKKSDFQVNLNNASRSQSSHSYDDSTLPLIDRNQKSDKKPDREEIQMSNMGSNTKSLDNNYSTPNERGDHNRTLDRSGDLGDMEPLKGTTPLMKI

SEQ ID NO: 18901 - protein, 495 aa, Homo sapiens
MELHGGNRGGYQPKALEQSGCWLWQAALSTLNPNPTDSCPLYLNYATVAALPCRVSRHNSPSAAHFITRLVRTCLPPGAHRCIVMVCEQPEVFASACALARAFPLFTHRSGASRRLEKKTVTVEFFLVGQDNGPVEVSTLQCLANATDGVRLAARIVDTPCNEMNTDTFLEEINKVGKELGIIPTIIRDEELKTRGFGGIYGVGKAALHPPALAVLSHTPDGATQTIAWVGKGIVYDTGGLSIKGKTTMPGMKRDCGGAAAVLGAFRAAIKQGFKDNLHAVFCLAENSVGPNATRPDDIHLLYSGKTVEINNTDAEGRLVLADGVSYACKDLGADIILDMATLTGAQGIATGKYHAAVLTNSAEWEAACVKAGRKCGDLVHPLVYCPELHFSEFTSAVADMKNSVADRDNSPSSCAGLFIASHIGFDWPGVWVHLDIAAPVHAGERATGFGVALLLALFGRASEDPLLNLVSPLGCEVDVEEGDLGRDSKRRRLV

SEQ ID NO: 18902 - protein, 422 aa, Homo sapiens
MARRPRHSIYSSDEDDEDFEMCDHDYDGLLPKSGKRHLGKTRWTREEDEKLKKLVEQNGTDDWKVIANYLPNRTDVQCQHRWQKVLNPELIKGPWTKEEDQRVIELVQKYGPKRWSVIAKHLKGRIGKQCRERWHNHLNPEVKKTSWTEEEDRIIYQAHKRLGNRWAEIAKLLPGRTDNAIKNHWNSTMRRKVEQEGYLQESSKASQPAVATSFQKNSHLMGFAQAPPTAQLPATGQPTVNNDYSYYHISEAQNVSSHVPYPVALHVNIVNVPQPAAAAIQRHYNDEDPEKEKRIKELELLLMSTENELKGQQVLPTQNHTCSYPGWHSTTIADHTRPHGDSAPVSCLGEHHSTPSLPADPGSLPEESASPARILHHGVISAVLNSLKKQIFHLANITQAKPYSFSKERAMGLNLQENLAQG

SEQ ID NO: 18903 - protein, 781 aa, Homo sapiens
MWGLVRLLLAWLGGWGCMGRLAAPARAWAGSREHPGPALLRTRRSWVWNQFFVIEEYAGPEPVLIGKLHSDVDRGEGRTKYLLTGEGAGTVFVIDEATGNIHVTKSLDREEKAQYVLLAQAVDRASNRPLEPPSEFIIKVQDINDNPPIFPLGPYHATVPEMSNVGTSVIQVTAHDADDPSYGNSAKLVYTVLDGLPFFSVDPQTGVVRTAIPNMDRETQEEFLVVIQAKDMGGHMGGLSGSTTVTVTLSDVNDNPPKFPQSLYQFSVVETAGPGTLVGRLRAQDPDLGDNALMAYSILDGEGSEAFSISTDLQGRDGLLTVRKPLDFESQRSYSFRVEATNTLIDPAYLRRGPFKDVASVRVAVQDAPEPPAFTQAAYHLTVPENKAPGTLVGQISAADLDSPASPIRYSILPHSDPERCFSIQPEEGTIHTAAPLDREARAWHNLTVLATELDSSAQASRVQVAIQTLDENDNAPQLAEPYDTFVCDSAAPGQLIQVIRALDRDEVGNSSHVSFQGPLGPDANFTVQDNRDGSASLLLPSRPAPPRHAPYLVPIELWDWGQPALSSTATVTVSVCRCQPDGSVASCWPEAHLSAAGLSTGALLAIITCVGALLALVVLFVALRRQKQEALMVLEEEDVRENIITYDDEGGGEEDTEAFDITALQNPDGAAPPAPGPPARRDVLPRARVSRQPRPPGPADVAQLLALRLREADEDPGVPPYDSVQVYGYEGRGSSCGSLSSLGSGSEAGGAPGPAEPLDDWGPLFRTLAELYGAKEPPAP

SEQ ID NO: 18904 - protein, 158 aa, Homo sapiens
RLPLQCVLWGCLLTAVHPEPPTACREKQYLINSQCCSLCQPGQKLVSDCTEFTETECLPCGESEFLDTWNRETHCHQHKYCDPNLGLRVQQKGTSETDTICTCEEGWHCTSEACESCVLHRSCSPGFGVKQIAVRPKTWLCNRQAQTRLMLSVVPRIG

SEQ ID NO: 18905 - protein, 918 aa, Homo sapiens
MGRSNSRSHSSRSKSRSQSSSRSRSRSHSRKKRYRSRSRTYSRSRSRDRMYSRDYRRDYRNNRGMRRPYGYRGRGRGYYQGGGGRYHRGGYRPVWNRRHSRSPRRGRSRSRSPKRRSVSSQRSRSRSRRSYRSSRSPRSSSSRSSSPYSKSPVSKRRGSQEKQTKKAEGEPQEESPLKSKSQEEPKDTFEHDPSESIDEFNKSSATSGDIWPGLSAYDNSPRSPHSPSPIATPPSQSSSCSDAPMLSTVHSAKNTPSQHSHSIQHSPERSGSGSVGNGSSRYSPSQNSPIHHIPSRRSPAKTIAPQNAPRDESRGRSSFYPDGGDQETAKTGKFLKRFTDEESRVFLLDRGNTRDKEASKEKGSEKGRAEGEWEDQEALDYFSDKESGKQKFNDSEGDDTEETEDYRQFRKSVLADQGKSFATASHRNTEEEGLKYKSKVSLKGNRESDGFREEKNYKLKETGYVVERPSTTKDKHKEEDKNSERITVKKETQSPEQVKSEKLKDLFDYSPPLHKNLDAREKSTFREESPLRIKMIASDSHRPEVKLKMAPVPLDDSNRPASLTKDRLLASTLVHSVKKEQEFRSIFDHIKLPQASKSTSESFIQHIVSLVHHVKEQYFKSAAMTLNERFTSYQKATEEHSTRQKSPEIHRRIDISPSTLRKHTRLAGEERVFKEENQKGDKKLRCDSADLRHDIDRRRKERSKERGDSKGSRESSGSRKQEKTPKDYKEYKSYKDDSKHKREQDHSRSSSSSASPSSPSSREEKESKKEREEEFKTHHEMKEYSGFAGVSRPRGTFFRIRGRGRARGVFAGTNTGPNNSNTTFQKRPKEEEWDPEYTPKSKKYFLHDDRDDGVDYWAKRGRGRGTFQRGRGRFNFKKSGSSPKWTHDKYQGDGIVEDEEETMENNEEKKDRRKEEKE

SEQ ID NO: 18906 - protein, 1582 aa, Homo sapiens
MAGPGGWRDREVTDLGHLPDPTGIFSLDKTIGLGTYGRIYLGLHEKTGAFTAVKVMNARKTPLPEIGRRVRVNKYQKSVGWRYSDEEEDLRTELNLLRKYSFHKNIVSFYGAFFKLSPPGQRHQLWMVMELCAAGSVTDVVRMTSNQSLKEDWIAYICREILQGLAHLHAHRVIHRDIKGQNVLLTHNAEVKLVDFGVSAQVSRTNGRRNSFIGTPYWMAPEVIDCDEDPRRSYDYRSDVWSVGITAIEMAEGAPPLCNLQPLEALFVILRESAPTVKSSGWSRKFHNFMEKCTIKNFLFRPTSANMLQHPFVRDIKNERHVVESLTRHLTGIIKKRQKKGIPLIFEREEAIKEQYTVRRFRGPSCTHELLRLPTSSRCRPLRVLHGEPSQPRWLPDREEPQVQALQQLQGAARVFMPLQALDSAPKPLKGQAQAPQRLQGAARVFMPLQAQVKAKASKPLQMQIKAPPRLRRAARVLMPLQAQVRAPRLLQVQSQVSKKQQAQTQTSEPQDLDQVPEEFQGQDQVPEQQRQGQAPEQQQRHNQVPEQELEQNQAPEQPEVQEQAAEPAQAETEAEEPESLRVNAQVFLPLLSQDHHVLLPLHLDTQVLIPVEGQTEGSPQAQAWTLEPPQAIGSVQALIEGLSRDLLRAPNSNNSKPLGPLQTLMENLSSNRFYSQPEQAREKKSKVSTLRQALAKRLSPKRFRAKSSWRPEKLELSDLEARRQRRQRRWEDIFNQHEEELRQVDKDKEDESSDNDEVFHSIQAEVQIEPLKPYISNPKKIEVQERSPSVPNNQDHAHHVKFSSSVPQRSLLEQAQKPIDIRQRSSQNRQNWLAASESSSEEESPVTGRRSQSSPPYSTIDQKLLVDIHVPDGFKVGKISPPVYLTNEWVGYNALSEIFRNDWLTPAPVIQPPEEDGDYVELYDASADTDGDDDDESNDTFEDTYDHANGNDDLDNQVDQANDVCKDHDDDNNKFVDDVNNNYYEAPSCPRASYGRDGSCKQDGYDGSRGKEEAYRGYGSHTANRSHGGSAASEDNAAIGDQEEHAANIGSERRGSEGDGGKGVVRTSEESGALGLNGEENCSETDGPGLKRPASQDFEYLQEEPGGGNEASNAIDSGAAPSAPDHESDNKDISESSTQSDFSANHSSPSKGSGMSADANFASAILYAGFVEVPEESPKQPSEVNVNPLYVSPACKKPLIHMYEKEFTSEICCGSLWGVNLLLGTRSNLYLMDRSGKADITKLIRRRPFRQIQVLEPLNLLITISGHKNRLRVYHLTWLRNKILNNDPESKRRQEEMLKTEEACKAIDKLTGCEHFSVLQHEETTYIAIALKSSIHLYAWAPKSFDESTAIKVCIDQSADSEGDYMSYQAYIRILAKIQAADPVNRFKRPDELLHLLKLKVFPTLDHKPVTVDLAIGSEKRLKIFFSSADGYHLIDAESEVMSDVTLPKNPLEIIIPQNIIILPDCLGIGMMLTFNAEALSVEANEQLFKKILEMWKDIPSSIAFECTQRTTGWGQKAIEVRSLQSRVLESELKRRSIKKLRFLCTRGDKLFFTSTLRNHHSRVYFMTLGKLEELQSNYDV

SEQ ID NO: 18907 - protein, 63 aa, Homo sapiens
GVTLYELLTHCDSSQSPPTVYHLMKNCWETEASFRPTFENLIPILKTVHEKYQGQAPSVFSVC

SEQ ID NO: 18908 - protein, 513 aa, Homo sapiens
MALRAPALLPLLLLLLPLRAAGCPAACRCYSATVECGALRLRVVPLGIPPGTQTLFLQDNNIARLEPGALAPLAALRRLYLHNNSLRALEAGAFRAQPRLLELALTSNRLRGLRSGAFVGLAQLRVLYLAGNQLARLLDFTFLHLPRLQELHLQENSIELLEDQALAGLSSLALLDLSRNQLGTISREALQPLASLQVLRLTENPWRCDCALHWLGAWIKEGGQRLLTSRDRKIMCAEPPRLALQSLLDVSHSSLICIPPSVHVQPLELTANLGEDLRVACQASGYPQPLVTWRKVPQPREGRPRAQAQLEGGLLGLGGHSASDTGSGMLFLSNITLAHAGKYECEASNAGGAARVPFRLLVNASRQQPQQPAQPPPPAARPAGSEPRPEAGSMAFRALGVATQTAIAAAIALLALTALLLVAMICRRRRRRKKARGPPGEGALFVNDYLDGPCTFAQLEELRDERGHEMFVINRSKPLFAEGPAEAPADCGPEQGAGPGLRVPPPVAYEIHC

SEQ ID NO: 18909 - protein, 85 aa, Homo sapiens
MELVTFRDVAIEFSPEEWKCLDPAQQNLYRDVMLENYRNLVSLGFVISNPDLVTCLEQIKEPCNLKIHETAAKPPVVQHFWSLQF

SEQ ID NO: 18910 - protein, 457 aa, Homo sapiens
MLCRNQLSPVNIHPSYAPSSPSSSNSGSYKGSDCSPIMRRSGRYMSCGENHGVRPPNPEQYLTPLQQKEVTVRHLKTKLKESERRLHERESEIVELKSQLARMREDWIEEECHRVEAQLALKEARKEIKQLKQVIETMRSSLADKDKGIQKYFVDINIQNKKLESLLQSMEMAHSGSLRDELCLDFPCDSPEKSLTLNPPLDTMADGLSLEEQVTGEGADRELLVGDSIANSTDLFDEIVTATTTESGDLELVHSTPGANVLELLPIVMGQEEGSVVVERAVQTDVVPYSPAISELIQSVLQKLQDPCPSSLASPDESEPDSMESFPESLSALVVDLTPRNPNSAILLSPVETPYANVDAEVHANRLMRELDFAACVEERLDGVIPLARGGVVRQYWSSSFLVDLLAVAAPVVPTVLWAFSTQRGGTDPVYNIGALLRGCCVVALHSLRRTAFRIKT

SEQ ID NO: 18911 - protein, 185 aa, Homo sapiens
SKSKSERANIQLAATKKTQYQQLPVSDEILFQIYQPREPLHFSKFLDPDFQPSCSEVDLIGFVVSVVKKTGLAPFVYLSDECYNLLAIKFWIDLNEDIIKPHMLIAASNLQWRPESKSGLLTLFAGDFSVFSASPKEGHFQETFNKMKNTVERQSLALSPPGWSTIAQSRITAVSASWAQAILVP

SEQ ID NO: 18912 - protein, 645 aa, Homo sapiens
MIGEEVPSDQYYWAPLAQHERGSLASLDSLRKGGPPPPNWRQPELPEVIAMLGFRLDAVKSNAAAYLQHLCYRNDKVKTDVRKLKGIPVLVGLLDHPKKEVHLGACGALKNISFGRDQDNKIAIKNCDGVPALVRLLRKARDMDLTEVITGTLWNLSSHDSIKMEIVDHALHALTDEVIIPHSGWEREPNEDCKPRHIEWESVLTNTAGCLRNVSSERSEARRKLRECDGLVDALIFIVQAEIGQKDSDSKLVENCVCLLRNLSYQVHREIPQAERYQEAAPNVANNTGPHAASCFGAKKGKDEWFSRGKKPIEDPANDTVDFPKRTSPARGYELLFQPEVVRIYISLLKESKTPAILEASAGAIQNLCAGRWTYGRYIRSALRQEKALSAIADLLTNEHERVVKAASGALRNLAVDARNKELIGKHAIPNLVKNLPGGQQNSSWNFSEDTVISILNTINEVIAENLEAAKKLRETQGIEKLVLINKSGNRSEKEVRAAALVLQTIWGYKELRKPLEKEGWKKSDFQVNLNNASRSQSSHSYDDSTLPLIDRNQKSDKKPDREEIQMSNMGSNTKSLDNNYSTPNERGDHNRTLDRSGDLGDMEPLKGTTPLMQDEGQESLEEELDVLVLDDEGGQVSYPSMQKI

SEQ ID NO: 18913 - protein, 1367 aa, Homo sapiens
MGNSDSQYTLQGSKNHSNTITGAKQIPCSLKIRGIHAKEEKSLHGWGHGSNGAGYKSRSLARSCLSHFKSNQPYASRLGGPTCKVSRGVAYSTHRTNAPGKDFQGISAAFSTENGFHSVGHELADNHITSRDCNGHLLNCYGRNESIASTPPGEDRKSPRVLIKTLGKLDGCLRVEFHNGGNPSKVPAEDCSEPVQLLRYSPTLASETSPVPEARRGSSADSLPSHRPSPTDSRLRSSKGSSLSSESSWYDSPWGNAGELSEAEGSFLAPGMPDPSLHASFPPGDAKKPFNQSSSLSSLRELYKDANLGSLSPSGIRLSDEYMGTHASLSNRVSFASDIDVPSRVAHGDPIQYSSFTLPCRKPKAFVEDTAKKDSLKARMRRISDWTGSLSRKKRKLQEPRSKEGSDYFDSRSDGLNTDVQGSSQASAFLWSGGSTQILSQRSESTHAIGSDPLRQNIYENFMRELEMSRTNTENIETSTETAESSSESLSSLEQLDLLFEKEQGVVRKAGWLFFKPLVTVQKERKLELVARRKWKQYWVTLKGCTLLFYETYGKNSMDQSSAPRCALFAEDSIVQSVPEHPKKENVFCLSNSFGDVYLFQATSQTDLENWVTAVHSACASLFAKKHGKEDTLRLLKNQTKNLLQKIDMDSKMKKMAELQLSVVSDPKNRKAIENQIQQWEQNLEKFHMDLFRMRCYLASLQGGELPNPKSLLAAASRPSKLALGRLGILSVSSFHALVCSRDDSALRKRTLSLTQRGRNKKGIFSSLKGLDTLARKGKEKRPSITQVDELLHIYGSTVDGVPRDNAWEIQTYVHFQDNHGVTVGIKPEHRVEDILTLACKMRQLEPSHYGLQLRKLVDDNVEYCIPAPYEYMQQQVYDEIEVFPLNVYDVQLTKTGSVCDFGFAVTAQVDERQHLSRIFISDVLPDGLAYGEGLRKGNEIMTLNGEAVSDLDLKQMEALFSEKSVGLTLIARPPDTKATLCTSWSDSDLFSRDQKSLLPPPNQSQLLEEFLDNFKKNTANDFSNVPDITTGLKRSQTDGTLDQVSHREKMEQTFRSAEQITALCRSFNDSQANGMEGPRENQDPPPRSLARHLSDADRLRKVIQELVDTEKSYVKDLSCLFELYLEPLQNETFLTQDEMESLFGSLPEMLEFQKVFLETLEDGISASSDFNTLETPSQFRKLLFSLGGSFLYYADHFKLYSGFCANHIKVQKVLERAKTDKAFKAFLDARNPTKQHSSTLESYLIKPVQRVLKYPLLLKELVSLTDQESEEHYHLTEALKAMEKVASHINEMQKIYEDYGTVFDQLVAEQSGTEKEVTELSMGELLMHSTVSWLNPFLSLGKARKDLELTVFVFKRAVILVYKENC

SEQ ID NO: 18914 - protein, 701 aa, Homo sapiens
ITQERNRAKETLEEERKRMQELESLLAQQKKALAKSITQEKNRVKEALEEEQTRVQELEERLARQKEISESNIAYEKRKAKEAMEKEKKKVQDLENRLTKQKEELELKEQKEDVLNNKLSDALAMVEETQKTKATESLKAESLALKLNETLAELETTKTKMIMVEERLILQQKMVKALQDEQESQRHGFEEEIMEYKEQIKQHAQTIVSLEEKLQKVTQHHKKIEGEIATLKDNDPAPKEERPQDPLVAPMTESSAKDMAYEHLIDDLLAAQKEILSQQEVIMKLRKDLTEAHSRMSDLRGELNEKQKMELEQNVVLVQQQSKELSVLKEKMAQMSSLVEKKDRELKALEEALRASQEKHRLQLNTEKEQKPRKKTQTCDTSVQIEPVHTEAFSSSQEQQSFSDLGVRCKGSRHEEVIQRQKKALSELRARIKELEKARSPDHKDHQNESFLDLKNLRMENNVQKILLDAKPDLPTLSRIEILAPQNGLCNARFGSAMEKSGKMDVAEALELSEKLYLDMSKTLGSLMNIKNMSGHVSMKYLSRQEREKVNQLRQRDLDLVFDKITQLKNQLGRKEELLRGYEKDVEQLRRSKVSIEMYQSQVAKLEDDIYKEAEEKALLKEALERMEHQLCQEKRINRAIRQQKRRVFVEMVKNRMQNSNSQVGTRKASLKMDQEREMLRKETSSKSSQSLLHSKPSGKY

SEQ ID NO: 18915 - protein, 257 aa, Homo sapiens
MEHLGPHHLHPGHAEPISFGIDQILNSPDQGGCMGPASRLQDGEYGLGCLVGGAYTYGGGGSAAATGAGGAGAYGTGGPGGPGGPAGGGGACSMGPLTGSYNVNMALAGGPGPGGGGGSSGGAGALSAAGVIRVPAHRPLAGAVAHPQPLATGLPTVPSVPAMPGVNNLTGLTFPWMESNRRYTKDRFTGHPYQNRTPPKKKKPRTSFTRLQICELEKRFHRQKYLASAERAALAKALKMTDAQVKTWFQNRRTKWR

SEQ ID NO: 18916 - protein, 461 aa, Homo sapiens
MVLDFVTPTPLGTRWGLGGTCVNVGCIPKKLMHQAALLGQALQDSRNYGWKVEETVKHDWDRMIEAVQNHIGSLNWGYRVALREKKVVYENAYGQFIGPHRIKATNNKGKEKIYSAERFLIATGERPRYLGIPGDKEYCISSDDLFSLPYCPGKTLVVGASYVALECAGFLAGIGLDVTVMVRSILLRGFDQDMANKIGEHMEEHGIKFIRQFVPIKVEQIEAGTPGRLRVVAQSTNSEEIIEGEYNTVMLAIGRDACTRKIGLETVGVKINEKTGKIPVTDEEQTNVPYIYAIGDILEDKVELTPVAIQAGRLLAQRLYAGSTVKCDYENVPTTVFTPLEYGACGLSEEKAVEKFGEENIEVYHSYFWPLEWTIPSRDNNKCYAKIICNTKDNERVVGFHVLGPNAGEVTQGFAAALKCGLTKKQLDSTIGIHPVCAEVFTTLSVTKRSGASILQAGCUG

SEQ ID NO: 18917 - protein, 514 aa, Homo sapiens
MNVLLFWKTFLLYNQGPEYHYLHQMLGLGLCLSRASASVLNLNCSLILLPMCRTLLAYLRGSQKVPSRRTRRLLDKSRTFHITCGVTICIFSGVHVAAHLVNALNFSVNYSEDFVELNAARYRDEDPRKLLFTTVPGLTGVCMVVVLFLMITASTYAIRVSNYDIFWYTHNLFFVFYMLLTLHVSGGLLKYQTNLDTHPPGCISLNRTSSQNISLPEYFSEHFHEPFPEGFSKPAEFTQHKFVKICMEEPRFQANFPQTWLWISGPLCLYCAERLYRYIRSNKPVTIISVMSHPSDVMEIRMVKENFKARPGQYITLHCPSVSALENHPFTLTMCPTETKATFGVHLKIVGDWTERFRDLLLPPSSQDSEILPFIQSRNYPKDDWKPYKLRRLYFIWVCRDIQSFRWFADLLCMLHNKFWQENRPDYVNIQLYLSQTDGIQKIIGEKYHALNSRLFIGRPRWKLLFDEIAKYNRGKTVGVFCCGPNSLSKTLHKLSNQNNSYGTRFEYNKESFS

SEQ ID NO: 18918 - protein, 749 aa, Homo sapiens
MIDWVSWPLGKNIDKWIIALLKGLAAVKKFSILIEVSLTKIEKVFSKLLYPIVRGAALSVLKYMLLTFQHSHEAFHLLLPHIPPMVASLVKEDSNSGTSCLEQLAELVHCMVFRFPGFPDLYEPVMEAIKDLHVPNEDRIKQLLGQDAWTSQKSELAGFYPRLMAKSDTGKIGLINLGNTCYVNSILQALFMASDFRHCVLRLTENNSQPLMTKLQWLFGFLEHSQRPAISPENFLSASWTPWFSPGTQQDCSEYLKYLLDRLHEEEKTGTRICQKLKQSSSPSPPEEPPAPSSTSVEKMFGGKIVTRICCLCCLNVSSREEAFTDLSLAFPPPERCRRRRLGSVMRPTEDITARELPPPTSAQGPGRVGPRRQRKHCITEDTPPTSLYIEGLDSKEAGGQSSQEERIEREEEGKEERTEKEEVGEEEESTRGEGEREKEEEVEEEEEKVEKETEKEAEQEKEEDSLGAGTHPDAAIPSGERTCGSEGSRSVLDLVNYFLSPEKLTAENRYYCESCASLQDAEKVVELSQGPCYLILTLLRFSFDLRTMRRRKILDDVSIPLLLRLPLAGGRGQAYDLCSVVVHSGVSSESGHYYCYAREGAARPAASLGTADRPEPENQWYLFNDTRVSFSSFESVSNVTSFFPKDTAYVLFYRQRPREGPEAELGSSRVRTEPTLHKDLMEAISKDNILYLQEQEKEARSRAAYISALPTSPHWGRGFDEDKDEDEGSPGGCNPAGGNGGDFHRLVF

SEQ ID NO: 18919 - protein, 840 aa, Homo sapiens
MQEPGQIVETYTEEDPEGAMSVVSVETSDDGTTRRTETTVKKVVKTVTTRTVQPVAMGPDGLPVDASSVSNNYIQTLGRDFRKNGNGGPGPYVGQAGTATLPRNFHYPPDGYSRHYEDGYPGGSDNYGSLSRVTRIEERYRPSMEGYRAPSRQDVYGPQPQVRVGGSSVDLHRFHPEPYGLEDDQRSMGYDDLDYGMMSDYGTARRTGTPSDPRRRLRSYEDMIGEEVPSDQYYWAPLAQHERGSLASLDSLRKGGPPPPNWRQPELPEVIAMLGFRLDAVKSNAAAYLQHLCYRNDKVKTDVRKLKGIPVLVGLLDHPKKEVHLGACGALKNISFGRDQDNKIAIKNCDGVPALVRLLRKARDMDLTEVITGTLWNLSSHDSIKMEIVDHALHALTDEVIIPHSGWEREPNEDCKPRHIEWESVLTNTAGCLRNVSSERSEARRKLRECDGLVDALIFIVQAEIGQKDSDSKLVENCVCLLRNLSYQVHREIPQAERYQEAAPNVANNTGPHAASCFGAKKGKGKKPIEDPANDTVDFPKRTSPARGYELLFQPEVVRIYISLLKESKTPAILEASAGAIQNLCAGRWTYGRYIRSALRQEKALSAIADLLTNEHERVVKAASGALRNLAVDARNKELIGKHAIPNLVKNLPGGQQNSSWNFSEDTVISILNTINEVIAENLEAAKKLRETQGIEKLVLINKSGNRSEKEVRAAALVLQTIWGYKELRKPLEKEGWKKSDFQVNLNNASRSQSSHSYDDSTLPLIDRNQKSDNNYSTPNERGDHNRTLDRSGDLGDMEPLKGTTPLMQDEGQESLEEELDVLVLDDEGGQVSYPSMQKI

SEQ ID NO: 18920 - protein, 299 aa, Homo sapiens
MSWIKEGELSLWERFCANIIKAGPMPKHIAFIMDGNRRYAKKCQVERQEGHSQGFNKLAETLRWCLNLGILEVTVYAFSIENFKRSKSEVDGLMDLARQKFSRLMEEKEKLQKHGVCIRVLGDLHLLPLDLQELIAQAVQATKNYNNDISESLLDKCLYTNRSPHPDILIRTSGEVRLSDFLLWQTSHSCLVFQPVLWPEYTFWNLFEAILQFQMNHSVLQKARDMYAEERKRQQLERDQATVTEQLLREGLQASGDAQLRRTRLHKLSARREERVQGFLQALELKRADWLARLGTASA

SEQ ID NO: 18921 - protein, 250 aa, Homo sapiens
MVSFRLSNKTASPSIKLLVDDPIVVNPGEAITLVCVTTGGEPAPSLTWVRSFGTLPEKTVLNGGTLTIPAITSDDAGTYSCIANNNVGNPAKKSTNIIVRALKKGRFWITPDPYHKDDNIQIGREVKISCQVEAVPSEELTFSWFKNGRPLRSSERMVITQTDPDVSPGTTNLDIIDLKFTDFGTYTCVASLKGGGISDISIDVNISSSTGNTIGDKRNILTSSKTLPLESTHLTTDRCGFSIEWKLYKV

SEQ ID NO: 18922 - protein, 107 aa, Homo sapiens
MIARRNPEPLRFLPDEARSLPPPKLTDPRLLYIGFLGYCSGLIDNLIRRRPIATAGLHRQLLYITAFFFAGYYLVKREDYLYAVRDREMFGYMKLHPEDFPEEGISS

SEQ ID NO: 18923 - protein, 150 aa, Homo sapiens
MTKDNNLLGKFELTGIPPAPRGVPQIEVTFDIDANGILNVSAVDKSTGKENKITITNDKGRLSKEDIERMVQEAEKYKAEDEKQRDKVSSKNSLESYAFNMKATVEDEKLQGKINDEDKQKILDKCNEIINWLDKNQTAEKEEFEHQQKE

SEQ ID NO: 18924 - protein, 520 aa, Homo sapiens
MMALPGGRHLDSVTLPGQRLHLMQVDSVQRWMEDLKLMTECECMCVLQAKPISLEEDAQGDLILAGGPGPGDPLQLLLKRGWVISTELRRIGQKLAQDRWARVHSMSVRLTCHARSMVSEYSAVSRNSLKEMGEIEKLLMEKCSELSAVTERCLQVENEHVLKSMKACVSETLSMLGQHFGQLLELALTREVQALVRKIDASDNIYTTESTTGNLFSLTQEGAPLCRIIAKEGGVVALFKVCRQDSFRCLYPQALRTLASICCVEEGVHQLEKVDGVLCLADILTDNSHSEATRAEAAAVVAQVTSPHLPVTQHLSSFLESMEEIVTALVKLCQEASSGEVFLLASAALANITFFDTMACEMLLQLNAIRVLLEACSDKQRVDTPYTRDQIVTILANMSVLEQCASDIIQENGVQLIMGMLSEKPRSGTPAEVAACERVQQKAAVTLARLSRDPDVAREAVRLSCMSRLIELCRSPSERNSSDAVLVACLAMGIQLQVKKTNISALLLWFLFWHIQGCSA

SEQ ID NO: 18925 - protein, 414 aa, Homo sapiens
MLRSTSTVTLLSGGAARTPGAPSRRANVCRLRLTVPPESPVPEQCEKKIERKEQLLDLSNGEPTRKLPQGVVYGVVRRSDQNQQKEMVVYGWSTSQLKEEMNYIKDVRATLEKVRKRMYGDYDEMRQKIRQLTQELSVSHAQQEYLENHIQTQSSALDRFNAMNSALASDSIGLQKTLVDVTLENSNIKDQIRNLQQTYEASMDKLREKQRQLEVAQVENQLLKMKVESSQEANAEVMREMTKKLYSQYEEKLQEEQRKHSAEKEALLEETNSFLKAIEEANKKMQAAEISLEEKDQRIGELDRLIERMEKERHQLQLQLLEHETEMSGELTDSDKERYQQLEEASASLRERIRHLDDMVHCQQKKVKQMVEEIESLKKKLQQKQLLILQLLEKISFLEGEGRKGLKGRLKMSC

SEQ ID NO: 18926 - protein, 231 aa, Homo sapiens
MAVSWRSWLANEGVKHLCLFIWLSMNVLLFWKTFLLYNQGPEYHYLHQMLGCPTETKATFGVHLKIVGDWTERFRDLLLPPSSQDSEILPFIQSRNYPKDDWKPYKLRRLYFIWVCRDIQSFRWFADLLCMLHNKFWQENRPDYVNIQLYLSQTDGIQKIIGEKYHALNSRLFIGRPRWKLLFDEIAKYNRGKTVGVFCCGPNSLSKTLHKLSNQNNSYGTRFEYNKESFS

SEQ ID NO: 18927 - protein, 258 aa, Homo sapiens
MAAKSQPNIPKAKSLDGVTNDRTASQGQWGRACCALTGPVVDIVTGHARLSDIWAKTPPITRKAAQLYTLWVTFQVLLYTSLPDFCHKFLPGYVGGIQEGAVTPAGVVNKYQINGLQAWLLTHLLWFANAHLLSWFSPTIIFDNWIPLLWCANILGYAVSTFAMVKGYFFPTSARDCKFTGNFFYNYMMGIEFNPRIGKWFDFKLFFNGRPGIVAWTLINLSFAAKQRELHSHVTNAMVLVNVLQAIYVIDFFWNETW

SEQ ID NO: 18928 - protein, 889 aa, Homo sapiens
MELVKAALAEALRLLRLQVPPSSLQGSGTPAPPGDSSLAAPPGLPPTCTPSLVSRGTQTETEVELKSSPGPPGLSNGPPAPQGASEEPSGTQSEGGGSSSSGAGSPGPPGILRPLQPPQRADTPRRNSSSSSSPSERPRQKLSRKAISSANLLVRSGSTESRGGKDPLSSPGGPGSRRSNYNLEGISVKMFLRGRPITMYIPSGIRSLEELPSGPPPETLSLDWVYGYRGRDSRSNLFVLRSGEVVYFIACVVVLYRPGGGPGGPGGGGQRHYRGHTDCVRCLAVHPDGVRVASGQTAGVDKDGKPLQPVVHIWDSETLLKLQEIGLGAFERGVGALAFSAADQGAFLCVVDDSNEHMLSVWDCSRGMKLAEIKSTNDSVLAVGFNPRDSSCIVTSGKSHVHFWNWSGGVGVPGNGTLTRKQGVFGKYKKPKFIPCFVFLPDGDILTGDSEGNILTWGRSPSDSKTPGRGGAKETYGIVAQAHAHEGSIFALCLRRDGTVLSGGGRDRRLVQWGPGLVALQEAEIPEHFGAVRAIAEGLGSELLVGTTKNALLRGDLAQGFSPVIQGHTDELWGLCTHPSQNRFLTCGHDRQLCLWDGESHALAWSIDLKETGLCADFHPSGAVVAVGLNTGRWLVLDTETREIVSDVIDGNEQLSVVRYSPDGLYLAIGSHDNVIYIYSVSSDGAKSSRFGRCMGHSSFITHLDWSKDGNFIMSNSGDYEILYWDVAGGCKQLKNRYESRDREWATYTCVLGFHVYVPVRSCQGAEPHVRGPRQPRDQRPIHARRLAPRLAGRQGRQHLPVASAGRWGRGAGARHALSNPLPVPRLLPRRLIAAWRDRLARRRGPAPPCPSLAQSPTTRGRLFPGLTSRHSRSRIFLEGANGAPAHTV

SEQ ID NO: 18929 - protein, 155 aa, Homo sapiens
MAEPGHSHHLSARVRGRTERRIPRLWRLLLWAGTAFQVTQGTGPELHACKESEYHYEYTACDSTGSRWRVAVPHTPGLCTSLPDPIKGTECSFSCNAGEFLDMKDQSCKPCAEGRYSLGTGIRFDEWDELPHGFASLSANMELDDSAAESTGNCT

SEQ ID NO: 18930 - protein, 1375 aa, Homo sapiens
MAGYVPGQQPANRSQEKEFVQAYEDVLERYKDERDRVQKKTFTKWVNKHLMKVRKHINDLYEDLRDGHNLISLLEVLSGIKLPREKGRMRFHRLQNVQIALDFLKQRQVKLVNIRNDDITDGNPKLTLGLIWTIILHFQISDIYISGESGDMSAKEKLLLWTQKVTAGYTGIKCTNFSSCWSDGKMFNALIHRYRPDLVDMERVQIQSNRENLEQAFEVAERLGVTRLLDAEDVDVPSPDEKSVITYVSSIYDAFPKVPEGGEGISATEVDSRWQEYQSRVDSLIPWIKQHTILMSDKTFPQNPVELKALYNQYIHFKETEILAKEREKGRIEELYKLLEVWIEFGRIKLPQGYHPNDVEEEWGKLIIEMLEREKSLRPAVERLELLLQIANKIQNGALNCEEKLTLAKNTLQADAAHLESGQPVQCESDVIMYIQECEGLIRQLQVDLQILRDENYYQLEELAFRVMRLQDELVTLRLECTNLYRKGHFTSLELVPPSTLTTTHLKAEPLTKATHSSSTSWFRKPMTRAELVAISSSEDEGNLRFVYELLSWVEEMQMKLERAEWGNDLPSVELQLETQQHIHTSVEELGSSVKEARLYEGKMSQNFHTSYAETLGKLETQYCKLKETSSFRMRHLQSLHKFVSRATAELIWLNEKEEEELAYDWSDNNSNISAKRNYFSELTMELEEKQDVFRSLQDTAELLSLENHPAKQTVEAYSAAVQSQLQWMKQLCLCVEQHVKENTAYFQFFSDARELESFLRNLQDSIKRKYSCDHNTSLSRLEDLLQDSMDEKEQLIQSKSSVASLVGRSKTIVQLKPRSPDHVLKNTISVKAVCDYRQIEITICKNDECVLEDNSQRTKWKVISPTGNEAMVPSVCFLIPPPNKDAIEMASRVEQSYQKVMALWHQLHVNTKSLISWNYLRKDLDLVQTWNLEKLRSSAPGECHQIMKNLQAHYEDFLQDSRDSVLFSVADRLRLEEEVEACKARFQHLMKSMENEDKEETVAKMYISELKNIRLRLEEYEQRVVKRIQSLASSRTDRDAWQDNALRIAEQEHTQEDLQQLRSDLDAVSMKCDSFLHQSPSSSSVPTLRSELNLLVEKMDHVYGLSTVYLNKLKTVDVIVRSIQDAELLVKGYEIKLSQEEVVLADLSALEAHWSTLRHWLSDVKDKNSVFSVLDEEIAKAKVVAEQMSRLTPERNLDLERYQEKGSQLQERWHRVIAQLEIRQSELESIQEVLGDYRACHGTLIKWIEETTAQQEMMKPGQAEDSRVLSEQLSQQTALFAEIERNQTKLDQCQKFSQQYSTIVKDYELQLMTYKAFVESQQKSPGKRRRMLSSSDAITQEFMDLRTRYTALVTLTTQHVKYISDALRRLEEEE

SEQ ID NO: 18931 - protein, 1062 aa, Homo sapiens
MGNSLGCFKEPKESIAIPEKAPISPKKRVRFKRRWRGKKIPTPEASHQEETSEGTGVIEETETLTKLTESLQKEDGVGGVEHTPPDILLPGDSAPNSRVVDRGMIVQVKERFQGEVQTAHLLLENESSVAGGVWDSLEEGMTVIAHLLDNPAERNCEKSVSQLVEFPRTASCSSRAVLLPLQGETAVEKGNIQRGFRSCALPRTDYPTDKGNQEQFSEGWSVEEGTKSVSGAPQTASWIIECSVSSLLLDQPGGQRRTEPSHVGQVPPQDSRLPTSQSDLSISGVTVSILPSSSGYGSDGPHIHGIQPKDTEPEKSSTSFSEEDGTLSLEASHTPSWGLEEISDIYISGESGDMSAKEKLLLWTQKVTAGYTGIKCTNFSSCWSDGKMFNALIHRYRPDLVDMERVQIQSNRENLEQAFEVAERLGVTRLLDAEDVDVPSPDEKSVITYVSSIYDAFPKVPEGGEGISATEVDSRWQEYQSRVDSLIPWIKQHTILMSDKTFPQNPVELKALYNQYIHFKETEILAKEREKGRIEELYKLLEVWIEFGRIKLPQGYHPNDVEEEWGKLIIEMLEREKSLRPAVERLELLLQIANKIQNGALNCEEKLTLAKNTLQADAAHLESGQPVQCESDVIMYIQECEGLIRQLQVDLQILRDENYYQLEELAFRVMRLQDELVTLRLECTNLYRKGHFTSLELVPPSTLTTTHLKAEPLTKATHSSSTSWFRKPMTRAELVAISSSEDEGNLRFVYELLSWVEEMQMKLERAEWGNDLPSVELQLETQQHIHTSVEELGSSVKEARLYEGKMSQNFHTSYAETLGKLETQYCKLKETSSFRMRHLQSLHKFVSRATAELIWLNEKEEEELAYDWSDNNSNISAKRNYFSELTMELEEKQDVFRSLQDTAELLSLENHPAKQTVEAYSAAVQSQLQWMKQLCLCVEQHVKENTAYFQFFSDARELESFLRNLQDSIKRKYSCDHNTSLSRLEDLLQDSMAQDEKEQLIQSKSSVASLVGRSKTIVQLKPRSPDHVLKNTISVKAVCDYRQIEGRTILSEGYGPLASAAC

SEQ ID NO: 18932 - protein, 346 aa, Homo sapiens
MGEFMAMEAGLSEVKSELQSRDDLLRIIEMERLQLHRELLKIGECQNAQGNKTRLESSYLPSIKEPERKIKELFSVMQDQPNHEKELNKIRSQLQQVEEYHNSEQERMRNEISDLTEELHQKEITIATVTKKAALLEKQLKMELEIKEKMLAKQKVSDMKYKAVRTENTHLKGMMGDLDPGEYMSMDFTNREQSRHTSINKLQYENERLRNDLAKLHVNGKSTWTNQNTYEETGRYAYQSQIKVEQNEERLSHDCEPNRSTMPPLPPSTFQAKEMTSPLVSDDDVFPLSPPDMSFPASLAAQHFLLEEEKRAKELEKLLNTHIDELQRHTEFTLNKYSKLKQNRHI

SEQ ID NO: 18933 - protein, 600 aa, Homo sapiens
MKPFQLDLLFVCFFLFSQELGLQKRGCCLVLGYMAKDKFRRMNEGQVYSFSQQPQDQVVVSGQPVTLLCAIPEYDGFVLWIKDGLALGVGRDLSSYPQYLVVGNHLSGEHHLKILRAELQDDAVYECQAIQAAIRSRPARLTVLVPPDDPVILGGPVISLRAGDPLNLTCHADNAKPAASIIWLRKGEVINGATYSKTLLRDGKRESIVSTLFISPGDVENGQSIVCRATNKAIPGGKETSVTIDIQHPPLVNLSVEPQPVLEDNVVTFHCSAKANPAVTQYRWAKRGQIIKEASGEVYRTTVDYTYFSEPVSCEVTNALGSTNLSRTVDVYFGPRMTTEPQSLLVDLGSDAIFSCAWTGNPSLTIVWMKRGSGVVLSNEKTLTLKSVRQEDAGKYVCRAVVPRVGAGEREVTLTVNGPPIISSTQTQHALHGEKGQIKCFIRSTPPPDRIAWSWKENVLESGTSGRYTVETISTEEGVISTLTISNIVRADFQTIYNCTAWNSFGSDTEIIRLKEQGSEMKSGAGLEAESVPMAVIIGVAVGAGVAFLVLMATIVAFCCARSQRSTGGRSGISGRGTEKKARLRLPRRASKQECNEQGS

SEQ ID NO: 18934 - protein, 717 aa, Homo sapiens
MTMTANKNSSITHGAGGTKAPRGTLSRKSFEFEDASSLQSLYPSSPTENGTENQPKFGSKSTLEENAYEDIVGDLPKENPYEDVDLKSRRAGRKSQQLSENSLDSLHRMWSPQDRKYNSPPTQLSLKPNSQSLRSGNWSERKSHRLPRLPKRHSHDDMLLLAQLSLPSSPSSLNEDSLSTTSELLSSRRARRIPKLVQRINSIYNAKRGKKRLKKLSMSSIETASLRDENSESESDSDDRFKAHTQRLVHIQSMLKRAPSYRTLELELLEWQERELFEYFVVVSLKKKPSRNTYLPEVSYQFPKLDRPTKQMREAEERLKAIPQFCFPDAKDWLPVSEYSSETFSFMLTGEDGSRRFGYCRRLLPSGKGPRLPEVYCVISRLGCFGLFSKVLDEVERRRGISAALVYPFMRSLMESPFPAPGKTIKVKTFLPGAGNEVLELRRPMDSRLEHVDFECLFTCLSVRQLIRIFASLLLERRVIFVADKLSTLSSCSHAVVALLYPFSWQHTFIPVLPASMIDIVCCPTPFLVGLLSSSLPKLKELPVEEALMVNLGSDRFIRQMDDEDTLLPRKLQAALEQALERKNELISQDSDSDSDDECNTLNGLVSEVFIRFFVETVGHYSLFLTQSEKGERAFQREAFRKSVASKSIRRFLEVFMESQMFAGFIQDRELRKCRAKGLFEQRVEQYLEELPDTEQSGMNKFLRGLGNKMKFLHKKN

SEQ ID NO: 18935 - protein, 316 aa, Homo sapiens
MHGLFDVEISLTVQENAGSISCSMRHAHLSREVESRVQIGDTFFEPISWHLATKVLGILCCGLFFGIVGLKIFFSKFQWKIQAELDWRRKHGQAELRDARKHAVEVTLDPETAHPKLCVSDLKTVTHRKAPQEVPHSEKRFTRKSVVASQSFQAGKHYWEVDGGHNKRWRVGVCRDDVDRRKEYVTLSPDHGYWVLRLNGEHLYFTLNPRFISVFPRTPPTKIGVFLDYECGTISFFNINDQSLIYTLTCRFEGLLRPYIEYPSYNEQNGTPIVICPVTQESEKEASWQRASAIPETSNSESSSQATTPFLPRGEM

SEQ ID NO: 18936 - protein, 174 aa, Homo sapiens
LGSRDSALLWQLLVLLCRQNGSMVGSDIAELLMQDCKKLEKYKRQPPVANLINLTDEDWPVLSSGTPNLLTGEIPPSVETPAQIVEKFTRLLYYGRKKCCGEKQWGDWRPHLAVILSNQAGDPELYQRAIVAIGDTLAGKGLVEAAHFCYLMAHVPFGHYTVKTDHLVLLGSSH

SEQ ID NO: 18937 - protein, 547 aa, Homo sapiens
MTVLEITLAVILTLLGLAILAILLTRWARCKQSEMYISRYSSEQSARLLDYEDGRGSRHAYSTQSERSKRDYTPSTNSLALSRSSIALPQGSMSSIKCLQTTEEPPSRTAGAMMQFTAPIPGATGPIKLSQKTIVQTPGPIVQYPGSNAGPPSAPRGPPMAPIIISQRTASQLAAPIRIPQVHTMDSSGKITLTPVVILTGYMDEELAKKSCSKIQILKCGGTARSQNSREENKEALKNDIIFTNSVESLKSAHIKEPEREGKGTDLEKDKIGMEVKVDSDAGIPKRQETQLKISEMSIPQGQGAQIKKSVSDVPRGQESQVKKSESGVPKGQEAQVTKSGLVVLKGQEAQVEKSEMGVPRRQESQVKKSQSGVSKGQEAQVKKRESVVLKGQEAQVEKSELKVPKGQEGQVEKTEADVPKEQEVQEKKSEAGVLKGPESQVKNTEVSVPETLESQVKKSESGVLKGQEAQEKKESFEDKGNNDKEKERDAEKDPNKKEKGDKNTKGDKGKDKVKGKRESEINGEKSKGSKRAKANTGRKYNKKVEE

SEQ ID NO: 18938 - protein, 289 aa, Homo sapiens
MEEGARHRNNTEKKHPGGGESDASPEAGSGGGGVALKKEIGLVSACGIIVGNIIGSGIFVSPKGVLENAGSVGLALIVWIVTGFITVVGALCYAELGVTIPKSGGDYSYVKDIFGGLAGFLRLWIAVLVIYPTNQAVIALTFSNYVLQPLFPTCFPPESGLRLLAAICLLLLTWVNCSSVRWATRVQDIFTAGKLLALALIIIMGIVQICKGEYFWLEPKNAFENFQEPDIGLVALAFLQGSFAYGGWNFLNYVTEELVDPYKAANPGEPEDVCGRVPRGGAGLRDRGG

SEQ ID NO: 18939 - protein, 543 aa, Homo sapiens
MLSRLVLNSWAQAIIRPRPPKVLGLQVTTFSEAYQEGRLQKLLKMNGPEDLPKSYDYDLIIIGGGSGGLAAAKEAAQYGKKVMVLDFVTPTPLGTRWGLGGTCVNVGCIPKKLMHQAALLGQALQDSRNYGWKVEETVKHDWDRMIEAVQNHIGSLNWGYRVALREKKVVYENAYGQFIGPHRIKATNNKGKEKIYSAERFLIATGERPRYLGIPGDKEYCISSDDLFSLPYCPGKTLVVGASYVALECAGFLAGIGLDVTVMVRSILLRGFDQDMANKIGEHMEEHGIKFIRQFVPIKVEQIEAGTPGRLRVVAQSTNSEEIIEGEYNTVMLAIGRDACTRKIGLETVGVKINEKTGKIPVTDEEQTNVPYIYAIGDILEDKVELTPVAIQAGRLLAQRLYAGSTVKCDYENVPTTVFTPLEYGACGLSEEKAVEKFGEENIEVYHSYFWPLEWTIPSRDNNKCYAKIICNTKDNERVVGFHVLGPNAGEVTQGFAAALKCGLTKKQLDSTIGIHPVCAEVFTTLSVTKRSGASILQAGCUG

SEQ ID NO: 18940 - protein, 119 aa, Homo sapiens
MEERGDSEPTPGCSGLGPGGVRGFGDGGGAPSWAPEDAWMGTHPKYLEMMELDIGDATQVYVAFLVYLDLMESKSWHEVNCVGLPELQLICLVGTEIEGEGLQTVVPTPITASLSHNRW

SEQ ID NO: 18941 - protein, 694 aa, Homo sapiens
MDLHKQWENTETNWHKEKMELLDQFDNERKEWESQWKIMQKKIEELCREVKLWRKININESAKIIDLYHEKTIPEKVIESSPNYPDLGQSEFIRTNHKDGLRKENKREQSLVSGGNQMCKEQKATKKSKVGFLDPLATDNQKECEAWPDLRTSEEDSKSCSGALSTALEELAKVSEELCSFQEEIRKRSNHRRMKSDSFLQEMPNVTNIPHGDPMINNDQCILPISLEKEKQKNRKNLSCTNVLQSNSTKKCGIDTIDLKRNETPPVPPPRSTSRNFPSSDSEQAYERWKERLDHNSWVPHEGRSKRNYNPHFPLRQQEMSMLYPNEGKTSKDGIIFSSLVPEVKIDSKPPSNEDVGLSMWSCDIGIGAKRSPSTSWFQKTCSTPSNPKYEMVIPDHPAKSHPDLHVSNDCSSSVAESSSPLRNFSCGFERTTRNEKLAAKTDEFNRTVFRTDRNCQAIQQNHSCSKSSEDLKPCDTSSTHTGSISQSNDVSGIWKTNAHMPVPMENVPDNPTKKSTTGLVRQMQGHLSPRSYRNMLHEHDWRPSNLSGRPRSADPRSNYGVVEKLLKTYETATESALQNSKCFQDNWTKCNSDVSGGATLSQHLEMLQMEQQFQQKTAVWGGQEVKQGIDPKKITEESMSVNASHGKGFSRPARPANRRLPSRWASRSPSAPPALRRTTHNYTISLRSEALMV

SEQ ID NO: 18942 - protein, 264 aa, Homo sapiens
MCDLCIRYTIMVDKYIPNISMCLKDSDPFIRKQTLILLTNLLQEEFVKWKGSLFFRFVSTLIDSHPDIASFGEFCLAHLLLKRNPVMFFQHFIECIFHFNNYEKHEKYNKFPQSEREKRLFSLKGKSNKERRMKIYKFLLEHFTDEQRFNITSKICLSILACFADGILPLDLDASELLSDTFEVLSSKEIKLLAMRSKPDKDLLMEEDDMALANVVMQEAQKKLISQVQKRNFIENIIPIIISLKTVLEKNKIPALRELMHYLR

SEQ ID NO: 18943 - protein, 752 aa, Homo sapiens
MDQREILQKFLDEAQSKKITKEEFANEFLKLKRQSTKYKADKTYPTTVAEKPKNIKKNRYKDILPYDYSRVELSLITSDEDSSYINANFIKGVYGPKAYIATQGPLSTTLLDFWRMIWEYSVLIIVMACMEYEMGKKKCERYWAEPGEMQLEFGPFSVSCEAEKRKSDYIIRTLKVKFNSETRTIYQFHYKNWPDHDVPSSIDPILELIWDVRCYQEDDSVPICIHCSAGCGRTGVICAIDYTWMLLKDGSQAKHCIPEKNHTLQADSYSPNLPKSTTKAAKMMNQQRTKMEIKESSSFDFRTSEISAKEELVLHPAKSSTSFDFLELNYSFDKNADTTMKWQTKAFPIVGEPLQKHQSLDLGSLLFEGCSNSKPVNAAGRYFNSKVPITRTKSTPFELIQQRETKEVDSKENFSYLESQPHDSCFVEMQAQKVMHVSSAELNYSLPYDSKHQIRNASNVKHHDSSALGVYSYIPLVENPYFSSWPPSGTSSKMSLDLPEKQDGTVFPSSLLPTSSTSLFSYYNSHDSLSLNSPTNISSLLNQESAVLATAPRIDDEIPPPLPVWTPESFIVVEEAGEFSPNVPKSLSSAVKVKIGTSLEWGGTSEPKKFDDSVILRPSKSVKLRSPKSELHQDRSSPPPPLPERTLESFFLADEDCMQAQSIETYSTSYPDTMENSTSSKQTLKTPGKSFTRSKSLKILRNMKKSICNSCPPNKPAESVQSNNSSSFLNFGFANRFSKPKGPRNPPPTWNI

SEQ ID NO: 18944 - protein, 181 aa, Homo sapiens
MAPRSRRRRHKKPPSSVAPIIMAPTTIVTPVPLTPSKPGPSIDTLGFFSLDDNVPGLSQLILQKLNMKSYEEYKLVVDGGTPVSGFGFRCPQEMFQRMEDTFRFCAHCRALPSGLSDSKVLRHCKRCRNVYYCGPECQKSDWPAHRRVCQELRLVAVDRLMEWLLVTEHLNFTPGTWHNSA

SEQ ID NO: 18945 - protein, 920 aa, Homo sapiens
MGRSNSRSHSSRSKSRSQSSSRSRSRSHSRKKRYSSRSRSRTYSRSRSRDRMYSRDYRRDYRNNRGMRRPYGYRGRGRGYYQGGGGRYHRGGYRPVWNRRHSRSPRRGRSRSRSPKRRSVSSQRSRSRSRRSYRSSRSPRSSSSRSSSPYSKSPVSKRRGSQEKQTKKAEGEPQEESPLKSKSQEEPKDTFEHDPSESIDEFNKSSATSGDIWPGLSAYDNSPRSPHSPSPIATPPSQSSSCSDAPMLSTVHSAKNTPSQHSHSIQHSPERSGSGSVGNGSSRYSPSQNSPIHHIPSRRSPAKTIAPQNAPRDESRGRSSFYPDGGDQETAKTGKFLKRFTDEESRVFLLDRGNTRDKEASKEKGSEKGRAEGEWEDQEALDYFSDKESGKQKFNDSEGDDTEETEDYRQFRKSVLADQGKSFATASHRNTEEEGLKYKSKVSLKGNRESDGFREEKNYKLKETGYVVERPSTTKDKHKEEDKNSERITVKKETQSPEQVKSEKLKDLFDYSPPLHKNLDAREKSTFREESPLRIKMIASDSHRPEVKLKMAPVPLDDSNRPASLTKDRLLASTLVHSVKKEQEFRSIFDHIKLPQASKSTSESFIQHIVSLVHHVKEQYFKSAAMTLNERFTSYQKATEEHSTRQKSPEIHRRIDISPSTLRKHTRLAGEERVFKEENQKGDKKLRCDSADLRHDIDRRRKERSKERGDSKGSRESSGSRKQEKTPKDYKEYKSYKDDSKHKREQDHSRSSSSSASPSSPSSREEKESKKEREEEFKTHHEMKEYSGFAGVSRPRGTFFRIRGRGRARGVFAGTNTGPNNSNTTFQKRPKEEEWDPEYTPKSKKYFLHDDRDDGVDYWAKRGRGRGTFQRGRGRFNFKKSGSSPKWTHDKYQGDGIVEDEEETMENNEEKKDRRKEEKE

SEQ ID NO: 18946 - protein, 160 aa, Homo sapiens
MSPLECSECFGDQLLHRTYTWQLTLRGTAEPFPRLHNLYSTPRCAQQAALPRLSRRMASQHSYPLNRFSSVPLDPMERPMSQADLELDYNPPRVQLSDEMFVFQDGRWVNENCRLQSPYFSPSASFHHKLHHKRLAKECMLQEENKSLREENKALREENR

SEQ ID NO: 18947 - protein, 413 aa, Homo sapiens
MWDQGGQPWQQWPLNQQQWMQSFQHQQDPSQIDWAALAQAWIAQREASGQQSMVEQPPGMMPNGQDMSTMESGPNNHGNFQGDSNFNRMWQPEWGMHQQPPHPPPDQPWMPPTPGPMDIVPPSEDSNSQDSGEFAPDNRHIFNQNNHNFGGPPDNFAVGPVNQFDYQHGAAFGPPQGGFHPPYWQPGPPGPPAPPQNRRERPSSFRDRQRSPIALPVKQEPPQIDAVKRRTLPAWIREGLEKMEREKQKKLEKERMEQQRSQLSKKEKKATEDAEGGDGPRLPQRSKFDSDEEEEDTENVEAASSGKVTRSPSPVPQEEHSDPEMTEEEKEYQMMLLTKMLLTEILLDVTDEEIYYVAKDAHRKATKGIFWCFWFCFSWGILVLMTILAFFCCPCWISTRYLNILLHVLTLKD

SEQ ID NO: 18948 - protein, 372 aa, Homo sapiens
MAESRGRLYLWMCLAAALASFLMGFMVGWFIKPLKETTTSVRYHQSIRWKLVSEMKAENIKSFLRSFTKLPHLAGTEQNFLLAKKIQTQWKKFGLDSAKLVHYDVLLSYPNETNANYISIVDEHETEIFKTSYLEPPPDGYENVTNIVPPYNAFSAQGMPEGDLVYVNYARTEDFFKLEREMGINCTGKIVIARYGKIFRGNKVKNAMLAGAIGIILYSDPADYFAPEVQPYPKGWNLPGTAAQRGNVLNLNGAGDPLTPGYPAKDRYVILGGHRDSWVFGAIDPTSGVAVLQEIARSFGKLMSKGWRPRRTIIFASWDAEEFGLLGSTEWAEVNKTKKVLIIFLVNREQICMCLRMIKNIFHYLIWFCFGE

SEQ ID NO: 18949 - protein, 183 aa, Homo sapiens
PDQKENTHFTVLIHELAEAFQKDFTKSTKERLLLTAGVSAGRQMIDNSYQVEKLAKDLDFINLLSFDFHGSWEKPLITGHNSPLSKGWQDRGPSSYYNVICQFLKGAKITRLQDQQVPYAVKGNQWVGYDDVKSMETKVQFLKNLNLGGAMIWSIDMDDFTGKSCNQGPYPLVQAVKRSLGSL

SEQ ID NO: 18950 - protein, 906 aa, Homo sapiens
MKNDESNKENSSEMDYLENATVIDESALTPEQRLGLKQAEERLERDHIFRLEKRSPEYTNCRYLCKLCLIHIENIQGAHKHIKEKRHKKNILEKQEESELRSLPPPSPAHLAALSVAVIELAKEHGITDDDLRVRQEIVEEMSKVITTFLPECSLRLYGSSLTRFALKSSDVNIDIKFPPKMNHPDLLIKVLGILKKNVLYVDVESDFHAKVPVVVCRDRKSGLLCRVSAGNDMACLTTDLLTALGKIEPVFIPLVLAFRYWAKLCYIDSQTDGGIPSYCFALMVMFFLQQRKPPLLPCLLGSWIEGFDPKRMDDFQLKGIVEEKFVKWECNSSSATEKNSIAEENKAKADQPKDDTKKTETDNQSNAMKEKHGKSPLALETPNRVSLGQLWLELLKFYTLDFALEEYVICVRIQDILTRENKNWPKRRIAIEDPFSVKRNVARSLNSQLVYEYVVERFRAAYRYFACPQTKGGNKSTVDFKKREKGKISNKKPVKSNNMATNGCILLGETTEKINAEREQPVQCDEMDCTSQRCIIDNNNLLVNELDFADHGQDSSSLSTSKSSEIEPKLDKKQDDLAPSETCLKKELSQCNCIDLSKSPDPDKSTGTDCRSNLETESSHQSVCTDTSATSCNCKATEDASDLNDDDNLPTQELYYVFDKFILTSGKPPTIVCSICKKDGHSKNDCPEDFRKIDLKPLPPMTNRFREILDLVCKRCFDELSPPCSEQHNREQILIGLEKFIQKEYDEKARLCLFGSSKNGFGFRDSDLDICMTLEGHENAEKLNCKEIIENLAKILKRHPGLRNILPITTAKVPIVKFEHRRSGLEGDISLYNTLAQHNTRMLATYAAIDPRVQYLGYTMKVFAKIFDGKQIPQRMVDGWNAFFFDKTEELKKRLPSLGKNTESL

SEQ ID NO: 18951 - protein, 838 aa, Homo sapiens
MQEPGQIVETYTEEDPEGAMSVVSVETSDDGTTRRTETTVKKVVKTVTTRTVQPVAMGPDGLPVDASSVSNNYIQTLGRDFRKNGNGGPGPYVGQAGTATLPRNFHYPPDGYSRHYEDGYPGGSDNYGSLSRVTRIEERYRPSMEGYRAPSRQDVYGPQPQVRVGGSSVDLHRFHPEPYGLEDDQRSMGYDDLDYGMMSDYGTARRTGTPSDPRRRLRSYEDMIGEEVPSDQYYWAPLAQHERGSLASLDSLRKGGPPPPNWRQPELPEVIAMLGFRLDAVKSNAAAYLQHLCYRNDKVKTDVRKLKGIPVLVGLLDHPKKEVHLGACGALKNISFGRDQDNKIAIKNCDGVPALVRLLRKARDMDLTEVITGTLWNLSSHDSIKMEIVDHALHALTDEVIIPHSGWEREPNEDCKPRHIEWESVLTNTAGCLRNVSSERSEARRKLRECDGLVDALIFIVQAEIGQKDSDSKLVENCVCLLRNLSYQVHREIPQAERYQEAAPNVANNTGPHAASCFGAKKGKDEWFSRGKKPIEDPANDTVDFPKRTSPARGYELLFQPEVVRIYISLLKESKTPAILEASAGAIQNLCAGRWTYGRYIRSALRQEKALSAIADLLTNEHERVVKAASGALRNLAVDARNKELIGKHAIPNLVKNLPGGQQNSSWNFSEDTVISILNTINEVIAENLEAAKKLRETQGIEKLVLINKSGNRSEKEVRAAALVLQTIWGYKELRKPLEKEGWKKSDFQVNLNNASRSQSSHSYDDSTLPLIDRNQKSDKKPDREEIQMSNMGSNTKSLDNNYSTPNERGDHNRTLDRSGDLGDMEPLKGTTPLMQKI

SEQ ID NO: 18952 - protein, 157 aa, Homo sapiens
MPASWTSPQKSSALAPEDHGSSYEGSVSFRDVAIDFSREEWRHLDLSQRNLYRDVMLETYSHLLSVGYQVPKPEVVMLEQGKEPWALQGERPRHSCPGEKLWDHNQHRKIIGYKPASSQDQKIYSGEKSYECAEFGKSFTWKSQFKASQNSYRRKTI

SEQ ID NO: 18953 - protein, 1136 aa, Homo sapiens
MTLIGENGHSTDTLTGSGFRVVVCPLPCMNGGQCSSRNQCLCPPDFTGRFCQVPAGGAGGGTGGSGPGLSRTGALSTGALPPLAPEGDSVASKHAIYAVQVIADPPGPGEGPPAQHAAFLVPLGPGQISAEVQAPPPVVNVRVHHPPEASVQVHRIESSNAESAAPSQHLLPHPKPSHPRPPTQKPLGRCFQDTLPKQPCGSNPLPGLTKQEDCCGSIGTAWGQSKCHKCPQLQYTGVQKPGPVRGEVGADCPQGYKRLNSTHCQDINECAMPGVCRHGDCLNNPGSYRCVCPPGHSLGPSRTQCIADKPEEKSLCFRLVSPEHQCQHPLTTRLTRQLCCCSVGKAWGARCQRCPTDGTAAFKEICPAGKGYHILTSHQTLTIQGESDFSLFLHPDGPPKPQQLPESPSQAPPPEDTEEERGVTTDSPVSEERSVQQSHPTATTTPARPYPELISRPSPPTMRWFLPDLPPSRSAVEIAPTQVTETDECRLNQNICGHGECVPGPPDYSCHCNPGYRSHPQHRYCVDVNECEAEPCGPGRGICMNTGGSYNCHCNRGYRLHVGAGGRSCVDLNECAKPHLCGDGGFCINFPGHYKCNCYPGYRLKASRPPVCEDIDECRDPSSCPDGKCENKPGSFKCIACQPGYRSQGGGACRDVNECAEGSPCSPGWCENLPGSFRCTCAQGYAPAPDGRSCLDVDECEAGDVCDNGICSNTPGSFQCQCLSGYHLSRDRSHCEDIDECDFPAACIGGDCINTNGSYRCLCPQGHRLVGGRKCQDIDECSQDPSLCLPHGACKNLQGSYVCVCDEGFTPTQDQHGCEEVEQPHHKKECYLNFDDTVFCDSVLATNVTQQECCCSLGAGWGDHCEIYPCPVYSSAEFHSLCPDGKGYTQDNNIVNYGIPAHRDIDECMLFGSEICKEGKCVNTQPGYECYCKQGFYYDGNLLECVDVDECLDESNCRNGVCENTRGGYRCACTPPAEYSPAQRQCLSPEEMDVDECQDPAACRPGRCVNLPGSYRCECRPPWVPGPSGRDCQLPESPAERAPERRDVCWSQRGEDGMCAGPLAGPALTFDDCCCRQGRGWGAQCRPCPPRGAGSHCPTSQSESNSFWDTSPLLLGKPPRDEDSSEEDSDECRCVS

SEQ ID NO: 18954 - protein, 953 aa, Homo sapiens
MAMEPGALWTFLGHLWLLAGPTCEEDVDECLSDPCLHGGTCSDTVAGYICRCPETWGGRDCSVQLTGCQGHTCPLAATCIPIFESGVHSYVCHCPPGTHGPFCGQNTTFSVMAGSPIQASVPAGGPLGLALRFRTTLPAGTLATRNDTKESLELALVAATLQATLWSYSTTVLVLRLPDLALNDGHWHQVEVVLHLATLELRLWHEGCPARLCVASGPVALASTASATPLPAGISSAQLGDATFAGCLQDVRVDGHLLLPEDLGENVLLGCERREQCRPLPCVHGGSCVDLWTHFRCDCARPHRGPTCADEIPAATFGLGGAPSSASFLLQELPGPNLTVSFLLRTRESAGLLLQFANDSAAGLTVFLSEGRIRAEVPGSPAVVLPGRWDDGLRHLVMLSFGPDQLQDLGQHVHVGGRLLAADSQPWGGPFRGCLQDLRLDGCHLPFFPLPLDNSSQPSELGGRQSWNLTAGCVSEDMCSPDPCFNGGTCLVTWNDFHCTCPANFTGPTCAQQLWCPGQPCLPPATCEEVPDGFVCVAEATFREGPPAAFSGHNASSGRLLGGLSLAFRTRDSEAWLLRAAAGALEGVWLAVRNGSLAGGVRGGHGLPGAVLPIPGPRVADGAWHRVRLAMERPAATTSRWLLWLDGAATPVALRGLASDLGFLQGPGAVRILLAENFTGCLGRVALGGLPLPLARPRPGAAPGAREHFASWPGTPAPILGCRGAPVCAPSPCLHDGACRDLFDAFACACGPGWEGPRCEAHVDPCHSAPCARGRCHTHPDGRFECRCPPGFGGPRCRLPVPSKECSLNVTCLDGSPCEGGSPAANCSCLEGLAGQRCQVPTLPCEANPCLNGGTCRAAGGVSECICNARFSGQFCEVAKGLPLPLPFPLLEVAVPAACACLLLLLLGLLSGILAARKRRQSEGTYSPSQQEVAGARLEMDSVLKVPPEERLI

SEQ ID NO: 18955 - protein, 289 aa, Homo sapiens
MSVDPACPQSLPCFEASDCKESSPMPVICGPEENYPSLQMSSAEMPHTETVSPLPSSMDLLIQDSPDSSTSPKGKQPTSAEKSVAKKEDKVPVKKQKTRTVFSSTQLCVLNDRFQRQKYLSLQQMQELSNILNLSYKQVKTWFQNQRMKSKRWQKNNWPKNSNGVTQGCLVNPTGNLPMWSNQTWNNSTWSNQTQNIQSWSNHSWNTQTWCTQSWNNQAWNSPFYNCGEESLQSCMQFQPNSPASDLEAALEAAGEGLNVIQQTTRYFSTPQTMDLFLNYSMNMQPEDV

SEQ ID NO: 18956 - protein, 142 aa, Homo sapiens
MRLSVAAAISHGRVFRRMGLGPESRIHLLRNLLTGLVRHERIEAPWARVDEMRGYAEKEKDLIPKLFQVLAPRYKDQTGGYTRMLQIPNRSLDRAKMAVIEYKGNCLPPLPLPRRDSHLTLLNQLLQGLRQDLRQSQEASNH

SEQ ID NO: 18957 - protein, 399 aa, Homo sapiens
MASPGKPGADEAQEEEGELEGGSAGPRAAILEQAEELFLLCDKEAKGFITKHDLQGLQSDLPLTPEQLEAVFESLDRAHTGFLTAREFCLGLGMFVGVASAQGANPCRTPEETFESGGLDVQGTAGSLDEEEEEEERFHTVLEQLGVAPVLGKQRAVRTLWARLQRERPELLGSFEDVLIRASACLEEAARERDGLEQALRRRESEHEREVRALYEETEQLREQSRRPPSQNFARGERRSRLELELQSREQDLERAGLRQRELEQQLHAQAAEHLEAQAQNSQLWRAHEALRTQLEGAQEQIRRLESEARGRQEQTQRDVVAVSRNMQKEKVSLLRQLELLRELNTRLRDDRDACEARRAGSSCRKALTTARLPGPTCCCCCCWARPPRRGSGHLPSAR

SEQ ID NO: 18958 - protein, 947 aa, Homo sapiens
MEFSWGSGQESRRLLLLLLLLAAWEAGNGQLHYSVSEEAKHGTFVGRIAQDLGLELAELVPRLFRVASKGRGGLLEVNLQNGILFVNSRIDREELCRRSAECSIHLEVIVDRPLQVFHVDVEVRDINDNPPVFPATQKNLSIAESRPLDSRFPLEGASDADIGENALLTYRLSPNEYFSLEKPPDDELVKGLGLILRKSLDREEAPEIFLVLTATDGGKPELTGTVQLLITVLDANDNAPAFDRTIYKVRLLENVPNGTLVIKLNASDLDEGLNGDIVYSFSNDISPNVKSKFHIDPITGQIIVKGYIDFEESKSYEIIVEGIDKGQLPLSGHCRVIVEVEDNNDNVPDLEFKSLSLPIREDAPLGTVIALISVSDKDMGVNGLVTCSLTSHVPFKLVSTFKNYYSLVLDSALDRESVSAYELVVTARDGGSPSLWATASVSVEVADVNDNAPAFAQPEYTVFVKENNPPGCHIFTVSAWDADAQENALVSYSLVERRVGERALSSYVSVHAESGKVYALQPLDHEELELLQFQVTARDAGVPPLGSNVTLQVFVLDENDNAPALLAPRAGGTGGAVSELVPWSVGVGHVVAKVRAVDADSGYNAWLSYELQPGTGGARIPFRVGLYTGEISTTRALDETDAPRHRLLVLVKDHGEPALTATATVLVSLVESGQAPKASSRALVGAVGPDAALVDVNVYLIIAICAVSSLLVLTLLLYTALRCSALPTEGACAPGKPTLVCSSAVGSWSYSQQRRPRVCSGEGPPKTDLMAFSPSLPDSRDREDQLQTTEESFAKPRQPNPDWRYSASLRAGMHSSVHLEEAGILRAGPGGPDQQWPTVSSATPEPEAGEVSPPVGAGVNSNSWTFKYGPGNPKQSGPGELPDKFIIPGSPAIISIRQEPTNSQIDKSDFITFGKKEETKKKKKKKKGNKTQEKKEKGNSTTDNSDQ

SEQ ID NO: 18959 - protein, 698 aa, Homo sapiens
MSAVVAQTLHVFGLRSHVANNIFYFDEQIIIFPSGNHCVKYNVDQKWQKFIPGSEKSQGMLALSISPNRRYLAISETVQEKPAITIYELSSIPCRKRKVLNNFDFQVQKFISMAFSPDSKYLLAQTSPPESNLVYWLWEKQKVMAIVRIDTQNNPVYQVSFSPQDNTQVCVTGNGMFKLLRFAEGTLKQTSFQRGEPQNYLAHTWVADDKIVVGTDTGKLFLFESGDQRWETSIMVKEPTNGSKSLDVIQESESLIEFPPVSSPLPSYEQMVAASSHSQMSMPQVFAIAAYSKGFACSAGPGRVLLFEKMEEKDFYRESREIRIPVDPQSNDPSQSDKQDVLCLCFSPSEETLVASTSKNQLYSITMSLTEISKGEPAHFEYLMYPLHSAPITGLATCIRKPLIATCSLDRSIRLWNYETNTLELFKEYQEEAYSISLHPSGHFIVVGFADKLRLMNLLIDDIRSFKEYSVRGCGECSFSNGGHLFAAVNGNVIHVYTTTSLENISSLKGHTGKIRSIVWNADDSKLISGGTDGAVYEWNLSTGKRETECVLKSCSYNCVTVSPDAKIIFAVGSDHTLKEIADSLILREISAFDVTYTAIVISHSGRMMFVGTSVGTIRAMKYPLPLQKEFNEYQAHAGPITKVSRALSPGTQSHTCLLRALFIPSTSQCLFSLLLLSYLFIHHSLNHHLLTMNILFV

SEQ ID NO: 18960 - protein, 669 aa, Homo sapiens
MPSLPQEGVIQGPSPLDLNTELPYQSTMKRKVRKKKKKGTITANVAGTKFEIVRLVIDEMGFMKTPDEDETSNLIWCDSAVQQEKISELQNYQRINHFPGMGEICRKDFLARNMTKMIKSRPLDYTFVPRTWIFPAEYTQFQNYVKELKKKRKQKTFIVKPANGAMGHGISLIRNGDKLPSQDHLIVQEYIEKPFLMEGYKFDLRIYILVTSCDPLKIFLYHDGLVRMGTEKYIPPNESNLTQLYMHLTNYSVNKHNEHFERDETENKGSKRSIKWFTEFLQANQHDVAKFWSDISELVVKTLIVAEPHVLHAYRMCRPGQPPGSESVCFEVLGFDILLDRKLKPWLLEINRAPSFGTDQKIDYDVKRGVLLNALKLLNIRTSDKRRNLAKQKAEAQRRLYGQNSIKRLLPGSSDWEQQRHQLERRKEELKERLAQVRKQISREEHENRHMGNYRRIYPPEDKALLEKYENLLAVAFQTFLSGRAASFQRELNNPLKRMKEEDILDLLEQCEIDDEKLMGKTTKTRGPKPLCSMPESTEIMKRPKYCSSDSSYDSSSSSSESDENEKEEYQNKKREKQVTYNLKPSNHYKLIQQPSSIRRSVSCPRSISAQSPSSGDTRPFSAQQMISVSRPTSASRSHSLNRASSYMRHLPHSNDACSTNSQVIILAQ

SEQ ID NO: 18961 - protein, 1045 aa, Homo sapiens
MDLFRMRCYLASLQGGELPNPKSLLAAASRPSKLALGRLGILSVSSFHALVCSRDDSALRKRTLSLTQRGRNKKGIFSSLKGLDTLARKGKEKRPSITQIFDSSGSHGFSGTQLPQNSSNSSEVDELLHIYGSTVDGVPRDNAWEIQTYVHFQDNHGVTVGIKPEHRVEDILTLACKMRQLEPSHYGLQLRKLVDDNVEYCIPAPYEYMQQQVYDEIEVFPLNVYDVQLTKTGSVCDFGFAVTAQVDERQHLSRIFISDVLPDGLAYGEGLRKGNEIMTLNGEAVSDLDLKQMEALFSEKSVGLTLIARPPDTKATLCTSWSDSDLFSRDQKSLLPPPNQSQLLEEFLDNFKKNTANDFSNVPDITTGLKRSQTDGTLDQVSHREKMEQTFRSAEQITALCRSFNDSQANGMEGPRENQDPPPRSLARHLSDADRLRKVIQELVDTEKSYVKDLSCLFELYLEPLQNETFLTQDEMESLFGSLPEMLEFQKVFLETLEDGISASSDFNTLETPSQFRKLLFSLGGSFLYYADHFKLYSGFCANHIKVQKVLERAKTDKAFKAFLDARNPTKQHSSTLESYLIKPVQRVLKYPLLLKELVSLTDQESEEHYHLTEALKAMEKVASHINEMQKIYEDYGTVFDQLVAEQSGTEKEVTELSMGELLMHSTVSWLNPFLSLGKARKDLELTVFVFKRAVILVYKENCKLKKKLPSNSRPAHNSTDLDPFKFRWLIPISALQVRLGNPAGTENNSIWELIHTKSEIEGRPETIFQLCCSDSESKTNIVKVIRSILRENFRRHIKCELPLEKTCKDRLVPLKNRVPVSAKLAKCVFLTVASSRSLKVLKNSSSNEWTGETGKGTLLDSDEGSLSSGTQSSGCPTAEGRQDSKSTSPGKYPHPGLADFADNLIKESDILSDEDDDHRQTVKQGSPTKDIEIQFQRLRISEDPDVHPEAEQQPGPESGEGQKGGEQPKLVRGHFCPIKRKANSTKRDRGTLLKAQIRHQSLDSQSENATIDLNSVLEREFSVQSLTSVVSEECFYETESHGKS

SEQ ID NO: 18962 - protein, 1358 aa, Homo sapiens
MIEPSEDSFETMMEHKNPSSKQMESSEGSSNTTEATSGSGVRGEAGPASGPAQEKKEPPSGPLQEMEELPTDLLQDMEEPSSGPRKEIEDPPNDLLQDLEESCNGSHQARGDPLSGASDRMKEASVNPSGAREEQEAHTDLKESGREETPQEQNQTEHSTAELMAMVRSIISLYFRMQDLKEQQRVAEEILIKGINAGQLPAPKHFSGDRREFHEFIVLCQLTLQSYPRMFYNDRLRVGYVINHLSGLALEWAKALLQENSPLIGDFPAFLEAMSEVFEYRQALRVAEEAMFTIRQGGRSATEYIDEFQSLVPILGWPDEVLQAHLCQGLNEEIRHYLFRVPQPDSLDSLIVLILQIEEKLAERRAMLRLPPEARPRNLTWIDSPAPERWMVSSWLPSEVHPDINRAHLFLLLMVRVNPYHSVAVQALVDSGADGNFMDEKFAQEHYVELYEKPYPQPVQSVDGSLIGNEPVWLYTEPLVCIHQNHQESIEFDIVPSPNFSVVLGIRWLRVHAPEVDWIKGRCTFHSPYCLKNCFRPPPPCIALERHGMSLLPGLPHPYSDLADVFNPKEADDETSDQPSSDGSDDLSESEPSELQQAGDSDHSETFYECPSTAPWEPVGARMQERARLQEEYWDLQDMLTNRQDYIQMIPELFDQLHGAEWFTKLELRGTIVEESVNGHRTEDVWKAAFGLELEEMKSYQPFALSPDPIIPQNVIHFILKDMLGFFVLSYGQEVLIYSMSQEEHLHHVRQVLVRFRHHNVYCSLDKSQFHRQTVEFLGFVVTPKGVKLNKNVMTIITGYPTPGSKLSLRNFIEFVFPYRHFVERFSIIAEPLVRQLLSSYQFYWGVEEQEAFECLKRAFRKAPLLHHPKPQNPFYLETGVTGTALHASLIQIDDQTGKRACCAFYSRNISPIEVEYSQAEMKILPIRAAFMVWCRYLENTEEPIMILLNTEDLASLNNDRLTVLLPGHWVFFFSHFNFDVMELPEQDGGRALPPVRNLRWRRAFQRNTAARQTLLLASRGFPRDPSTESGEEENEEQDELNEQILRQELLAMIPIDQILNSFLAHFSMAQIRAVILHFFRGLLYWKNTLALAAILVLLRVRQCLSLRPAPAMRVARPQPQRSLRLILDSSLIAGSSITTAITQLLTQMPALVGANTIPAQELAELFLGPGRWQRNALHSQAHRGLQFTPGFWLTLCEFFGVRVTPQEGHLPALRQNRYLELHVVGDEDVVLREALQDDLQRYRQCGLHDGLQDTSQDKQDNDVQEAPPSHTAATHPPRPRHLMDPQVLEFLGSRLLHIHSADGQLHLLSREQAARALSQFLTLIYRRALPIPAWESQPREQARLEELPDEDEDANLD

SEQ ID NO: 18963 - protein, 630 aa, Homo sapiens
MPRYGASLRQSCPRSGREQGQDGTAGAPGLLWMGLVLALALALALALALSDSRVLWAPAEAHPLSPQGHPARLHRIVPRLRDVFGWGNLTCPICKGLFTAINLGLKEPNVARVGSVAIKLCNLLKIAPPAVCQSIVHLFEDDMVEVWRRSVLSPSEACGLLLGSTCGHWDIFSSWNISLPTVPKPPPKPPSPPAPGAPVSRILFLTDLHWDHDYLEGTDPDCADPLCCRRGSGLPPASRPGAGYWGEYSKCDLPLRTLESLLSGLGPAGPFDMVYWTGDIPAHDVWHQTRQDQLRALTTVTALVRKFLGPVPVYPAVGNHESTPVNSFPPPFIEGNHSSRWLYEAMAKAWEPWLPAEALRTLRIGGFYALSPYPGLRLISLNMNFCSRENFWLLINSTDPAGQLQWLVGELQAAEDRGDKVHIIGHIPPGHCLKSWSWNYYRIVARYENTLAAQFFGHTHVDEFEVFYDEETLSRPLAVAFLAPSATTYIGLNPGYRVYQIDGNYSGSSHVVLDHETYILNLTQANIPGAIPHWQLLYRARETYGLPNTLPTAWHNLVYRMRGDMQLFQTFWFLYHKGHPPSEPCGTPCRLATLCAQLSARADSPALCRHLMPDGSLPEAQSLWPRPLFC

SEQ ID NO: 18964 - protein, 223 aa, Homo sapiens
MSWMFLRDLLSGVNKYSTGTGWIWLAVVFVFRLLVYMVAAEHVWKDEQKEFECNSRQPGCKNVCFDDFFPISQVRLWALQLIMVSTPSLLVVLHVAYHEGREKRHRKKLYVSPGTMDGGLWYAYLISLIVKTGFEIGFLVLFYKLYDGFSVPYLIKCDLKPCPNTVDCFISKPTEKTIFILFLVITSCLCIVLNFIELSFLVLKCFIKCCLQKYLKKPQVLSV

SEQ ID NO: 18965 - protein, 1494 aa, Homo sapiens
MDDDSLDELVARSPGPDGHPQVGPADPAGDFEESSVGSSGDSGDDSDSEHGDGTDGEDEGASEEEDLEDRSGSEDSEDDGETLLEVAGTQGKLEAAGSFNSDDDAESCPICLNAFRDQAVGTPENCAHYFCLDCIVEWSKNANSCPVDRTLFKCICIRAQFGGKILRKIPVENTKASEEEEDPTFCEVCGRSDREDRLLLCDGCDAGYHMECLDPPLQEVPVDEWFCPECAAPGVVLAADAGPVSEEEVSLLLADVVPTTSRLRPRAGRTRAIARTRQSERVRATVNRNRISTARRVQHTPGRLGSSLLDEAIEAVATGLSTAVYQRPLTPRTPARRKRKTRRRKKVPGRKKTPSGPSAKSKSSATRSKKRQHRVKKRRGKKVKSEATTRSRIARTLGLRRPVHSSCIPSVLKPVEPSLGLLRADIGAASLSLFGDPYELDPFDSSEELSANPLSPLSAKRRALSRSALQSHQPVARPVSVGLSRRRLPAAVPEPDLEEEPVPDLLGSILSGQSLLMLGSSDVIIHRDGSLSAKRAAPVSFQRNSGSLSRGEEGFKGCLQPRALPSGSPAQGPSGNRPQSTGLSCQGRSRTPARTAGAPVRLDLPAAPGAVQARNLSNGSVPGFRQSHSPWFNGTNKHTLPLASAASKISSRDSKPPCRSVVPGPPLKPAPRRTDISELPRIPKIRRDDGGGRRDAAPAHGQSIEIPSACISRLTGREGTGQPGRGTRAESEASSRVPREPGVHTGSSRPPAPSSHGSLAPLGPSRGKGVGSTFESFRINIPGNMAHSSQLSSPGFCNTFRPVDDKEQRKENPSPLFSIKKTKQLRSEVYDPSDPTGSDSSAPGSSPERSGPGLLPSEITRTISINSPKAQTVQAVRCVTSYTVESIFGTEPEPPLGPSSAMSKLRGAVAAEGASDTEREEPTESQGLAARLRRPSPPEPWDEEDGASCSTFFGSEERTVTCVTVVEPEAPPSPDVLQAATHRVVELRPPSRSRSTSSSRSRKKAKRKRVSREHGRTRSGTRSESRDRSSRSASPSVGEERPRRQRSKAKSRRSSSDRSSSRERAKRKKAKDKSREHRRGPWGHSRRTSRSRSGSPGSSSYEHYESRKKKKRRSASRPRGRECSPTSSLERLCRHKHQRERSHERPDRKESVAWPRDRRKRRSRSPSSEHRAREHRRPRSREKWPQTRSHSPERKGAVREASPAPLAQGEPGREDLPTRLPALGEAHVSPEVATADKAPLQAPPVLEVAAECEPDDLDLDYGDSVEAGHVFDDFSSDAVFIQLDDMSSPPSPESTDSSPERDFPLKPALPPASLAVAAIQREVSLMHDEDPSQPPPLPEGTQEPHLLRPDAAEKAEAPSSPDVAPAGKEDSPSASGRVQEAARPEEVVSQTPLLRSRALVKRVTWNLQESESSAPAEDRAPRAPLHRPQKPREGAWDMEDVAPTGVRQVFSELPFPSHVLPEPGFPDTDPSQPQSQPVKPLQPATRRRRPRPPG

SEQ ID NO: 18966 - protein, 548 aa, Homo sapiens
MAASEVAGVVANAPSPPESSSLCASKSDEGLPDGLSTKDSAQKQKNSPLLSTDFKTADSEVNTDQDIEKNLDKMMTERTLLKERYQEVLDKQRQVENQLQVQLKQLQQRREEEMKNHQEILKAIQDVTIKREETKKKIEKEKKEFLQKEQDLKAEIEKLCEKGRREVWEMELDRLKNQDGEINRNIMEETERAWKAEILSLESRKELLVLKLEEAEKEAELHLTYLKSTPPTLETVRSKQEWETRLNGVRIMKKNVRDQFNSHIQLVRNGAKLSSLPQIPTPTLPPPPSETDFMLQVFQPSPSLAPRMPFSIGQVTMPMVMPSADPRSLSFPILNPALSQPSQPSSPLPGSHGRNSPGLGSLVSPHGPHMPPAASIPPPPGLGGVKASAETPRPQPVDKLEKILEKLLTRFPQCNKAQMTNILQQIKTARTTMAGLTMEELIQLVAARLAEHERVAASTQPLGRIRALFPAPLAQISTPMFLPSAQVSYPGRSSHAPATCKLCLMCQKLVQPSELHPMACTHVLHKECIKFWAQTNTNDTCPFCPTLK

SEQ ID NO: 18967 - protein, 677 aa, Homo sapiens
MPRQFPKLNISEVDEQVRLLAEKVFAKVLREEDSKDALSLFTVPEDCPIGQKEAKERELQKELAEQKSVETAKRKKSFKMIRSQSLSLQMPPQQDWKGPPAASPAMSPTTPVVTGATSLPTPAPYAMPEFQRVTISGDYCAGITLEDYEQAAKSLAKALMIREKYARLAYHRFPRITSQYLGHPRADTAPPEEGLPDFHPPPLPQEDPYCLDDAPPNLDYLVHMQGGILFVYDNKKMLEHQEPHSLPYPDLETYTVDMSHILALITDGPTKTYCHRRLNFLESKFSLHEMLNEMSEFKELKSNPHRDFYNVRKVDTHIHAAACMNQKHLLRFIKHTYQTEPDRTVAEKRGRKITLRQVFDGLHMDPYDLTVDSLDVHAGRQTFHRFDKFNSKYNPVGASELRDLYLKTENYLGGEYFARMVKEVARELEESKYQYSEPRLSIYGRSPEEWPNLAYWFIQHKVYSPNMRWIIQVPRIYDIFRSKKLLPNFGKMLENIFLPLFKATINPQDHRELHLFLKYVTGFDSVDDESKHSDHMFSDKSPNPDVWTSEQNPPYSYYLYYMYANIMVLNNLRRERGLSTFLFRPHCGEAGSITHLVSAFLTADNISHGLLLKKSPVLQYLYYLAQIPIAMSPLSNNSLFLEYSKNPLREFLHKGLHVSLSTDDPMQFHYTKLKCGS

SEQ ID NO: 18968 - protein, 1271 aa, Homo sapiens
MAAATVGRDTLPEHWSYGVCRDGRVFFINDQLRCTTWLHPRTGEPVNSGHMIRSDLPRGWEEGFTEEGASYFIDHNQQTTAFRHPVTGQFSPENSEFILQEEPNPHMSKQDRNQRPSSMVSETSTAGTASTLEAKPGPKIIKSSSKVHSFGKRDQAIRRNPNVPVVVRGWLHKQDSSGMRLWKRRWFVLADYCLFYYKDSREEAVLGSIPLPSYVISPVAPEDRISRKYSFKAVHTGMRALIYNSSTAGSQAEQSGMRTYYFSADTQEDMNAWVRAMNQAAQVLSRSSLKRDMEKVERQAVPQANHTESCHECGRVGPGHTRDCPHRGHDDIVNFERQEQEGEQYRSQRDPLEGKRDRSKARSPYSPAEEDALFMDLPTGPRGQQAQPQRAEKNGMLPASYGPGEQNGTGGYQRAFPPRTNPEKHSQRKSNLAQVEHWARAQKGDSRSLPLDQTLPRQGPGQSLSFPENYQTLPKSTRHPSGGSSPPPRNLPSDYKYAQDRASHLKMSSEERRAHRDGTVWQLYEWQQRQQFRHGSPTAPICLGSPEFTDQGRSRSMLEVPRSISVPPSPSDIPPPGPPRVFPPRRPHTPAERVTVKPPDQRRSVDISLGDSPRRARGHAVKNSSHVDRRSMPSMGYMTHTVSAPSLHGKSADDTYLQLKKDLEYLDLKMTGRDLLKDRSLKPVKIAESDTDVKLSIFCEQDRVLQDLEDKIRALKENKDQLESVLEVLHRQMEQYRDQPQHLEKIAYQQKLLQEDLVHIRAELSRESTEMENAWNEYLKLENDVEQLKQTLQEQHRRAFFFQEKSQIQKDLWRIEDVTAGLSANKENFRILVESVKNPERKTVPLFPHPPVPSLSTSESKPPPQPSPPTSPVRTPLEVRLFPQLQTYVPYRPHPPQLRKVTSPLQSPTKAKPKVEDEAPPRPPLPELYSPEDQPPAVPPLPREATIIRHTSVRGLKRQSDERKRDRELGQCVNGDSRVELRSYVSEPELATLSGDMAQPSLGLVGPESRYQTLPGRGLSGSTSRLQQSSTIAPYVTLRRGLNAESSKATFPRPKSALERLYSGDHQRGKMSAEEQLERMKRHQKALVRERKRTLGQGERTGLPSSRYLSRPLPGDLGSWKREQDFDLQLLERVVQGEKKDKEENGWLKVQAMPVTELDLEPQDYDLDISRELSKPEKVSIPERYVELDPEEPPSLEELQARYRKAEKIRNILARSSMCNLQPTSGQDQNSVADLDLQLQEQERIINISYALASEASQRSKQVAAQAVTDP

SEQ ID NO: 18969 - protein, 803 aa, Homo sapiens
MKTETVPPFQETPAGSSCHLNNLLSSRKLMAVGVLLGWLLVIHLLVNVWLLCLLSALLVVLGGWLGSSLAGVASGRLHLERFIPLATCPPCPEAERQLEREINRTIQMIIRDFVLSWYRSVSQEPAFEEEMEAAMKGLVQELRRRMSVMDSHAVAQSVLTLCGCHLQSYIQAKEATAGKNGPVEPSHLWEAYCRATAPHPAVHSPSAEVTYTRGVVNLLLQGLVPKPHLETRTGRHVVVELITCNVILPLISRLSDPDWIHLVLVGIFSKARDPAPCPASAPEQPSVPTSLPLIAEVEQLPEGRASPVAAPVFLSYSEPEGSAGPSPEVEEGHEAVEGDLGGMCEERKVGNNSSHFLQPNVRGPLFLCEDSELESPLSELGKETIMLMTPGSFLSDRIQDALCALESSQALEPKDGEASEGAEAEEGPGTETETGLPVSTLNSCPEIHIDTADKEIEQGDVTASVTALLEGPEKTCPSRPSCLEKDLTNDVSSLDPTLPPVLLSSSPPGPLSSATFSFEPLSSPDGPVIIQNLRITGTITAREHSGTGFHPYTLYTVKYETALDGENSSGLQQLAYHTVNRRYREFLNLQTRLEEKPDLRKFIKNVKGPKKLFPDLPLGNMDSDRVEARKSLLESFLKQLCAIPEIANSEEVQEFLALNTDARIAFVKKPFMVSRIDKMVVSAIVDTLKTAFPRSEPQSPTEELSEAETESKPQTEGKKASKSRLRFSSSKISPALSVTEAQDKILYCLQEGNVTKLLEMQPTKAPEKDPEQPPKGRVDSCVSDAAVPAQDPSNSDPAEHAMC

SEQ ID NO: 18970 - protein, 2489 aa, Homo sapiens
MPAILVASKMKSGLPKPVHSAAPILHVPPARAGPQPCYLKLGSKVEVSKTTYPSQIPLKSQVLQGLQEPAGEGLPLRKSGSVENGFDTQIYTDWANHYLAKSGHKRLIRDLQQDVTDGVLLAQIIQVVANEKIEDINGCPKNRSQMIENIDACLNFLAAKGINIQGLSAEEIRNGNLKAILGLFFSLSRYKQQQQQPQKQHLSSPLPPAVSQVAGAPSQCQAGTPQQQVPVTPQAPCQPHQPAPHQQSKAQAEMQSSASSKDSSQSKIIRFTLGQKKISRLPGPTARVSAAGSEAKTRGGSTTANNRRSQSFNNYDKSKPVTSPPPPPSSHEKEPLASSASSHPGMSDNAPASLESGSSSTPTNCSTSSAIPQPGAATKPWRSKSLSVKHSATVSMLSVKPPGPEAPRPTPEAMKPAPNNQKSMLEKLKLFNSKGGSKAGEGPGSRDTSCERLETLPSFEESEELEAASRMLTTVGPASSSPKIALKGIAQRTFSRALTNKKSSLKGNEKEKEKQQREKDKEKSKDLAKRASVTERLDLKEEPKEDPSGAAVPEMPKKSSKIASFIPKGGKLNSAKKEPMAPSHSGIPKPGMKSMPGKSPSAPAPSKEGERSRSGKLSSGLPQQKPQLDGRHSSSSSSLASSEGKGPGGTTLNHSISSQTVSGSVGTTQTTGSNTVSVQLPQPQQQYNHPNTATVAPFLYRSQTDTEGNVTAESSSTGVSVEPSHFTKTGQPALEELTGEDPEARRLRTVKNIADLRQNLEETMSSLRGTQVTHSTLETTFDTNVTTEMSGRSILSLTGRPTPLSWRLGQSSPRLQAGDAPSMGNGYPPRANASRFINTESGRYVYSAPLRRQLASRGSSVCHVDVSDKAGDEMDLEGISMDAPGYMSDGDVLSKNIRTDDITSGYMTDGGLGLYTRRLNRLPDGMAVVRETLQRNTSLGLGDADSWDDSSSVSSGISDTIDNLSTDDINTSSSISSYANTPASSRKNLDVQTDAEKHSQVERNSLWSGDDVKKSDGGSDSGIKMEPGSKWRRNPSDVSDESDKSTSGKKNPVISQTGSWRRGMTAQVGITMPRTKPSAPAGALKTPGTGKTDDAKVSEKGRLSPKASQVKRSPSDAGRSSGDESKKPLPSSSRTPTANANSFGFKKQSGSAAGLAMITASGVTVTSRSATLGKIPKSSALVSRSAGRKSSMDGAQNQDDGYLALSSRTNLQYRSLPRPSKSNSRNGAGNRSSTSSIDSNISSKSAGLPVPKLREPSKTALGSSLPGLVNQTDKEKGISSDNESVASCNSVKVNPAAQPVSSPAQTSLQPGAKYPDVASPTLRRLFGGKPTKQVPIATAENMKNSVVISNPHATMTQQGNLDSPSGSGVLSSGSSSPLYSKNVDLNQSPLASSPSSAHSAPSNSLTWGTNASSSSAVSKDGLGFQSVSSLHTSCESIDISLSSGGVPSHNSSTGLIASSKDDSLTPFVRTNSVKTTLSESPLSSPAASPKFCRSTLPRKQDSDPHLDRNTLPKKGLRYTPTSQLRTQEDAKEWLRSHSAGGLQDTAANSPFSSGSSVTSPSGTRFNFSQLASPTTVTQMSLSNPTMLRTHSLSNADGQYDPYTDSRFRNSSMSLDEKSRTMSRSGSFRDGFEEESWEKSSVDNFVSRLHSSLHFSLPLFHHARYELVHGSSLSLVSSTSSVYSTPEEKCQSEIRKLRRELDASQEKVSALTTQLTANAHLVAAFEQSLGNMTIRLQSLTMTAEQKDSELNELRKTIELLKKQNAAAQAAINGVINTPELNCKGNGTAQSADLRIRRQHSSDSVSSINSATSHSSVGSNIESDSKKKKRKNWVNIQLRSSFKQAFGKKKSPKSASSHSDIEEMTDSSLPSSPKLPHNGSTGSTPLLRNSHSNSLISECMDSEAETVMQLRNELRDKEMKLTDIRLEALSSAHQLDQLREAMNRMQSEIEKLKAENDRLKSESQGSGCSRAPSQVSISASPRQSMGLSQHSLNLTESTSLDMLLDDTGECSARKEGGRHVKIVVSFQEEMKWKEDSRPHLFLIGCIGVSGKTKWDVLDGVVRRLFKEYIIHVDPVSQLGLNSDSVLGYSIGEIKRSNTSETPELLPCGYLVGENTTISVTVKGLAENSLDSLVFESLIPKPILQRYVSLLIEHRRIILSGPSGTGKTYLANRLSEYIVLREGRELTDGVIATFNVDHKSSKELRQYLSNLADQCNSENNAVDMPLVIILDNLHHVSSLGEIFNGLLNCKYHKCPYIIGTMNQATSSTPNLQLHHNFRWVLCANHTEPVKGFLGRFLRRKLMETEISGRVRNMELVKIIDWIPKVWHHLNRFLEAHSSSDVTIGPRLFLSCPIDVDGSRVWFTDLWNYSIIPYLLEAVREGLQLYGRRAPWEDPAKWVMDTYPWAASPQQHEWPPLLQLRPEDVGFDGYSMPREGSTSKQMPPSDAEGDPLMNMLMRLQEAANYSSPQSYDSDSNSNSHHDDILDSSLESTL

SEQ ID NO: 18971 - protein, 1551 aa, Homo sapiens
MENTGWMGKGHRMTPACPLLLSVILSLRLATAFDPAPSACSALASGVLYGAFSLQDLFPTIASGCSWTLENPDPTKYSLYLRFNRQEQVCAHFAPRLLPLDHYLVNFTCLRPSPEEAVAQAESEVGRPEEEEAEAAAGLELCSGSGPFTFLHFDKNFVQLCLSAEPSEAPRLLAPAALAFRFVEVLLINNNNSSQFTCGVLCRWSEECGRAAGRACGFAQPGCSCPGEAGAGSTTTTSPGPPAAHTLSNALVPGGPAPPAEADLHSGSSNDLFTTEMRYGEEPEEEPKVKTQWPRSADEPGLYMAQTGDPAAEEWSPWSVCSLTCGQGLQVRTRSCVSSPYGTLCSGPLRETRPCNNSATCPVHGVWEEWGSWSLCSRSCGRGSRSRMRTCVPPQHGGKACEGPELQTKLCSMAACPVEGQWLEWGPWGPCSTSCANGTQQRSRKCSVAGPAWATCTGALTDTRECSNLECPATDSKWGPWNAWSLCSKTCDTGWQRRFRMCQATGTQGYPCEGTGEEVKPCSEKRCPAFHEMCRDEYVMLMTWKKAAAGEIIYNKCPPNASGSASRRCLLSAQGVAYWGLPSFARCISHEYRYLYLSLREHLAKGQRMLAGEGMSQVVRSLQELLARRTYYSGDLLFSVDILRNVTDTFKRATYVPSADDVQRFFQVVSFMVDAENKEKWDDAQQVSPGSVHLLRVVEDFIHLVGDALKAFQSSLIVTDNLVISIQREPVSAVSSDITFPMRGRRGMKDWVRHSEDRLFLPKEVLSLSSPGKPATSGAAGSPGRGRGPGTVPPGPGHSHQRLLPADPDESSYFVIGAVLYRTLGLILPPPRPPLAVTSRVMTVTVRPPTQPPAEPLITVELSYIINGTTDPHCASWDYSRADASSGDWDTENCQTLETQAAHTRCQCQHLSTFAVLAQPPKDLTLELAGSPSVPLVIGCAVSCMALLTLLAIYAAFWRFIKSERSIILLNFCLSILASNILILVGQSRVLSKGVCTMTAAFLHFFFLSSFCWVLTEAWQSYLAVIGRMRTRLVRKRFLCLGWGLPALVVAVSVGFTRTKGYGTSSYCWLSLEGGLLYAFVGPAAVIVLVNMLIGIIVFNKLMARDGISDKSKKQRAGASLWSSCVVLPLLALTWMSAVLAMTDRRSVLFQALFAVFNSAQGFVITAVHCFLRREVQDVVKCQMGVCRADESEDSPDSCKNGQLQILSDFEKDVDLACQTVLFKEVNTCNPSTITGTLSRLSLDEDEEPKSCLVGPEGSLSFSPLPGNILVPMAASPGLGEPPPPQEANPVYMCGEGGLRQLDLTWLRPTEPGSEGDYMVLPRRTLSLQPGGGGGGGEDAPRARPEGTPRRAAKTVAHTEGYPSFLSVDHSGLGLGPAYGSLQNPYGMTFQPPPPTPSARQVPEPGERSRTMPRTVPGSTMKMGSLERKKLRYSDLDFEVMHTRKRHSELYHELNQKFHTFDRYRSQSTAKREKRWSVSSGGAAERSVCTDKPSPGERPSLSQHRRHQSWSTFKSMTLGSLPPKPRERLTLHRAAAWEPTEPPDGDFQTEV

SEQ ID NO: 18972 - protein, 55 aa, Homo sapiens
MSSKYPRSVRRCLPLCALTLEAALILLFYFFTHYDASLEDQKGLVASYQVFGWPP

SEQ ID NO: 18973 - protein, 962 aa, Homo sapiens
MLGSMARKKPRNTSRLPLALNPLKSKDVLAVLAERNEAIVPVGAWVEPASPGSSEIPAYTSAYLIEEELKEQLRKKQEALKHFQKQVKYRVNQQIRLRKKQQLQKSYERAQKEGSIAMQSSATHLTSKRTSVFPNNLNVAIGSSRLPPSLMPGDGIEDEENQNELFQQQAQALSETMKQARHRLASFKTVIKKKGSVFPDDGRKSFLTREEVLSRKPASTGINTGIRGELPIKVHQGLLAAVPYQNYMENQELDYEEPDYEESSSLVTDEKGKEDLFGRGQQDQQAIHSEDKNKPFSRVQKVKFKNPLFVLMEEEEQKQLHFEGLQDILPEAQDYFLEAQGDLLETQGDLTGIQSVKPDTQAVEMKVQVTEPEGQAIEPEGQPIKTETQGIMLKAQSIELEEGSIVLKTQDFLPTNQALLTKNQDVLLKDHCVLPKDQSILLKYQDQDFLPRDQHVLHKDQDILPKYQDQNFLPKDQNFLSRDQHVLPKDQDILPKYQDQNFLPKDQNFLSRDQHVLPKDQNILPKYQGQDFLPKDQDFLSRDQHVLPKDWNILPKCQDQDFLPRDQGVLPKDQNILPICQDQDFLPRDQGYLPKDQNILPICQDRDFLPRDLHVLSNDQNILPKCQDQDFLPKYQKVHFKEPYSDMTDEKGREDFSLADYQCLPPKSQDQDDIKNQQPASFMREERVREELPLDYHQYVVPKIQDQDSPREQNKHIKLPSSFEKWEIARGNTPGVPLAYDRYQSGLSTEFQAPLAFQSDVDKEEDKKERQKQYLRHRRLFMDIEREQVKEQQRQKEQKKKIEKIKKKREQECYAAEQRILRMNFHEDPYSGEKLSEILAQLQLQEIKGTREKQQREKEYLSSLCLIILYLYRYVEALRAQIQEKMQLYNITLPPLCCCGPDFWDAHPDTCANNCIFYKNHRAYTRALHSFINSCDVPGGNSTLRVAIHNFASAHRRTLKNL

SEQ ID NO: 18974 - protein, 829 aa, Homo sapiens
MISRLAAAQSCASHWPPSADSHILPFSTPGPSTCLPNYYRCSSGTCVMDTWVCDGYRDCADGSDEEACPLLANVTAASTPTQLGRCDRFEFECHQPKTCIPNWKRCDGHQDCQDGRDEANCPTHSTLTCMSREFQCEDGEACIVLSERCDGFLDCSDESDEKACSDELTVYKVQNLQWTADFSGDVTLTWMRPKKMPSASCVYNVYYRVVGESIWKTLETHSNKTNTVLKVLKPDTTYQVKVQVQCLSKAHNTNDFVTLRTPEGLPDAPRNLQLSLPREAEGVIVGHWAPPIHTHGLIREYIVEYSRSGSKMWASQRAASNFTEIKNLLVNTLYTVRVAAVTSRGIGNWSDSKSITTIKGKVIPPPDIHIDSYGENYLSFTLTMESDIKVNGYVVNLFWAFDTHKQERRTLNFRGSILSHKVGNLTAHTSYEISAWAKTDLGDSPLAFEHVMTRGVRPPAPSLKAKAINQTAVECTWTGPRNVVYGIFYATSFLDLYRNPKSLTTSLHNKTVIVSKDEQYLFLVRVVVPYQGPSSDYVVVKMIPDSRLPPRHLHVVHTGKTSVVIKWESPYDSPDQDLLYAVAVKDLIRKTDRSYKVKSRNSTVEYTLNKLEPGGKYHIIVQLGNMSKDSSIKITTVSLSAPDALKIITENDHVLLFWKSLALKEKHFNESRGYEIHMFDSAMNITAYLGNTTDNFFKISNLKMGHNYTFTVQARCLFGNQICGEPAILLYDELGSGADASATQAARSTDVAAVVVPILFLILLSLGVGFAILYTKHRRLQSSFTAFANSHYSSRLGSAIFSSGDDLGEDDEDAPMITGFSDDVPMVIA

SEQ ID NO: 18975 - protein, 744 aa, Homo sapiens
MEQDPKPPRLRLWALIPWLPRKQRPRISQTSLPVPGPGSGPQRDSDEGVLKEISITHHVKAGSEKADPSHFELLKVLGQGSFGKVFLVRKVTRPDSGHLYAMKVLKKATLKVRDRVRTKMERDILADVNHPFVVKLHYAFQTEGKLYLILDFLRGGDLFTRLSKEVMFTEEDVKFYLAELALGLDHLHSLGIIYRDLKPENILLDEEGHIKLTDFGLSKEAIDHEKKAYSFCGTVEYMAPEVVNRQGHSHSADWWSYGVLMFEMLTGSLPFQGKDRKETMTLILKAKLGMPQFLSTEAQSLLRALFKRNPANRLGSGPDGAEEIKRHVFYSTIDWNKLYRREIKPPFKPAVAQPDDTFYFDTEFTSRTPKDSPGIPPSAGAHQLFRGFSFVATGLMEDDGKPRAPQAPLHSVVQQLHGKNLVFSDGYVVKETIGVGSYSECKRCVHKATNMEYAVKVIDKSKRDPSEEIEILLRYGQHPNIITLKDVYDDGKHVYLVTELMRGGELLDKILRQKFFSEREASFVLHTIGKTVEYLHSQGVVHRDLKPSNILYVDESGNPECLRICDFGFAKQLRAENGLLMTPCYTANFVAPEVLKRQGYDEGCDIWSLGILLYTMLAGYTPFANGPSDTPEEILTRIGSGKFTLSGGNWNTVSETAKDLVSKMLHVDPHQRLTAKQVLQHPWVTQKDKLPQSQLSHQDLQLVKGAMAATYSALNSSKPTPQLKPIESSILAQRRVRKLPSTTL

SEQ ID NO: 18976 - protein, 315 aa, Homo sapiens
MFSPNHTIVTEFILLGLTDDPVLEKILFGVFLAIYLITLAGNLCMILLIRTNSHLQTPMYFFLGHLSFVDICYSSNVTPNMLHNFLSEQKTISYAGCFTQCLLFIALVITEFYILASMALDRYVAICSPLHYSSRMSKNICVCLVTIPYMYGFLSGFSQSLLTFHLSFCGSLEINHFYCADPPLIMLACSDTRVKKMAMFVVAGFNLSSSLFIILLSYLFIFAAIFRIRSAEGRHKAFSTCASHLTIVTLFYGTLFCMYVRPPSEKSVEESKITAVFYTFLSPMLNPLIYSLRNTDVILAMQQMIRGKSFHKIAV

SEQ ID NO: 18977 - protein, 121 aa, Homo sapiens
QTAYFIGIFTFLWVERPMTAKKKPNFILLLKALLLSSYGKLLLIPAVIWEHDYTSVCLKLIKVFVLTSNFQAIRVTLNINRKLSFLAVLSGLLLESIMVYFFQSMEWDVGSDYAIFKSQDF

SEQ ID NO: 18978 - protein, 198 aa, Homo sapiens
MQVIFSTAPWPNLPRAQASPGKVTEAVKEAIDAGYRHFDCAYFYHNEREVGAGIRCKIKEGAVRREDLFIATKLWCTCHKKSLVETACRKSLKALKLNYLDLYLIHWPMGFKPPHPEWIMSCSELSFCLSHPRVQDLPLDESNMVIPSDTDFLDTWEAMEDLVITGLVKNIGVSNFNHEQLERLLNKPGLRFKPLTNQ

SEQ ID NO: 18979 - protein, 181 aa, Homo sapiens
MELANLQPKRPKTIKQRHVRKKRKIKDMLNTPLCPSHSSLHPVLLPSDVFDQPQPVGNKRIEFHISTDMPAAFKKDLEKEQNCEEKNHGFGKIFPKPNLDITEEIKEDSDEMPSECISRRELEKGRISREEMETLSVFRSYEPGEPNCRIYVKNLAKHVQEKDLKYIFGRYVDFSSETQRI

SEQ ID NO: 18980 - protein, 871 aa, Homo sapiens [sequence omitted]

SEQ ID NO: 18981 - protein, 579 aa, Homo sapiens
MEANHCSLAPKSWMVREKYIRPLTTEEWVEKMMDADPEFPPDFAEAFESQLSLSDSPSLCRPVYSKKGLEHKADLQQHLFPVPPGHLECTPESLWKELSLQHEGLKELIHKQMRPFSQGIVILSRSWAVDLNLQEKPGVICDALLIAQNSTPILYTILREQDAEGQDYCTRTAFTLKQKLVNMGGYTGKVCVRAKVLCLSPESSAEALEAAVSPMDYPASYSLAGTQHMEALLQSLVIVLLGFRSLLSDQLGCEVLNLLTAQQYEIFSRSLRKNRELFVHGLPGSGKTIMAMKIMEKIRNVFHCEAHRILYVCENQPLRNFISDRNICRAETRETFLREKFEHIQHIVIDEAQNFRTEDGDWYRKAKTITQREKDCPGVLWIFLDYFQTSHLGHSGLPPLSAQYPREELTRVVRNADEIAEYIQQEMQLIIENPPINIPHGYLAILSEAKWVPGVPGNTKIIKNFTLEQIVTYVADTCRCFFERGYSPKDVAVLVSTVTEVEQYQSKLLKAMRKKMVVQLSDACDMLGVHIVLDSVRRFSGLERSIVFGIHPRTADPAILPNILICLASRAKQHLYIFL

SEQ ID NO: 18982 - protein, 234 aa, Homo sapiens
MAPRRARGCRTLGLPALLLLLLLRPPATRGITCPPPMSVEHADIWVKSYSLYSRERYICNSGFKRKAGTSSLTECVLNKATNVAHWTTPSLKCIKPAASSPSSNNTAATTAAIVPGSQLMPSKSPSTGTTEISSHESSHGTPSQTTAKNWELTASASHQPPGVYPQGHSDTTVAISTSTVLLCGLSAVSLLACYLKSRQTPPLASVEMEAMEALPVTWGTSSRDEDLENCSHHL

SEQ ID NO: 18983 - protein, 778 aa, Homo sapiens
MKPFQLDLLFVCFFLFSQELGLQKRGCCLVLGYMAKDKFRRMNEGQVYSFSQQPQDQVVVSGQPVTLLCAIPEYDGFVLWIKDGLALGVGRDLSSYPQYLVVGNHLSGEHHLKILRAELQDDAVYECQAIQAAIRSRPARLTVLVPPDDPVILGGPVISLRAGDPLNLTCHADNAKPAASIIWLRKGEVINGATYSKTLLRDGKRESIVSTLFISPGDVENGQSIVCRATNKAIPGGKETSVTIDIQHPPLVNLSVEPQPVLEDNVVTFHCSAKANPAVTQYRWAKRGQIIKEASGEVYRTTVDYTYFSEPVSCEVTNALGSTNLSRTVDVYFGPRMTTEPQSLLVDLGSDAIFSCAWTGNPSLTIVWMKRGSGVVLSNEKTLTLKSVRQEDAGKYVCRAVVPRVGAGEREVTLTVNGPPIISSTQTQHALHGEKGQIKCFIRSTPPPDRIAWSWKENVLESGTSGRYTVETISTEEGVISTLTISNIVRADFQTIYNCTAWNSFGSDTEIIRLKEQGSEMKSGAGLEAESVPMAVIIGVAVGAGVAFLVLMATIVAFCCARSQRNLKGVVSAKNDIRVEIVHKEPASGREGEEHSTIKQLMMDRGEFQQDSVLKQLEVLKEEEKEFQNLKDPTNGYYSVNTFKEHHSTPTISLSSCQPDLRPAGKQRVPTGMSFTNIYSTLSGQGRLYDYGQRFVLGMGSSSIELCEREFQRGSLSDSSSFLDTQCDSSVSSSGKQDGYVQFDKASKASASSSHHSQSSSQNSDPSRPLQRRMQTHV

SEQ ID NO: 18984 - protein, 586 aa, Homo sapiens
MAKSDTGKIGLINLGNTCYVNSILQALFMASDFRHCVLRLTENNSQPLMTKLQWLFGFLEHSQRPAISPENFLSASWTPWFSPGTQQDCSEYLKYLLDRLHEEEKTGTRICQKLKQSSSPSPPEEPPAPSSTSVEKMFGGKIVTRICCLCCLNVSSREEAFTDLSLAFPPPERCRRRRLGSVMRPTEDITARELPPPTSAQGPGRVGPRRQRKHCITEDTPPTSLYIEGLDSKEAGGQSSQEERIEREEEGKEERTEKEEVGEEEESTRGEGEREKEEEVEEEEEKVEKETEKEAEQEKEEDSLGAGTHPDAAIPSGERTCGSEGSRSVLDLVNYFLSPEKLTAENRYYCESCASLQDAEKVVELSQGPCYLILTLLRFSFDLRTMRRRKILDDVSIPLLLRLPLAGGRGQAYDLCSVVVHSGVSSESGHYYCYAREGAARPAASLGTADRPEPENQWYLFNDTRVSFSSFESVSNVTSFFPKDTAYVLFYRQRPREGPEAELGSSRVRTEPTLHKDLMEAISKDNILYLQEQEKEARSRAAYISALPTSPHWGRGFDEDKDEDEGSPGGCNPAGGNGGDFHRLVF

SEQ ID NO: 18985 - protein, 764 aa, Homo sapiens
MSSEQWPRLPGKVSVLTDQVEAQGEKIRDLEVCLEGHQVKLNAAEEMLQQELLSRTSLETQKLDLMTEVSELKLKLVGMEKEQREQEEKQRKAEELLQELRHLKIKVEELENERNQYEWKLKATKAEVAQLQEQVALKDAEIERLHSQLSRTAALHSESHTERDQEIQRLKMGMETLLLANEDKDRRIEELTGLLNQYRKVKEIVMVTQGPSERTLSINEEEPEGGFSKWNATNKDPEELFKQEMPPRCSSPTVGPPPLPQKSLETRAQKKLSCSLEDLRSESVDKCMDGNQPFPVLEPKDSPFLAEHKYPTLPGKLSGATPNGEAAKSPPTICQPDATGSSLLRLRDTESGWDDTAVVNDLSSTSSGTESGPQSPLTPDGKRNPKGIKKFWGKIRRTQSGNFYTDTLGMAEFRRGGLRATAGPRLSRTRDSKGQKSDANAPFAQWSTERVCAWLEDFGLAQYVIFARQWVSSGHTLLTATPQDMEKELGIKHPLHRKKLVLAVKAINTKQEEKSALLDHIWVTRWLDDIGLPQYKDQFHESRVDRRMLQYLTVNDLLFLKVTSQLHHLSIKCAIHVLHVNKFNPHCLHRRPADESNLSPSEVVQWSNHRVMEWLRSVDLAEYAPNLRGSGVHGGLIILEPRFTGDTLAMLLNIPPQKTLLRRHLTTKFNALIGPEAEQEKREKMASPAYTPLTTTAKVRPRKLGFSHFGNIRKKKFDESTDYICPMEPSDGVSDSHRVYSGYRGLSPLDAPELDGLDQVGQIS

SEQ ID NO: 18986 - protein, 740 aa, Homo sapiens
MLLWLLLLILTPGREQSGVAPKAVLLLNPPWSTAFKGEKVALICSSISHSLAQGDTYWYHDEKLLKIKHDKIQITEPGNYQCKTRGSSLSDAVHVEFSPDWLILQALHPVFEGDNVILRCQGKDNKNTHQKVYYKDGKQLPNSYNLEKITVNSVSRDNSKYHCTAYRKFYILDIEVTSKPLNIQVQELFLHPVLRASSSTPIEGSPMTLTCETQLSPQRPDVQLQFSLFRDSQTLGLGWSRSPRLQIPAMWTEDSGSYWCEVETVTHSIKKRSLRSQIRVQRVPVSNVNLEIRPTGGQLIEGENMVLICSVAQGSGTVTFSWHKEGRVRSLGRKTQRSLLAELHVLTVKESDAGRYYCAADNVHSPILSTWIRVTVRTLLSPSVPVSHPVLTFRAPRAHTVVGDLLELHCESLRGSPPILYRFYHEDVTLGNSSAPSGGGASFNLSLTAEHSGNYSCDADNGLGAQHSHGVSLRVTVPVSRPVLTLRAPGAQAVVGDLLELHCESLRGSFPILYWFYHEDDTLGNISAHSGGGASFNLSLTTEHSGNYSCEADNGLGAQHSKVVTLNVTGTSRNRTGLTAAGITGLVLSILVLAAAAALLHYARARRKPGGLSATGTSSHSPSECQEPSSSRPSRIDPQEPTHSKPLAPMELEPMYSNVNPGDSNPIYSQIWSIQHTKENSANCPMMHQEHEELTVLYSELKKTHPDDSAGEASSRGRAHEEDDEENYENVPRVLLASDH

SEQ ID NO: 18987 - protein, 887 aa, Homo sapiens
MANGTLTRRHQNGRFVGDADLERQKFSDLKLNGPQDHSHLLYSTIPRMQEPGQIVETYTEEDPEGAMSVVSVETSDDGTTRRTETTVKKVVKTVTTRTVQPVAMGPDGLPVDASSVSNNYIQTLGRDFRKNGNGGPGPYVGQAGTATLPRNFHYPPDGYSRHYEDGYPGGSDNYGSLSRVTRIEERYRPSMEGYRAPSRQDVYGPQPQVRVGGSSVDLHRFHPEPYGLEDDQRSMGYDDLDYGMMSDYGTARRTGTPSDPRRRLRSYEDMIGEEVPSDQYYWAPLAQHERGSLASLDSLRKGGPPPPNWRQPELPEVIAMLGFRLDAVKSNAAAYLQHLCYRNDKVKTDVRKLKGIPVLVGLLDHPKKEVHLGACGALKNISFGRDQDNKIAIKNCDGVPALVRLLRKARDMDLTEVITGTLWNLSSHDSIKMEIVDHALHALTDEVIIPHSGWEREPNEDCKPRHIEWESVLTNTAGCLRNVSSERSEARRKLRECDGLVDALIFIVQAEIGQKDSDSKLVENCVCLLRNLSYQVHREIPQAERYQEAAPNVANNTGPHAASCFGAKKGKGKKPIEDPANDTVDFPKRTSPARGYELLFQPEVVRIYISLLKESKTPAILEASAGAIQNLCAGRWTYGRYIRSALRQEKALSAIADLLTNEHERVVKAASGALRNLAVDARNKELIGKHAIPNLVKNLPGGQQNSSWNFSEDTVISILNTINEVIAENLEAAKKLRETQGIEKLVLINKSGNRSEKEVRAAALVLQTIWGYKELRKPLEKEGWKKSDFQVNLNNASRSQSSHSYDDSTLPLIDRNQKSDNNYSTPNERGDHNRTLDRSGDLGDMEPLKGTTPLMQDEGQESLEEELDVLVLDDEGGQVSYPSMQKI

SEQ ID NO: 18988 - protein, 610 aa, Homo sapiens
MLDFFTIFSKGGLVLWCFQGVSDSCTGPVNALIRSVLLQVGFQKILTLTYVDKLIDDVHRLFRDKYRTEIQQQSALSLLNGTFDFQNDFLRLLREAEESSKIRAPTTMKKFEDSEKAKKPVRSMIETRGEKPKEKAKNSKKKGAKKEGSDGPLATSKPVPAEKSGLPVGPENGVELSKEELIRRKREEFIQKHGRGMEKSNKSTKSDAPKEKGKKAPRVWELGGCANKEVLDYSTPTTNGTPEAALSEDINLIRGTGSGGQLQDLDCSSSDDEGAAQNSTKPSATKGTLGGMFGMLKGLVGSKSLSREDMESVLDKMRDHLIAKNVAADIAVQLCESVANKLEGKVMGTFSTVTSTVKQALQESLVQILQPQRRVDMLRDIMDAQRRQRPYVVTFCGVNGVGKSTNLAKISFWLLENGFSVLIAACDTFRAGAVEQLRTHTRRLSALHPPEKHGGRTMVQLFEKGYGKDAAGIAMEAIAFARNQGFDVVLVDTAGRMQDNAPLMTALAKLITVNTPDLVLFVGEALVGNEAVDQLVKFNRALADHSMAQTPRLIDGIVLTKFDTIDDKVGAAISMTYITSKPIVFVGTGQTYCDLRSLNAKAVVAALMKA

SEQ ID NO: 18989 - protein, 384 aa, Homo sapiens
MPPFCRNAKLGLLSFLICAGRSLLPLGKNAFWLERIENNNTLWEKAQSQKMRYKTSLVMRKRLRLYRNTLKESSSSSGHHGPQLTAASSPSVFPGLHEEPPQASPSRPLNGLLRLGLPGDMYARPEPFPPGPAARSDALAAAAALHGYGGMNLTVNLAAPHGPGAFFRYMRQPIKQELICKWLAADGTATPSLCSKTFSTMHELVTHVTVEHVGGPEQANHICFWEECPRQGKPFKAKYKLVNHIRVHTGEKPFPCPFPGCGKVFARSENLKIHKRTHTGEKPFRCEFEGCERRFANSSDRKKHSHVHTSDKPYTCKVRGCDKCYTHPSSLRKHMKVHGRSPPPSSGYDSATPSALVSPSSDCGHKSQVASSAAVAARTADLSE

SEQ ID NO: 18990 - protein, 137 aa, Homo sapiens
MRNGISPIIIDNTNLHAWEMKPYAVMALENNYEVIFREPDTRWKFNVQELARRNIHGVSREKIHRMKERYEHDVTFHSVLHAEKPSRMNRNQDRNNALPSNNARYWNSYTEFPNRRAHGGFTNESSYHRRGGCHHGY

SEQ ID NO: 18991 - protein, 76 aa, Homo sapiens
CEVKTDFCQTVLPYLIHDILLQDTNESWRNLLSTHVQGFFTSCLRHFSQTSRSTTPANLDSDLLQEQFLMMLSGWI

SEQ ID NO: 18992 - protein, 502 aa, Homo sapiens
MENQAHNTMGTSPCEAELQELMEQIDIMVSNKKMDWERKMRALETRLDLRDQELANAQTCLDQKGQEVGLLRQKLDSLEKCNLAMTQNYEGQLQSLKAQFSKLTNNFEKLRLHQMKQNKVPRKELPHLKEEIPFELSNLNQKLEEFRAKSREWDKQEILYQTHLISLDAQQKLLSEKCNQFQKQAQSYQTQLNGKKQCLEDSSSEIPRLICDPDPNCEINERDEFIIEKLKSAVNEIALSRNKLQDENQKLLQELKMYQRQCQAMEAGLSEVKSELQSRDDLLRIIEMERLQLHRELLKIGECQNAQGNKTRLESSYLPSIKEPERKIKELFSVMQDQPNHEKELNKIRSQLQQVEEYHNSEQERMRNEISDLTEELHQKEITIATVTKKAALLEKQLKMELEIKEKMLAKQKVSDMKYKAVRTENTHLKGMMGDLDPGEYMSMDFTNREQSRHTSINKLQYENERLRNDLAKLHVNGKSTWTNQNTYEETGRYAYQSQIKT

SEQ ID NO: 18993 - protein, 733 aa, Homo sapiens
MPAETDECRLNQNICGHGECVPGPPDYSCHCNPGYRSHPQHRYCVDVNECEAEPCGPGRGICMNTGGSYNCHCNRGYRLHVGAGGRSCVDLNECAKPHLCGDGGFCINFPGHYKCNCYPGYRLKASRPPVCEDIDECRDPSSCPDGKCENKPGSFKCIACQPGYRSQGGGACRDVNECAEGSPCSPGWCENLPGSFRCTCAQGYAPAPDGRSCLDVDECEAGDVCDNGICSNTPGSFQCQCLSGYHLSRDRSHCEDIDECDFPAACIGGDCINTNGSYRCLCPQGHRLVGGRKCQDIDECSQDPSLCLPHGACKNLQGSYVCVCDEGFTPTQDQHGCEEVEQPHHKKECYLNFDDTVFCDSVLATNVTQQECCCSLGAGWGDHCEIYPCPVYSSAEFHSLCPDGKGYTQDNNIVNYGIPAHRDIDECMLFGSEICKEGKCVNTQPGYECYCKQGFYYDGNLLECVDVDECLDESNCRNGVCENTRGGYRCACTPPAEYSPAQRQCLSPEEMDVDECQDPAACRPGRCVNLPGSYRCECRPPWVPGPSGRDCQLPESPAERAPERRDVCWSQRGEDGMCAGPLAGPALTFDDCCCRQGRGWGAQCRPCPPRGAGSHCPTSQSESNSFWDTSPLLLGKPPRDEDSSEEDSDECRCVSGRCVPRPGGAVCECPGGFQLDASRARCVDIDECRELNQRGLLCKSERCVNTSGSFRCVCKAGFARSRPHGACVPQRRR

SEQ ID NO: 18994 - protein, 516 aa, Homo sapiens
MELLKLNRSVQGTGPGPGASLCRPGAPLLNSSSVGNLSCEPPRIRGAGTRELELAIRITLYAVIFLMSVGGNMLIIVVLGLSRRLRTVTNAFLLSLAVSDLLLAVACMPFTLLPNLMGTFIFGTVICKAVSYLMGVSVSVSTLSLVAIALERYSAICRPLQARVWQTRSHAARVIVATWLLSGLLMVPYPVYTVVQPVGPRVLQCVHRWPSARVRQTWSVLLLLLLFFIPGVVMAVAYGLISRELYLGLRFDGDSDSDSQSRVRNQGGLPGGAGPREQNLGEAELWRATGPAGVGGTEMKVRVRRKLEMELSWERRSGGDWAGDWGDSPFSLTAHPLCSGAVHQNGRCRPETGAVGEDSDGCYVQLPRSRPALELTALTAPGPGSGSRPTQAKLLAKKRVVRMLLVIVVLFFLCWLPVYSANTWRAFDGPGAHRALSGAPISFIHLLSYASACVNPLVYCFMHRRFRQACLETCARCCPRPPRARPRALPDEDPPTPSIASLSRLSYTTISTLGPG

SEQ ID NO: 18995 - protein, 236 aa, Homo sapiens
IYPIMDKSSRTRLALIICNEEFDSIPRRTGAEVDITGMTMLLQNLGYSVDVKKNLTASDMTTELEAFAHRPEHKTSDSTFLVFMSHGIREGICGKKHSEQVPDILQLNAIFNMLNTKNCPSLKDKPKVIIIQACRGDSPGVVWFKDSVGVSGNLSLPTTEEFEDDAIKKAHIEKDFIAFCSSTPDNVSWRHPTMGSVFIGRLIEHMQEYACSCDVEEIFRKEVKRSFCKGFWNYVC

SEQ ID NO: 18996 - protein, 128 aa, Homo sapiens
TSGHWSLTRPGVFYIGREDGYIDIWDLLEKTHEPAQSQNICITMITYIKPWIFSSKQQFIATADYYGTLHILEIPWTLSRPSTNEMASVNHYFEREVKHLEYVEQRKKIREQEKKEMELEMAKKKVVS

SEQ ID NO: 18997 - protein, 226 aa, Homo sapiens
MPVEEFVAGWISGALGLVLGHPFDTVKVRLQTQTTYRGIVDCMVKIYRHESAYCLAPFDLIKVRLQNQTEPRAQPGSPPPRYQGPVHCAASIFREEGPRGLFRGAWALTLRDTPTVGIYFITYEGLCRQYTPEGQNPSSATVLVAGGFAGIASWVAATPLDMIKSRMQMDGLRRRVYQGMLDCMVSSIRQEGLGVFFRGVTINSARAFPVNAVTFLSYEYLLRWWG

SEQ ID NO: 18998 - protein, 359 aa, Homo sapiens
MGQDQTKQQIEKGLQLYQSNQTEKALQVWTKVLEKSSDLMGRFRVLGCLVTAHSEMGRYKEMLKFAVVQIDTARELEDADFLLESYLNLARSNEKLCEFHKTISYCKTCLGLPGTRAGAQLGGQVSLSMGNAFLGLSVFQKALESFEKALRYAHNNDDAMLECRVCCSLGSFYAQVKESMKIALQHGDRPLQALCLLCFADIHRSRGDLETAFPRYDSAMSIMTEIGNRLGQVQALLGVAKCWVARKALDKALDAIERAQDLAEEVGNKLSQLKLHCLSESIYRSKGLQRELRAHVVRFHECVEETELYCGLCGESIGEKNSRLQALPCSHIFHLRCLQNNGTRSCPNCRRSSMKPGFV

SEQ ID NO: 18999 - protein, 944 aa, Homo sapiens
MSQPPIGGAAPATAAASPAAAATEARLHPEGSSRKQQRAQSPARPRDSSLRQTIAATRSPVGAGTKLNSVRQQQLQQQQQQGNKTGSRTGPPASIRGGGGGAEKATPLAPKGAAPGAVQPVAGAEAAPAATLAALGGRRPGPPEEPPRELESVPSKLGEPPPLGEGGGGGGEGGGAGGGSGEREGGAPQPPPPRGWRGKGVRAQQRGGSGGEGASPSPSSSSAGKTPGTGSRNSGSGVAGGGSGGGGSYWKEGCLQSELIQFHLKKERAAAAAAAAQMHAKNGGGSSSRSSPVSGPPAVCETLAVASASPMAAAAEGPQQSAEGSASGGGMQAAAPPSSQPHPQQLQEQEEMQEEMEKLREENETLKNEIDELRTEMDEMRDTFFEEDACQLQEMRHELERANKNCRILQYRLRKAERKRLRYAQTGEIDGELLRSLEQDLKVAKDVSVRLHHELENVEEKRTTTEDENEKLRQQLIEVEIAKQALQNELEKMKELSLKRRGSKDLPKSEKKAQQTPTEEDNEDLKCQLQFVKEEAALMRKKMAKIDKEKDRFEHELQKYRSFYGDLDSPLPKGEAGGPPSTREAELKLRLRLVEEEANILGRKIVELEVENRGLKAELDDLRGDDFNGSANPLMREQSESLSELRQHLQLVEDETELLRRNVADLEEQNKRITAELNKYKYKSGGHDSARHHDNAKTEALQEELKAARLQINELSGKVMQLQYENRVLMSNMQRYDLASHLGIRGSPRDSDAESDAGKKESDDDSRPPHRKREGPIGGESDSEEVRNIRCLTPTRSFYPAPGPWPKSFSDRQQMKDIRSEAERLGKTIDRLIADTSTIITEARIYVANGDLFGLMDEEDDGSRIREHELLYRINAQMKAFRKELQTFIDRLEVPKSADDRGAEEPISMFQPIILLILILVLFSSLSYTTIFKLVFLFTLFFVL

SEQ ID NO: 19000 - protein, 396 aa, Homo sapiens
MFLLPEGVLIQTPRDTRNNSSCADVLAEEGEVHVALCRGQGGTPADKPQREWHNSWQVVAMAALGGLILSDVYPFSCKAVAGYKCTGYRSQDKSFHVEGALNHIFTRSLPFEGSQPRIFRIKLGNQWFSFPEPEALVGKLNRGFLEAPSCHPIKTINEKLIAELGKVFPLKRLKCSYPLLPQEGTSVLPFWNCDFLSAAFWISLHEDNSNSESLTGGTSQDVEDFLVSFSELSLLKNPGRDGKEEACEGTCGQAKICLRPSLLVHVQDVIEVPDFLSGSLHILSGPVFQKCHILPFTMPAFHETLFILGVNQNLKDGCLQSLLDHLKGILDSLLTQTLPESSKLSSLVKFVLQSNGKDYMIRVKTHNFSPDCTEDLIIGSVITSATSVIHKDQCFV

SEQ ID NO: 19001 - protein, 853 aa, Homo sapiens
MSQSPAFGPRRGSSPRGAAGAAARRNESQDYLLMDSELGEDGCPQAPLPCYGYYPCFRGSDNRLAHRRQTVLREKGRRLANRGPAYMFSDRSTSLSIEEERFLDAAEYGNIPVVRKMLEECHSLNVNCVDYMGQNALQLAVANEHLEITELLLKKENLSRVGDALLLAISKGYVRIVEAILSHPAFAEGKRLATSPSQSELQQDDFYAYDEDGTRFSHDVTPIILAAHCQEYEIVHTLLRKGARIERPHDYFCKCNDCNQKQKHDSFSHSRSRINAYKGLASPAYLSLSSEDPVMTALELSNELAVLANIEKEFKNDYKKLSMQCKDFVVGLLDLCRNTEEVEAILNGDVETLQSGDHGRPNLSRLKLAIKYEVKKFVAHPNCQQQLLSIWYENLSGLRQQTMAVKFLVVLAVAIGLPFLALIYWFAPCSKMGKIMRGPFMKFVAHAASFTIFLGLLVMNAADRFEGTKLLPNETSTDNAKQLFRMKTSCFSWMEMLIISWVIARIKWDPSDPQIISEGLYAIAVVLSFSRIAYILPANESFGPLQISLGRTVKDIFKFMVIFIMVFVAFMIGMFNLYSYYIGAKQNEAFTTVEESFKTLFWAIFGLSEVKSVVINYNHKFIENIGYVLYGVYNVTMVIVLLNMLIAMINSSFQEIEDDADVEWKFARAKLWFSYFEEGRTLPVPFNLVPSPKSLFYLLLKLKKWISELFQGHKKGFQEDAEMNKINEEKKLGILGSHEDLSKLSLDKKQVGHNKQPSIRSSEDFHLNSFNNPPRQYQKIMKRLIKRYVLQAQIDKESDEVNEGELKEIKQDISSLRYELLEEKSQNTEDLAELIRELGEKLSMEPNQEETNR

SEQ ID NO: 19002 - protein, 144 aa, Homo sapiens
MVSVDKHQSPSLKYTGSSMVHIPPGEPDFESSLCQTCLGEHAFQRGVLPQENESCSWETQSGCEVREPCNHANILTKPDPRTFWTNDDPAFMKQRRMGLNDFIQKIANNSYACKHPEVQSILKISQPQEPELMNANPSPPPSPS

SEQ ID NO: 19003 - protein, 765 aa, Homo sapiens
MGDEDDDESCAVELRITEANLTGHEEKVSVENFELLKVLGTGAYGKVFLVRKAGGHDAGKLYAMKVLRKAALVQRAKTQEHTRTERSVLELVRQAPFLVTLHYAFQTDAKLHLILDYVSGGEMFTHLYQRQYFKEAEVRVYGGEIVLALEHLHKLGIIYRDLKLENVLLDSEGHIVLTDFGLSKEFLTEEKERTFSFCGTIEYMAPEIIRSKTGHGKAVDWWSLGILLFELLTGASPFTLEGERNTQAEVSRRILKCSPPFPPRIGPVAQDLLQRLLCKDPKKRLGAGPQGAQEVRNHPFFQGLDWVALAARKIPAPFRPQIRSELDVGNFAEEFTRLEPVYSPPGSPPPGDPRIFQGYSFVAPSILFDHNNAVMTDGLEAPGAGDRPGRAAVARSAMMQYELDLREPALGQGSFSVCRRCRQRQSGQEFAVKILSRRLEANTQREVAALRLCQSHPNVVNLHEVHHDQLHTYLVLELLRGGELLEHIRKKRHFSESEASQILRSLVSAVSFMHEEAGVVHRDLKPENILYADDTPGAPVKIIDFGFARLRPQSPGVPMQTPCFTLQYAAPELLAQQGYDESCDLWSLGVILYMMLSGQVPFQGASGQGGQSQAAEIMCKIREGRFSLDGEAWQGVSEEAKELVRGLLTVDPAKRLKLEGLRGSSWLQDGSARSSPPLRTPDVLESSGPAVRSGLNATFMAFNRGKREGFFLKSVENAPLAKRRKQKLRSATASRRGSPAPANPGRAPVASKGAPRRANGPLPPS

SEQ ID NO: 19004 - protein, 902 aa, Homo sapiens
MFPALETHLKQTIPDPYEDFMYRHLQYYGYFKAQRGSLPNSATHQHVRKNNPQCLLNGSLGEKDDLIPDTLQKEKLLWPISLSSAVHRQIEAINRDFHSCLGWMQWRGLSSLQPPPPRFKDSPASAFRVAGITDSHMLSLPHLRSRQLLYDELDEVNPRLREPQELFSILSTKRPLQAPRWPIECEVIKENIHHIEWAPPQPEYFYQPKGNEKVPEIVGEKKGTVVYQLDSVPIEGSYFTSSRVGGKRGIVKELAVTLQGPEDNTLLFESRFESGNLQKAVRVDTYEYELTLRTDLYTNKHTQWFYFRVQNTRKDATYRFTIVNLLKPKSLYTVGMKPLLYSQLDANTRNIGWRREGNEIKYYKNNTDDGQQPFYCLTWTIQFPYDQDTCFFAHFYPYTYTDLQCYLLSVANNPIQSQFCKLQTLCRSLAGNTVYLLTITNPSQTPQEAAAKKAVVLSARVHPGESNGSWVMKGFLDFILSNSPDAQLLRDIFVFKVLPMLNPDGVIVGNYRCSLAGRDLNRHYKTILKESFPCIWYTRNMIKRLLEEREVLLYCDFHGHSRKNNIFLYGCNNNNRKYWLHERVFPLMLCKNAPDKFSFHSCNFKVQKCKEGTGRVVMWRMGILNSYTMESTFGGSTLGNKRDTHFTIEDLKSLGYHVCDTLLDFCDPDQMKFTQCLAELKELLRQEIHKKFHELGQDVDLEGSWSDISLSDIESSTSGSDSSLSDGLPVHLANIADELTQKKKMFKKKKKKSLQTRKQRNEQYQKKNLMQKLKLTEDTSEKAGFASTLQKQPTFFKNSENSSFLPMKNENPRLNETNLNRRDKDTPLDPSMATLILPKNKGRMQNKKPGFTVSCSPKRTINSSQEPAPGMKPNWPRSRYPATKRGCAAMAAYPSLHIYTYP

SEQ ID NO: 19005 - protein, 204 aa, Homo sapiens
MLPGLRRLLQAPASACLLLMLLALPLAAPSCPMLCTCYSSPPTVSCQANNFSSVPLSLPPSTQRLFLQNNLIRTLRPGTFGSNLLTLWLFSNNLSTIYPGTFRHLQALEELDLGDNRHLRSLEPDTFQGLERLQSLHLYRCQLSSLPGNIFRGLVSLQYLYLQENSLLHLQGKKEKGKSLLCSWRMDALKMEGIPVIVIHCYYY

SEQ ID NO: 19006 - protein, 431 aa, Homo sapiens
MSTRSVSSSSYRRMFGGPGTASRPSSSRSYVTTSTRTYSLGSALRPSTSRSLYASSPGGVYATRSSAVRLRSSVPGVRLLQDSVDFSLADAINTEFKNTRTNEKVELQELNDRFANYIDKVRFLEQQNKILLAELEQLKGQGKSRLGDLYEEEMRELRRQVDQLTNDKARVEVERDNLAEDIMRLREKLQEEMLQREEAENTLQSFRQDVDNASLARLDLERKVESLQEEIAFLKKLHEEEIQELQAQIQEQHVQIDVDVSKPDLTAALRDVRQQYESVAAKNLQEAEEWYKSKFADLSEAANRNNDALRQAKQESTEYRRQVQSLTCEVDALKGTNESLERQMREMEENFAVEAANYQDTIGRLQDEIQNMKEEMARHLREYQDLLNVKMALDIEIATYRKLLEGEESRISLPLPNFSSLNLRGKHFISL

SEQ ID NO: 19007 - protein, 333 aa, Homo sapiens
MKMDVSVRAAGCSDDLSSGEADVDPKLLELTADEEKCRSIRRQYRQLMYCVRQNREDIVSSANNSLTEALEEANVLFDGVSRTREAALDARFLVMASDLGKEKAKQLNSDMNFFNQLAFCDFLFLFVGLNWMEGDPDKLSDCDDSIALSFWKAIEKEATSWMVKAETFHFVFGSFKLERSAPKPRLEHQKKVRKMEENGNMPTKLQKLDLSSYPEATEKNVERILGLLQTYFRKYPDTPVSYFEFVIDPNSFSRTVENIFYVSFIVRDGFARIRLDEDRLPILEPMNVNQMGEGNDSSCHGRKQGVISLTLQEWKNIVAAFEISEAMITYSSY

SEQ ID NO: 19008 - protein, 443 aa, Homo sapiens
CDASLHISNPRSDKRRRYSMLHSQESGSSVFYHSQDDGPGLEGGDCAKNSGAPFILGQAKNARLASGDSTTKHDLNLSQRRRAYSTNQITNHKPLPRATMASDPMPAAKRYPLRKARLQDLTNQTSLDVQRWQIDLQPLLNSGQDLNQGPKLRGPGARRPSLLPQGCQPFLPWGQETQAWSPVRERTSDSRSPGDLEPSHHPSAFETETSSDWDPPAESQERASPSRPATPAPVLGKALVKGLHDSQRLQWEVSFELGTPGPERGGAQDADLWSETFHHLAARAIIRDFEQLAEREGEIEQGSNRRYQVSALHTSKACNIISKYTAFVPVDVSKSRYLPTVVEYPNSGAALRMLGSRALAQQWRGTSSGFGRPQTMLGEDSAPGNGPRKCSQTLMGFKTKTETEHSVRGWKPRGALQNQSVLSTSWSHWPPKPRRTSSTPEPS

SEQ ID NO: 19009 - protein, 280 aa, Homo sapiens
IDGKKVGKELTEKPKFILSVLLLWNFGLLIVDHIHFQYNGFLFGLMLLSIARLFQKRHMEGAFLFAVLLHFKHIYLYVAPAYGVYLLRSYCFTANKPDGSIRWKSFSFVRVISLGLVVFLVSALSLGPFLALPSIFCLWFKPQGPRGFLRCLTLCALSSFMFGWHVHEKAILLAILPMSLLSVGKAGDASIFLILTTTGHYSLFPLLFTAPELPIKILLMLLFTIYSISSLKTLFRKEKPLFNWMETFYLLGLGPLEVCCEFVFPFTSWKVKYPFIPLLL

SEQ ID NO: 19010 - protein, 598 aa, Homo sapiens
MRGGGGCVLALGGQRGFQKERRRMASGNGLPSSSALVAKGPCALGPFPRYIWIHQDTPQDSLDKTCHEIWKRVQGLPEASQPWTSMEQLSVPVVGTLRGNELSFQEEALELSSGKDEISLLVEQEFLSLTKEHSILVEESSGELEVPGSSPEGTRELAPCILAPPLVAGSNERPRASIIVGDKLLKQKVAMPVISSRQDCDSATSTVTDILCAAEVKSSKGTEDRGRILGDSNLQVSKLLSQFPLKSTETSKVPDNKNVLDKTRVTKDFLQDNLFSGPGPKEPTGLSPFLLLPPRPPPARPDKLPELPAQKRQLPVFAKICSKPKADPAVERHHLMEWSPGTKEPKKGQGSLFLSQWPQSQKDACGEEGCCDAVGTASLTLPPKKPTCPAEKNLLYEFLGATKNPSGQPRLRNKVEVDGPELKFNAPVTVADKNNPKYTGNVFTPHFPTAMTSATLNQPLWLNLNYPPPPVFTNHSTFLQYQGLYPQQAARMPYQQALHPQLGCYSQQVMPYNPQQMGQQIFRSSYTPLLSYIPFVQPNYPYPQRTPPKMSANPRDPPLMAGDGPQYLFPQGYGFGSTSGGPLMHSPYFSSSGNGINF

SEQ ID NO: 19011 - protein, 1100 aa, Homo sapiens
MASSWKLMLFLSVTMCLSEYSKSLPGLSTSYAALLRIKKSSSSSLFGSKTRPRYSSPSLGTLSASSPSWLGAAQNYYSPINLYHSSDAFKQDESVDYGPVFVQEPDDIIFPTDSDEKKVALNCEVRGNPVPSYRWLRNGTEIDLESDYRYSLIDGTFIISNPSEAKDSGHYQCLATNTVGSILSREATLQFAYLGNFSGRTRSAVSVREGQGVVLMCSPPPHSPEIIYSWVFNEFPSFVAEDSRRFISQETGNLYISKVQTSDVGSYICLVKNTVTNARVLSPPTPLTLRNDGVMGEYEPKIEVHFPFTVTAAKGTTVKMECFALGNPVPTITWMKVNGYIPSKARLRKSQAVLEIPNVQLDDAGIYECRAENSRGKNSFRGQLQVYTYPHWVEKLNDTQLDSGSPLRWECKATGKPRPTYRWLKNGVPLSPQSRVEMVNGVLMIHNVNQSDAGMYQCLAENKYGAIYASAELKILASAPTFALNQLKKTIIVTKDQEVVIECKPQGSPKPTISWKKGDRAVRENKRIAILPDGSLRILNASKSDEGKYVCRGENVFGSAEIIASLSVKEPTRIELTPKRTELTVGESIVLNCKAIHDASLDVTFYWTLKGQPIDFEEEGGHFESIRAQASSADLMIRNILLMHAGRYGCRVQTTADSVSDEAELLVRGPPGPPGIVIVEEITESTATLSWSPAADNHSPISSYNLQARSPFSLGWQTVKTVPEIITGDMESAMAVDLNPWVEYEFRVVATNPIGTGDPSTPSRMIRTNEAVPKTAPTNVSGRSGRRHELVIAWEPVSEEFQNGEGFGYIVAFRPNGTRGWKEKMVTSSEASKFIYRDESVPPLTPFEVKVGVYNNKGDGPFSQIVVICSAEGEPSAAPTDVKATSVSVSEILVAWKHIKESLGRPQGFEVGYWKDMEQEDTAETVKTRGNESFVILTGLEGNTLYHFTVRAYNGAGYGPPSSEVSATTKKSPPSQAPSNLRWEQQGSQVSLGWEPVIPLANESEVVGYKVFYRQEGHSNSQVIETQKLQAVVPLPDAGVYIIEVRAYSEGGDGTASSQIRVPSYSGGKITSAQSTLHSLSTSSSSVTLLLALMIPSTSW

SEQ ID NO: 19012 - protein, 404 aa, Homo sapiens
MHETVDGYRRYFTQIVGFFVVEDHILHVTQGLVTRAYTDELWNMALSKIIAVLRAHSSYCTDPDLVLELKNLTVIFADTLQGYGFPVNRLFDLLFEIRDQYNETLLKKWAGVFRDIFEEDNYSPIPVVNEEEYKIVISKFPFQDPDLEKQSFPKKFPMSQSVPHIYIQVKEFIYASLKFSESLHRSSTEIDDMLRKSTNLLLTRTLSSCLLNLIRKPHIGLTELVQIIINTTHLEQACKYLEDFITNITNISQETVHTTRLYGLSTFKDARHAAEGEIYTKLNQKIDEFVQLADYDWTMSEPDGRASGYLMDLINFLRSIFQVFTHLPGKVAQTACMSACQHLSTSLMQMLLDSELKQISMGAVQQFNLDVIQCEYEVLLCCPDWSQTPGLKSSSCLGIPKCWN

SEQ ID NO: 19013 - protein, 510 aa, Homo sapiens
MALRAPALLPLLLLLLPLRAAGCPAACRCYSATVECGALRLRVVPLGIPPGTQTLFLQDNNIARLEPGALAPLAALRRLYLHNNSLRALEAGAFRAQPRLLELALTSNRLRGLRSGAFVGLAQLRVLYLAGNQLARLLDFTFLHLPELHLQENSIELLEDQALAGLSSLALLDLSRNQLGTISREALQPLASLQVLRLTENPWRCDCALHWLGAWIKEGGQRLLTSRDRKIMCAEPPRLALQSLLDVSHSSLICIPPSVHVQPLELTANLGEDLRVACQASGYPQPLVTWRKVPQPREGRPRAQAQLEGGLLGLGGHSASDTGSGMLFLSNITLAHAGKYECEASNAGGAARVPFRLLVNASRQQPQQPAQPPPPAARPAGSEPRPEAGSMAFRALGVATQTAIAAAIALLALTALLLVAMICRRRRRRKKARGPPGEGALFVNDYLDGPCTFAQLEELRDERGHEMFVINRSKPLFAEGPAEAPADCGPEQGAGPGLRVPPPVAYEIHC

SEQ ID NO: 19014 - protein, 428 aa, Homo sapiens
MPHIPEDEEPPGEPQAAQSPAGQQGPPAAGVSCSPTPTIVLTGDATSPEGETDKNLANRVHSPHKRLSHRHLKVSTASLTSVDPAGHIIDLVNDQLPDISISEEDKKKNLALLEEAKLVSERFLTRRGRKSRSSPGDSPSAVSPNLSPSASPTSSRSNSLTVPTPPGLDVCSGPPSPLPGAPPQKGDEADVSSPHPGEPEHILMRNQNLVGLKLPDLSEAAEQEKGLPSELSPAIEEEESKSGLDVMPNISDVLLRKLRVHRSLPGSAPPLTEKEVENVFVQLSLAFRNDSYTLESRINQAERERNLTEENTEKELENFKASITSSASLWHHCEHRETYQKLLEDIAVLHRLAARLSSRAEVVGAVRQEKRMSKATEVMMQYVENLKRTYEKDHAELMEFKKLANQNSSRSCGPSEYASPEGQRCCGS

SEQ ID NO: 19015 - protein, 432 aa, Homo sapiens [sequence omitted]

SEQ ID NO: 19016 - protein, 272 aa, Homo sapiens
MKAAVDLKPTLTIIKTEKVDLELFPSPDMECADVPLLTPSSKEMMSQALKATFSGFTKEQQRLGIPKDPRQWTETHVRDWVMWAVNEFSLKGVDFQKFCMNGAALCALGKDCFLELAPDFVGDILWEHLEILQKEDVKPYQVNGVNPAYPESRYTSDYFISYGIEHAQCVPPSEFSEPSFITESYQTLHPISSEELLSLKYENDYPSVILRDPLQTDTLQNDYFAIKQEVVTPDNMCMGRTSRGKLGGQDSFESIESYDSCGQEMGKEEKQT

SEQ ID NO: 19017 - protein, 157 aa, Homo sapiens
WGEKKAVLAGDLILSAASIALARIGNTTVISILTQVIEDLVRGEFLQLGSKENENERFAHYLEKTFKKTASLIANSCKAVSVLGCPDPVVHEIAYQYGKNVGIAFQLIDDVLDFTSCSDQMGKPTSADLKLGLATGPVLFACQQVHCQGKTGSCCKH

SEQ ID NO: 19018 - protein, 218 aa, Homo sapiens
TGCARSEPKILTHYKRVFTSIISFDPHNNLMRPHTLNSTSMSKAYQSTFTGETNTPYSKQFVHSKSSQYRRLRTEWKNNVYLARSRIQGLGLYAAKDLEKHTMVIEYIGTIIRNEVANRREKIYEEQNRGIYMFRINNEHVIDATLTGGPARYINHSCAPNCVAEVVTFDKEDKIIIISSRRIPKGEELTYDYQFDFEDDQHKIPCHCGAWNCRKWMN

SEQ ID NO: 19019 - protein, 285 aa, Homo sapiens
MVGEGPYLISDLDQRGRRRSFAERYDPSLKTMIPVRPCARLAPNPVDDAGLLSFATFSWLTPVMVKGYRQRLTVDTLPPLSTYDSSDTNAKRFRVLWDEEVARVGPEKASLSHVVWKFQRTRVLMDIVANILCIIMAAIGPTVLIHQILQQTERTSGKVWVGIGLCIALFATEFTKVFFWALAWAINYRTAIRLKVALSTLVFENLVSFKTLTHISVGEVLNILSSDSYSLFEAALFCPLPATIPILMVFCAAYAFFILGPTALIGISVCLWPSSIQLSEGQQFW

SEQ ID NO: 19020 - protein, 300 aa, Homo sapiens
RAEEDEDKEDDFRAPLYKTVEIKGIQVRMKWCATCRFYRPPRCSHCSVCDNCVEVTGKFRGGVNPFTNGCCNNVSRVLCSSPAPRYLGRPKKEKTIVIRPPFLRPEVSDGQITVKIMDNGIQGELRRTKSKGSLEITESQSADAEPPPPPKPDLSRYTGLRTHLGLATNEDSSLLAKDSPPTPTMYKYRPGYSSSSTSAAMPHSSSAKLSRGDSLKEPTSIAESSRHPSYRSEPSLEPESFRSPTFGKSFHFDPLSSGSRSSSLKSAQGTGFELGQLQSIRSEGTTSTSYKSLANQTRNG

SEQ ID NO: 19021 - protein, 126 aa, Homo sapiens
MVNLESMHTDIKMSGDVADSTDARSTLSQVEPGNDRNGLDFNRQIKTEDLSDSLQQTLSHRPCHLSQGPAMMSGNQMSGLNASPCQDMASLHPLQQLVLVPGHLQSVSQFLLSQTQPGQQEDWRAT

SEQ ID NO: 19022 - protein, 603 aa, Homo sapiens
MADEGKSYSVSTSFFKSPTQFSSNFSLMLPSHREGSFLWIGSGVCMEMASVVKHDDERVNFPQRKKKGRGPFRWKYGEGNRRSGRGGSGIRSSRLEEDDGDVAMSDAQDGPRVRYNPYTTRPNRRGDTWHDRDRIHVTVRRDRAPPERGGAGTSQDGTSKNWFKITIPYGRKYDKAWLLSMIQSKCSVPFTPIEFHYENTRAQFFVEDASTASALKAVNYKILDRENRRISIIINSSAPPHTILNELKPEQVEQLKLIMSKRYDGSQQALDLKGLRSDPDLVAQNIDVVLNRRSCMAATLRIIEENIPELLSLNLSNNRLYRLDDMSSIVQKAPNLKILNLSGNELKSERELDKIKGLKLEELWLDGNSLCDTFRDQSTYISAIRERFPKLLRLDGHELPPPIAFDVEAPTTLPPCKGSYFGTENLKSLVLHFLQQYYAIYDSGDRQGLLDAYHDGACCSLSIPFIPQNPARSSLAEYFKDSRNVKKLKDPTLRFRLLKHTRLNVVAFLNELPKTQHDVNSFVVDISAQTSTLLCFSVNGVFKEVDGKSRDSLRAFTRTFIAVPASNSGLCIVNDELFVRNASSEEIQRAFAMPAPTPSSSPV

SEQ ID NO: 19023 - protein, 1369 aa, Homo sapiens
MSLVLNDLLICCRQLEHDRATERKKEVEKFKRLIRDPETIKHLDRHSDSKQGKYLNWDAVFRFLQKYIQKETECLRIAKPNVSASTQASRQKKMQEISSLVKYFIKCANRRAPRLKCQELLNYIMDTVKDSSNGAIYGADCSNILLKDILSVRKYWCEISQQQWLELFSVYFRLYLKPSQDVHRVLVARIIHAVTKGCCSQTDGLNSKFLDFFSKAIQCARQEKSSSGLNHILAALTIFLKTLAVNFRIRVCELGDEILPTLLYIWTQHRLNDSLKEVIIELFQLQIYIHHPKGAKTQEKGAYESTKWRSILYNLYDLLVNEISHIGSRGKYSSGFRNIAVKENLIELMADICHQVFNEDTRSLEISQSYTTTQRESSDYSVPCKRKKIELGWEVIKDHLQKSQNDFDLVPWLQIATQLISKYPASLPNCELSPLLMILSQLLPQQRHGERTPYVLRCLTEVALCQDKRSNLESSQKSDLLKLWNKIWCITFRGISSEQIQAENFGLLGAIIQGSLVEVDREFWKLFTGSACRPSCPAVCCLTLALTTSIVPGTVKMGIEQNMCEVNRSFSLKESIMKWLLFYQLEGDLENSTEVPPILHSNFPHLVLEKILVSLTMKNCKAAMNFFQSVPECEHHQKDKEELSFSEVEELFLQTTFDKMDFLTIVRECGIEKHQSSIGFSVHQNLKESLDRCLLGLSEQLLNNYSSEITNSETLVRCSRLLVGVLGCYCYMGVIAEEEAYKSELFQKAKSLMQCAGESITLFKNKTNEEFRIGSLRNMMQLCTRCLSNCTKKSPNKIASGFFLRLLTSKLMNDIADICKSLASFIKKPFDRGEVESMEDDTNGNLMEVEDQSSMNLFNDYPDSSVSDANEPGESQSTIGAINPLAEEYLSKQDLLFLDMLKFLCLCVTTAQTNTVSFRAADIRRKLLMLIDSSTLEPTKSLHLHMYLMLLKELPGEEYPLPMEDVLELLKPLSNVCSLYRRDQDVCKTILNHVLHVVKNLGQSNMDSENTRDAQGQFLTVIGAFWHLTKERKYIFSVRMALVNCLKTLLEADPYSKWAILNVMGKDFPVNEVFTQFLADNHHQVRMLAAESINRLFQDTKGDSSRLLKALPLKLQQTAFENAYLKAQEGMREMSHSAENPETLDEIYNRKSVLLTLIAVVLSCSPICEKQALFALCKSVKENGLEPHLVKKVLEKVSETFGYRRLEDFMASHLDYLVLEWLNLQDTEYNLSSFPFILLNYTNIEDFYRSCYKVLIPHLVIRSHFDEVKSIANQIQEDWKSLLTDCFPKILVNILPYFAYEGTRDSGMAQQRETATKVYDMLKSENLLGKQIDHLFISNLPEIVVELLMTLHEPANSSASQSTDLCDFS

SEQ ID NO: 19024 - protein, 690 aa, Homo sapiens
MSAQSLLHSVFSCSSPASSSAASAKGFSKRKLRQTRSLDPALIGGCGSDEAGAEGSARGATAGRLYSPSLPAESLGPRLASSSRGPPPRATRLPPPGPLCSSFSTPSTPQEKSPSGSFHFDYEVPLGRGGLKKSMAWDLPSVLAGPASSRSASSILCSSGGGPNGIFASPRRWLQQRKFQSPPDSRGHPYVVWKSELELYDLQILGTKPPMNSDTHRNFDPTATLRNQGDFTWNSMSGRSVRLRSVPIQSLSELERARLQEVAFYQLQQDCDLSCQITIPKDGQKRKKSLRKKLDSLGKEKNKDKEFIPQAFGMPLSQVIANDRAYKLKQDLQRDEQKDASDFVASLLPFGNKRQNKELSSSNSSLSSTSETPNESTSPNTPEPAPRARRRGAMSVDSITDLDDNQSRLLEALQLSLPAEAQSKKEKARDKKLSLNPIYRQVPRLVDSCCQHLEKHGLQTVGIFRVGSSKKRVRQLREEFDRGIDVSLEEEHSVHDVAALLKEFLRDMPDPLLTRELYTAFINTLLLEPEEQLGTLQLLIYLLPPCNCDTLHRLLQFLSIVARHADDNISKDGQEVTGNKMTSLNLATIFGPNLLHKQKSSDKEFSVQSSARAEESTAIIAVVQKMIENYEALFMVPPDLQNEVLISLLETDPDVVDYLLRRKASQSSTSSVLPAAVQACPQYPASMFTP

SEQ ID NO: 19025 - protein, 85 aa, Homo sapiens
MMAVEQMPKKDWYSILGADPSANISDLKQKYQKLILMYHPDKQSTDVPAGTVEECVQKFIEIDQAWKILGNEETKREYDLQRCGS

SEQ ID NO: 19026 - protein, 723 aa, Homo sapiens
MCSGRFQNIQVNPDFPRGRISNSFRRTSSTENKTKTLGKLHQEPRQLQSDGKRKILLEELANSDPKLALTGVPIVQWPKRDKLKFPTRPKVRVPTIPITKPHTMKPAPRLTPVRPAAASPIVSGARRRRVRCRKCKACVQGECGVCHYCRDMKKFGGPGRMKQSCVLRQCLAPRLPHSVTCSLCGEVDQNEETQDFEKKLMECCICNEIVHPGCLQMDGEGLLNEELPNCWECPKCYQEDSSEKAQKRKMEESDEEAVQAKVLRPLRSCDEPLTPPPHSPTSMLQLIHDPVSPRGMVTRSSPGAGPSDHHSASRDERFKRRQLLRLQATERTMVREKENNPSGKKELSEVEKAKIRGSYLTVTLQRPTKELHGTSIVPKLQAITASSANLRHSPRVLVQHCPARTPQRGDEEGLGGEEEEEEEEEEEDDSAEEGGAARLNGRGSWAQDGDESWMQREVWMSVFRYLSRRELCECMRVCKTWYKWCCDKRLWTKIDLSRCKAIVPQALSGIIKRQPVSLDLSWTNISKKQLTWLVNRLPGLKDLLLAGCSWSAVSALSTSSCPLLRTLDLRWAVGIKDPQIRDLLTPPADKPGQDNRSKLRNMTDFRLAGLDITDATLRLIIRHMPLLSRLDLSHCSHLTDQSSNLLTAVGSSTRYSLTELNMAGCNKLTDQTLIYLRRIANVTLIDLRGCKQITRKACEHFISDLSINSLYCLSDEKLIQKIS

SEQ ID NO: 19027 - protein, 527 aa, Homo sapiens
MPGVANSGPSTSSRETANPCSRKKVHFGSIHDAVRAGDVKQLSEIVVRGASINELDVLHKFTPLHWAAHSGSLECLHWLLWHGADITHVTTRGWTASHIAAIRGQDACVQALIMNGANLTAQDDRGCTPLHLAATHGHSFTLQIMLRSGVDPSVTDKREWRPVHYAAFHGRLGCLQLLVKWGCSIEDVDYNGNLPVHLAAMEGHLHCFKFLVSRMSSATQVLKAFNDNGENVLDLAQRFFKQNILQFIQGAEYEGKDLEDQETLAFPGHVAAFKGDLGMLKKLVEDGVININERADNGSTPMHKAAGQGHIECLQWLIKMGADSNITNKAGERPSDVAKRFAHLAAVKLLEELQKYDIDDENEIDENDVKYFIRHGVEGSTDAKDDLCLSDLDKTDARMRAYKKIVELRHLLEIAESNYKHLGGITEEDLKQKKEQLESEKTIKELQGQLEYERLRREKLECQLDEYRAEVDQLRETLEKIQVPNFVAMVGVLFNTFIFLKKYIQEWPRVQALGWGSLDLNPGYSLF

SEQ ID NO: 19028 - protein, 840 aa, Homo sapiens
MDYHEDDKRFRREEYEGNLLEAGLELERDEDTKIHGVGFVKIHAPWNVLCREAEFLKLKMPTKKMYHINETRGLLKKINSVLQKITDPIQPKVAEHRPQTMKRLSYPFSREKQHLFDLSDKDSFFDSKTRSTIVYEILKRTTCTKAKYSMGITSLLANGVYAAAYPLHDGDYNGENVEFNDRKLLYEEWARYGVFYKYQPIDLVRKYFGEKIGLYFAWLGVYTQMLIPASIVGIIVFLYGCATMDENIPSMEMCDQRHNITMCPLCDKTCSYWKMSSACATARASHLFDNPATVFFSVFMALWAATFMEHWKRKQMRLNYRWDLTGFEEEEDHPRAEYEARVLEKSLKKESRNKETDKVKLTWRDRFPAYLTNLVSIIFMIAVTFAIVLGVIIYRISMAAALAMNSSPSVRSNIRVTVTATAVIINLVVIILLDEVYGCIARWLTKIEVPKTEKSFEERLIFKAFLLKFVNSYTPIFYVAFFKGRFVGRPGDYVYIFRSFRMEECAPGGCLMELCIQLSIIMLGKQLIQNNLFEIGIPKMKKLIRYLKLKQQSPPDHEECVKRKQRYEVDYNLEPFAGLTPEYMEMIIQFGFVTLFVASFPLAPLFALLNNIIEIRLDAKKFVTELRRPVAVRAKDIGIWYNILRGIGKLAVIINAFVISFTSDFIPRLVYLYMYSKNGTMHGFVNHTLSSFNVSDFQNGTAPNDPLDLGYEVQICRYKDYREPPWSENKYDISKDFWAVLAARLAFVIVFQNLVMFMSDFVDWVIPDIPKDISQQIHKEKVLMVELFMREEQDKQQLLETWMEKERQKDEPPCNHHNTKACPDSLGSPAPSHAYHGGVL

SEQ ID NO: 19029 - protein, 532 aa, Homo sapiens
MERDSHGNASPARTPSAGASPAQASPAGTPPGRASPAQASPAQASPAGTPPGRASPAQASPAGTPPGRASPGRASPAQASPAQASPARASPALASLSRSSSGRSSSARSASVTTSPTRVYLVRATPVGAVPIRSSPARSAPATRATRESPVQFWQGHTGIRYKEQRESCPKHAVRCDGVVDCKLKSDELGCVRFDWDKSLLKIYSGSSHQWLPICSSNWNDSYSEKTCQQLGFESAHRTTEVAHRDFANSFSILRYNSTIQESLHRSECPSQRYISLQCSHCGLRAMTGRIVGGALASDSKWPWQVSLHFGTTHICGGTLIDAQWVLTAAHCFFVTREKVLEGWKVYAGTSNLHQLPEAASIAEIIINSNYTDEEDDYDIALMRLSKPLTLSAHIHPACLPMHGQTFSLNETCWITGFGKTRETDDKTSPFLREVQVNLIDFKKCNDYLVYDSYLTPRMMCAGDLRGGRDSCQGDSGGPLVCEQNNRWYLAGVTSWGTGCGQRNKPGVYTKVTEVLPWIYSKMESEVRFRKS

SEQ ID NO: 19030 - protein, 1124 aa, Homo sapiens
QSPVGRHVVGVKGVGGMSVACVLKRKAVLWQDSFSPHLKHHPQEPANPNMPVVLTSGTGSQAQPQPAANQALAAGTHSSPVPGSIGVAGRSQDDAMVDYFFQRQHGEQLGGGGSGGGGYNNSKHRWPTGDNIHAEHQVRSMDELNHDFQALALEGRAMGEQLLPGKKFWETDESSKDGPKGIFLGDQWRDSAWGTSDHSVSQPIMVQRRPGQSFHVNSEVNSVLSPRSESGGLGVSMVEYVLSSSPGDSCLRKGGFGPRDADSDENDKGEKKNKGTFDGDKLGDLKEEGDVMDKTNGLPVQNGIDADVKDFSRTPGNCQNSANEVDLLGPNQNGSEGLAQLTSTNGAKPVEDFSNMESQSVPLDPMEHVGMEPLQFDYSGTQVPVDSAAATVGLFDYNSQQQLFQRPNALAVQQLTAAQQQQYALAAAHQPHIAGLAPAAFVPNPYIISAAPPGTDPYTAGLAAAATLGPAVVPHQYYGVTPWGVYPASLFQQQAAAAAAATNSANQQTTPQAQQGQQQVLRGGASQRPLTPNQNQQGQQTDPLVAAAAVNSALAFGQGLAAGMPGYPVLAPAAYYDQTGALVVNAGARNGLGAPVRLVAPAPVIISSSAAQAAVAAAAASANGAAGGLAGTTNGPFRPLGTQQPQPQPQQQPNNNLASSSFYGNNSLNSNSQSSSLFSQGSAQPANTSLGFGSSSSLGATLGSALGGFGTAGGLTNGSGRYISAAPGAEAKYRSASSASSLFSPSSTLFSSSRLRYGMSDVMPSGRSRLLEDFRNNRYPNLQLREIAGHIMEFSQDQHGSRFIQLKLERATPAERQLVFNEILQAAYQLMVDVFGNYVIQKFFEFGSLEQKLALAERIRGHVLSLALQMYGCRVIQKALEFIPSDQQNEMVRELDGHVLKCVKDQNGNHVVQKCIECVQPQSLQFIIDAFKGQVFALSTHPYGCRVIQRILEHCLPDQTLPILEELHQHTEQLVQDQYGNYVIQHVLEHGRPEDKSKIVAEIRGNVLVLSQHKFASNVVEKCVTHASRTERAVLIDEVCTMNDGPHSALYTMMKDQYANYVVQKMIDVAEPGQRKIVMHKIRPHIATLRKYTYGKHILAKLEKYYMKNGVDLGPICGPPNGII

SEQ ID NO: 19031 - protein, 610 aa, Homo sapiens
MAGAQTLLTFRDVAIEFSLEEWKCLDLAQQNLYRDVMLENYRNLFSVGLTVCKPGLITCLEQRKEPWNVKRQEAADGHPEMGFHHATQACLELLGSSDLPASASQSAGITGVNHRAQPGLNVSVDKFTAMSSHFTQDLLPEQGIQDAFPKRILRGYGNCGLDNLYLRKDWESLDECKLQKDYNGLNQCSSTTHSKIFQYNKYVKIFDNFSNLHRRNISNTGEKPFKCQECGKSFQMLSFLTEHQKIHTGKKFQKCGECGKTFIQCSHFTEPENIDTGEKPYKCQECNNVIKTCSVLTKNRIYAGGEHYRCEEFGKVFNQCSHLTEHEHGTEEKPCKYEECSSVFISCSSLSNQQMILAGEKLSKCETWYKGFNHSPNPSKHQRNEIGGKPFKCEECDSIFKWFSDLTKHKRIHTGEKPYKCDECGKAYTQSSHLSEHRRIHTGEKPYQCEECGKVFRTCSSLSNHKRTHSEEKPYTCEECGNIFKQLSDLTKHKKTHTGEKPYKCDECGKNFTQSSNLIVHKRIHTGEKPYKCEECGRVFMWFSDITKHKKTHTGEKPYKCDECGKNFTQSSNLIVHKRIHTGEKPYKCEKCGKAFTQFSHLTVHESIHT

SEQ ID NO: 19032 - protein, 598 aa, Homo sapiens
MAFSGIYKLDDGKPYLNNCFPARNLLRVPEEGQGHWLVVQKGNLKKKPKGLVGAQAERRESLKATSFEFKGKKESRRENQVDLPGHILDQAFLLKHHCVRKPSDLCTINAKENDFKHFHSVIYINASENLLPLEAFHTFPALKELDLAFNGIKTIYVKYGDFKLLEFLDLSFNSLTVEAICDLGILPHLRVLLLTGNGLTSLPPNLAVAEQEASVTSLTSKRYILRFPALETLMLDDNRLSNPSCFASLAGLRRLKKLSLDENRIIRIPYLQQVQLYDESVDWNGGRGSPHKEPQFMLQSKPRMLEDSDEQLDYTVLPMKKDVDRTGVPPLLKSFLQERLGIHLIRRKIVKPKHHVLMSRKESWKVKSEIPKVPKQPLVLHHPRMTTTKSPSKDMLEPEAELAEDLPTTKSTSVESEMPTENLEGHSPSCRTFVPLPPICSNSTVHSEETLSHLSDTTVRLSPERPSDEDSKSTESIFLTQVSELPSSVIHKDDLELKEKDQKKPPTAPREVKGTRRKLPTAFLPSKYHGYEELLTAKPDPAFIEPKGIQKNAQALQQMLKHPLLCHSSKPKLDTLQKPYVHKEKRVLSCTSGQNGGW

SEQ ID NO: 19033 - protein, 276 aa, Homo sapiens
MVLLKLLEVYRKGSAGTFHKSTIFGNTIMTSQPVPNETIIVLPSNVINFSQAEKPEPTNQGQDSLKKHLHAEIKVIGTIQILCGMMVLSLGIILASASFSPNFTQVTSTLLNSAYPFIGPFFFIISGSLSIATEKRLTKLLVHSSLVGSILSALSALVGFIILSVKQATLNPASLQCELDKNNIPTRSYVSYFYHDSLYTTDCYTAKASLAGTLSLMLICTLLEFCLAVLTAVLRWKQAYSDFPGSVLFLPHSYIGNSGMSSKMTHDCGYEELLTS

SEQ ID NO: 19034 - protein, 852 aa, Homo sapiens
MFFACYCALRTNVKKYRYQDEDAPHDHSLPRLTHEVRGPELVHVSEKNLSQIENVHGYVLQSHISPLKASPAPIIVNTDTLDTIPYVNGTEIEYEFEEITLERGNSGLGFSIAGGTDNPHIGDDPGIFITKIIPGGAAAEDGRLRVNDCILRVNEVDVSEVSHSKAVEALKEAGSIVRLYVRRRRPILETVVEIKLFKGPKGLGFSIAGGVGNQHIPGDNSIYVTKIIDGGAAQKDGRLQVGDRLLMVNNYSLEEVTHEEAVAILKNTSEVVYLKVGKPTTIYMTDPYGPPDITHSYSPPMENHLLSGNNGTLEYKTSLPPISPGRYSPIPKHMLVDDDYTRPPEPVYSTVNKLCDKPASPRHYSPVECDKSFLLSAPYSHYHLGLLPDSEMTSHSQHSTATRQPSMTLQRAVSLEGEPRKVVLHKGSTGLGFNIVGGEDGEGIFVSFILAGGPADLSGELQRGDQILSVNGIDLRGASHEQAAAALKGAGQTVTIIAQYQPEDYARFEAKIHDLREQMMNHSMSSGSGSLRTNQKRSLYVRAMFDYDKSKDSGLPSQGLSFKYGDILHVINASDDEWWQARRVMLEGDSEEMGVIPSKRRVERKERARLKTVKFNAKPGVIDSKGDIPGLGDDGYGTKTLRGQEDLILSYEPVTRQEINYTRPVIILGPMKDRINDDLISEFPDKFGSCVPHTTRPKRDYEVDGRDYHFVISREQMEKDIQEHKFIEAGQYNDNLYGTSVQSVRFVAERGKHCILDVSGNAIKRLQVAQLYPIAIFIKPRSLEPLMEMNKRLTEEQAKKTYDRAIKLEQEFGEYFTAIVQGDTLEDIYNQCKLVIEEQSGPFIWIPSKEKL

SEQ ID NO: 19035 - protein, 1203 aa, Homo sapiens
MSQAGDVEGPSTGDPVLSPQHNCELLQNMEGASSMPGLSPDGPGASSGPGVRAGSRRKIPRKEALRGGSSRAAGAAEVRPGVLELLAVVQSRGSMLAPGLHMQLPSVPTQGRALTSKRLQVSLCDILDDSCPRKLCSRSAGLPERALACRERLAGVEEVSCLRPREARDGGMSSPGCDRRSPTLSKEEPPGRPLTSSPDPVPVRVRKKWRRQGAHSECEEGAGDFLWLDQSPRGDNLLSVGDPPQVADLESLGGPCRPPSPKDTGSGPGEPGGSGAGCASGTEKFGYLPATGDGPQPGSPCGPVGFPVPSGGESLSSAAQAPPQSAALCLGASAQASAEQQEAVCVVRTGSDEGQAPAQDQEELEAKAQPASRGRLEQGLAAPADTCASSREPLGGLSSSLDTEASRACSGPFMEQRRSKGTKNLKKGPVPCAQDRGTDRSSDNSHQDRPEEPSPGGCPRLEEVKIPHGVKLVCYLGSGPVIQLLGAISHGQAGGQLPPKLEVLEDLMEVSSPSPAQRLRRKKRPMVQGPAGCQVFQPSPSGGTAGDPGGLSDPFYPPRSGSLALGDPSSDPACSQSGPMEAEEDSLPEQPEDSAQLQQEKPSLYIGVRGTVVRSMQEVLWTRLRELPDPVLSEEVVEGIAAGIEAALWDLTQGTNGRYKTKYRSLLFNLRDPRNLDLFLKVVHGDVTPYDLVRMSSMQLAPQELARWRDQEEKRGLNIIEQQQKEPCRLPASKMTHKGEVEIQRDMDQTLTLEDLVGPQMFMDCSPQALPIASEDTTGQHDHHFLDPNCHICKDWEPSNELLGSFEAAKSCGDNIFQKALSQTPMPAPEMPKTRELSPTEPQDRVPPSGLHVPAAPTKALPCLPPWEGVLDMFSIKRFRARAQLVSGHSCRLVQALPTVIRSAGCIPSNIVWDLLASICPAKAKDVCVVRLCPHGARDTQNCRLLYSYLNDRQRHGLASVEHMGMVLLPLPAFQPLPTRLRPLGGPGLEVTHSSLLLAVLLPKEGLPDTAGSSPWLGKVQKMVSFNSKVEKRYYQPDDRRPNVPLKGTPPPGGAWQQSQGRGSIAPRGISAWQRPPRGRGRLWPEPENWQHPGRGQWPPEPGLRQSQHPYSVAPAGHGFGRGQHFHRDSCPHQALLRHLESLATMSHQLQALLCPQTKSSIPRPLQRLSSALAAPEPPGPARDSSLGPTDEAGSECPFPRKA

SEQ ID NO: 19036 - protein, 331 aa, Homo sapiens
MAGQGLPLHVATLLTGLLECLGFAGVLFGWPSLVFVFKNEDYFKDLCGPDAGPIGNATGQADCKAQDERFSLIFTLGSFMNNFMTFPTGYIFDRFKTTVARLIAIFFYTTATLIIAFTSAGSAVLLFLAMPMLTIGGILFLITNLQIGNLFGQHRSTIITLYNGAFDSSSAVFLIIKLLYEKGISLRASFIFISVCSTWHVARTFLLMPRGHIPYPLPPNYSYGLCPGNGTTKEEKETAEHENRELQSKEFLSAKEETPGAGQKQELRSFWSYAFSRRFAWHLVWLSVIQLWHYLFIGTLNSLLTNMAGGDMARVSTYTNAFAFTQFGVLC

SEQ ID NO: 19037 - protein, 349 aa, Homo sapiens
GYPQGPYPQEGYPQGPYPQGGYPQGPYPQSPFPPNPYGQPQVFPGQDPDSPQHGNYQEEGPPSYYDNQDFPATNWDDKSIRQAFIRKVFLVLTLQLSVTLSTVSVFTFVAEVKGFVRENVWTYYVSYAVFFISLIVLSCCGDFRRKHPWNLVALVTPKPEPLCLGPAMQSHTPTLPGLVTVVLLVLMRQGPAGVAWGHTPKVSLCLPTAVGPDRQPVVHGGDDRQLLQHRGSHHGRGHHHSRLLHRRHLLHADPLRLHLMHGRAPGEHGGALHLRHSLHLHPEPHPGDRVRLTGRSALHLLPRSGHPAATGEQAAVPEPRRVCVCCAEPVHRHHQHLPVHPHHHWPRQG

SEQ ID NO: 19038 - protein, 360 aa, Homo sapiens
MDKLDANVSSEEGFGSVEKVVLLTFLSTVILMAILGNLLVMVAVCWDRQLRKIKTNYFIVSLAFADLLVSVLVMPFGAIELVQDIWIYGEVFCLVRTSLDVLLTTASIFHLCCISLDRYYAICCQPLVYRNKMTPLRIALMLGGCWVIPTFISFLPIMQGWNNIGIIDLIEKRKFNQNSNSTYCVFMVNKPYAITCSVVAFYIPFLLMVLAYYRIYVTAKEHAHQIQMLQRAGASSESRPQSADQHSTHRMRTETKAAKTLCIIMGCFCLCWAPFFVTNIVDPFIDYTVPGQVWTAFLWLGYINSGLNPFLYAFLNKSFRRAFLIILCCDDERYRRPSILGQTVPCSTTTINGSTHVLRF

SEQ ID NO: 19039 - protein, 223 aa, Homo sapiens
MTVLIKRNTTIPTKQTQTFTTYSDNQPGVLIQVYEGERAMTKDNNLLGKFELTGIPPAPRGVPQIEVTFDIDANGILNVSAVDKSTGKENKITITNDKGRLSKEDIERMVQEAEKYKAEDEKQRDKVSSKNSLESYAFNMKATVEDEKLQGKINDEDKQKILDKCNEIINWLDKNQTAEKEEFEHQQKELEKVCNPIITKLYQSAGGMPGGMPGGFPGGGAPP

SEQ ID NO: 19040 - protein, 357 aa, Homo sapiens
MLEMLEYNHYQVQTHLENPTKYHIQQAQRQQGFYKFEEQNRAESECPGMNTHSRASCMQMDDVIDDIISLESSYNEEILGLMDPALQMANTLPVSGNLIDLYGNQGLPPPGLTISNSCPANLPNIKRELTESEARALAKERQKKDNHNLIERRRRFNINDRIKELGTLIPKSNDPDMRWNKGTILKASVDYIRKLQREQQRAKELENRQKKLEHANRHLLLRIQELEMQARAHGLSLIPSTGLCSPDLVNRIIKQEPVLENCSQDLLQHHADLTCTTTLDLTDGTITFNNNLGTGTEANQAYSVPTKMGSKLEDILMDDTLSPVGVTDPLLSSVSPGASKTSSRRSSMSMEETEHTC

SEQ ID NO: 19041 - protein, 393 aa, Homo sapiens
MMLRGNLKQVRIEKNPARLRALESAVGESEPAAAAAMALALAGEPAPPAPAPPEDHPDEEMGFTIDIKSFLKPGEKTYTQRCRLFVGNLPTDITEEDFKRLFERYGEPSEVFINRDRGFGFIRLESRTLAEIAKAELDGTILKSRPLRIRFATHGAALTVKNLSPVVSNELLEQAFSQFGPVEKAVVVVDDRGRATGKGFVEFAAKPPARKALERCGDGAFLLTTTPRPVIVEPMEQFDDEDGLPEKLMQKTQQYHKEREQPPRFAQPGTFEFEYASRWKALDEMEKQQREQVDRNIREAKEKLEAEMEAARHEHQLMLMRQDLMRRQEELRRLEELRNQELQKRKQIQLRHEEEHRRREEEMIRHREQEELRRQQEGFKPNYMENGDKRKCG

SEQ ID NO: 19042 - protein, 551 aa, Homo sapiens
MSCEDGRALEGTLSELAAETDLPVVFVKQRKIGGHGPTLKAYQEGRLQKLLKMNGPEDLPKSYDYDLIIIGGGSGGLAAAKEAAQYGKKVMVLDFVTPTPLGTRWGLGGTCVNVGCIPKKLMHQAALLGQALQDSRNYGWKVEETVKHDWDRMIEAVQNHIGSLNWGYRVALREKKVVYENAYGQFIGPHRIKATNNKGKEKIYSAERFLIATGERPRYLGIPGDKEYCISSDDLFSLPYCPGKTLVVGASYVALECAGFLAGIGLDVTVMVRSILLRGFDQDMANKIGEHMEEHGIKFIRQFVPIKVEQIEAGTPGRLRVVAQSTNSEEIIEGEYNTVMLAIGRDACTRKIGLETVGVKINEKTGKIPVTDEEQTNVPYIYAIGDILEDKVELTPVAIQAGRLLAQRLYAGSTVKCDYENVPTTVFTPLEYGACGLSEEKAVEKFGEENIEVYHSYFWPLEWTIPSRDNNKCYAKIICNTKDNERVVGFHVLGPNAGEVTQGFAAALKCGLTKKQLDSTIGIHPVCAEVFTTLSVTKRSGASILQAGCUG

SEQ ID NO: 19043 - protein, 2002 aa, Homo sapiens
MFNLMKKDKDKDGGRKEKKEKKEKKERMSAAELRSLEEMSLRRGFFNLNRSSKRESKTRLEISNPIPIKVASGSDLHLTDIDSDSNRGSVILDSGHLSTASSSDDLKGEEGSFRGSVLQRAAKFGSLAKQNSQMIVKRFSFSQRSRDESASETSTPSEHSAAPSPQVEVRTLEGQLVQHPGPGIPRPGHRSRAPELVTKKFPVDLRLPPVVPLPPPTLRELELQRRPTGDFGFSLRRTTMLDRGPEGQACRRVVHFAEPGAGTKDLALGLVPGDRLVEINGHNVESKSRDEIVEMIRQSGDSVRLKVQPIPELSELSRSWLRSGEGPRREPSDAKTEEQIAAEEAWNETEKVWLVHRDGFSLASQLKSEELNLPEGKVRVKLDHDGAILDVDEDDVEKANAPSCDRLEDLASLVYLNESSVLHTLRQRYGASLLHTYAGPSLLVLGPRGAPAVYSEKVMHMFKGCRREDMAPHIYAVAQTAYRAMLMSRQDQSIILLGSSGSGKTTSCQHLVQYLATIAGISGNKVFSVEKWQALYTLLEAFGNSPTIINGNATRFSQILSLDFDQAGQVASASIQTMLLEKLRVARRPASEATFNVFYYLLACGDGTLRTELHLNHLAENNVFGIVPLAKPEEKQKAAQQFSKLQAAMKVLGISPDEQKACWFILAAIYHLGAAGATKEAAEAGRKQFARHEWAQKAAYLLGCSLEELSSAIFKHQHKGGTLQRSTSFRQGPEESGLGDGTGPKLSALECLEGMAAGLYSELFTLLVSLVNRALKSSQHSLCSMMIVDTPGFQNPEQGGSARGASFEELCHNYTQDRLQRLFHERTFVQELERYKEENIELAFDDLEPPTDDSVAAVDQASHQSLVRSLARTDEARGLLWLLEEEALVPGASEDTLLERLFSYYGPQEGDKKGQSPLLHSSKPHHFLLGHSHGTNWVEYNVTGWLNYTKQNPATQNAPRLLQDSQKKIISNLFLGRAGSATVLSGSIAGLEGGSQLALRRATSMRKTFTTGMAAVKKKSLCIQMKLQVDALIDTIKKSKLHFVHCFLPVAEGWAGEPRSASSRRVSSSSELDLPSGDHCEAGLLQLDVPLLRTQLRGSRLLDAMRMYRQGYPDHMVFSEFRRRFDVLAPHLTKKHGRNYIVVDERRAVEELLECLDLEKSSCCMGLSRVFFRAGTLARLEEQRDEQTSRNLTLFQAACRGYLARQHFKKRKIQDLAIRCVQKNIKKNKGVKDWPWWKLFTTVRPLIEVQLSEEQIRNKDEEIQQLRSKLEKAEKERNELRLNSDRLESRISELTSELTDERNTGESASQLLDAETAERLRAEKEMKELQTQYDALKKQMEVMEMEVMEARLIRAAEINGEVDDDDAGGEWRLKYERAVREVDFTKKRLQQEFEDKLEVEQQNKRQLERRLGDLQADSEESQRALQQLKKKCQRLTAELQDTKLHLEGQQVRNHELEKKQRRFDSELSQAHEEAQREKLQREKLQREKDMLLAEAFSLKQQLEEKDMDIAGFTQKVVSLEAELQDISSQESKDEASLAKVKKQLRDLEAKVKDQEEELDEQAGTIQMLEQLKQMEVQLEEEYEDKQKVLREKRELEGKLATLSDQVNRRDFESEKRLRKDLKRTKALLADAQLMLDHLKNSAPSKREIAQLKNQLEESEFTCAAAVKARKAMEVEIEDLHLQIDDIAKAKTALEEQLSRLQREKNEIQNRLEEDQEDMNELMKKHKAAVAQASRDLAQINDLQAQLEEANKEKQELQEKLQALQSQVEFLEQSMVDKSLVSRQEAKIRELETRLEFERTQVKRLESLASRLKENMEKLTEERDQRIAAENREKEQNKRLQRQLRDTKEEMGELARKEAEASRKKHELEMDLESLEAANQSLQADLKLAFKRIGDLQAAIEDEMESDENEDLINSEGDSDVDSELEDRVDGVKSWLSKNKGPSKAASDDGSLKSSSPTSYWKSLAPDRSDDEHDPLDNTSRPRYSHSYLSDSDTEAKLTETNA

SEQ ID NO: 19044 - protein, 73 aa, Homo sapiens
MNRPAPVEISYENMRFLITHNPTNATLNKFTEELKKYGVTTLVRVCDATYDKAPVEKEGIHVLGTCAGCTCFD

SEQ ID NO: 19045 - protein, 366 aa, Homo sapiens
MPRYGASLRQSCPRSGREQGQDGTAGAPGLLWMGLVLALALALALALALSDSRVLWAPAEAHPLSPQGHPARLHRIVPRLRDVFGWGNLTCPICKGLFTAINLGLKKEPNVARVGSVAIKLCNLLKIAPPAVCQSIVHLFEDDMVEVWRRSVLSPSEACGLLLGSTCGHWDIFSSWNISLPTVPKPPPKPPSPPAPGAPVSRILFLTDLHWDHDYLEGTDPDCADPLCCRRGSGLPPASRPGAGYWGEYSKCDLPLRTLESLLSGLGPAGPFDMVYWTGDIPAHDVWHQTRQDQLRALTTVTALVRKFLGPVPVYPAVGNHESTPVNSFPPPFIEGNHSSRWLYEAMAKAWEPWLPAEALRTLRCI

SEQ ID NO: 19046 - protein, 245 aa, Homo sapiens
TGNFFYNYMMGIEFNPRIGKWFDFKLFFNGRPGIVAWTLINLSFAAKQRELHSHVTNAMVLVNVLQAIYVIDFFWNETWYLKTIDICHDHFGWYLGWGDCVWLPYLYTLQKRTRRQGVCQRQSWGLTPGRWAPEPTLLSSPWAKHRLTPSPSPPRVCTWCTTPCSCPPRTPWASCCWAWWATTSSGWPTTRRTCSAARMGAASSGAGSPRSSSAPTHPPMGRGTTASCWCRASGAWPATSTTSAT

SEQ ID NO: 19047 - protein, 323 aa, Homo sapiens
MAQFYYKRNVNAPYRDRIPLRIVRAESELSPSEKAYLNAVEKGDYASVKKSLEEAEIYFKININCIDPLGRTALLIAIENENLELIELLLSFNVYVGDALLHAIRKEVVGAVELLLNHKKPSGEKQVPPILLDKQFSEFTPDITPIILAAHTNNYEIIKLLVQKGVSVPRPHEVRCNCVECVSSSDVDSLRHSRSRLNIYKALASPSLIALSSEDPFLTAFQLSWELQELSKVENEFKSEYEELSRQCKQFAKDLLDQTRSSRELEIILNYRDDNSLIEEQSGNDLARLKLAIKYRQKEASYGEKLNRCGMADFRTTSMIGGI

SEQ ID NO: 19048 - protein, 357 aa, Homo sapiens
MGIKVQRPRCFFDIAINNQPAGRVVFELFSDVCPKTCENFRCLCTGEKGTGKSTQKPLHYKSCLFHRVVKDFMVQGGDFSEGNGRGGESIYGGFFEDESFAVKHNKEFLLSMANRGKDTNGSQFFITTKPTPHLDGHHVVFGQVISGQEVVREIENQKTDAASKPFAEVRILSCGELIPKSKVKKEEKKRHKSSSSSSSSSSDSDSSSDSQSSSDSSDSESATEEKSKKRKKKHRKNSRKHKKEKKKRKKSKKSASSESEAENLEAQPQSTVRPEEIPPIPENRFLMRKSPPKADEKERKNRERERERECNPPNSQPASYQRRLLVTRSGRKIKGRGPRVGDSFPRDLHNIAFVFLK

SEQ ID NO: 19049 - protein, 545 aa, Homo sapiens
MNELPRDTCGNHTNQLDGTKEERELPRVIKTSGSMPDDASLNSTTLSDASQDKEGSFAVPRSDSVAILETIPVLPVHSNGSPEPGQPVQNAISDDDFLEKNIPPEAEELSFEVSYSEMVTEALKRNKLKKSEIKKEDYVLTKFNVQKTRFGLTEAGDLSAEDMKKIRHLSLIELTAFFDAFGIQLKRNKTEKVKGRDNGIFGVPLTVLLDGDRKKDPGVKVPLVLQKFFEKVEESGLESEGIFRLSGCTAKVKQYREELDAKFNADKFKWDKMCHREAAVMLKAFFRELPTSLFPVEYIPAFISLMERGPHVKVQFQALHLMVMALPDANRDAAQALMTFFNKVIANESKNRMSLWNISTVMAPNLFFSRSKHSDYEELLLANTAAHIIRLMLKYQKILWKVPSFLITQVRRMNEATMLLKKQLPSVRKLLRRKTLERETASPKTSKVLQKSPSARRMSDVPEGVIRVHAPLLSKVSMAIQLNNQTKAKDILAKFQYENRILHWQRAALSFLNGKWVKKEREESTETNRSPKHVFLFTIGLDIST

SEQ ID NO: 19050 - protein, 219 aa, Homo sapiens
MAPRRARGCRTLGLPALLLLLLLRPPATRGITCPPPMSVEHADIWVKSYSLYSRERYICNSGFKRKAGTSSLTECVLNKATNVAHWTTPSLKCIKPAASSPSSNNTAATTAAIVPGSQLMPSKSPSTGTTEISSHESSHGTPSQTTAKNWELTASASHQPPGVYPQGHSDTTVAISTSTVLLCGLSAVSLLACYLKSRASVCSCHPRSAGHTCSVGSVC

SEQ ID NO: 19051 - protein, 360 aa, Homo sapiens
MLKDSGPLFNTDYDILKSNLQNCSKFSAIQCAAAVPRAPAESSSSSKKFEQSHLHMSSETQANNELTTNGHGPPASKQVSQQPKGIMGMFASKAAAKTQETNKETKTEAKEVTNASAAGNKAPGKGNMMSNFFGKAAMNKFKVNLDSEQAVKEEKIVEQPTVSVTEPKLATPAGLKKSSKKAEPVKVLQKEKKRGKRVALSDDETKETENMRKKRRRIKLPESDSSEDEVFPDSPGAYEAESPSPPPPPSPPLEPVPKTEPEPPSVKSSSGENKRKRKRVLKSKTYLDGEGCIVTEKVYESESCTDSEEELNMKTSSVHRPPAMTVKKEPREERKGPKKGTAALGKANRQVSITGFFQRK

SEQ ID NO: 19052 - protein, 518 aa, Homo sapiens
MIPQTPHHCSPGAAMSVQVAAPGSAGLGPERLSPEELVRQTRQVVQGLEALRAEHHGLAGHLAEALAGQGPAAGLEMLEEKQQVVSHSLEAIELGLGEAQVLLALSAHVGALEAEKQRLRSQARRLAQENVWLREELEETQRRLRASEESVAQLEEEKRHLEFLGQLRQYDPPAESQQSESPPRRDSLASLFPSEEEERKGPEAAGAAAAQQGGYEIPARLRTLHNLVIQYAGQGRYEVAVPLCRQALEDLERSSGHCHPDVATMLNILALVYRDQNKYKEATDLLHDALQIREQTLGPEHPAVAATLNNLAVLYGKRGRYREAEPLCQRALEIREKVLGADHPDVAKQLNNLALLCQNQGKFEDVERHYARALSIYEALGGPHDPNVAKTKNNLASAYLKQNKYQQAEELYKEILHKEDLPAPLGAPNTGTAGDAEQALRRSSSLSKIRESIRRGSEKLVSRLRGEAAAGAAGMKRAMSLNTLNVDAPRAPGTQFPSWHLDKAPRTLSASTQDLSPH

SEQ ID NO: 19053 - protein, 1138 aa, Homo sapiens
MADPGMMSLFGEDGNIFSEGLEGLGECGYPENPVNPMGQQMPIDQGFASLQPSLHHPSTNQNQTKLTHFDHYNQYEQQKMHLMDQPNRMMSNTPGNGLASPHSQYHTPPVPQVPHGGSGGGQMGVYPGMQNERHGQSFVDSSSMWGPRAVQVPDQIRAPYQQQQPQPQPPQPAPSGPPAQGHPQHMQQMGSYMARGDFSMQQHGQPQQRMSQFSQGQEGLNQGNPFIATSGPGHLSHVPQQSPSMAPSLRHSVQQFHHHPSTALHGESVAHSPRFSPNPPQQGAVRPQTLNFSSRSQTVPSPTINNSGQYSRYPYSNLNQGLVNNTGMNQNLGLTNNTPMNQSVPRYPNAVGFPSNSGQGLMHQQPIHPSGSLNQMNTQTMHPSQPQGTYASPPPMSPMKAMSNPAGTPPPQVRPGSAGIPMEVGSYPNMPHPQPSHQPPGAMGIGQRNMGPRNMQQSRPFIGMSSAPRELTGHMRPNGCPGVGLGDPQAIQERLIPGQQHPGQQPSFQQLPTCPPLQPHPGLHHQSSPPHPHHQPWAQLHPSPQNTPQKVPVHQHSPSEPFLEKPVPDMTQVSGPNAQLVKSDDYLPSIEQQPQQKKKKKKNNHIVAEDPSKGFGKDDFPGGVDNQELNRNSLDGSQEEKKKKKRSKAKKDPKEPKEPKEKKEPKEPKTPKAPKIPKEPKEKKAKTATPKPKSSKKSSNKKPDSEASALKKKVNKGKTEGSENSDLDKTPPPSPPPEEDEDPGVQKRRSSRQVKRKRYTEDLEFKISDEEADDADAAGRDSPSNTSQSEQQESVDAEGPVVEKIMSSRSVKKQKESGEEVEIEEFYVKYKNFSYLHCQWASIEDLEKDKRIQQKIKRFKAKQGQNKFLSEIEDELFNPDYVEVDRIMDFARSTDDRGEPVTHYLVKWCSLPYEDSTWERRQDIDQAKIEEFEKLMSREPETERVERPPADDWKKSESSREYKNNNKLREYQLEGVNWLLFNWYNMRNCILADEMGLGKTIQSITFLYEIYLKGIHGPFLVIAPLSTIPNWEREFRTWTELNVVVYHGSQASRRTIQLYEMYFKDPQGRVIKGSYKFHAIITTFEMILTDCPELRNIPWRCVVIDEAHRLKNRNCKLLEGLKMMDLVSDHIGDCTEPE

SEQ ID NO: 19054 - protein, 950 aa, Homo sapiens
MLYSSRGDPEGQPLLLSLLILAMWVVGSGQLHYSVPEEAEHGTFVGRIAQDLGLELAELVPRLFQLDSKGRGDLLEVNLQNGILFVNSRIDREELCGRSAECSIHLEVIVDRPLQVFHVDVEVKDINDNPPVFPATQKNLFIAESRPLDSRFPLEGASDADIGENALLTYRLSPNEYFFLDVPTSNQQVKPLGLVLRKLLDREETPELHLLLTATDGGKPELTGTVQLLITVLDNNDNAPVFDRTLYTVKLPENVSIGTLVIHPNASDLDEGLNGDIIYSFSSDVSPDIKSKFHMDPLSGAITVIGHMDFEESRAHKIPVEAVDKGFPPLAGHCTLLVEVVDVNDNAPQLTIKTLSVPVKEDAQLGTVIALISVIDLDADANGQVTCSLTPHVPFKLVSTYKNYYSLVLDRALDRESVSAYELVVTARDGGSPSLWATARVSVEVADVNDNAPAFAQSEYTVFVKENNPPGCHIFTVSARDADAQENALVSYSLVERRLGERSLSSYVSVHAESGKVYALQPLDHEELELLQFQVSARDAGVPPLGSNVTLQVFVLDENDNAPALLTPRMRGTDGAVSEMVLRSVGAGVVVGKVRAVDADSGYNAWLSYELQPETASASIPFRVGLYTGEISTTRALDETDAPRQRLLVLVKDHGEPALTATATVLVSLVESGQAPKSSSRASVGATGPEVTLVDVNVYLIIAICAVSSLLVLTLLLYTVLRCSAMPTEGECAPGKPTLVCSSAVGSWSYSQQRRQRVCSGEGKQKTDLMAFSPGLSPCAGSTERTGEPSASSDSTGKPRQPNPDWRYSASLRAGMHSSVHLEEAGILRAGPGGPDQQWPTVSSATPEPEAGEVSPPVGAGVNSNSWTFKYGPGNPKQSGPGELPDKFIIPGSPAIISIRQEPTNSQIDKSDFITFGKKEETKKKKKKKKGNKTQEKKEKGNSTTDNSDQ

SEQ ID NO: 19055 - protein, 331 aa, Homo sapiens
MFPALETHLKQTIPDPYEDFMYRHLQYYGYFKAQRGSLPNSATHQHVRKNNPQCLLNGSLGEKDDLIPDTLQKEKLLYSHMLSLPHLRSRQLLYDELDEVNPRLREPQELFSILSTKRPLQAPRWPIECEVIKENIHHIEWAPPQPEYFYQPKGNEKVPEIVGEKKGTVVYQLDSVPIEGSYFTSSRVGGKRGIVKELAVTLQGPEDNTLLFESRFESGNLQKAVRVDTYEYELTLRTDLYTNKHTQWFYFRVQNTRKDATYRFTIVNLLKPKSLYTVGMKPLLYSQLDANTRNIGWRREGNEIKYYKNNTDDGQQPFYCLTWTIQFPYDQ

SEQ ID NO: 19056 - protein, 186 aa, Homo sapiens
RTTSAGTITPKISKSPEPTWTTPAPGKTQFISLKPKIPLSPEVTHTKPVPTTDIEPVTVRTEATVTTLAPKTSQRTRTRRPRPKHKTTPRPETLQTKLDFGPITPGTSSAPTTTTKRTRRPHPKPKTTPHPEVPQTKLAPKVPQRTHRPHPKPKTTLSPEELQTELVPATIFEPVSPIKEAPGTTF

SEQ ID NO: 19057 - protein, 168 aa, Homo sapiens
MTSPEIASLSWGQMKVKGSNTTYKDCKVWPGGSRTWDWRETGTESLTLLPRLECSGAISAHCNLHLPGSCHSPASASQVAGTTGACHHTQHSPGVQPADVKEVVEKGVQTLVIGRGMSEALKVPSSTVEYLKKHGIDVRVLQTEQAVKEYNALVAQGVRVGGVFHSTC

SEQ ID NO: 19058 - protein, 406 aa, Homo sapiens
LVDLAANSLLNKLIHQSLVESSHRVEVLQKDPSSPLYSVKTFEELRLKEELLKGIYAMGFNRPSKIQEMALPMMLAHPPQNLIAQSQSGTGKTAAFVLAMLSRVNALELFPQCLCLAPTYELALQTGRVVEQMGKFCVDVQVMYAIRGNRNWCFKLKLIDLTKIRVFVLDEADVMIDTQGFSDHSIRIQRALPSECQMLLFSATFEDSVWHFAERIIPDPNVIKLRKEELTLNNIRQYYVLCEHRKDKYQALCNIYGSITIGQAIIFCQTRRNAKWLTVEMIQDGHQVSLLSGELTVEQRASIIQRFRDGKEKVLITTNVCARGIDVKQVTIVVNFDLPVKQGEEPDYETYLHRIGRTGRFGKKGLAFNMIEVDELPSLMKIQDHFNSSIKQLNAEDMDEIEKIDY

SEQ ID NO: 19059 - protein, 391 aa, Homo sapiens
MVVVLFLMITASTYAIRVSNYDIFWYTHNLFFVFYMLLTLHVSGGLLKYQTNLDTHPPGCISLNRTSSQNISLPEYFSEHFHEPFPEGFSKPAEFTQHKFVKICMEEPRFQANFPQTWLWISGPLCLYCAERLYRYIRSNKPVTIISVMSHPSDVMEIRMVKENFKARPGQYITLHCPSVSALENHPFTLTMCPTETKATFGVHLKIVGDWTERFRDLLLPPSSQDSEILPFIQSRNYPKLYIDGPFGSPFEESLNYEVSLCVAGGIGVTPFASILNTLLDDWKPYKLRRLYFIWFWQENRPDYVNIQLYLSQTDGIQKIIGEKYHALNSRLFIGRPRWKLLFDEIAKYNRGKTVGVFCCGPNSLSKTLHKLSNQNNSYGTRFEYNKESFS

SEQ ID NO: 19060 - protein, 410 aa, Homo sapiens
MNLEGGGRGGEFGMSAVSCGNGKLRQWLIDQIDSGKYPGLVWENEEKSIFRIPWKHAGKQDYNREEDAALFKAWALFKGKFREGIDKPDPPTWKTRLRCALNKSNDFEELVERSQLDISDPYKVYRIVPEGAKKGAKQLTLEDPQMSMSHPYTMTTPYPSLPAQQVHNYMMPPLDRSWRDYVPDQPHPEIPYQCPMTFGPRGHHWQGPACENGCQVTGTFYACAPPESQAPGVPTEPSIRSAEALAFSDCRLHICLYYREILVKELTTSSPEGCRISHGHTYDASNLDQVLFPYPEDNGQRKNIEKLLSHLERGVVLWMAPDGLYAKRLCQSRIYWDGPLALCNDRPNKLERDQTCKLFDTQQFLSELQAFAHHGRSLPRFQVTLCFGEEFPDPQRQRKLITAHVLRSLA

SEQ ID NO: 19061 - protein, 113 aa, Homo sapiens
MCKGLAGLPASCLRSAKDMKHRLGFLLQKSDSCEHNSSHNKKDKVVICQRVSQEEVKKWAESLENLISHECGLAAFKAFLKSEYSEENIDFWISCEEYKKIKSPSKLSPKAKY

SEQ ID NO: 19062 - protein, 803 aa, Homo sapiens
MSEADRAQKMDGESEEEQESVDTGEEEEGGDESDLSSESSIKKKFLKRKGKTDSPWIKPARKRRRRSRKKPSGALGSESYKSSAGSAEQTAPGDSTGYMEVSLDSLDLRVKGILSSQAEGLANGPDVLETDGLQEVPLCSCRMETPKSREITTLANNQCMATESVDHELGRCTNSVVKYELMRPSNKAPLLVLCEDHRGRMVKHQCCPGCGYFCTAGNFMECQPESSISHRFHKDCASRVNNASYCPHCGEESSKAKEVTIAKADTTSTVTPVPGQEKGSALEGRADTTTGSAAGPPLSEDDKLQGAASHVPEGFDPTGPAGLGRPTPGLSQGPGKETLESALIALDSEKPKKLRFHPKQLYFSARQGELQKVLLMLVDGIDPNFKMEHQNKRSPLHAAAEAGHVDICHMLVQAGANIDTCSEDQRTPLMEAAENNHLEAVKYLIKAGALVDPKDAEGSTCLHLAAKKGHYEVVQYLLSNGQMDVNCQDDGGWTPMIWATEYKHVDLVKLLLSKGSDINIRDNEENICLHWAAFSGCVDIAEILLAAKCDLHAVNIHGDSPLHIAARENRYDCVVLFLSRDSDVTLKNKEGETPLQCASLNSQVWSALQMSKALQDSAPDRPSPVERIVSRDIARGYERIPIPCVNAVDSEPCPSNYKYVSQNCVTSPMNIDRNITHLQYCVCIDDCSSSNCMCGQLSMRCWYDKDGRLLPEFNMAEPPLIFECNHACSCWRNCRNRVVQNGLRARLQLYRTRDMGWGVRSLQDIPPGTFVCEYVGELISDSEADVREEDSYLFDLDNKISSA

SEQ ID NO: 19063 - protein, 490 aa, Homo sapiens
MMALPGGRHLDSVTLPGQRLHLMQVDSVQRWMEDLKLMTECECMCVLQAKPISLEEDAQGDLILAGGPGPGDPLQLLLKRGWVISTELRRIGQKLAQDRWARVHSMSVRLTCHARSMVSEYSAVSRNSLKEMGEIEKLLMEKCSELSAVTERCLQVENEHVLKSMKACVSETLSMLGQHFGQLLELALTREVQALVRKIDASDNIYTTESTTGNLFSLTQEGAPLCRIIAKVDGVLCLADILTDNSHSEATRAEAAAVVAQVTSPHLPVTQHLSSFLESMEEIVTALVKLCQEASSGEVFLLASAALANITFFDTMACEMLLQLNAIRVLLEACSDKQRVDTPYTRDQIVTILANMSVLEQCASDIIQENGVQLIMGMLSEKPRSGTPAEVAACERVQQKAAVTLARLSRDPDVAREAVRLSCMSRLIELCRSPSERNSSDAVLVACLAALRRLAGVCPEGLQDSDFQQLVQPRLVDSFLLCSNMEESFV

SEQ ID NO: 19064 - protein, 383 aa, Homo sapiens
MFCPLKLILLPVLLDYSLGLNDLNVSPPELTVHVGDSALMGCVFQSTEDKCIFKIDWTLSPGEHAKDEYVLYYYSNLSVPIGRFQNRVHLMGDILCNDGSLLLQDVQEADQGTYICEIRLKGESQVFKKAVVLHVLPEEPKELMVHVGGLIQMGCVFQSTEVKHVTKEEIVFRYYHKLRMSVEYSQSWGHFQNRVNLVGDIFRNDGSIMLQGVRESDGGNYTCSIHLGNLVFKKTIVLHVSPEEPRTLVTPAALRPLVLGGNQLVIIVGIVCATILLLPVLILIVKKTCGNKSSVNSTVLVKNTKKTNPEIKEKPCHFERCEGEKHIYSPIIVREVIEEEEPSEKSEATYMTMHPVWPSLRSDRNNSLEKKSGGGMPKTQQAF

SEQ ID NO: 19065 - protein, 165 aa, Homo sapiens
MSWIKEGELSLWERFCANIIKAGPMPKHIAFIMDGNRRYAKKCQVERQEGHSQGFNKLAETLRWCLNLGILEVTVYAFSIENFKRSKSEVDGLMDLARQKFSRLMEEKEKLQKHGVCIRVLGDLHLLPLDLQELIAQAVQATKNYNKCFLNVCFAYTSRHEISNA

SEQ ID NO: 19066 - protein, 512 aa, Homo sapiens
MDRVLLRWISLFWLTAMVEGLQVTVPDKKKVAMLFQPTVLRCHFSTSSHQPAVVQWKFKSYCQDRMGESLGMSSTRAQSLSKRNLEWDPYLDCLDSRRTVRVVASKQGSTVTLGDFYRGREITIVHDADLQIGKLMWGDSGLYYCIITTPDDLEGKNEDSVELLVLVRKGYRIQADKERDSMKVLYYVEKELAQFDPARRMRGRYNNTISELSSLHEEDSNFRQSFHQMRSKQFPVSGDLESNPDYWSGVMGGSSGASRGPSAMEYNKEDRESFRHSQPRSKSEMLSRKNFATGVPAVSMDELAAFADSYGQRPRRADGNSHEARGGSRFERSESRAHSGFYQDDSLEEYYGQRSRSREPLTDADRGWAFSPARRRPAEDAHLPRLVSRTPGTAPKYDHSYLGSARERQARPEGASRGGSLETPSKRSAQLGPRSASYYAWSPPGTYKAGSSQDDQEDASDDALPPYSELELTRGPSYRGRDLPYHSNSEKKRKKEPAKKTNDFPTRMSLVV

SEQ ID NO: 19067 - protein, 112 aa, Homo sapiens
SQAEKPEPTNQGQDSLKKHLHAEIKVIGFIISGSLSIATEKRLTKLLVHSSLVGSILSALSALVGFIILSVKQATLNPASLQWNSLSDADLHSAGILPSCAHCCAAVETGLL

SEQ ID NO: 19068 - protein, 433 aa, Homo sapiens
MIRCAATGSAVLLHSGSSVPAAAGSSVVSESAVSWEAGARAVLRCQSPRMVWTQDRLHDRQRVLHWDLRGPGGGPARRLLDLYSAGEQRVYEARDRGRLELSASAFDDGNFSLLIRAVEETDAGLYTCNLHHHYCHLYESLAVRLEVTDGPPATPAYWDGEKEVLAVARGAPALLTCVNRGHVWTDRHVEEAQQVVHWDRQPPGVPHDRADRLLDLYASGERRAYGPLFLRDRVAVGADAFERGDFSLRIEPLEVADEGTYSCHLHHHYCGLHERRVFHLTVAEPHAEPPPRGSPGNGSSHSGAPGPDPTLARGHNVINVIVPESRAHFFQQLGYVLATLLLFILLLVTVLLAARRRRGGYEYSDQKSGKSKGKDVNLAEFAVAAGDQMLYRSEDIQLDYKNNILKERAELAHSPLPAKYIDLDKGFRKENCK

SEQ ID NO: 19069 - protein, 750 aa, Homo sapiens
MGRSNSRSHSSRSKSRSQSSSRSRSRSHSRKKRYRSRSRTYSRSRSRDRMYSRDYRRDYRNNRGMRRPYGYRGRGRGYYQGGGGRYHRGGYRPVWNRRHSRSPRRGRSRSRSPKRRSVSSQRSRSRSRRSYRSSRSPRSSSSRSSSPYSKSPVSKRRGSQEKQTKKAEGEPQEESPLKSKSQEEPKDTFEHDPSESIDEFNKSSATSGDIWPGLSAYDNSPRSPHSPSPIATPPSQSSSCSDAPMLSTVHSAKNTPSQHSHSIQHSPERSGSGSVGNGSSRYSPSQNSPIHHIPSRRSPAKTIAPQNAPRDESRGRSSFYPDGGDQETAKTGKFLKRFTDEESRVFLLDRGNTRDKEASKEKGSEKGRAEGEWEDQEALDYFSDKESGKQKFNDSEGDDTEETEDYRQFRKSVLADQGKSFATASHRNTEEEGLKYKSKVSLKGNRESDGFREEKNYKLKETGYVVERPSTTKDKHKEEDKNSERITVKKETQSPEQVKSEKLKDLFDYSPPLHKNLDAREKSTFREESPLRIKMIASDSHRPEVKLKMAPVPLDDSNRPASLTKDRLLASTLVHSVKKEQEFRSIFDHIKLPQASKSTSESFIQHIVSLVHHVKEQYFKSAAMTLNERFTSYQKATEEHSTRQKSPEIHRRIDISPSTLRKHTRLAGEERVFKEENQKGDKKLRCDSADLRHDIDRRRKERSKERGDSKGSRESSGSRKQEKTPKDYKEYKSYKDDSKNVFVFYTAYGG

SEQ ID NO: 19070 - protein, 722 aa, Homo sapiens
KTAFADKETQAIYLLTDGRPDQPPETVIDQVKRFQEIPIYTISFNYNDEIANRFLKEVAALTGGEFHFYNFGCKDPTPPEAVQNEDLTLLVKEMEQGHSDLEKMQDLYSESLIMDWWYNAEKDGDSKHQKEICSMISTPEKCAKPQSDVDSTQTSSLNMLKGPWGLSDQKVQKKKVLHAESTKTSLLRSQMSSLRSSACSERKDGLSNASSRRTALSDKEMSILLAEEWLDDKSSEKVTREGSQVYDHDSSDVSSENWLKTYGLVAKKLTLMDALSVAAVPHSSTYVPVLDKHVVSKVFDEVFPLAHVCNDTNKMTLINPQGAKLNIYKRKVEQAIQSYEKRLNKIVWRALSQEEKEKLDANKPIQYLENKTVLNQALERLNWPISLKELSMLESEILAGKMYIQQAMELQEAAKKNYANKAPGEQQKLQGNPTKKTKSKRPDPLKGQKVIARCDENGFYFPGVVKKCVSRTQALVGFSYGDTKVVSTSFITPVGGAMPCPLLQVGDYVFAKIVIPKGFDFYVPAIVIALPNKHVATEKFYTVLKCNNRREFCPRSALIKISQNKYALSCSHIKSPPIPEDPEVEDVEARNSAFLFWPLKEADTQDSREPRREKPRRKKRPAKQPLQQAAPSDSDGSSHGISSHGSCQGTHPEPRVWVMGGEHNIAYLRNTLKSLSRIVHLTSSFRFWACLGSSAAKTLTSLSNAELCFPRQPTSTSPRPGV

SEQ ID NO: 19071 - protein, 168 aa, Homo sapiens
MAATALLEAGLARVLFYPTLLYTLFRGKVPGRAHRDWYHRIDPTVLLGALPLRSLTRQVSRAGEPGPLPRPRRSVPVGPLGSPPSLLSHLFASAAGTGRERARGDHHERGVRDEVPVQLFTGVEETRSRAAAAQHSRHDWDPHLGQPPEGSPICSQVPVAGPVCLRAL

SEQ ID NO: 19072 - protein, 369 aa, Homo sapiens
MNTNSKEVLSLGVQVPEAWEELLTMKVEAKSHLQWQESRLKRSNPLAREIFRRHFRQLCYQETPGPREALTRLQELCYQWLRPHVSTKEQILDLLVLEQFLSILPKELQGWVREHCPESGEEAVILLEDLERELDEPQHEMVAHRHRQEVLCKEMVPLAEQTPLTLQSQPKEPQLTCDSAQKCHSIGETDTFLFSKPVVIPQLKGGGETWPNNRGVLRDEVTKTEDRELVLRKDCPKIVEPHGKMFNEQTWEVSQQDPSHGEVGEHKDRIERQWGNLLGEGQHKCDECGKSFTQSSGLIRHQRIHTGERPYECNECGKAFSRSSGLFNHRGIHNIQKRYHCKECGKVFSQSAGLIQHQRIHKGEKPYQC

SEQ ID NO: 19073 - protein, 114 aa, Homo sapiens
MTSQPVPNETIIVLPSNVINFSQAEKPEPTNQGQDSLKKHLHAEIKVIGVHSSLVGSILSALSALVGFIILSVKQATLNPASLQWNSLSDADLHSAGILPSCAHCCAAVETGLL

SEQ ID NO: 19074 - protein, 193 aa, Homo sapiens
VFTVTKAHFQTPTPVVTDTLRVPMAGLAFSHQLMVPGKEGGVPLAPNQPVHGTQADQERLATCTPSDRTHCAATPSSSEDTETVSNSSEGRASPHDVLETIFVRKVGAFVNKPINQVTLTSLDIPFAMFAPKNLELEDTDPMVNPPDSPETESPLQGSLHSDGSSGGSSGNTHDDFVMIDFKPAFSKDDILPM

SEQ ID NO: 19075 - protein, 540 aa, Homo sapiens
MDVCVRLALWLLWGLLLHQGQSLSHSHSEKATGTSSGANSEESTAAEFCRIDKPLCHSEDEKLSFEAVRNIHKLMDDDANGDVDVEESDEFLREDLNYHDPTVKHSTFHGEDKLISVEDLWKAWKSSEVYNWTVDEVVQWLITYVELPQYEETFRKLQLSGHAMPRLAVTNTTMTGTVLKMTDRSHRQKLQLKALDTVLFGPPLLTRHNHLKDFMLVVSIVIGVGGCWFAYIQNRYSKEHMKKMMKDLEGLHRAEQSLHDLQERLHKAQEEHRTVEVEKVHLEKKLRDEINLAKQEAQRLKELREGTENERSRQKYAEEELEQVREALRKAEKELESHSSWYAPEALQKWLQLTHEVEVQYYNIKKQNAEKQLLVAKEGAEKIKKKRNTLFGTFHVAHSSSLDDVDHKILTAKQALSEVTAALRERLHRWQQIEILCGFQIVNNPGIHSLVAALNIDPSWMGSTRPNPAHFIMTDDVDDMDEEIVSPLSMQSPSLQSSVRQRLTEPQHGLGSQRGSSLKANRLSSKGFDPFRFGVLPPHE

SEQ ID NO: 19076 - protein, 580 aa, Homo sapiens
QILLTLLETRRPTFEGHIEICPPGMSHSACSVNKSVLEAIRGRLGSFHELLLEPPKLFLLQKSVMKTTWGVLDPPVGNTRLNVIRLISSLLQTNTSSINGDLMELNSIGVILNMFFKYTWNNFLHTQVEICIALILASPFENTENATITDQDSTGDNLLLKHLFQKCQLIERILEAWEMNEKKQAEGGRRHGYMGHLTRIANCIVHSTDKGPNSALVQQLIKDLPDEVRERWETFCTSSLGETNKRNTVDLAFSDYQMQQMTSNFIDQFGFNDEKFADQDDIGNVSFDRVSDINFTLNTNESGNIALFEACCKERIQQFDDGGSDEEDIWEEKHIAFTPESQRRSSSGSTDSEESTDSEEEDGAKQDLFEPSSANTEDKMEVDLSEPPNWSANFDVPMETTHGAPLDSVGSDVWSTEEPMPTKETGWASFSEFTSSLSTKDSLRSNSPVEMETSTEPMDPLTPSAAALAVQPEAAGSVAMEASSDGEEDAESTDKVTETVMNGGMKETLSLTVDAKTETAVFKSEEGKLSTSQDAACKDAEECPETAEAKCAAPRPPSSSPEQRTGQPSAPGDTSVNGPV

SEQ ID NO: 19077 - protein, 294 aa, Homo sapiens
MSFPPHLNRPPMGIPALPPGIPPPQFPGFPPPVPPGTPMIPVPMSIMAPAPTVLVPTVSMVGKHLGARKDHPGLKAKENDENCGPTTTVFVGNISEKASDMLIRQLLAKCGLVLSWKRVQGASGKLQAFGFCEYKEPESTLRALRLLHDLQIGEKKLLVKVDAKTKAQLDEWKAKKKASNGNARPETVTNDDEEALDEETKRRDQMIKGAIEVLIREYSSELNAPSQESDSHPRKKKKEKKEDIFRRFPVAPLIPYPLITKEDINAIEMEEDKRDLISREISKFRDTHKRSYGD

SEQ ID NO: 19078 - protein, 731 aa, Homo sapiens
MSQSGAVSCCPGATNGSLGRSDGVAKMSPKDLFEQRKKYSNSNVIMHETSQYHVQHLATFIMDKSEAITSVDDAIRKLVQLSSKEKIWTQEMLLQVNDQSLRLLDIESQSAQTPGASRVRAMYPQEELEDFPLPTVQRSQTVLNQLRYPSVLLLVCQDSEQSKPDVHFFHCDEVEAELVHEDIESALADCRLGKKMRPQTLKGHQEKIRQRQSILPPPQGPAPIPFQHRGGDSPEAKNRVGPQVPLSEPGFRRRESQEEPRAVLAQKIEKETQILNCALDDIEWFVARLQKAAEAFKQLNQRKKGKKKGKKAPAEGVLTLRARPPSEGEFIDCFQKIKLAINLLAKLQKHIQNPSAAELVHFLFGPLDLIVNTCSGPDIARSVSCPLLSRDAVDFLRGHLVPKEMSLWESLGESWMRPRSEWPREPQVPLYVPKFHSGWEPPVDVLQEAPWEVEGLASAPIEEVSPVSRQSIRNSQKHSPTSEPTPPGDALPPVSSPHTHRGYQPTPAMAKYVKILYDFTARNANELSVLKDEVLEVLEDGRQWWKLRSRSGQAGYVPCNILGEARPEDAGAPFEQAGQKYWGPASPTHKLPPSFPGNKDELMQHMDEVNDELIRKISNIRAQPQRHFRVERSQPVSQPLTYESGPDEVRAWLEAKAFSPRIVENLGILTGPQLFSLNKEELKKVCGEEGVRVYSQLTMQKAFLEKQQSGSELEELMNKFHSMNQRRGEDS

SEQ ID NO: 19079 - protein, 246 aa, Homo sapiens
MDSTIPVLGTELTPINGREETPCYKQTLSFTGLTCIVSLVALTGNAVVLWLLGCRMRRNAVSIYILNLVAADFLFLSGHIICSPLRLINIRHPISKILSPVMTFPYFIGLSMLSAISTERCLSILWPIWYHCRRPRYLSSVMCVLLWALSLLRSILEWMFCDFLFSGANSVWCETSDFITIAWLVFLCVVLCGSSLVLLVRILCGSRKMPLTRLYVTILLTVLVFLLCGLPFGIQWALFSRIHLDW

SEQ ID NO: 19080 - protein, 483 aa, Homo sapiens
MAQISSNSGFKECPSSHPEPTRAKDVDKEEALQMEAEALAKLQKDRQVTDNQRGFELSSSTRKKAQVYNKQDYDLMVFPESDSQKRALDIDVEKLTQAELEKLLLDDSFETKKTPVLPVTPILSPSFSAQLYFRPTIQRGQWPPGLPGPSTYALPSIYPSTYSKQAAFQNGFNPRMPTFPSTEPIYLSLPGQSPYFSYPLTPATPFHPQGSLPIYRPVVSTDMAKLFDKIASTSEFLKNGKARTDLEITDSKVSNLQVSPKSEDISKFDWLDLDPLSKPKVDNVEVLDHEEEKNVSSLLAKDPWDAVLLEERSTANCHLERKVNGKSLSVATVTRSQSLNIRTTQLAKAQGHISQKDPNGTSSLPTGSSLLQEVEVQNEEMAAFCRSITKLKTKFPYTNHRTNPGYLLSPVTAQRNICGENASVKVSIDIEGFQLPVTFTCDVSSTVEIIIMQALCWVHDDLNQVDVGSYVLKVCGQEEVLQK

SEQ ID NO: 19081 - protein, 306 aa, Homo sapiens
MFEEPEWAEAAPVAAGLGPVISRPPPAASSQNKGSKRRQLLATLRALEAASLSQHPPSLCISDSEEEEEERKKKCPKKASFASASAEVGKKGKKKCQKQGPPCSDSEEEVERKKKCHKQALVGSDSAEDEKRKRKCQKHAPINSAQHLDNVDQTGPKAWKGSTTNDPPKQSPGSTSPKPPHTLSRKQWRNRQKNKRRCKNKFQPPQVPDQAPAEAPTEKTEVSPVPRTDSHEARAGALRARMAQRLDGARFRYLNEQLYSGPSSAAQRLFQEDPEAFLLYHRGFQSQVKKWPLQPVDRIARDLRQR

SEQ ID NO: 19082 - protein, 107 aa, Homo sapiens
AVEFLEQAQQVSGLLAQLWRAQPAAILPCLKELFAVISCAEEEPPSSALASVVQHLPLELMDGVVRNLSNDDSVTDSQMLTAISRFSLSCCTPSSGELPCLCSSTCS

SEQ ID NO: 19083 - protein, 255 aa, Homo sapiens
MSNNLSELDTKIQEKAMKVDMDICRRIDITAKLCDVAQQRNCEDMIQMFQKKLVPSMGGRKRERKAAVEEDTSLSESEGPRQPDGDEEESTALSINEEMQRMLNQLREYDFEDDCDSLTWEETEETLLLWEDFSGYAMAAAEAQGEQEDSLEKVIKDTESLFKTREKEYQETIDQIELELATAKNDMNRHLHEYMEMCSMKRGLDVQMETCRRLITQSGDRKSPAFTAVPLSDPPPPPSEAEDSDRDVSSDSSMR

SEQ ID NO: 19084 - protein, 236 aa, Homo sapiens
MKTLMRHGLAVCLALTTMCTSLLLVYSSLGGQKERPPQQQQQQQQQQQQASATGSSQPAAESSTQQRPGVPAGPRPLDGYLGVADHKPLKMHCRDCALVTSSGHLLHSRQGSQIDQTECVIRMNDAPTRGYGRDVGNRTSLRVIAHSSIQRILRNRHDLLNVSQGTVFIFWGPSSYMRRDGKGQVYNNLHLLSQVLPRLKAFMITRHKMLQFDELFKQETGKDRYPTLGSALAGLQ

SEQ ID NO: 19085 - protein, 595 aa, Homo sapiens
MGPFWARKDDTGCPSSQSVSPVKTPSDAGNSPIGFCPGSDEGFTRKKCTIGMVGEGSIQSSRYKKESKSGLVKPGSEADFSSSSSTGSISAPEVHMSTAGSKRSSSSRNRGPHGRSNGASSHKPGSSPSSPREKDLLSMLCRNQLSPVNIHPSYAPSSPSSSNSGSYKGSDCSPIMRRSGRYMSCGENHGVRPPNPEQYLTPLQQKEVTVRHLKTKLKESERRLHERESEIVELKSQLARMREDWIEEECHRVEAQLALKEARKEIKQLKQVIETMRSSLADKDKGIQKYFVDINIQNKKLESLLQSMEMAHSGSLRDELCLDFPCDSPEKSLTLNPPLDTMADGLSLEEQVTGEGADRELLVGDSIANSTDLFDEIVTATTTESGDLELVHSTPGANVLELLPIVMGQEEGSVVVERAVQTDVVPYSPAISELIQSVLQKLQDPCPSSLASPDESEPDSMESFPESLSALVVDLTPRNPNSAILLSPVETPYANVDAEVHANRLMRELDFAACVEERLDGVIPLARGGVVRQYWSSSFLVDLLAVAAPVVPTVLWAFSTQRGGTDPVYNIGALLRGCCVVALHSLRRTAFRIKT

SEQ ID NO: 19086 - protein, 933 aa, Homo sapiens
MSAPGAGHSAGGSCNESSALGPVEALGTEEGERPGSLRQMWRYRSWDVPQIPSEAPQTQKAITKSGLQHLAPPPPTPGAPCSESERQIRSTVDWSSATYGEHIWFETNVSGDFCYVGEQYCVARMLQKSVSRRKCAACKIVVHTPCIEQLEKINFRCKPSFRESGSRNVREPTFVRHHWVHRRRQDGKCRHCGKGFQQKFTFHSKEIVAISCSWCKQAYHSKVSCFMLQQIEEPCSLGVHAAVVIPPTWILRARRPQNTLKASKKKKRASFKRKSSKKGPEEGRWRPFIIRPTPSPLMKPLLVFVNPKSGGNQGAKIIQSFLWYLNPRQVFDLSQGGPKEALEMYRKVHNLRILACGGDGTVGWILSTLDQLRLKPPPPVAILPLGTGNDLARTLNWGGGYTDEPVSKILSHVEEGNVVQLDRWDLHAEPNPEAGPEDRDEGATDRLPLDVFNNYFSLGFDAHVTLEFHESREANPEKFNSRFRNKMFYAGTAFSDFLMGSSKDLAKHIRVVCDGMDLTPKIQDLKPQCVVFLNIPRYCAGTMPWGHPGEHHDFEPQRHDDGYLEVIGFTMTSLAALQVGGHGERLTQCREVVLTTSKAIPVQVDGEPCKLAASRIRIALRNQATMVQKAKRRSAAPLHSDQQPVPEQLRIQVSRVSMHDYEALHYDKEQLKEASVPLGTVVVPGDSDLELCRAHIERLQQEPDGAGAKSPTCQKLSPKWCFLDATTASRFYRIDRAQEHLNYVTEIAQDEIYILDPELLGASARPDLPTPTSPLPTSPCSPTPRSLQGDAAPPQGEELIEAAKRNDFCKLQELHRAGGDLMHRDEQSRTLLHHAVSTGSKDVVRYLLDHAPPEILDAVEENGETCLHQAAALGQRTICHYIVEAGASLMKTDQQGDTPRQRAEKAQDTELAAYLENRQHYQMIQREDQETAV

SEQ ID NO: 19087 - protein, 934 aa, Homo sapiens
MEPRDGSPEARSSDSESASASSSGSERDAGPEPDKAPRRLNKRRFPGLRLFGHRKAITKSGLQHLAPPPPTPGAPCSESERQIRSTVDWSESATYGEHIWFETNVSGDFCYVGEQYCVARMLQKSVSRRKCAACKIVVHTPCIEQLEKINFRCKPSFRESGSRNVREPTFVRHHWVHRRRQDGKCRHCGKGFQQKFTFHSKEIVAISCSWCKQAYHSKVSCFMLQQIEEPCSLGVHAAVVIPPTWILRARRPQNTLKASKKKKRASFKRKSSKKGPEEGRWRPFIIRPTPSPLMKPLLVFVNPKSGGNQGAKIIQSFLWYLNPRQVFDLSQGGPKEALEMYRKVHNLRILACGGDGTVGWILSTLDQLRLKPPPPVAILPLGTGNDLARTLNWGGGYTDEPVSKILSHVEEGNVVQLDRWDLHAEPNPEAGPEDRDEGATDRLPLDVFNNYFSLGFDAHVTLEFHESREANPEKFNSRFRNKMFYAGTAFSDFLMGSSKDLAKHIRVVCDGMDLTPKIQDLKPQCVVFLNIPRYCAGTMPWGHPGEHHDFEPQRHDDGYLEVIGFTMTSLAALQVGGHGERLTQCREVVLTTSKAIPVQVDGEPCKLAASRIRIALRNQATMVQKAKRRSAAPLHSDQQPVPEQLRIQVSRVSMHDYEALHYDKEQLKEASVPLGTVVVPGDSDLELCRAHIERLQQEPDGAGAKSPTCQKLSPKWCFLDATTASRFYRIDRAQEHLNYVTEIAQDEIYILDPELLGASARPDLPTPTSPLPTSPCSPTPRSLQGDAAPPQGEELIEAAKRNDFCKLQELHRAGGDLMHRDEQSRTLLHHAVSTGSKDVVRYLLDHAPPEILDAVEENPCSPSGETCLHQAAALGQRTICHYIVEAGASLMKTDQQGDTPRQRAEKAQDTELAAYLENRQHYQMIQREDQETAV

SEQ ID NO: 19088 - protein, 165 aa, Homo sapiens
MGSWALLWPPLLFTGLLVRPPGTMAQAQYCSVNKDIFEVEENTNVTEPLVDIHVPEGQEVTLGALSTPFAFRIQGNQLFLNVTPDYEEKSLLEAQLLCQSGGTLTKEIRVEEDTKVNSTVIPETQLQAEDRDKDDILFYTLQEMTAGASDYFSLVSVNRPALRLD

SEQ ID NO: 19089 - protein, 249 aa, Homo sapiens
MARQPYRFPQARIPERGSGVFRLTVRNAMAHRDSEMKEECLREDLKFYFMSPCEKYRARRQIPWKLGLQILKIVMVTTQLVRFGLSNQLVVAFKEDNTVAFKHLFLKGYSGTDEDDYSCSVYTQEDAYESIFFAINQYHQLKDITLGTLGYGENEDNRIGLKVCKQHYKKGTMFPSNETLNIDNDVELDCVQLDLQDLSKKPPDWKNSSFFRLEFYRLLQVEISFHLKGIDLQTIHSRELPDCYVFQNT

SEQ ID NO: 19090 - protein, 198 aa, Homo sapiens
MDSLQKQDLRRPKIHGAVQASPYQPPTLASLQRLLWVRQAATLNHIDEVWPSLFLGDAYAARDKSKLIQLGITHVVNAAAGKFQVDTGAKFYRGMSLEYYGIEADDNPFFDLSVYFLPVARYIRAALSVPQGRVLVHCAMGVSRSATLVLAFLMICENMTLVEAIQTVQAHRNICPNSGFLRQLQVLDNRLGRETGRF

SEQ ID NO: 19091 - protein, 78 aa, Homo sapiens
MASSSTVPLGFHYETKYVVLSYLGLLSQEKLQEQHLSSPQGVQLDIASQSLDQEILLKVKTEIEEELKSLDKEISEGQ

SEQ ID NO: 19092 - protein, 620 aa, Homo sapiens
MAWLRLQPLTSAFLHFGLVTFVLFLNGLRAEAGGSGDVPSTGQNNESCSGSSDCKEGVILPIWYPENPSLGDKIARVIVYFVALIYMFLGVSIIADRFMASIEVITSQEREVTIKKPNGETSTTTIRVWNETVSNLTLMALGSSAPEILLSLIEVCGHGFIAGDLGPSTIVGSAAFNMFIIIGICVYVIPDGETRKIKHLRVFFITAAWSIFAYIWLYMILAVFSPGVVQVWEGLLTLFFFPVCVLLAWVADKRLLFYKYMHKKYRTDKHRGIIIETEGDHPKGIEMDGKMMNSHFLDGNLVPLEGKEVDESRREMIRILKDLKQKHPEKDLDQLVEMANYYALSHQQKSRAFYRIQATRMMTGAGNILKKHAAEQAKKASSMSEVHTDEPEDFISKVFFDPCSYQCLENCGAVLLTVVRKGGDMSKTMYVDYKTEDGSANAGADYEFTEGTVVLKPGETQKEFSVGIIDDDIFEEDEHFFVRLSNVRIEEEQPEEGMPPAIFNSLPLPRAVLASPCVATVTILDDDHAGIFTFECDTIHVSESIGVMEVKVLRTSGARGTVIVPFRTVEGTAKGGGEDFEDTYGELEFKNDETVCDRQEADYGRRGGQEDSRDGKASIG

SEQ ID NO: 19093 - protein, 935 aa, Homo sapiens
MTTEVGSVSEVKKDSSQLGTDATKEKPKEVAENQQNQSSDPEEEKGSQPPPAAESQSSLRRQKREKETSESRGISRFIPPWLKKQKSYTLVVAKDGGDKKEPTQAVVEEQVLDKEEPLPEEQRQAKGDAEEMAQKKQEIKVEVKEEKPSVSKEEKPSVSKVEMQPTELVSKEREEKVKETQEDKLEGGAAKRETKEVQTNELKAEKASQKVTKKTKTVQCKVTLLDGTEYSCDLEKHAKGQVLFDKVCEHLNLLEKDYFGLLFQESPEQKNWLDPAKEIKRQLRNLPWLFTFNVKFYPPDPSQLTEDITRYFLCLQLRQDIASGRLPCSFVTHALLGSYTLQAELGDYDPEEHGSIDLSEFQFAPTQTKELEEKVAELHKTHRGLSPAQADSQFLENAKRLSMYGVDLHHAKDSEGVDIKLGVCANGLLIYKDRLRINRFAWPKILKISYKRSNFYIKVRPAELEQFESTIGFKLPNHRAAKRLWKVCVEHHTFYRLVSPEQPPKAKFLTLGSKFRYSGRTQAQTRQASTLIDRPAPHFERTSSKRVSRSLDGAPIGVMDQSLMKDFPGAAGEISAYGPGLVSIAVVQDGDGRREVRSPTKAPHLQLIEGKSSHETLNIVEEKKRAEVGKDERVITEEMNGKEISPGSGPGEIRKVEPVTQKDSTSLSSESSSSSSESEEEDVGEYRPHHRVTEGTIREEQEYEEEVEEEPRPAAKVVEREEAVPEASPVTQAGASVITVETVIQENVGAQKIPGEKSVHEGALKQDMGEEAEEEPQKVNGEVSHVDIDVLPQIICCSEPPVVKTEMVTISDASQRTEISTKEVPIVQTETKTITYESPQIDGGAGGDSGTLLTAQTITSESVSTTTTTHITKTVKGGISETRIEKRIVITGDGDIDHDQALAQAIREAREQHPDMSVTRVVVHKETELAEEGED

SEQ ID NO: 19094 - protein, 559 aa, Homo sapiens
MLKSKTFLKKTRAGGVMKIVREHYLRDDIGCGAPGCAACGGAHEGPALEPQPQDPASSVCPQPHYLLPDTNVLLHQIDVLEDPAIRNVIVLQTVLQEVRNRSAPVYKRIRDVTNNQEKHFYTFTNEHHRETYVEQEQGENANDRNDRAIRVAAKWYNEHLKKMSADNQLQVIFITNDRRNKEKAIEEGIPAFTCEEYVKSLTANPELIDRLACLSEEGNEIESGKIIFSEHLPLSKLQQGIKSGTYLQGTFRASRENYLEATVWIHGDNEENKEIILQGLKHLNRAVHEDIVAVELLPKSQWVAPSSVVLHDEGQNEEDVEKEEETERMLKTAVSEKMLKPTGRVVGIIKRNWRPYCGMLSKSDIKESRRHLFTPADKRIPRIRIETRQASTLEGRRIIVAIDGWPRNSRYPNGHFVRNLGDVGEKETETEVLLLEHDVPHQPFSQAVLSFLPKMPWSITEKDMKNREDLRHLCICSVDPPGCTDIDDALHCRELENGNLEVGVHIADVSHFIRPGNALDQESARRGTTVYLCEKRIDMVPELLSSNLCSLKCDVDRHL

SEQ ID NO: 19095 - protein, 215 aa, Homo sapiens
MRPKTGQVGCETPEELGPGPRQRWPLLLLGLAMVAHGLLRPMVAPQSGDPDPGASVGSSRSSLRSLWGSRLLLQPSPQRADPRCWPRGFWSEPQSLCYVFGTGTKVTVLGQPKANPTVTLFPPSSEELQANKATLVCLISDFYPGAVTVAWKADGSPVKAGVETTKPSKQSNNKYAASSYLSLTPEQWKSHRSYSCQVTHEGSTVEKTVAPTECS

SEQ ID NO: 19096 - protein, 191 aa, Homo sapiens
MRAAGVGLVDCHCHLSAPDFDRDLDDVLEKAKKANVVALVAVAEHSGEFEKIMQLSERYNGFVLPCLGVHPVQGLPPEDQRSVTLKDLDVALPIIENYKDRLLAIGEVGLDFSPRFAGTGEQKEEQRQVLIRQIQLAKRLNLPVNVHSRSAGRPTINLLQEQAETCETIAFNFYMLRNRFTCTRTRKTGTE

SEQ ID NO: 19097 - protein, 169 aa, Homo sapiens
VSSLQGEDCREAVQRLGVSANLPEEQLGALLAGMHTLLQQALRLPPTSLKPDTFRDQLQELCIPQDLVGDLASVVFGSQRPLLDSVAQQQGAWLPHVADFRWRVDVAISTSALARSLQPSVLMQLKLSDGSAYRFEVPTAKFQELRYSVALVLKEMADLEKRCERRLQD

SEQ ID NO: 19098 - protein, 485 aa, Homo sapiens
MTAAENVCYTLINVPMDSEPPSEISLKNDLEKGDVKSKTEALKKVIIMILNGEKLPGLLMTIIRFVLPLQDHTIKKLLLVFWEIVPKTTPDGRLLHEMILVCDAYRKDLQHPNEFIRGSTLRFLCKLKEAELLEPLMPAIRACLEHRHSYVRRNAVLAIYTIYRNFEHLIPDAPELIHDFLVNEKDASCKRNAFMMLIHADQDRALDYLSTCIDQVQTFGDILQLVIVELIYKVCHANPSERARFIRCIYNLLQSSSPAVKYEAAGTLVTLSSAPTAIKAAAQCYIDLIIKESDNNVKLIVLDRLIELKEHPAHERVLQDLVMDILRVLSTPDLEVRKKTLQLALDLVSSRNVEELVIVLKKEVIKTNNVSEHEDTDKYRQLLVRTLHSCSVRFPDMAANVIPVLMEFLSDNNEAAAADVLEFVREAIQRFDNLRMLIVEKMLEVFHAIKSVKIYRGALWILGEYCSTKEDIQSVMTEIRRSLGE

SEQ ID NO: 19099 - protein, 386 aa, Homo sapiens
MADHSFSDGVPSDSVEAAKNASNTEKLTDQVMQNPRVLAALQERLDNVPHTPSSYIETLPKAVKRRINALKQLQVRCAHIEAKFYEEVHDLERKYAALYQPLFDKRREFITGDVEPTDAESEWHSENEEEEKLAGDMKSKVVVTEKAAATAEEPDPKGIPEFWFTIFRNVDMLSELVQEYDEPILKHLQDIKVKFSDPGQPMSFVLEFHFEPNDYFTNSVLTKTYKMKSEPDKADPFSFEGPEIVDCDGCTIDWKKGKNVTVKTIKKKQKHKGRGTVRTITKQVPNESFFNFFNPLKASGDGESLDEDSEFTLASDFEIGHFFRERIVPRAVLYFTGEAIEDDDNFEEGEEGEEEELEGDEEGEDEDDAEINPKKEPSQPAECKQQ

SEQ ID NO: 19100 - protein, 892 aa, Homo sapiens
MHGFRRTLRNAVLTQKQDSLRIISIQPVAGTNQLDMLFAVEMHSSEFYKPAYLIQKLSNARRHLENIMRISAILEKNCSGLDCQEQHCEQGLSLDSHALMTYSTARISFVCPRFYRNVRCTCNGGLCPGSNDPCVEKPCPGDMQCVSYEASRRPFLCQCPPGKLGECSGHTSLSFAGNSYIKYRLSENSKEEDFKLALRLRTLQSNGIIMYTRANPCIILKIVDGKLWFQLDCGSGPGILGISGRAVNDGSWHSVFLELNRNFTSLSLDDSYVERRRAPLYFQTLSTESSIYFGALVQADNIRSLTDTRVTQVLSGFQGCLDSVILNNNELPLQNKRSSFAEVVGLTELKLGCVLYPDACKRSPCQHGGSCTGLPSGGYQCTCLSQFTGRNCESEITACFPNPCRNGGSCDPIGNTFICNCKAGLTGVTCEEDINECEREECENGGSCVNVFGSFLCNCTPGYVGQYCGLRPVVVPNIQAGHSYVGKEELIGIAVVLFVIFILVVLFIVFRKKVFRKNYSRNNITLVQDPATAALLNKSNGIPFRNLRGSGDGRNVYQEVGPPQVPVRPMAYTPCFQSDSRSNLDKIVDGLGGEHQEMTTFHPESPRILTARRGVVVCSVAPNLPAVSPCRSDCDSIRKNGWDAGTENKGVDDPGEVTCFAGSNKGSNSEVQSLSSFQSDSGDDNAYHWDTSDWMPGARLSDIEEVPNYENQDGGSAHQGSTRELESDYYLGGYDIDSEYPPPHEEEFLSQDQLPPPLPEDFPDQYEALPPSQPVSLASTLSPDCRRRPQFHPSQYLPPHPFPNETDLVGPPASCEFSTFAVSMNQGTEPTGPADSVSLSLHNSRGTSSSDVSANCGFDDSEVAMSDYESVGELSLASLHIPFVETQHQTQV

SEQ ID NO: 19101 - protein, 702 aa, Homo sapiens
ATAAAAAAVMAPPGCPGSCPNFAVVCSFLERYGPLLDLPELPFPELERVLQAPPPDVGNGEVPKELVELHLKLMRKIGKSVTADRWEKYLIKICQEFNSTWAWEMEKKGYLEMSVECKLALLKYLCECQFDDNLKFKNIINEEDADTMRLQPIGRDKDGLMYWYQLDQDHNVRMYIEEQDDQDGSSWKCIVRNRNELAETLALLKAQIDPVLLKNSSQQDNSSRESPSLEDEETKKEEETPKQEEQKESEKMKSEEQPMDLENRSTANVLEETTVKKEKEDEKELVKLPVIVKLEKPLPENEEKKIIKEESDSFKENVKPIKVEVKECRADPKDTKSSMEKPVAQEPERIEFGGNIKSSHEITEKSTEETEKLKNDQQAKIPLKKREIKLSDDFDSPVKGPLCKSVTPTKEFLKDEIKQEEETCKRISTITALGHEGKQLVNGEVSDERVAPNFKTEPIETKFYETKEESYSPSKDRNIITEGNGTESLNSVITSMKTGELEKETAPLRKDADSSISVLEIHSQKAQIEEPDPPEMETSLDSSEMAKDLSSKTALSSTESCTMKGEEKSPKTKKDKRPPILECLEKLEKSKKTFLDKDAQRLSPIPEEVPKSTLESEKPGSPEAAETSPPSNIIDHCEKLASEKEVVECQSTSTVGGQSVKKVDLETLKEDSEFTKVEMDNLDNAQTSGIEEPSETKGSMQK

SEQ ID NO: 19102 - protein, 473 aa, Homo sapiens
MSQTSSIGSAESLISLERKKEKNINRDITSRKDLPSRTSNVERKASQQQWGRGNFTEGKVPHIRIENGAAIEEIYTFGRILGKGSFGIVIEATDKETETKWAIKKVNKEKAGSSAVKLLEREVNILKSVKHEHIIHLEQVFETPKKMYLVMELCEDGELKEILDRKGHFSENETRWIIQSLASAIAYLHNNDIVHRDLKLENIMVKSSLIDDNNEINLNIKVTDFGLAVKKQSRSEAMLQATCGTPIYMAPEVISAHDYSQQCDIWSIGVVMYMLLRGEPPFLASSEEKLFELIRKGELHFENAVWNSISDCAKSVLKQLMKVDPAHRITAKELLDNQWLTGNKLSSVRPTNVLEMMKEWKNNPESVEENTTEEKNKPSTEEKLKSYQPWGNVPDANYTSDEEEEKQSTAYEKQFPATSKDNFDMCSSSFTSSKLLPAEIKGEMEKTPVTPSQGTATKYPAKSGALSRTKKKL

SEQ ID NO: 19103 - protein, 1094 aa, Homo sapiens
MAPPSEETPLIPQRSCSLLSTEAGALHVLLPARGPGPPQRLSFSFGDHLAEDLCVQAAKASGILPVYHSLFALATEDLSCWFPPSHIFSVEDASTQVLLYRIRFYFPNWFGLEKCHRFGLRKDLASAILDLPVLEHLFAQHRSDLVSGRLPVGLSLKEQGECLSLAVLDLARMAREQAQRPGELLKTVSYKACLPPSLRDLIQGLSFVTRRRIRRTVRRALRRVAACQADRHSLMAKYIMDLERLDPAGAAETFHVGLPGALGGHDGLGLLRVAGDGGIAWTQGEQEVLQPFCDFPEIVDISIKQAPRVGPAGEHRLVTVTRTDNQILEAEFPGLPEALSFVALVDGYFRLTTDSQHFFCKEVAPPRLLEEVAEQCHGPITLDFAINKLKTGGSRPGSYVLRRSPQDFDSFLLTVCVQNPLGPDYKGCLIRRSPTGTFLLVGLSRPHSSLRELLATCWDGGLHVDGVAVTLTSCCIPRPKEKSNLIVVQRGHSPPTSSLVQPQSQYQLSQMTFHKIPADSLEWHENLGHGSFTKIYRGCRHEVVDGEARKTEVLLKVMDAKHKNCMESFLEAASLMSQVSYRHLVLLHGVCMAGDSTMVQEFVHLGAIDMYLRKRGHLVPASWKLQVVKQLAYALNYLEDKGLPHGNVSARKVLLAREGADGSPPFIKLSDPGVSPAVLSLEMLTDRIPWVAPECLREAQTLSLEADKWGFGATVWEVFSGVTMPISALDPAKKLQFYEDRQQLPAPKWTELALLIQQCMAYEPVQRPSFRAVIRDLNSLISSDYELLSDPTPGALAPRDGLWNGAQLYACQDPTIFEERHLKYISQLGKGNFGSVELCRYDPLGDNTGALVAVKQLQHSGPDQQRDFQREIQILKALHSDFIVKYRGVSYGPGRQSLRLVMEYLPSGCLRDFLQRHRARLDASRLLLYSSQICKGMEYLGSRRCVHRDLAARNILVESEAHVKIADFGLAKLLPLDKDYYVVREPGQSPIFWYAPESLSDNIFSRQSDVWSFGVVLYELFTYCDKSCSPSAEFLRMMGCERDVPALCRLLELLEEGQRLPAPPACPAEVSAAGLASVSQSVDWAGVSGKPAGA

SEQ ID NO: 19104 - protein, 311 aa, Homo sapiens
MEMENCTRVKEFIFLGLTQNREVSLVLFLFLLLVYVTTLLGNLLIMVTVTCESRLHTPMYFLLHNLSIADICFSSITVPKVLVDLLSERKTISFNHCFTQMFLFHLIGGVDVFSLSVMALDRYVAISKPLHYATIMSRDHCIGLTVAAWLGGFVHSIVQISLLLPLPFCGPNVLDTFYCDVHRVLKLAHTDIFILELLMISNNGLLTTLWFFLLLVSYIVILSLPKSQAGEGRRKAISTCTSHITVVTLHFVPCIYVYARPFTALPMDKAISVTFTVISPLLNPLIYTLRNHEMKSAMRRLKRRLVPSDRK

SEQ ID NO: 19105 - protein, 937 aa, Homo sapiens
MVCPNGYDPGGRHLLLFIIILAAWEAGRGQLHYSVPEEAKHGNFVGRIAQDLGLELAELVPRLFRAVCKFRGDLLEVNLQNGILFVNSRIDREELCGRSAECSIHLEVIVERPLQVFHVDVEVKDINDNPPVFPATQRNLFIAESRPLDSRFPLEGASDADIGENALLTYRLSPNEYFFLDVPTSNQQVKPLGLVLRKLLDREETPELHLLLTATDGGKPELTGTVQLLITVLDNNDNAPVFDRTLYTVKLPENVSIGTLVIHPNASDLDEGLNGDIIYSFSSDVSPDIKSKFHMDPLSGAITVIGHMDFEESRAHKIPVEAVDKGFPPLAGHCTVLVEVVDVNDNAPQLTLTSLSLPIPEDAQPGTVITLISVFDRDFGVNGQVTCSLTPRVPFKLVSTFKNYYSLVLDSALDRESVSAYELVVTARDGGSPSLWATASVSVEVADVNDNAPAFAQPEYTVFVKENNPPGCHIFTVSAGDADAQKNALVSYSLVELRVGERALSSYVSVHAESGKVYALQPLDHEELELLQFQVSARDAGVPPLGSNVTLQVFVLDENDNAPALLAPRVGGTGGAVRELVPRSVGAGHVVAKVRAVDADSGYNAWLSYELQPVAAGASIPFRVGLYTGEISTTRALDETDAPRHRLLVLVKDHGEPSLTATATVLVSLVESGQAPKASSRASLGIAGPETELVDVNVYLIIAICAVSSLLVLTLLLYTALRCSAPSSEGACSLVKPTLVCSSAVGSWSFSQQRRQRVCSGEGPPKTDLMAFSPSLPQGPSSTDNPRQPNPDWRYSASLRAGMHSSVHLEEAGILRAGPGGPDQQWPTVSSATPEPEAGEVSPPVGAGVNSNSWTFKYGPGNPKQSGPGELPDKFIIPGSPAIISIRQEPTNSQIDKSDFITFGKKEETKKKKKKKKGNKTQEKKEKGNSTTDNSDQ

SEQ ID NO: 19106 - protein, 192 aa, Homo sapiens
MTKKRIAVIGGGVSGLSSIKCCVEEGLEPVCFERTDDIGGLWRFQENPEEGRASIYKSVIINTSKEMMCFSDYPIPDHYPNFMHNAQVLEYFRMYAKEFDLLKYIRFKTTVCSVKKQPDFATSGQWEVVTESEGKKEMNVFDGVMVCTGHHTNAHLPLESFPGIEKFKGQYFHSRDYKNPEGFTGKRVIIIG

SEQ ID NO: 19107 - protein, 638 aa, Homo sapiens
MPLPLLPMDLKGEPGPPGKPGPRGPPGPPGFPGKPGMGKPGLHGQPGPAGPPGFSRMGKAGPPGLPGKVGPPGQPGLRGEPGIRGDQGLRGPPGPPGLPGPSGITIPGKPGAQGVPGPPGFQGEPGPQGEPGPPGDRGLKGDNGVGQPGLPGAPGQGGAPGPPGLPGPAGLGKPGLDGLPGAPGDKGESGPPGVPGPRGEPGAVGPKGPPGVDGVGVPGAAGLPGPQGPSGAKGEPGTRGPPGLIGPTGYGMPGLPGPKGDRGPAGVPGLLGDRGEPGEDGEPGEQGPQGLGGPPGLPGSAGLPGRRGPPGPKGEAGPGGPPGVPGIRGDQGPSGLAGKPGVPGERGLPGAHGPPGPTGPKGEPGFTGRPGGPGVAGALGQKGDLGLPGQPGLRGPSGIPGLQGPAGPIGPQGLPGLKGEPGLPGPPGEGRAGEPGTAGPTGPPGVPGSPGITGPPGPPGPPGPPGAPGAFDETGIAGLHLPNGGVEGAVLGKGGKPQFGLGELSAHATPAFTAVLTSPFPASGMPVKFDRTLYNGHSGYNPATGIFTCPVGGVYYFAYHVHVKGTNVWVALYKNNVPATYTYDEYKKGYLDQASGGAVLQLRPNDQVWVQMPSDQANGLYSTEYIHSSFSGFLLCPT

SEQ ID NO: 19108 - protein, 721 aa, Homo sapiens
MSEFRIHHDVNELLSLLRVHGGDGAEVYIDLLQKNRTPYVTTTVSAHSAKVKIAEFSRTPEDFLKKYDELKSKNTRNLDPLVYLLSKLTEDKETLQYLQQNAKERAELAAAAVGSSTTSINVPAAASKISMQELEELRKQLGSVATGSTLQQSLELKRKMLRDKQNKKNSGQHLPIFPAWVYERPALIGDFLIGAGISTDTALPIGTLPLASQESAVVEDLLYVLVGVDGRYVSAQPLAGRQSRTFLVDPNLDLSIRELVHRILPVAASYSAVTRFIEEKSSFEYGQVNHALAAAMRTLVKEHLILVSQLEQLHRQGLLSLQKLWFYIQPAMRTMDILASLATSVDKGECLGGSTLSLLHDRSFSYTGDSQAQELCLYLTKAASAPYFEVLEKWIYRGIIHDPYSEFMVEEHELRKERIQEDYNDKYWDQRYTIVQQQIPSFLQKMADKILSTGKYLNVVRECGHDVTCPVAKEIIYTLKERAYVEQIEKAFNYASKVLLDFLMEEKELVAHLRSIKRYFLMDQGDFFVHFMDLAEEELRKPVEDITPPRLEALLELALRMSTANTDPFKDDLKIDLMPHDLITQLLRVLAIETKQEKAMAHADPTELALSGLEAFSFDYIVKWPLSLIINRKALTRYQMLFRHMFYCKHVERQLCSVWISNKTAKQHSLHSAQWFAGAFTLRQRMLNFVQNIQYYMMFEVMEPTWHILEKNLKSASWTPA

SEQ ID NO: 19109 - protein, 158 aa, Homo sapiens
MESNFNTESSSTFTLQSSSETLFSIQLLDFKTSLLEALEELRMRREAEIHYEEQIGKIIVETQELKWQKETLQNQKETLAEQHKEAMAVFKKQLQMKMCALEEEKGKYQLATEIKEKEIEGLKETLKALQVSKYSLQKKVSEMVRKLQNIFSPIWIST

SEQ ID NO: 19110 - protein, 164 aa, Homo sapiens
MFCSGRKWVAEATICTKLMKREKRRMGKRRAKKAKREEKKKGGERRRNEKRGNQMKRMCERKKYETDLEDQDIMGAFLDKPKMEKHNAQGQGNGLRYGLSSMQGKSRQHECDFDLFSKCTQSIARSSEEGGRVGQVPGMQSRRNHKEAGGRRPRLSPCDAHISE

SEQ ID NO: 19111 - protein, 1124 aa, Homo sapiens
MQTSRHSFSQTTGCVCRSPLFLESSTSWPPLSLLPNLLPIIASIENNICGEHWDEWTRMLLSREMHQCRSDEYNCSSGMCIRSSWVCDGDNDCRDWSDEANCTAIYHTCEASNFQCRNGHCIPQRWACDGDTDCQDGSDEDPVNCEKKCNGFRCPNGTCIPSSKHCDGLRDCSDGSDEQHCEPLCTHFMDFVCKNRQQCLFHSMVCDGIIQCRDGSDEDAAFAGCSQDPEFHKVCDEFGFQCQNGVCISLIWKCDGMDDCGDYSDEANCENPTEAPNCSRYFQFRCENGHCIPNRWKCDRENDCGDWSDEKDCGDSHILPFSTPGPSTCLPNYYRCSSGTCVMDTWVCDGYRDCADGSDEEACPLLANVTAASTPTQLGRCDRFEFECHQPKTCIPNWKRCDGHQDCQDGRDEANCPTHSTLTCMSREFQCEDGEACIVLSERCDGFLDCSDESDEKACSDELTVYKVQNLQWTADFSGDVTLTWMRPKKMPSASCVYNVYYRVVGESIWKTLETHSNKTNTVLKVLKPDTTYQVKVQVQCLSKAHNTNDFVTLRTPEGLPDAPRNLQLSLPREAEGVIVGHWAPPIHTHGLIREYIVEYSRSGSKMWASQRAASNFTEIKNLLVNTLYTVRVAAVTSRGIGNWSDSKSITTIKGKVIPPPDIHIDSYGENYLSFTLTMESDIKVNGYVVNLFWAFDTHKQERRTLNFRGSILSHKVGNLTAHTSYEISAWAKTDLGDSPLAFEHVMTRGVRPPAPSLKAKAINQTAVECTWTGPRNVVYGIFYATSFLDLYRNPKSLTTSLHNKTVIVSKDEQYLFLVRVVVPYQGPSSDYVVVKMIPDSRLPPRHLHVVHTGKTSVVIKWESPYDSPDQDLLYAVAVKDLIRKTDRSYKVKSRNSTVEYTLNKLEPGGKYHIIVQLGNMSKDSSIKITTVSLSAPDALKIITENDHVLLFWKSLALKEKHFNESRGYEIHMFDSAMNITAYLGNTTDNFFKISNLKMGHNYTFTVQARCLFGNQICGEPAILLYDELGSGADASATQAARSTDVAAVVVPILFLILLSLGVGFAILYTKHRRLQSSFTAFANSHYSSRLGSAIFSSGDDLGEDDEDAPMITGFSDDVPMVIA

SEQ ID NO: 19112 - protein, 154 aa, Homo sapiens
LEPGSPKARQGIIPEEYVLTRLAEDPAKPRYRARQRRARFVSKKGNCNVAHKNIREQGRFLQDVFTTLVDLKWPHTLLIFTMSFLCSWLLFAMAWWLIAFAHGDLAPSEGTAEPCVTSIHSFSSAFLFSIEVQVTIGFGGRMVTEECPLAILIL

SEQ ID NO: 19113 - protein, 115 aa, Homo sapiens
MWRPVQLCHFHSALLHSRQKPWPSPAVFFRRNVRGLPPRFSSPTPLWRKVLSTAVVGAPLLLGARYVMAEAREKRRMRLVVDGMGRFGRPCLPRPWRPTLLVSSSLPSGPQAAGL

SEQ ID NO: 19114 - protein, 154 aa, Homo sapiens
MADHSFSDGVPSDSVEAAKNASNTEKLTDQVMQNPRVLAALQERLDNVPHTPSSYIETLPKAVKRRINALKQLQDIKVKFSDPGQPMSFVLEFHFEPNDYFTNSVLTKTYKMKSEPDKADPFSFEGPEIVDCDGCTIDWKKGKNVTVKTIKKKQ

SEQ ID NO: 19115 - protein, 718 aa, Homo sapiens
MLQQELLSRTSLETQKLDLMTEVSELKLKLVGMEKEQREQEEKQRKAEELLQELRHLKIKVEELENERNQYEWKLKATKAEVAQLQEQVALKDAEIERLHSQLSRTAALHSESHTERDQEIQRLKMGMETLLLANEDKDRRIEELTGLLNQYRKVKEIVMVTQGPSERTLSINEEEPEGGFSKWNATNKDPEELFKQEMPPRCSSPTVGPPPLPQKSLETRAQKKLSCSLEDLRSESVDKCMDGNQPFPVLEPKDSPFLAEHKYPTLPGKLSGATPNGEAAKSPPTICQPDATGSSLLRLRDTESGWDDTAVVNDLSSTSSGTESGPQSPLTPDGKRNPKGIKKFWGKIRRTQSGNFYTDTLGMAEFRRGGLRATAGPRLSRTRDSKGQKSDANAPFAQWSTERVCAWLEDFGLAQYVIFARQWVSSGHTLLTATPQDMEKELGIKHPLHRKKLVLAVKAINTKQEEKSALLDHIWVTRWLDDIGLPQYKDQFHESRVDRRMLQYLTVNDLLFLKVTSQLHHLSIKCAIHVLHVNKFNPHCLHRRPADESNLSPSEVVQWSNHRVMEWLRSVDLAEYAPNLRGSGVHGGLIILEPRFTGDTLAMLLNIPPQKTLLRRHLTTKFNALIGPEAEQEKREKMASPAYTPLTTTAKVRPRKLGFSHFGNIRKKKFDESTDYICPMEPSDGVSDSHRVYSGYRGLSPLDAPELDGLDQVGQIS

SEQ ID NO: 19116 - protein, 555 aa, Homo sapiens
MADRGGVGEAAAVGASPASVPGLNPTLGWRERLRAGLAGTGASLWFVAGLGLLYALRIPLRLCENLAAVTVFLNSLTPKFYVALTGTSSLISGLIFIFEWWYFHKHGTSFIEQVSVSHLQPLMGGTESSISEPGSPSRNRENETSRQNLSECKVWRNPLNLFRGAEYRRYTWVTGKEPLTYYDMNLSAQDHQTFFTCDTDFLRPSDTVMQKAWRERNPPARIKAAYQALELNNDCATAYVLLAEEEATTIVDAERLFKQALKAGETIYRQSQQCQHQSPQHEAQLRRDTNVLVYIKRRLAMCARKLGRIREAVKIMRDLMKEFPPLTMLNIHENLLESLLELQAYPDVQAVLAKYDDISLPKSAAICYTAALLKTRTVSEKFSPETASRRGLSTAEINAVEAIHRAVEFNPHVPKYLLEMKSLILPPEHILKRGDSEAIAYAFFHLQHWKRIEGALNLLQCTWEGTFRMIPYPLEKGHLFYPYPSCTETADRELLPTFHHVSVYPKKELPLFIHFTAGFCSSTAMIAILTHQFPEIMGIFAKAVVGVKTQKENAD

SEQ ID NO: 19117 - protein, 738 aa, Homo sapiens
MKGFKLSCTASNSNRSTPACSPILRKRSRSPTPQNQDGDTMVEKGSDHSSDKSPSTPEQGVQRSCSSQSGRSGGKNSKKSQSWYNVLSPTYKQRNEDFRKLFKQLPDTERLIVDYSCALQRDILLQGRLYLSENWICFYSNIFRWETLLTVRLKDICSMTKEKTARLIPNAIQVCTDSEKHFFTSFGARDRTYMMMFRLWQNALLEKPLCPKELWHFVHQCYGNELGLTSDDEDYVPPDDDFNTMGYCEEIPVEENEVNDSSSKSSIETKPDASPQLPKKSITNSTLTSTGSSEAPVSFDGLPLEEEALEGDGSLEKELAIDNIMGEKIEMIAPVNSPSLDFNDNEDIPTELSDSSDTHDEGEVQAFYEDLSGRQYVNEVFNFSVDKLYDLLFTNSPFQRDFMEQRRFSDIIFHPWKKEENGNQSRVILYTITLTNPLAPKTATVRETQTMYKASQESECYVIDAEVLTHDVPYHDYFYTINRYTLTRVARNKSRLRVSTELRYRKQPWGLVKTFIEKNFWSGLEDYFRHLESELAKTESTYLAEMHRQSPKEKASKTTTVRRRKRPHAHLRVPHLEEVMSPVTTPTDEDVGHRIKHVAGSTQTRHIPEDTPNGFHLQSVSKLLLVISCVICFSLVLLVILNMMLFYKLWMLEYTTQTLTAWQGLRLQERLPQSQTEWAQLLESQQKYHDTELQKWREIIKSSVMLLDQMKDSLINLQNGIRSRDYTSESEEKRNRYH

SEQ ID NO: 19118 - protein, 747 aa, Homo sapiens
MGRSNSRSHSSRSKSRSQSSSRSRSRSHSRKKRYSSRSRSRTYSRSRSRDRMYSRDYRRDYRNNRGMRRPYGYRGRGRGYYQGGGGRYHRGGYRPVWNRRHSRSPRRGRSRSRSPKRRSVSSQRSRSRSRRSYRSSRSPRSSSSRSSSPYSKSPVSKRRGSQEKQTKKAEGEPQEESPLKSKSQEEPKDTFEHDPSESIDEFNKSSATSGDIWPGLSAYDNSPRSPHSPSPIATPPSQSSSCSDAPMLSTVHSAKNTPSQHSHSIQHSPERSGSGSVGNGSSRYSPSQNSPIHHIPSRRSPAKTIAPQNAPRDESRGRSSFYPDGGDQETAKTGKFLKSPPLHKNLDAREKSTFREESPLRIKMIASDSHRPEVKLKMAPVPLDDSNRPASLTKDRLLASTLVHSVKKEQEFRSIFDHIKLPQASKSTSESFIQHIVSLVHHVKEQYFKSAAMTLNERFTSYQKATEEHSTRQKSPEIHRRIDISPSTLRKHTRLAGEERVFKEENQKGDKKLRCDSADLRHDIDRRRKERSKERGDSKGSRESSGSRKQEKTPKDYKEYKSYKDDSKHKREQDHSRSSSSSASPSSPSSREEKESKKEREEEFKTHHEMKEYSGFAGVSRPRGTFFRIRGRGRARGVFAGTNTGPNNSNTTFQKRPKEEEWDPEYTPKSKKYFLHDDRDDGVDYWAKRGRGRGTFQRGRGRFNFKKSGSSPKWTHDKYQGDGIVEDEEETMENNEEKKDRRKEEKE

SEQ ID NO: 19119 - protein, 491 aa, Homo sapiens
MERDSHGNASPARTPSAGASPAQASPAGTPPGRASPAQASPAQASPAGTPPGRASPAQASPAGTPPGRASPGRASPAQASPAQASPARASPALASLSRSSSGRSSSARSASVTTSPTRVYLVRATPVGAVPIRSSPARSAPATRATRESPGTSLPKFTWREGQKQLPLIGCVLLLIALVVSLIILFQFWQGHTGIRYKEQRESCPKHAVRCDGVVDCKLKSDELGCVRFDWDKSLLKIYSGSSHQWLPICSSNWNDSYSEKTCQQLGFESAHRTTEVAHRDFANSFSILRYNSTIQESLHRSECPSQRYISLQCSHCGLRAMTGRIVGGALASDSKWPWQVSLHFGTTHICGGTLIDAQWVLTAAHCFFVTREKVLEGWKVYAGTSNLHQLPEAASIAEIIINSNYTDEEDDYDIALMRLSKPLTLSGEGICTPRSPAPQPQHPLQPSHLSASVNSYPGPKASAGQKSKTLKDPYMEHFCFIIRETEAQGL

SEQ ID NO: 19120 - protein, 1106 aa, Homo sapiens
MRKPRRKSRQNAEGRRSPSPYSLKCSPTRETLTYAQAQRIVEVDIDGRLHRISIYDPLKIITEDELTAQDITECNSNKENSEQPQFPGKSKKPSSKGKKKESCSKHASGTSFHLPQPSFRMVDSGIQPEAPPLPAAYYRYIEKPPEDLDAEVEYDMDEEDLAWLDMVNEKRRVDGHSLVSADTFELLVDRLEKESYLESRSSGAQQSLIDEDAFCCVCLDDECHNSNVILFCDICNLAVHQECYGVPYIPEGQWLCRCCLQSPSRPVDCILCPNKGGAFKQTSDGHWAHVVCAIWIPEVCFANTVFLEPIEGIDNIPPARWKLTCYICKQKGLGAAIQCHKVNCYTAFHVTCAQRAGLFMKIEPMRETSLNGTIFTVRKTAYCEAHSPPGAATARRKGDSPRSISETGDEEGLKEGDGEEEEEEEVEEEEQEAQGGVSGSLKGVPKKSKMSLKQKIKKEPEEAGQDTPSTLPMLAVPQIPSYRLNKICSGLSFQRKNQFMQRLHNYWLLKRQARNGVPLIRRLHSHLQSQRNAEQREQDEKTSAVKEELKYWQKLRHDLERARLLIELIRKREKLKREQVKVQQAAMELELMPFNVLLRTTLDLLQEKDPAHIFAEPVNLSEVPDYLEFISKPMDFSTMRRKLESHLYRTLEEFEEDFNLIVTNCMKYNAKDTIFHRAAVRLRDLGGAILRHARRQAENIGYDPERGTHLPESPKLEDFYRFSWEDVDNILIPENRAHLSPEVQLKELLEKLDLVSAMRSSGARTRRVRLLRREINALRQKLAQPPPPQPPSLNKTVSNGELPAGPQGDAAVLEQALQEEPEDDGDRDDSKLPPPPTLEPTGPAPSLSEQESPPEPPTLKPINDSKPPSRFLKPRKVEEDELLEKSPLQLGNEPLQRLLSDNGINRLSLMAPDTPAGTPLSGVGRRTSVLFKKAKNGVKLQRSPDRVLENGEDHGVAGSPASPASIEEERHSRKRPRSRSCSESEGERSPQQEEETGMTNGFGKHTESGSDSECSLGLSGGLAFEACSGLTPPKRSRGKPALSRVPFLEGVNGDSDYNGSDHRSQDAPGGPPAQWRSHPCPPAGRAEAGRAETGRGWREALPCPLL

SEQ ID NO: 19121 - protein, 1165 aa, Homo sapiens
MTFWIIINKKMKTLAERRRSAPSLILDKALQKRPTTRDSPSASVDTCTFLSSLVCSNRTLLIDGRAELKRGLQRQERHLFLFNDLFVVAKIKYNNNFKIKNKIKLTDMWTASCVDEVGEGNTNAMKSFVLGWPTVNFVATFSSPEQKDKWLSLLQRYINLEKEKDYPKSIPLKIFAKDIGNCAYSKTITVMNSDTANEVINMSLPMLGITGSERDYQLWVNSGKEEAPYPLIGHEYPYGIKMSHLRDSALLTPGSKDSTTPFNLQEPFLMEQLPREMQCQFILKPSRLAAAQQLSDSGHKTFKRRRSIINWAFWRGSSTHLDNLPSSPTSPMPGQLFGISLPNICENDNLPKPVLDMLFFLNQKGPLTKGIFRQSANVKSCRELKEKLNSGVEVHLDCESIFVIASVLKDFLRNIPGSIFSSDLYDHWVSVMDQGNDEEKINTVQRLLDQLPRANVVLLRYLFGVLHNIEQHSSSNQMTAFNLAVCVAPSILWPPASSSPELENEFTKKVSLLIQFLIENCLRIFGEEITSLFREVSVRCDTRENASDISCFQLNDSSYDSLENELNEDVDAPCSDLVKKLGQGSRSMDSVLTLSDYDLDQPEVEGLLTLSDFDLAHSKDEDVQMKRPLESKPVNILVYTKIPLRDHARAPSAMCTPSYLSTAAANAAKSLRRHRRCSEPSIDYLDSKLSYLREFYQKKLRKSSCDAILSQKDEDYLKQNQPLQEEGKTCFKQSLVTGTDVSKKNATTQNTKKKSLSGSEGNHVKLFPKSKPVAISVASYSPMSSQDHSKNQPFDVNTSGYSPPHTADALKGPRTHRRCSEPNIEDQNRKLTYLRGIYSKKQHKTSCEAGLLHGEEDYLKRHKSLQMEGQKLINQSLVMGIEVGKSSATNQNTEKVLPPRLNLCPRTSYSSLSSPGTSPSGSSVSSQDSAFSQISEHSVFTPTETSSPIDCTFQAQRKREDLSPDFSNASHVSGMPGPSSGQACSRPAYTKKDTMEWHSQMHSVTLHPSTWLRNGVASLKNWSLKKKAKAARPEEEKIASPKGPLEPPPHASGVPEANSLQEEQKDLPLRAAEGLSPVQSAQRCSSSPFQDSERHCSSPFSLVESRLKLCMKSHEEIEPGSQSSSGSLPWERASASSWTLEDATSPDSGPTVVCDIEDRYLTKDI

SEQ ID NO: 19122 - protein, 1437 aa, Homo sapiens
MIWYVATFIASVIGTRGLAAEGAHGLREEPEFVTARAGESVVLRCDVIHPVTGQPPPYVVEWFKFGVPIPIFIKFGYYPPHVDPEYAGRASLHDKASLRLEQVRSEDQGWYECKVLMLDQQYDTFHNGSWVHLTINAPPTFTETPPQYIEAKEGGSITMTCTAFGNPKPIVTWLKEGTLLGASGKYQVSDGSLTVTSVSREDRGAYTCRAYSIQGEAVHTTHLLVQGPPFIVSPPENITVNISQDALLTCRAEAYPGNLTYTWYWQDENVYFQNDLKLRVRILIDGTLIIFRVKPEDSGKYTCVPSNSLGRSPSASAYLTVQYPARVLNMPPVIYVPVGIHGYIRCPVDAEPPATVVKWNKDGRPLQVEKNLGWTLMEDGSIRIEEATEEALGTYTCVPYNTLGTMGQSAPARLVLKDPPYFTVLPGWEYRQEAGRELLIPCAAAGDPFPVITWRKVGKPSRSKHSALPSGSLQFRALSKEDHGEWECVATNVVTSITASTHLTVIGTSPHAPGSVRVQVSMTTANVSWEPGYDGGYEQTFSVWMKRAQFGPHDWLSLPVPPGPSWLLVDTLEPETAYQFSVLAQNKLGTSAFSEVVTVNTLAFPITTPEPLVLVTPPRCLIANRTQQGVLLSWLPPANHSFPIDRYIMEFRVAERWELLDDGIPGTEGEFFAKDLSQDTWYEFRVLAVMQDLISEPSNIAGVSSTDIFPQPDLTEDGLARPVLAGIVATICFLAAAILFSTLAACFVNKQRKRKLKRKKDPPLSITHCRKSLESPLSSGKVSPESIRTLRAPSESSDDQGQPAAKRMLSPTREKELSLYKKTKRAISSKKYSVAKAEAEAEATTPIELISRGPDGRFVMDPAEMEPSLKSRRIEGFPFAEETDMYPEFRQSDEENEDPLVPTSVAALKSQLTPLSSSQESYLPPPAYSPRFQPRGLEGPGGLEGRLQATGQARPPAPRPFHHGQYYGYLSSSSPGEVEPPPFYVPEVGSPLSSVMSSPPLPTEGPFGHPTIPEENGENASNSTLPLTQTPTGGRSPEPWGRPEFPFGGLETPAMMFPHQLPPCDVPESLQPKAGLPRGLPPTSLQVPAAYPGILSLEAPKGWAGKSPGRGPVPAPPAAKWQDRPMQPLVSQGQLRHTSQGMGIPVLPYPEPAEPGAHGGPSTFGLDTRWYEPQPRPRPSPRQARRAEPSLHQVVLQPSRLSPLTQSPLSSRTGSPELAARARPRPGLLQQAEMSEITLQPPAAVSFSRKSTPSTGSPSQSSRSGSPSYRPAMGFTTLATGYPSPPPGPAPAGPGDSLDVFGQTPSPRRTGEELLRPETPPPTLPTSGTLPPAPGNAAAPERLEALKYQRIKKPKKSSKGSSKSKKRSDDSASQTQQLPNSQVLWPDEAVCLRKKKRHSRPDPFARLSDLCHRQLPEDQTAILNSVDHDDPGHATLL

SEQ ID NO: 19123 - protein, 170 aa, Homo sapiens
FVADGIFKAELNEFLTRELAEDGYSGVEVRVTPTRTEIIILATRACYGVLRFIMESGAKGCEVVVSGKLRGQRAKSMKFVDGLMIHSGDPVNYYVDTAVRHVLLRQGVLGIKVKIMLPWDPTGKIGPKKPLPDHVSIVEPKDEILPTTPISEQKGGKPEPPAMPQPVPTA

SEQ ID NO: 19124 - protein, 936 aa, Homo sapiens
MVYSRRGSLGSRLLLLWLLLAYWKAGSGQLHYSIPEEAKHGTFVGRIAQDLGLELAELVPRLFRVASKGRGDLLEVNLQNGILFVNSRIDREELCRRRAECSIHLEVIVDRPLQVFHVEVAVKDINDNPPRFSRQEQRLFILESRMPDSRFPLEGASDLDIGANAQLRYRLNPNEYFDLDVKTNEEETNFLELVLRKSLDREETQEHRLLVIATDGGKPELTGTVQLLINVLDANDNAPEFDKSIYNVRLLENAPSGTLVIKLNASDADEGINKEIVYFFSNLVLDDVKSKFIINSNTGEIKVNGELDYEDYNSYEINIDAMDKSTFPLSGHCKVVVKLLDVNDNTPEMAITTLFLPVKEDAPLSTVIALISVSDRDSGANGQVTCSLMPHVPFKLVSTFKNYYSLVLDSALDRESVSVYELVVTARDGGSPSLWATASVSVEVADVNDNAPAFAQPQYTVFVKENNPPGCHIFTVSARDADAQENALVSYSLVERRVGERPLSSYVSVHAESGKVYALQPLDHEEVELLQFQVSARDAGVPPLGSNVTLQVFVLDENDNAPALLVPRVGGTGGAVSELVPRSVGAGHVVAKVRAVDPDSGYNAWLSYELQPAPGSARIPFRVGLYTGEISTTRSLDETEAPRHRLLVLVKDHGEPPLTATATVLVSLVESGQAPKASSRASAGAVGPEAALVDVNVYLIIAICAVSSLLVLTLLLYTALRCSAQPTEAVCTRGKPTLLCSSAVGSWSYSQQRRQRVCSGEAPPKTDLMAFSPSLPQGPTSTDNPRQPNPDWRYSASLRAGMHSSVHLEEAGILRAGPGGPDQQWPTVSSATPEPEAGEVSPPVGAGVNSNSWTFKYGPGNPKQSGPGELPDKFIIPGSPAIISIRQEPTNSQIDKSDFITFGKKEETKKKKKKKKGNKTQEKKEKGNSTTDNSDQ

SEQ ID NO: 19125 - protein, 339 aa, Homo sapiens
MEGQHNYLCAGRNDCIVDKIRRKNCPACRLRKCCQAGMVLGGRKFKKFNKVRVVRALDAVALPQPVGVPNESQALSQRFTFSPGQDIQLIPPLINLLMSIEPDVIYAGHDNTKPDTSSSLLTSLNQLGERQLLSVVKWSKSLPGFRNLHIDDQITLIQYSWMSLMVFGLGWRSYKHVSGQMLYFAPDLILNEQRMKESSFYSLCLTMWQIPQEFVKLQVSQEEFLCMKVLLLLNTIPLEGLRSQTQFEEMRSSYIRELIKAIGLRQKGVVSSSQRFYQLTKLLDNLHDLVKQLHLYCLNTFIQSRALSVEFPEMMSEVIAAQLPKILAGMVKPLLFHKK

SEQ ID NO: 19126 - protein, 369 aa, Homo sapiens
MEVSPWSCLQKQAAWGRSVVDFFLVITQLGFCSVYIVFLAENVKQVHEGFLESKVFISNSTNSSNPCERRSVDLRIYMLCFLPFIILLVFIRELKNLFVLSFLANVSMAVSLVIIYQYVVRNMPDPHNLPIVAGWKKYPLFFGTAVFAFEGIGVVLPLENQMKESKRFPQALNIGMGIVTTLYVTLATLGYMCFHDEIKGSITLNLPQDVWLYQSVKILYSFGIFVTYSIQFYVPAEIIIPGITSKFHTKWKQICEFGIRSFLVSITCAGAILIPRLDIVISFVGAVSSSTLALILPPLVEILTFSKEHYNIWMVLKNISIAFTGVVGFLLGTYITVEEIIYPTPKVVAGTPQSPFLNLNSTCLTSGLK

SEQ ID NO: 19127 - protein, 702 aa, Homo sapiens
MALLAMHSWRWAAAAAAFEKRRHSAILIRPLVSVSGSGPQWRPHQLGALGTARAYQALQVWPLIEKRTCWHGHAGGGLHTDPKEGLKDVDTRKIIKAMLSYVWPKDRPDLRARVAISLGFLGGAKAMNIVVPFMFKYAVDSLNQMSGNMLNLSDAPNTVATMATAVLIGYGVSRAGAAFFNEVRNAVFGKVAQNSIRRIAKNVFLHLHNLDLGFHLSRQTGALSKAIDRGTRGISFVLSALVFNLLPIMFEVMLVSGVLYYKCGAQFALVTLGTLGTYTAFTVAVTRWRTRFRIEMNKADNDAGNAAIDSLLNYETVKYFNNERYEAQRYDGFLKTYETASLKSTSTLAMLNFGQSAIFSVGLTAIMVLASQGIVAGTLTVGDLVMVNGLLFQLSLPLNFLGTVYRETRQALIDMNTLFTLLKVDTQIKDKVMASPLQITPQTATVAFDNVHFEYIEGQKVLSGISFEVPAGKKVAIVGGSGSGKSTIVRLLFRFYEPQKGSIYLAGQNIQDVSLESLRRAVGVVPQDAVLFHNTIYYNLLYGNISASPEEVYAVAKLAGLHDAILRMPHGYDTQVGERGLKLSGGEKQRVAIARAILKDPPVILYDEATSSLDSITEETILGAMKDVVKHRTSIFIAHRLSTVVDADEIIVLDQGKVAERGTHHGLLANPHSIYSEMWHTQSSRVQNHDNPKWEAKKENIS

SEQ ID NO: 19128 - protein, 1588 aa, Homo sapiens
MEACLKEELPSPVELEESLRNGVLLAKLGHCFAPSVVPLKKIYDVEQLRYQATGLHFRHTDNINFWLSAIAHIGLPSTFFPETTDIYDKKNMPRVVYCIHALSLFLFRLGLAPQIHDLYGKVKFTAEELSNMASELAKYGLQLPAFSKIGGILANELSVDEAAVHAAVLAINEAVERGVVEDTLAALQNPSALLENLREPLAAVYQEMLAQAKMEKAANARNHDDRESQDIYDHYLTQAEIQGNINHVNVHGALEVVDDALERQSPEALLKALQDPALALRGVRRDFADWYLEQLNSDREQKAQELGLVELLEKEEVQAGVAAANTKGDQEQAMLHAVQRINKAIRRRVAADTVKELMCPEAQLPPVYPVASSMYQLELAVLQQQQGELGQEELFVAVEMLSAVVLINRALEARDASGFWSSLVNPATGLAEVEGENAQRYFDALLKLRQERGMGEDFLSWNDLQATVSQVNAQTQEETDRVLAVSLINEALDKGSPEKTLSALLLPAAGLDDVSLPVAPRYHLLLVAAKRQKAQVTGDPGAVLWLEEIRQGVVRANQDTNTAQRMALGVAAINQAIKEGKAAQTERVLRNPAVALRGVVPDCANGYQRALESAMAKKQRPADTAFWVQHDMKDGTAYYFHLQTFQGIWEQPPGCPLNTSHLTREEIQSAVTKVTAAYDRQQLWKANVGFVIQLQARLRGFLVRQKFAEHSHFLRTWLPAVIKIQAHWRGYRQRKIYLEWLQYFKANLDAIIKIQAWARMWAARRQYLRRLHYFQKNVNSIVKIQAFFRARKAQDDYRILVHAPHPPLSVVRRFAHLLNQSQQDFLAEAELLKLQEEVVRKIRSNQQLEQDLNIMDIKIGLLVKNRITLQEVVSHCKKLTKRNKEQLSDMMVLDKQKGLKSLSKEKRQKLEAYQHLFYLLQTQPIYLAKLIFQMPQNKTTKFMEAVIFSLYNYASSRREAYLLLQLFKTALQEEIKSKVEQPQDVVTGNPTVVRLVVRFYRNGRGQSALQEILGKVIQDVLEDKVLSVHTDPVHLYKNWINQTEAQTGQRSHLPYDVTPEQALSHPEVQRRLDIALRNLLAMTDKFLLAITSSVDQIPYGMRYVAKVLKATLAEKFPDATDSEVYKVVGNLLYYRFLNPAVVAPDAFDIVAMAAGGALAAPQRHALGAVAQLLQHAAAGKAFSGQSQHLRVLNDYLEETHLKFRKFIHRACQVPEPEERFAVDEYSDMVAVAKPMVYITVGELVNTHRLLLEHQDCIAPDHQDPLHELLEDLGELPTIPDLIGESIAADGHTDLSKLEVSLTLTNKFEGLEADADDSNTRSLLLSTKQLLADIIQFHPGDTLKEILSLSASREQEAAHKQLMSRRQACTAQTPEPLRRHRSLTAHSLLPLAEKQRRVLRNLRRLEALGLVSARNGYQGLVDELAKDIRNQHRHRHRRKAELVKLQATLQGLSTKTTFYEEQGDYYSQYIRACLDHLAPDSKSSGKGKKQPSLHYTAAQLLEKGVLVEIEDLPASHFRNVIFDITPGDEAGKFEVNAKFLGVDMERFQLHYQDLLQLQYEGVAVMKLFNKAKVNVNLLIFLLNKKFLRK

SEQ ID NO: 19129 - protein, 578 aa, Homo sapiens
MAVRWTWAGKSCLLLAFLTVAYIFVELLVSTFHASAGAGRARELGSRRLSDLQKNTEDLSRPLYKKPPADSRALGEWGKASKLQLNEDELKQQEELIERYAINIYLSDRISLHRHIEDKRMYECKSQKFNYRTLPTTSVIIAFYNEAWSTLLRTIHSVLETSPAVLLKEIILVDDLSDRVYLKTQLETYISNLDRVRLIRTNKREGLVRARLIGATFATGDVLTFLDCHCECNSGWLEPLLERIGRDETAVVCPVIDTIDWNTFEFYMQIGEPMIGGFDWRLTFQWHSVPKQERDRRISRIDPIRSPTMAGGLFAVSKKYFQYLGTYDTGMEVWGGENLELSFRVWQCGGKLEIHPCSHVGHVFPKRAPYARPNFLQNTARAAEVWMDEYKEHFYNRNPPARKEAYGDISERKLLRERLRCKSFDWYLKNVFPNLHVPEDRPGWHGAIRSRGISSECLDYNSPDNNPTGANLSLFGCHGQGGNQFFEYTSNKEIRFNSVTELCAEVPEQKNYVGMQNCPKDGFPVPANIIWHFKEDGTIFHPHSGLCLSAYRTPEGRPDVQMRTCDALDKNQIWSFEK

SEQ ID NO: 19130 - protein, 390 aa, Homo sapiens
MLRSTSTVTLLSGGAARTPGAPSRRANVCRLRLTVPPESPVPEQCEKKIERKEQLLDLSNGEPTRKLPQGVVYGVVRRSDQNQQKEMVVYGWSTSQLKEEMNYIKDVRATLEKVRKRMYGDYDEMRQKIRQLTQELSVSHAQQEYLENHIQTQSSALDRFNAMNSALASDSIGLQKTLVDVTLENSNIKDQIRNLQQTYEASMDKLREKQRQLEVAQVENQLLKMKVESSQEANAEVMREMTKKLYSQYEEKLQEEQRKHSAEKEALLEETNSFLKAIEEANKKMQAAEISLEEKDQRIGELDRLIERMEKERHQLQLQLLEHETEMSGELTDSDKERYQQLEEASASLRERIRHLDDMVHCQQKKVKQMVEEIMSHELFSRFSLRLFGR

SEQ ID NO: 19131 - protein, 824 aa, Homo sapiens
MFPALETHLKQTIPDPYEDFMYRHLQYYGYFKAQRGSLPNSATHQHVRKNNPQCLLNGSLGEKDDLIPDTLQKEKLLWPISLSSAVHRQIEAINRDSHMLSLPHLRSRQLLYDELDEVNPRLREPQELFSILSTKRPLQAPRWPIECEVIKENIHHIEWAPPQPEYFYQPKGNEKVPEIVGEKKGTVVYQLDSVPIEGSYFTSSRVGGKRGIVKELAVTLQGPEDNTLLFESRFESGNLQKAVRVDTYEYELTLRTDLYTNKHTQWFYFRVQNTRKDATYRFTIVNLLKPKSLYTVGMKPLLYSQLDANTRNIGWRREGNEIKYYKNNTDDGQQPFYCLTWTIQFPYDQDTCFFAHFYPYTYTDLQCYLLSVANNPIQSQFCKLQTLCRSLAGNTVYLLTITNPSQTPQEAAAKKAVVLSARVHPGESNGSWVMKGFLDFILSNSPDAQLLRDIFVFKVLPMLNPDGVIVGNYRCSLAGRDLNRHYKTILKESFPCIWYTRNMIKRLLEEREVLLYCDFHGHSRKNNIFLYGCNNNNRKYWLHERVFPLMLCKNAPDKFSFHSCNFKVQKCKEGTGRVVMWRMGILNSYTMESTFGGSTLGNKRDTHFTIEDLKSLGYHVCDTLLDFCDPDQMKFTQCLAELKELLRQEIHKKFHELGQDVDLEGSWSDISLSDIESSTSGSDSSLSDGLPVHLANIADELTQKKKMFKKKKKKSLQTRKQRNEQYQKKNLMQKLKLTEDTSEKAGFASTLQKQPTFFKNSENSSFLPMKNENPRLNEVVFLFLTLCHTDSLTSRISTSLPQCDKCNSHLRYPNLTVPLGARKH

SEQ ID NO: 19132 - protein, 82 aa, Homo sapiens
MEASVLSPTSWEKRRAWLRQSRNWQTQVLEEEAAAALQDVPDPEPSSLDDVFQEGNPINKIEDWLQDCGYSEEGFSEEAGQF

SEQ ID NO: 19133 - protein, 1632 aa, Homo sapiens
MTESSMKKLASTLLDAITDKDPLVQEQVCSALCSLGEARPVETLRACEEYLRQHDKLAHPYRAAVLRAMERVLSSRASELDKDTASTIILLASSEMTKTKDLVWDWQQAASGVLVAVGRQFISKVMEELLRRLHPGTLPHCAVLHTLASLSVANAFGVVPFLPSVLSSLLPVLGVAKQDTVRVAFCSALQRFSEGALEYLANLDRAPDPTVRKDAFATDIFSAYDVLFHQWLQSREAKLRLAVVEALGPMSHLLPSERLEEQLPKLLPGILALYKKHAETFYLSKSLGQILEAAVSVGSRTLETQLDALLAALHSQICVPVESSSPLVMSNQKEVLRCFTVLACSSPDRLLAFLLPRLDTSNERTRVGTLQVVRHVINSAAAQMEDKKPFILSSMRLPLLDTNSKVKRAVVQVISAMAHHGYLEQPGGEAMIEYIVQQCALPPEQEPEKPGPGSKDPKADSVRAISVRTLYLVSTTVDRMSHVLWPYLLQFLTPVRFTGALTPLCRSLVHLAQKRQEAGADAFLIQYDAHASLPSPYAVTGRLLVVSSSPYLGDGRGAAALRLLSVLHPNIHPLLGQHWETTVPLLLGYLDEHTEETLPQEEWEEKLLMFLRDTLAIISDNAWICQLSLELCRQLPCYDEAPQEKNFLYKCIGTTLGAASSKEVVRKHLQELLETARYQEEAEREGLACCFGICAISHLEDTLAQLEDFVRSEVFRKSIGILNIFKDRSENEVEKVKSALILCYGHVAARAPRELVLAKVESDILRNICQHFSTKDPALKLCLVQSVCMVSRAICSSTQAGSFHFTRKAELVAQMMEFIRAEPPDSLRTPIRKKAMLTCTYLVSVEPALDEQARADVIHGCLHSIMALLPEPKEEDGGCQKSLYLETLHALEDLLTSLLQRNMTPQGLQIMIEHLSPWIKSPRGHERARALGLSALLLRYFLEHLRVSALVPFHNLGLLIGLFSPRCADLWPATRQEAVDCVYSLLYLQLGYEGFSRDYRDDVAERLLSLKDGLVHPDPAILFHTCHSVGQIIAKRLPPDQLISLLLTMFEALGDPEKNCSRAATVMINCLLQERGGVLQEKVPEIVSVLRSKLQEAQGEHVLPAAQHSVYLLATQHCAAVVSSLLGSPLPLDSHTCMLWRALAVEPRLAAQVLGLLLEKMSRDVPFKESRAFLLGRTPDRVATLLPLSATCALFEVMSTPAAGPAVLELYPQLFVVLLLRVSCTVGVQLPRNLQAQERRGASPALATRNLEPCSSAVDTLRSMLLRSGSEDVVQRMDLEGGWELLRTSAGHEEGATRLARAMAEHAGPRLPLVLKTLACTHSSAYENQRVTTTAFLAELLNSNVANDLMLLDSLLESLAARQKDTCASVRRLVLRGLANLASGCPDKVRTHGPQLLTAMIGGLDDGDNPHSPVALEAMLGLARLVHLVESWDLRSGLLHVAIRIRPFFDSEKMEFRTASIRLFGHLNKVCHGDCEDVFLDQVVGGLAPLLLHLQDPQATVASACRFALRMCGPNLACEELSAAFQKHLQEGRALHFGEFLNTTCKHLMHHFPDLLGRLLTTCLFYFKSSWENVRAAAPLFTGFLVLHSEPRQQPQVDLDQLIAALQILLKDPAPEVRTRAAEALGRLVKLA

SEQ ID NO: 19134 - protein, 106 aa, Homo sapiens
MVGEGPYLISDLDQRGRRRSFAERYDPSLKTMIPVRPCARLAPNPVDDAGLLSFATFSWLTPVMVKGYRQRLTVDTLPPLSTYDSSDTNAKRFRVLWDEEVARVGP

SEQ ID NO: 19135 - protein, 786 aa, Homo sapiens
MAFGASTFPPQYLSSEITLHPYAYSPYTLDSTQNVYSVPGSQYLYNQPSCYRGFQTVKHRNENTCPLPQEMKALFKKKTYDEKKTYDQQKFDSERADGTISSEIKSARGSHHLSIYAENSLKSDGYHKRTDRKSRIIAKNVSTSKPEFEFTTLDFPELQGAENNMSEIQKQPKWGPVHSVSTDISLLREVVKPAAVLSKGEIVVKNNPNESVTANAATNSPSCTRELSWTPMGYVVRQTLSTELSAAPKNVTSMINLKTIASSADPKNVSIPSSEALSSDPSYNKEKHIIHPTQKSKASQGSDLEQNEASRKNKKKKEKSTSKYEVLTVQEPPRIEDAEEFPNLAVASERRDRIETPKFQSKQQPQDNFKNNVKKSQLPVQLDLGGMLTALEKKQHSQHAKQSSKPVVVSVGAVPVLSKECASGERGRRMSQMKTPHNPLDSSAPLMKKGKQREIPKAKKPTSLKKIILKERQERKQRLQENAVSPAFTSDDTQDGESGGDDQFPEQAELSGPEGMDELISTPSVEDKSEEPPGTELQRDTEASHLAPNHTTFPKIHSRRFRDYCSQMLSKEVDACVTDLLKELVRFQDRMYQKDPVKAKTKRRLVLGLREVLKHLKLKKLKCVIISPNCEKIQSKGGLDDTLHTIIDYACEQNIPFVFALNRKALGRSLNKAVPVSVVGIFSYDGAQDQFHKMVELTVAARQAYKTMLENVQQELVGEPRPQAPPSLPTQGPSCPAEDGPPALKEKEEPHYIEIWKKHLEAYSGCTLELEESLEASTSQMMNLNL

SEQ ID NO: 19136 - protein, 78 aa, Homo sapiens
MEEGARHRNNTEKKHPGGGESDASPEAGSGGGGVALKKEIGLVSACGIIVGNIIGSGIFVSPKGVLENAGSVGLALIV

SEQ ID NO: 19137 - protein, 160 aa, Homo sapiens
MSVCYRPPGNETLLSWKTSRATGTAFLLLAALLGLPGNGFVVWSLAGWRPARGRPLAATLVLHLALADGAVLLLTPLFVAFLTRQAWPLGQAGCKAVYYVCALSMYASVLLTGLLSLQRCLAVTRPFLAPRLRSPALARRLLLAVWLAALLLAVPAAVYR

SEQ ID NO: 19138 - protein, 175 aa, Homo sapiens
MSPSLGFPAQMNHQKGPSPSFGVQPCGPHDSARGGMIPHPQSRGPFPTCQLKSELDMLVGKCREEPLEGDMSSPNSTGIQDPLLGMLDGREDLEREEKREPESVYETDCRWDGCSQEFDSQEQLVHHINSEHIHGERKEFVCHWGGCSRELRPFKAQYMLVVHMRRHTGEKPHKC

SEQ ID NO: 19139 - protein, 107 aa, Homo sapiens
MLRLYPGPMVTEAEGKGGPEMASLSSSVVPVSFISTLRESVLDPGVGGEGASDKQRSKLSLSHSMIPAAKIHTELCLPAFFSPAGTQRRFQQPQHHLTLSIIHTAAR

SEQ ID NO: 19140 - protein, 136 aa, Homo sapiens
MSWKKALRIPGDLRVATVTLMLAMLSSLLAEGRDSPEDFVFQFKGMCYFTNGTERVRLVTRYIYNREEYARFDSDVGVYRAVTPQGRPDAEYWNSQKEVLEGTRAELDTVCRHNYEVAFRGILQRRGMVTGLSRSW

SEQ ID NO: 19141 - protein, 924 aa, Homo sapiens
MAWLRLQPLTSAFLHFGLVTFVLFLNGLRAEAGGSGDVPSTGQNNESCSGSSDCKEGVILPIWYPENPSLGDKIARVIVYFVALIYMFLGVSIIADRFMASIEVITSQEREVTIKKPNGETSTTTIRVWNETVSNLTLMALGSSAPEILLSLIEVCGHGFIAGDLGPSTIVGSAAFNMFIIIGICVYVIPDGETRKIKHLRVFFITAAWSIFAYIWLYMILAVFSPGVVQVWEGLLTLFFFPVCVLLAWVADKRLLFYKYMHKKYRTDKHRGIIIETEGDHPKGIEMDGKMMNSHFLDGNLVPLEGKEVDESRREMIRILKDLKQKHPEKDLDQLVEMANYYALSHQQKSRAFYRIQATRMMTGAGNILKKHAAEQAKKASSMSEVHTDEPEDFISKVFFDPCSYQCLENCGAVLLTVVRKGGDMSKTMYVDYKTEDGSANAGADYEFTEGTVVLKPGETQKEFSVGIIDDDIFEEDEHFFVRLSNVRIEEEQPEEGMPPAIFNSLPLPRAVLASPCVATVTILDDDHAGIFTFECDTIHVSESIGVMEVKVLRTSGARGTVIVPFRTVEGTAKGGGEDFEDTYGELEFKNDETVKTIRVKIVDEEEYERQENFFIALGEPKWMERGISALLLSPDRKLTMEEEEAKRIAEMGKPVLGEHPKLEVIIEESYEFKTTVDKLIKKTNLALVVGTHSWRDQFMEAITVSAAGDEDEDESGEERLPSCFDYVMHFLTVFWKVLFACVPPTEYCHGWACFAVSILIIGMLTAIIGDLASHFGCTIGLKDSVTAVVFVAFGTSVPDTFASKAAALQDVYADASIGNVTGSNAVNVFLGIGLAWSVAAIYWALQGQEFHVSAGTLAFSVTLFTIFAFVCISVLLYRRRPHLGGELGGPRGCKLATTWLFVSLWLLYILFATLEAYCYIKGF

SEQ ID NO: 19142 - protein, 187 aa, Homo sapiens
GTRQPPYGPSAPVPPMTRPPPSNYQPPPSMQNHIPQVSSPAPLPRPMENRTSPSKSPFLHSGMKMQKAGPPVPASHIAPAPVQPPMIRRDITFPPGSVEATQPVLKQRRRLTMKDIGTPEAWRVMMSLKSGLLAESTWALDTINILLYDDNSIMTFNLSQISSMPVLCFLCLWARAQDFDSNNNLFT

SEQ ID NO: 19143 - protein, 342 aa, Homo sapiens
MAVSWRSWLANEGVKHLCLFIWLSMNVLLFWKTFLLYNQGPEYHYLHQMLGLGLCLSRASASVLNLNCSLILLPMCRTLLAYLRGSQKVPSRRTRRLLDKSRTFHITCGVTICIFSGVHVAAHLVNALNFSVNYSEDFVELNAARYRDEDPRKLLFTTVPGLTGVCMVVVLFLMITASTYAIRVSNYDIFWYTHNLFFVFYMLLTLHVSGDDWKPYKLRRLYFIWVCRDIQSFRWFADLLCMLHNKFWQENRPDYVNIQLYLSQTDGIQKIIGEKYHALNSRLFIGRPRWKLLFDEIAKYNRGKTVGVFCCGPNSLSKTLHKLSNQNNSYGTRFEYNKESFS

SEQ ID NO: 19144 - protein, 95 aa, Homo sapiens
MENHKSNNKENITIVDISRKINQLPEAERNLLENGSVYVGLNAALCGLIANSLFRRILNVTKARIAAGLPMAGIPFLTTDLTYRCFVIWIVKPVP

SEQ ID NO: 19145 - protein, 224 aa, Homo sapiens
VISQLRILGRSITAGSKFDREIWSNELSPVLNLWKKLNQCPLAWQSKWEGPEDPLQYLRGLVARALAIQNWVDKAEKQALLSETLDLSELFHPDTFLNALRQETARAVGRSVDSLKFVASWKGRLQEAKLQIKISGLLLEGCSFDGNQLSENQLDSPSVSSVLPCFMGWIPQDACGPYSPDECISLPVYTSAERDRVVTNIDVPCGGNQDQWIQCGAALFLKNQ

SEQ ID NO: 19146 - protein, 885 aa, Homo sapiens
MANGTLTRRHQNGRFVGDADLERQKFSDLKLNGPQDHSHLLYSTIPRMQEPGQIVETYTEEDPEGAMSVVSVETSDDGTTRRTETTVKKVVKTVTTRTVQPVAMGPDGLPVDASSVSNNYIQTLGRDFRKNGNGGPGPYVGQAGTATLPRNFHYPPDGYSRHYEDGYPGGSDNYGSLSRVTRIEERYRPSMEGYRAPSRQDVYGPQPQVRVGGSSVDLHRFHPEPYGLEDDQRSMGYDDLDYGMMSDYGTARRTGTPSDPRRRLRSYEDMIGEEVPSDQYYWAPLAQHERGSLASLDSLRKGGPPPPNWRQPELPEVIAMLGFRLDAVKSNAAAYLQHLCYRNDKVKTDVRKLKGIPVLVGLLDHPKKEVHLGACGALKNISFGRDQDNKIAIKNCDGVPALVRLLRKARDMDLTEVITGTLWNLSSHDSIKMEIVDHALHALTDEVIIPHSGWEREPNEDCKPRHIEWESVLTNTAGCLRNVSSERSEARRKLRECDGLVDALIFIVQAEIGQKDSDSKLVENCVCLLRNLSYQVHREIPQAERYQEAAPNVANNTGPHAASCFGAKKGKDEWFSRGKKPIEDPANDTVDFPKRTSPARGYELLFQPEVVRIYISLLKESKTPAILEASAGAIQNLCAGRWTYGRYIRSALRQEKALSAIADLLTNEHERVVKAASGALRNLAVDARNKELIGKHAIPNLVKNLPGGQQNSSWNFSEDTVISILNTINEVIAENLEAAKKLRETQGIEKLVLINKSGNRSEKEVRAAALVLQTIWGYKELRKPLEKEGWKKSDFQVNLNNASRSQSSHSYDDSTLPLIDRNQKSDKKPDREEIQMSNMGSNTKSLDNNYSTPNERGDHNRTLDRSGDLGDMEPLKGTTPLMQKI

SEQ ID NO: 19147 - protein, 649 aa, Homo sapiens
DLAPYFTSEPLSAVQKLGGPVVLHCSAQPVTTRISWLHNGKTLDGNLEHVKIHQGTLTILSLNSSLLGYYQCLANNSIGAIVSGPATVSVAVLGDFGSSTKHVITAEEKSAGFIGCRVPESNPKAEVRYKIRGKWLEHSTENYLILPSGNLQILNVSLEDKGSYKCAAYNPVTHQLKVEPIGRKLLVSRPSSDDVHILHPTHSQALAVLSRSPVTLECVVSGVPAPQVYWLKDGQDIAPGSNWRRLYSHLATDSVDPADSGNYSCMAGNKSGDVKYVTYMVNVLEHASISKGLQDQIVSLGATVHFTCDVHGNPAPNCTWFHNAQPIHPSARHLTAGNGLKISGVTVEDVGMYQCVADNGIGFMHSTGRLEIENDGGFKPVIITAPVSAKVADGDFVTLSCNASGLPVPVIRWYDSHGLITSHPSQVLRSKSRKSQLSRPEGLNLEPVYFVLSQAGASSLHIQAVTQEHAGKYICEAANEHGTTQAEASLMVVPFETNTKAETVTLPDAAQNDDRSKRDGSETGLLSSFPVKVHPSAVESAPEKNASGISVPDAPIILSPPQTHTPDTYNLVWRAGKDGGLPINAYFVKYRKLDDGVGMLGSWHTVRVPGSENELHLAELEPSSLYEVLMVARSAAGEGQPAMLTFRTS

SEQ ID NO: 19148 - protein, 247 aa, Homo sapiens
MGWQRLLLLPRPPASTGASNATRRPKSCTETITTKSCQKPVDKYIEYDPVIILINAILCKAQAYRHILFNTQINIHGKLCIFCLLCEAYLRWWQLQDSNQNTAPDDLIRYAKEWDFYRMFAIAALEQTAYFIGIFTFLWVERPMTAKKKPNFILLLKALLLSSYGKLLLIPAVIWEHDYTSVCLKLIKVFVLTSNFQAIRVTLNINRKLSFLAVLSGLLLESIMVYFFQSMEWDVGSDYAIFKSQDF

SEQ ID NO: 19149 - protein, 2235 aa, Homo sapiens
MPLFFSALLVLLLVALSALFLGRWLVVRLATKWCQRKLQAELKIGSFRFFWIQNVSLKFQQHQQTVEIDNLWISSKLLSHDLPHYVALCFGEVRIRTDLQKVSDLSAPFSQSAGVDQKELSFSPSLLKIFCQLFSIHVDAINIMVLKVDTSESLWHIQISRSRFLLDSDGKRLICEVSLCKINSKVLKSGQLEDTCLVELSLALDLCLKVGISSRHLTAITVDVWTLHAELHEGLFQSQLLCQGPSLASKPVPCSEVTENLVEPTLPGLFLLQQLPDQVKVKMENTSVVLSMNSQKRHLTWTLKLLQFLYHRDEDQLPLRSFTANSDMAQMSTELLLEDGLLLSQSRQRIVCLNSLKASVQVTTIDLSASLVLNTCIIHYRHQEFSHWLHLLALETQGSSSPVLKQRKKRTFPQILAPIIFSTSISNVNISIQLGDTPPFALGFNSISLDYQHLRPQSIHQRGVLTVDHLCWRVGSDSHIQRAPHPPNMHVWGEALVLDSFTLQGSYNQPLGLSSTQSDTLFLDCTIRGLQVEASDTCAQCLSRILSLMGPQSGKSAVSRHSSFGESVSLLWKVDLKVEDMNLFTLSALVGASEVRLDTLTILGSAETSTVGIQGLVLALVKSVTEKMQPCCKAPDIPTPVLSLSMLSITYHSSIRSLEVQCGAGLTLLWSPPDHMYLYQHVLATLQCRDLLRATVFPETVPSLALETSGTTSELEGRAPEPLPPKRLLNLTLEVSTAKLTAFVAEDKFITLAAESVSLSRHGGSLQAYCPELAAGFDGNSIFNFKEVEVQLLPELEEMILHRNPFPALQTLRNRVWLLSFGSVSVEFPYQYDFSRTLDEAVGVQKWLKGLHQGTRAWASPSPVPLPPDLLLKVEHFSWVFLDDVFEVKLHDNYELMKDESKESAKRLQLLDAKVAALRKQHGELLPARKIEELYASLERKNIEIYIQRSRRLYGNTPMRRALLTWSLAGLELVALADASFHGPEHVVEQVQELDPGSPFPPEGLDLVIQWCRMLKCNVKSFLVRIRDYPRYLFEIRDWRLMGRLVGTEQSGQPCSRRRQILHLGLPWGNVAVERNMPPLKFYHDFHSEIFQYTVVWGPCWDPAWTLIGQCVDLLTKPSADPSPPLPWWDKSRLLFHGDWHMDIEQANLHQLATEDPYNTTENMHWEWSHLSFHWKPGQFVFKGDLDINVRTASKYDDCCFLHLPDLCMTLDLQWLCHGNPHDHHSVTLRAPEFLPEVPLGQLHDSYRAFRSENLNLSIKMDLTRHSGTISQPRILLYSSTLRWMQNFWATWTSVTRPICRGKLFNNLKPSKKKLGQHYKQLSYTALFPQLQVHYWASFAQQRGIQIECSQGHVFTRGTQRLIPQAGTVMRRLISDWSVTQMVSDLSQVTVHLMASPTEENADHCLDPLVTKTHLLSLSSLTYQRHSNRTAEEELSARDGDPTFHTHQLHLVDLRISWTTTNRDIAFGLYDGYKKAAVLKRNLSTEALKGLKIDPQMPAKKPKRGVPTSASAPPRVNTPSFSGQPDKGSSGGAYMLQKLIEETDRFVVFTEEESGMSDQLCGIAACQTDDIYNRNCLIELVNCQMVLRGAETEGCVIVSAAKAQLLQCQHHPAWYGDTLKQKTSWTCLLDGMQYFATTESSPTEQDGRQLWLEVKNIEEHRQRSLDSVQELMESGQAVGGMVTTTTDWNQPAEAQQAQQVQRIISRCNCRMYYISYSHDIDPELATQIKPPEVLENQEKEDLLKKQEGAVDTFTLIHHELEISTNPAQYAMILDIVNNLLLHVEPKRKEHSEKKQRVRFQLEISSNPEEQRSSILHLQEAVRQHVAQIRQLEKQMYSIMKSLQDDSKNENLLDLNQKLQLQLNQEKANLQLESEELNILIRCFKDFQLQRANKMELRKQQEDVSVVRRTEFYFAQARWRLTEEDGQLGIAELELQRFLYSKVNKSDDTAEHLLELGWFTMNNLLPNAVYKVVLRPQSSCQSGRQLALRLFSKVRPPVGGISVKEHFEVNVVPLTIQLTHQFFHRMMGFFFPGRSVEDDEVGDEEDKSKLVTTGIPVVKPRQLIATDDAVPLGPGKGVAQGLTRSSGVRRSFRKSPEHPVDDIDKMKERAAMNNSFIYIKIPQVPLCVSYKGEKNSVDWGDLNLVLPCLEYHNNTWTWLDFAMAVKRDSRKALVAQVIKEKLRLKSATGSEVRGKLETKSDLNMQQQEEEEKARLLIGLSVGDKNPGKKSIFGRRK

SEQ ID NO: 19150 - protein, 714 aa, Homo sapiens
MLETYSHLLSVGYQVPKPEVVMLEQGKEPWALQGERPRHSCPGEKLWDHNQHRKIIGYKPASSQDQKIYSGEKSYECAEFGKSFTWKSQFKVHLKVPTGEKLYVCIECGRAFVQKPEFITHQKTHMREKPYKCNECGKSFFQVSSLFRHHRIHTGEKLYECSECGKGFPYNSDLSIHEKIHTGERHHECTDCGKAFTQKSTLKIHQKIHTGERSYICIECGQAFIQKTQLIAHRRIHSGEKPYECNNCGKSFISKSQLQVHQRVHTRVKPYICTEYGKVFSNNSNLITHEKIQSREKSSICTECGKAFTYRSELIIHQRIHTGEKPYECSDCGRAFTQKSALTVHQRIHTGEKSYICMKCGLAFIRKAHLITHQIIHTGEKPYKCGHCGKLFTSKSQLHVHKRIHTGEKPYVCNKCGKAFTNRSNLITHQKTHTGEKSYICSKCGKAFTQRSDLITHQRIHTGEKPYECNTCGKAFTQKSNLNIHQKIHTGERQYECHECGKAFNQKSILIVHQKIHTGEKPYVCTECGRAFIRKSNFITHQRIHTGEKPYECSDCGKSFTSKSQLLVHQPVHTGEKPYVCAECGKAFSGRSNLSKHQKTHTGEKPYICSECGKTFRQKSELITHHRIHTGEKPYECSDCGKSFTKKSQLQVHQRIHTGEKPYVCAECGKAFSNRSNLNKHQTTHTGDKPYKCGICGKGFVQKSVFSVHQSSHA

SEQ ID NO: 19151 - protein, 592 aa, Homo sapiens
EGMAGAVPGAIMDEDYYGSAAEWGDEADGGQQEDDSGEGEDDAEVQQECLHKFSTRDYIMEPSIFNTLKRYFQAGGSPENVIQLLSENYTAVAQTVNLLAEWLIQTGVEPVQVQETVENHLKSLLIKHFDPRKADSIFTEEGETPAWLEQMIAHTTWRDLFYKLAEAHPDCLMLNFTVKLISDAGYQGEITSVSTACQQLEVFSRVLRTSLATILDGGEENLEKNLPEFAKMVCHGEHTYLFAQAMMSVLAQEEQGGSAVRRIAQEVQRFAQEKGHDASQITLALGTAASYPRACQALGAMLSKGALNPADITVLFKMFTSMDPPPVELIRVPAFLDLFMQSLFKPGARINQDHKHKYIHILAYAASVVETWKKNKRVSINKDELKSTSKAVETVHNLCCNENKGASELVAELSTLYQCIRFPVVAMGVLKWVDWTVSEPRYFQLQTDHTPVHLALLDEISTCHQLLHPQVLQLLVKLFETEHSQLDVMEQLELKKTLLDRMVHLLSRGYVLPVVSYIRKCLEKLDTDISLIRYFVTEVLDVIAPPYTSDFVQLFLPILENDSIAGTIKTEGEHDPVTEFIAHCKSNFIMVN

SEQ ID NO: 19152 - protein, 3972 aa, Homo sapiens
MAHSCRWRFPARPGTTGGGGGGGRRGLGGAPRQRVPALLLPPGPPVGGGGPGAPPSPPAVAAAAAAAGSSGAGVPGGAAAASAASSSSASSSSSSSSSASSGPALLRVGPGFDAALQVSAAIGTNLRRFRAVFGESGGGGGSGEDEQFLGFGSDEEVRVRSPTRSPSVKTSPRKPRGRPRSGSDRNSAILSDPSVFSPLNKSETKSGDKIKKKDSKSIEKKRGRPPTFPGVKIKITHGKDISELPKGNKEDSLKKIKRTPSATFQQATKIKKLRAGKLSPLKSKFKTGKLQIGRKGVQIVRRRGRPPSTERIKTPSGLLINSELEKPQKVRKDKEGTPPLTKEDKTVVRQSPRRIKPVRIIPSSKRTDATIAKQLLQRAKKGAQKKIEKEAAQLQGRKVKTQVKNIRQFIMPVVSAISSRIIKTPRRFIEDEDYDPPIKIARLESTPNSRFSAPSCGSSEKSSAASQHSSQMSSDSSRSSSPSVDTSTDSQASEEIQVLPEERSDTPEVHPPLPISQSPENESNDRRSRRYSVSERSFGSRTTKKLSTLQSAPQQQTSSSPPPPLLTPPPPLQPASSISDHTPWLMPPTIPLASPFLPASTAPMQGKRKSILREPTFRWTSLKHSRSEPQYFSSAKYAKEGLIRKPIFDNFRPPPLTPEDVGFASGFSASGTAASARLFSPLHSGTRFDMHKRSPLLRAPRFTPSEAHSRIFESVTLPSNRTSAGTSSSGVSNRKRKRKVFSPIRSEPRSPSHSMRTRSGRLSSSELSPLTPPSSVSSSLSISVSPLATSALNPTFTFPSHSLTQSGESAEKNQRPRKQTSAPAEPFSSSSPTPLFPWFTPGSQTERGRNKDKAPEELSKDRDADKSVEKDKSRERDREREKENKRESRKEKRKKGSEIQSSSALYPVGRVSKEKVVGEDVATSSSAKKATGRKKSSSHDSGTDITSVTLGDTTAVKTKILIKKGRGNLEKTNLDLGPTAPSLEKEKTLCLSTPSSSTVKHSTSSIGSMLAQADKLPMTDKRVASLLKKAKAQLCKIEKSKSLKQTDQPKAQGQESDSSETSVRGPRIKHVCRRAAVALGRKRAVFPDDMPTLSALPWEEREKILSSMGNDDKSSIAGSEDAEPLAPPIKPIKPVTRNKAPQEPPVKKGRRSRRCGQCPGCQVPEDCGVCTNCLDKPKFGGRNIKKQCCKMRKCQNLQWMPSKAYLQKQAKAVKKKEKKSKTSEKKDSKESSVVKNVVDSSQKPTPSAREDPAPKKSSSEPPPRKPVEEKSEEGNVSAPGPESKQATTPASRKSSKQVSQPALVIPPQPPTTGPPRKEVPKTTPSEPKKKQPPPPESGPEQSKQKKVAPRPSIPVKQKPKEKEKPPPVNKQENAGTLNILSTLSNGNSSKQKIPADGVHRIRVDFKEDCEAENVWEMGGLGILTSVPITPRVVCFLCASSGHVEFVYCQVCCEPFHKFCLEENERPLEDQLENWCCRRCKFCHVCGRQHQATKQLLECNKCRNSYHPECLGPNYPTKPTKKKKVWICTKCVRCKSCGSTTPGKGWDAQWSHDFSLCHDCAKLFAKGNFCPLCDKCYDDDDYESKMMQCGKCDRWVHSKCENLSGTEDEMYEILSNLPESVAYTCVNCTERHPAEWRLALEKELQISLKQVLTALLNSRTTSHLLRYRQAAKPPDLNPETEESIPSRSSPEGPDPPVLTEVSKQDDQQPLDLEGVKRKMDQGNYTSVLEFSDDIVKIIQAAINSDGGQPEIKKANSMVKSFFIRQMERVFPWFSVKKSRFWEPNKVSSNSGMLPNAVLPPSLDHNYAQWQEREENSHTEQPPLMKKIIPAPKPKGPGEPDSPTPLHPPTPPILSTDRSREDSPELNPPPGIEDNRQCALCLTYGDDSANDAGRLLYIGQNEWTHVNCALWSAEVFEDDDGSLKNVHMAVIRGKQLRCEFCQKPGATVGCCLTSCTSNYHFMCSRAKNCVFLDDKKVYCQRHRDLIKGEVVPENGFEVFRRVFVDFEGISLRRKFLNGLEPENIHMMIGSMTIDCLGILNDLSDCEDKLFPIGYQCSRVYWSTTDARKRCVYTCKIVECRPPVVEPDINSTVEHDENRTIAHSPTSFTESSSKESQNTAEIISPPSPDRPPHSQTSGSCYYHVISKVPRIRTPSYSPTQRSPGCRPLPSAGSPTPTTHEIVTVGDPLLSSGLRSIGSRRHSTSSLSPQRSKLRIMSPMRTGNTYSRNNVSSVSTTGTATDLESSAKVVDHVLGPLNSSTSLGQNTSTSSNLQRTVVTVGNKNSHLDGSSSSEMKQSSASDLVSKSSSLKGEKTKVLSSKSSEGSAHNVAYPGIPKLAPQVHNTTSRELNVSKIGSFAEPSSVSFSSKEALSFPHLHLRGQRNDRDQHTDSTQSANSSPDEDTEVKTLKLSGMSNRSSIINEHMGSSSRDRRQKGKKSCKETFKEKHSSKSFLEPGQVTTGEEGNLKPEFMDEVLTPEYMGQRPCNNVSSDKIGDKGLSMPGVPKAPPMQVEGSAKELQAPRKRTVKVTLTPLKMENESQSKNALKESSPASPLQIESTSPTEPISASENPGDGPVAQPSPNNTSCQDSQSNNYQNLPVQDRNLMLPDGPKPQEDGSFKRRYPRRSARARSNMFFGLTPLYGVRSYGEEDIPFYSSSTGKKRGKRSAEGQVDGADDLSTSDEDDLYYYNFTRTVISSGGEERLASHNLFREEEQCDLPKISQLDGVDDGTESDTSVTATTRKSSQIPKRNGKENGTENLKIDRPEDAGEKEHVTKSSVGHKNEPKMDNCHSVSRVKTQGQDSLEAQLSSLESSRRVHTSTPSDKNLLDTYNTELLKSDSDNNNSDDCGNILPSDIMDFVLKNTPSMQALGESPESSSSELLNLGEGLGLDSNREKDMGLFEVFSQQLPTTEPVDSSVSSSISAEEQFELPLELPSDLSVLTTRSPTVPSQNPSRLAVISDSGEKRVTITEKSVASSESDPALLSPGVDPTPEGHMTPDHFIQGHMDADHISSPPCGSVEQGHGNNQDLTRNSSTPGLQVPVSPTVPIQNQKYVPNSTDSPGPSQISNAAVQTTPPHLKPATEKLIVVNQNMQPLYVLQTLPNGVTQKIQLTSSVSSTPSVMETNTSVLGPMGGGLTLTTGLNPSLPTSQSLFPSASKGLLPMSHHQHLHSFPAATQSSFPPNISNPPSGLLIGVQPPPDPQLLVSESSQRTDLSTTVATPSSGLKKRPISRLQTRKNKKLAPSSTPSNIAPSDVVSNMTLINFTPSQLPNHPSLLDLGSLNTSSHRTVPNIIKRSKSSIMYFEPAPLLPQSVGGTAATAAGTSTISQDTSHLTSGSVSGLASSSSVLNVVSMQTTTTPTSSASVPGHVTLTNPRLLGTPDIGSISNLLIKASQQSLGIQDQPVALPPSSGMFPQLGTSQTPSTAAITAASSICVLPSTQTTGITAASPSGEADEHYQLQHVNQLLASKTGIHSSQRDLDSASGPQVSNFTQTVDAPNSMGLEQNKALSSAVQASPTSPGGSPSSPSSGQRSASPSVPGPTKPKPKTKRFQLPLDKGNGKKHKVSHLRTSSSEAHIPDQETTSLTSGTGTPGAEAEQQDTASVEQSSQKECGQPAGQVAVLPEVQVTQNPANEQESAEPKTVEEEESNFSSPLMLWLQQEQKRKESITEKKPKKGLVFEISSDDGFQICAESIEDAWKSLTDKVQEARSNARLKQLSFAGVNGLRMLGILHDAVVFLIEQLSGAKHCRNYKFRFHKPEEANEPPLNPHGSARAEVHLRKSAFDMFNFLASKHRQPPEYNPNDEEEEEVQLKSARRATSMDLPMPMRFRHLKKTSKEAVGVYRSPIHGRGLFCKRNIDAGEMVIEYAGNVIRSIQTDKREKYYDSKGIGCYMFRIDDSEVVDATMHGNAARFINHSCEPNCYSRVINIDGQKHIVIFAMRKIYRGEELTYDYKFPIEDASNKLPCNCGAKKCRKFLN

SEQ ID NO: 19153 - protein, 740 aa, Homo sapiens
MTEELLKQQKLNSHETTITQQSVSDSHLAELQEKIQQTEATNKILQEKLNEMSYELKCAQESSQKQDGTIQNLKETLKSRERETEELYQVIEGQNDTMAKLREMLHQSQLGQLHSSEGTSPAQQQVALLDLQSALFCSQLEIQKLQRVVRQKERQLADAKQCVQFVEAAAHESEQQKEASWKHNQELRKALQQLQEELQNKSQQLRAWEAEKYNEIRTQEQNIQHLNHSLSHKEQLLQEFRELLQYRDNSDKTLEANEMLLEKLRQRIHDKAVALERAIDEKFSALEEKEKELRQLRLAVRERDHDLERLRDVLSSNEATMQSMESLLRAKGLEVEQLSTTCQNLQWLKEEMETKFSRWQKEQESIIQQLQTSLHDRNKEVEDLSATLLCKLGPGQSEIAEELCQRLQRKERMLQDLLSDRNKQVLEHEMEIQGLLQSVSTREQESQAAAEKLVQALMERNSELQALRQYLGGRDSLMSQAPISNQQAEVTPTGRLGKQTDQGSMQIPSRDDSTSLTAKEDVSIPRSTLGDLDTVAGLEKELSNAKEELELMAKKERESQMELSALQSMMAVQEEELQVQAADMESLTRNIQIKEDLIKDLQMQLVDPEDIPAMERLTQEVLLLREKVASVESQGQEISGNRRQQLLLMLEGLVDERSRLNEALQAERQLYSSLVKFHAHPESSERDRTLQVELEGAQVLRSRLEEVLGRSLERLNRLETLAAIGGGELESVRIHHKHAY

SEQ ID NO: 19154 - protein, 307 aa, Homo sapiens
MGDIPAVGLSSWKASPGKVTEAVKEAIDAGYRHFDCAYFYHNEREVGAGIRCKIKEGAVRREDLFIATKLWCTCHKKSLVETACRKSLKALKLNYLDLYLIHWPMGFKPPHPEWIMSCSELSFCLSHPRVQDLPLDESNMVIPSDTDFLDTWEAMEDLVITGLVKNIGVSNFNHEQLERLLNKPGLRFKPLTNQIECHPYLTQKNLISFCQSRDVSVTAYRPLGGSCEGVDLIDNPVIKRIAKEHGKSPAQILIRFQIQRNVIVIPGSITPSHIKENIQVFDFELTQHDMDNILSLNRNLRLAMFPM

SEQ ID NO: 19155 - protein, 695 aa, Homo sapiens
MTELKAKGPRAPHVAGGPPSPEVGSPLLCRPAAGPFPGSQTSDTLPEVSAIPISLDGLLFPRPCQGQDPSDEKTQDQQSLSDVEGAYSRAEATRGAGGSSSSPPEKDSGLLDSVLDTLLAPSGPGQSQPSPPACEVTSSWCLFGPELPEDPPAAPATQRVLSPLMSRSGCKVGDSSGTAAAHKVLPRGLSPARQLLLPASESPHWSGAPVKPSPQAAAVEVEEEDGSESEESAGPLLKGKPRALGGAAAGGGAAAVPPGAAAGGVALVPKEDSRFSAPRVALVEQDAPMAPGRSPLATTVMDFIHVPILPLNHALLAARTRQLLEDESYDGGAGAASAFAPPRSSPCASSTPVAVGDFPDCAYPPDAEPKDDAYPLYSDFQPPALKIKEEEEGAEASARSPRSYLVAGANPAAFPDFPLGPPPPLPPRATPSRPGEAAVTAAPASASVSSASSSGSTLECILYKAEGAPPQQGPFAPPPCKAPGASGCLLPRDGLPSTSASAAAAGAAPALYPALGLNGLPQLGYQAAVLKEGLPQVYPPYLNYLRPDSEASQSPQYSFESLPQKICLICGDEASGCHYGVLTCGSCKVFFKRAMEGQHNYLCAGRNDCIVDKIRRKNCPACRLRKCCQAGMVLGGFRNLHIDDQITLIQYSWMSLMVFGLGWRSYKHVSGQMLYFAPDLILNDSFGRATKSNPV

SEQ ID NO: 19156 - protein, 650 aa, Homo sapiens
MPTLQRDLPKENPYEDVDLKSRRAGRKSQQLSENSLDSLHRMWSPQDRKYNSPPTQLSLKPNSQSLRSGNWSERKSHRLPRLPKRHSHDDMLLLAQLSLPSSPSSLNEDSLSTTSELLSSRRARRIPKLVQRINSIYNAKRGKKRLKKLSMSSIETASLRDENSESESDSDDRFKAHTQRLVHIQSMLKRAPSYRTLELELLEWQERELFEYFVVVSLKKKPSRNTYLPEVSYQFPKLDRPTKQMREAEERLKAIPQFCFPDAKDWLPVSEYSSETFSFMLTGEDGSRRFGYCRRLLPSGKGPRLPEVYCVISRLGCFGLFSKVLDEVERRRGISAALVYPFMRSLMESPFPAPGKTIKVKTFLPGAGNEVLELRRPMDSRLEHVDFECLFTCLSVRQLIRIFASLLLERRVIFVADKLSTLSSCSHAVVALLYPFSWQHTFIPVLPASMIDIVCCPTPFLVGLLSSSLPKLKELPVEEALMVNLGSDRFIRQMDDEDTLLPRKLQAALEQALERKNELISQDSDSDSDDECNTLNGLVSEVFIRFFVETVGHYSLFLTQSEKGERAFQREAFRKSVASKSIRRFLEVFMESQMFAGFIQDRELRKCRAKGLFEQRVEQYLEELPDTEQSGMNKFLRGLGNKMKFLHKKN

SEQ ID NO: 19157 - protein, 1166 aa, Homo sapiens
MQDVQGPRPGSPGDAEDRRELGLHRGEVNFGGSGKKRGKFVRVPSGVAPSVLFDLLLAEWHLPAPNLVVSLVGEEQPFAMKSWLRDVLRKGLVKAAQSTGAWILTSALRVGLARHVGQAVRDHSLASTSTKVRVVAVGMASLGRVLHRRILEEAQEDFPVHYPEDDGGSQGPLCSLDSNLSHFILVEPGPPGKGDGLTELRLRLEKHISEQRAGYGGTGSIEIPVLCLLVNGDPNTLERISRAVEQAAPWLILVGSGGIADVLAALVNQPHLLVPKVAEKQFKEKFPSKHFSWEDIVRWTKLLQNITSHQHLLTVYDFEQEGSEELDTVILKALVKACKSHSQEPQDYLDELKLAVAWDRVDIAKSEIFNGDVEWKSCDLEEVMVDALVSNKPEFVRLFVDNGADVADFLTYGRLQELYRSVSRKSLLFDLLQRKQEEARLTLAGLGTQQAREPPAGPPAFSLHEVSRVLKDFLQDACRGFYQDGRPGDRRRAEKGPAKRPTGQKWLLDLNQKSENPWRDLFLWAVLQNRHEMATYFWAMGQEGVAAALAACKILKEMSHLETEAEAARATREAKYERLALDLFSECYSNSEARAFALLVRRNRCWSKTTCLHLATEADAKAFFAHDGVQAFLTRIWWGDMAAGTPILRLLGAFLCPALVYTNLITFSEEAPLRTGLEDLQDLDSLDTEKSPLYGLQSRVEELVEAPRAQGDRGPRAVFLLTRWRKFWGAPVTVFLGNVVMYFAFLFLFTYVLLVDFRPPPQGPSGPEVTLYFWVFTLVLEEIRQGFFTDEDTHLVKKFTLYVGDNWNKCDMVAIFLFIVGVTCRMLPSAFEAGRTVLAMDFMVFTLRLIHIFAIHKQLGPKIIVVERMMKDVFFFLFFLSVWLVAYGVTTQALLHPHDGRLEWIFRRVLYRPYLQIFGQIPLDEIDEARVNCSTHPLLLEDSPSCPSLYANWLVILLLVTFLLVTNVLLMNLLIAMFSYTFQVVQGNADMFWKFQRYNLIVEYHERPALAPPFILLSHLSLTLRRVFKKEAEHKREHLERDLPDPLDQKVVTWETVQKENFLSKMEKRRRDSEGEVLRKTAHRVDFIAKYLGGLREQEKRIKCLESQINYCSVLVSSVADVLAQGGGPRTGSQHCGEGSQLVAADHRGGLDGWEQPGAGQPPSDT

SEQ ID NO: 19158 - protein, 5762 aa, Homo sapiens
MGAPSACRTLVLALAAMLVVPQAETQGPVEPSWENAGHTMDGGAPTSSPTRRVSFVPPVTVFPSLSPLNPAHNGRVCSTWGDFHYKTFDGDVFRFPGLCNYVFSEHCRAAYEDFNVQLRRGLVGSRPVVTRVVIKAQGLVLEASNGSVLINGQREELPYSRTGLLVEQSGDYIKVSIRLVLTFLWNGEDSALLELDPKYANQTCGLCGDFNGLPAFNEFYAHNARLTPLQFGNLQKLDGPTEQCPDPLPLPAGNCTDEEGICHRTLLGPAFAECHALVDSTAYLAACAQDLCRCPTCPCATFVEYSRQCAHAGGQPRNWRCPELCPRTCPLNMQHQECGSPCTDTCSNPQRAQLCEDHCVDGCFCPPGTVLDDITHSGCLPLGQCPCTHGGRTYSPGTSFNTTCSSCTCSGGLWQCQDLPCPGTCSVQGGAHISTYDEKLYDLHGDCSYVLSKKCADSSFTVLAELRKCGLTDNENCLKAVTLSLDGGDTAIRVQADGGVFLNSIYTQLPLSAANITLFTPSSFFIVVQTGLGLQLLVQLVPLMQVFVRLDPAHQGQMCGLCGNFNQNQADDFTALSGVVEATGAAFANTWKAQAACANARNSFEDPCSLSVENENYARHWCSRLTDPNSAFSRCHSIINPKPFHSNCMFDTCNCERSEDCLCAALSSYVHACAAKGVQLSDWRDGVCTKYMQNCPKSQRYAYVVDACQPTCRGLSEADVTCSVSFVPVDGCTCPAGTFLNDAGACVPAQECPCYAHGTVLAPGEVVHDEGAVCSCTGGKLSCLGASLQKSTGCAAPMVYLDCSNSSAGTPGAECLRSCHTLDVGCFSTHCVSGCVCPPGLVSDGSGGCIAEEDCPCVHNEATYKPGETIRVDCNTCTCRNRRWECSHRLCLGTCVAYGDGHFITFDGDRYSFEGSCEYILAQDYCGDNTTHGTFRIVTENIPCGTTGTTCSKAIKLFVESYELILQEGTFKAVARGPGGDPPYKIRYMGIFLVIETHGMAVSWDRKTSVFIRLHQDYKGRVCGLCGNFDDNAINDFATRSRSVVGDALEFGNSWKLSPSCPDALAPKDPCTANPFRKSWAQKQCSILHGPTFAACRSQVDSTKYYEACVNDACACDSGGDCECFCTAVAAYAQACHDAGLCVSWRTPDTCPLFCDFYNPHGGCEWHYQPCGAPCLKTCRNPSGHCLVDLPGLEGCYPKCPPSQPFFNEDQMKCVAQCGCYDKDGNYYDVGARVPTAENCQSCNCTPSGIQCAHSLEACTCTYEDRTYSYQDVIYNTTDGLGACLIAICGSNGTIIRKAVACPGTPATTPFTFTTAWVPHSTTSPALPVSTVCVREVCRWSSWYNGHRPEPGLGGGDFETFENLRQRGYQVCPVLADIECRAAQLPDMPLEELGQQVDCDRMRGLMCANSQQSPPLCHDYELRVLCCEYVPCGPSPAPGTSPQPSLSASTEPAVPTPTQTTATEKTTLWVTPSIRSTAALTSQTGSSSGPVTVTPSAPGTTTCQPRCQWTEWFDEDYPKSEQLGGDVESYDKIRAAGGHLCQQPKDIECQAESFPNWTLAQVGQKVHCDVHFGLVCRNWEQEGVFKMCYNYRIRVLCCSDDHCRGRATTPPPTTELETATTTTTQALFSTPQPTSSPGLTRAPPASTTAVPTLSEGLTSPRYTSTLGTATTGGPTTPAGSTEPTVPGVATSTLPTRSALPGTTGSLGTWRPSQPPTLAPTTMATSRARPTGTASTASKEPLTTSLAPTLTSELSTSQAETSTPRTETTMSPLTNTTTSQGTTRCQPKCEWTEWFDVDFPTSGVAGGDMETFENIRAAGGKMCWAPKSIECRAENYPEVSIDQVGQVLTCSLETGLTCKNEDQTGRFNMCFNYNVRVLCCDDYSHCPSTPATSSTATPSSTPGTTWILTKPTTTATTTASTGSTATPTSTLRTAPPPKVLTTTATTPTVTSSKATPSSSPGTATALPALRSTATTPTATSVTPIPSSSLGTTWTRLSQTTTPTATMSTATPSSTPETAHTSTVLTATATTTGATGSVATPSSTPGTAHTTKVPTTTTTGFTATPSSSPGTALTPPVWISTTTTPTTRGSTVTPSSIPGTTHTATVLTTTTTTVATGSMATPSSSTQTSGTPPSLTTTATTITATGSTTNPSSTPGTTPIPPVLTTTATTPAATSNTVTPSSALGTTHTPPVPNTMATTHGRSLPPSSPHTVRTAWTSATSGILGTTHITEPSTVTSHTLAATTGTTQHSTPALSSPHPSSRTTESPPSPGTTTPGHTTATSRTTATATPSKTRTSTLLPSSPTSAPITTVVTMGCEPQCAWSEWLDYSYPMPGPSGGDFDTYSNIRAAGGAVCEQPLGLECRAQAQPGVPLRELGQVVECSLDFGLVCRNREQVGKFKMCFNYEIRVFCCNYGHCPSTPATSSTAMPSSTPGTTWILTELTTTATTTESTGSTATPSSTPGTTWILTEPSTTATVTVPTGSTATASSTQATAGTPHVSTTATTPTVTSSKATPFSSPGTATALPALRSTATTPTATSFTAIPSSSLGTTWTRLSQTTTPTATMSTATPSSTPETVHTSTVLTTTATTTGATGSVATPSSTPGTAHTTKVLTTTTTGFTATPSSSPGTARTLPVWISTTTTPTTRGSTVTPSSIPGTTHTPTVLTTTTTTVATGSMATPSSSTQTSGTPPSLTTTATTITATGSTTNPSSTPGTTPIPPVLTTTATTPAATSSTVTPSSALGTTHTPPVPNTTATTHGRSLSPSSPHTVRTAWTSATSGTLGTTHITEPSTGTSHTPAATTGTTQHSTPALSSPHPSSRTTESPPSPGTTTPGHTRATSRTTATATPSKTRTSTLLPSSPTSAPITTVVTMGCEPQCAWSEWLDYSYPMPGPSGGDFDTYSNIRAAGGAVCEQPLGLECRAQAQPGVPLRELGQVVECSLDFGLVCRNREQVGKFKMCFNYEIRVFCCNYGHCPSTPATSSTATPSSTPGTTWILTEQTTAATTTATTGSTAIPSSTPGTAPPPKVLTSTATTPTATSSKATSSSSPRTATTLPVLTSTATKSTATSFTPIPSFTLGTTGTLPEQTTTPMATMSTIHPSSTPETTHTSTVLTTKATTTRATSSMSTPSSTPGTTWILTELTTAATTTAATGPTATPSSTPGTTWILTEPSTTATVTVPTGSTATASSTRATAGTLKVLTSTATTPTVISSRATPSSSPGTATALPALRSTATTPTATSVTAIPSSSLGTAWTRLSQTTTPTATMSTATPSSTPETVHTSTVLTTTTTTTRATGSVATPSSTPGTAHTTKVPTTTTTGFTATPSSSPGTALTPPVWISTTTTPTTRGSTVTPSSIPGTTHTATVLTTTTTTVATGSMATPSSSTQTSGTPPSLTTTATTITATGSTTNPSSTPGTTPIPPVLTTTATTPAATSSTVTPSSALGTTHTPPVPNTTATTHGRSLPPSSPHTVRTAWTSATSGILGTTHITEPSTVTSHTPAATTSTTQHSTPALSSPHPSSRTTESPPSPGTTTPGHTRGTSRTTATATPSKTRTSTLLPSSPTSAPITTVVTTGCEPQCAWSEWLDYSYPMPGPSGGDFDTYSNIRAAGGAVCEQPLGLECRAQAQPGVPLRELGQVVECSLDFGLVCRNREQVGKFKMCFNYEIRVFCCNYGHCPSTPATSSTATPSSTPGTTWILTKLTTTATTTESTGSTATPSSTPGTTWILTEPSTTATVTVPTGSTATASSTQATAGTPHVSTTATTPTVTSSKATPFSSPGTATALPALRSTATTPTATSFTAIPSSSLGTTWTRLSQTTTPTATMSTATPSSTPETAHTSTVLTTTATTTRATGSVATPSSTPGTAHTTKVPTTTTTGFTVTPSSSPGTARTPPVWISTTTTPTTSGSTVTPSSVPGTTHTPTVLTTTTTTVATGSMATPSSSTQTSGTPPSLITTATTITATGSTTNPSSTPGTTPIPPVLTTTATTPAATSSTVTPSSALGTTHTPPVPNTTATTHGRSLSPSSPHTVRTAWTSATSGTLGTTHITEPSTGTSHTPAATTGTTQHSTPALSSPHPSSRTTESPPSPGTTTPGHTTATSRTTATATPSKTRTSTLLPSSPTSAPITTVVTTGCEPQCAWSEWLDYSYPMPGPSGGDFDTYSNIRAAGGAVCEQPLGLECRAQAQPGVPLGELGQVVECSLDFGLVCRNREQVGKFKMCFNYEIRVFCCNYGHCPSTPATSSTAMPSSTPGTTWILTELTTTATTTASTGSTATPSSTPGTAPPPKVLTSPATTPTATSSKATSSSSPRTATTLPVLTSTATKSTATSVTPIPSSTLGTTGTLPEQTTTPVATMSTIHPSSTPETTHTSTVLTTKATTTRATSSTSTPSSTPGTTWILTELTTAATTTAATGPTATPSSTPGTTWILTELTTTATTTASTGSTATPSSTPGTTWILTEPSTTATVTVPTGSTATASSTQATAGTPHVSTTATTPTVTSSKATPSSSPGTATALPALRSTATTPTATSFTAIPSSSLGTTWTRLSQTTTPTATMSTATPSSTPETVHTSTVLTATATTTGATGSVATPSSTPGTAHTTKVPTTTTTGFTATPSSSPGTALTPPVWISTTTTPTTTTPTTSGSTVTPSSIPGTTHTARVLTTTTTTVATGSMATPSSSTQTSGTPPSLTTTATTITATGSTTNPSSTPGTTPITPVLTSTATTPAATSSKATSSSSPRTATTLPVLTSTATKSTATSFTPIPSSTLWTTWTVPAQTTTPMSTMSTIHTSSTPETTHTSTVLTTTATMTRATNSTATPSSTLGTTRILTELTTTATTTAATGSTATLSSTPGTTWILTEPSTIATVMVPTGSTATASSTLGTAHTPKVVTTMATMPTATASTVPSSSTVGTTRTPAVLPSSLPTFSVSTVSSSVLTTLRPTGFPSSHFSTPCFCRAFGQFFSPGEVIYNKTDRAGCHFYAVCNQHCDIDRFQGACPTSPPPVSSAPLSSPSPAPGCDNAIPLRQVNETWTLENCTVARCVGDNRVVLLDPKPVANVTCVNKHLPIKVSDPSQPCDFHYECECICSMWGGSHYSTFDGTSYTFRGNCTYVLMREIHARFGNLSLYLDNHYCTASATAAAARCPRALSIHYKSMDIVLTVTMVHGKEEGLILFDQIPVSSGFSKNGVLVSVLGTTTMRVDIPALGVSVTFNGQVFQARLPYSLFHNNTEGQCGTCTNNQRDDCLQRDGTTAASCKDMAKTWLVPDSRKDGCWAPTGTPPTASPAAPVSSTPTPTPCPPQPLCDLMLSQVFAECHNLVPPGPFFNACISDHCRGRLEVPCQSLEAYAELCRARGVCSDWRGATGGLCDLTCPPTKVYKPCGPIQPATCNSRNQSPQLEGMAEGCFCPEDQILFNAHMGICVQACPCVGPDGFPKFPGERWVSNCQSCVCDEGSVSVQCKPLPCDAQGQPPPCNRPGFVTVTRPRAENPCCPETVCVCNTTTCPQSLPVCPPGQESICTQEEGDCCPTFRCRPQLCSYNGTFYGVGATFPGALPCHMCTCLSGDTQDPTVQCQEDACNNTTCPQGFEYKRVAGQCCGECVQTACLTPDGQPVQLNETWVNSHVDNCTVYLCEAEGGVHLLTPQPASCPDVSSCRGSLRKTGCCYSCEEDSCQVRINTTILWHQGCETEVNITFCEGSCPGASKYSAEAQAMQHQCTCCQERRVHEETVPLHCPNGSAILHTYTHVDECGCTPFCVPAPMAPPHTRGFPAQEATAV

SEQ ID NO: 19159 - protein, 195 aa, Homo sapiens
MNRFLLLMSLYLLGSARGTSSQPNELSGSIDHQTSVQQLPGEQPSGEQPSGEHLSGEQPLSELESGEQPSDEQPSGEHGSGEQPSGEQASGEQPSGEHASGEQASGAPISSTSTGTILNCYTCAYMNDQGKCLRGEGTCITQNSQQCMLKKIFEGGKLQFMVQGCENMCPSMNLFSHGTRMQIICCRNQSFCNKI

SEQ ID NO: 19160 - protein, 467 aa, Homo sapiens
MNENIDILETAIKQAAEQGARIIVTPEDALYGWKFTRETVFPYLEDIPDPQVNWIPCQDPHRFGHTPVQARLSCLAKDNSIYVLANLGDKKPCNSRDSTCPPNGYFQYNTNVVYNTEGKLVARYHKYHLYSEPQFNVPEKPELVTFNTAFGRFGIFTCFDIFFYDPGVTLVKDFHVDTILFPTAWMNVLPLLTAIEFHSAWAMGMGVNLLVANTHHVSLNMTGSGIYAPNGPKVYHYDMKTELGKLLLSEVDSHPLSSLAYPTAVNWNAYATTIKPFPVQKNTFRGFISRDGFNFTELFENAGNLTVCQKELCCHLSYRMLQKEENEVYVLGAFTGLHGRRRREYWQVCTLLKCKTTNLTTCGRPVETASTRFEMFSLSGTFGTEYVFPEVLLTEIHLSPGKFEVLKDGRLVNKNGSSGPILTVSLFGRWYTKDSLYSSCGTSNSAITYLLIFILLMIIALQNIVML

SEQ ID NO: 19161 - protein, 285 aa, Homo sapiens
MLLLVTSLLLCELPHPAFLLIPEKSDLRTVAPASSLNVRFDSRTMNLSWDCQENTTFSKCFLTDKKNRVVEPRLSNNECSCTFREICLHEGVTFEVHVNTSQRGFQQKLLYPNSGREGTAAQNFSCFIYNADLMNCTWARGPTAPRDVQYFLYIRNSKRRREIRCPYYIQDSGTHVGCHLDNLSGLTSRNYFLVNGTSREIGIQFFDSLLDTKKIERFNPPSNVTVRCNTTHCLVRWKQPRTYQKLSYLDFQYQLDVHRKNTQPGTENLLVLTTGTSALCTFMCS

SEQ ID NO: 19162 - protein, 285 aa, Homo sapiens
MNSSPAGTPSPQPSRANGNINLGPSANPNAQPTDFDFLKVIGKGNYGKVLLAKRKSDGAFYAVKVLQKKSILKKKEQSHIMAERSVLLKNVRHPFLVGLRYSFQTPEKLYFVLDYVNGGELFFHLQRERRFLEPRARFYAAEVASAIGYLHSLNIIYRDLKPENILLDCQGHVVLTDFGLCKEGVEPEDTTSTFCGTPEYLAPEVLRKEPYDRAVDWWCLGAVLYEMLHGLPPFYSQDVSQMYENILHQPLQIPGGRTVAACDLLQSLLHKDQRQRLGSKADFVA

SEQ ID NO: 19163 - protein, 224 aa, Homo sapiens
MNSMTSAVPVANSVLVVAPHNGYPVTPGIMSHVPLYPNSQPQVHLVPGNPPSLVSNVNGQPVQKALKEGKTLGAIQIIIGLAHIGLGSIMATVLVGEYLSISFYGGFPFWGGLWFIISGSLSVAAENQPYSYCLLSGSLGLNIVSAICSAVGVILFITDLKPWNGDFWRAAGLLPPGVWHRMRIFPLWLPVGLLSIKQCECHLSKHLCSKPSDHPRTGDLTTKL

SEQ ID NO: 19164 - protein, 300 aa, Homo sapiens
MSFPPHLNRPPMGIPALPPGIPPPQFPGFPPPVPPGTPMIPVPMSIMAPAPTVLVPTVSMVGKHLGARKDHPGLKAKENDENCGPTTTVFVGNISEKASDMLIRQLLAKCGLVLSWKRVQGASGKLQAFGFCEYKEPESTLRALRLLHDLQIGEKKLLVKVDAKTKAQLDEWKAKKKASNGNARPETVTNDDEEALDEETKRRDQMIKGAIEVLIREYSSELNAPSQESDSHPRKKKKEKKEDIFRRFPVAPLIPYPLITKEDINAIEMEEDKRDLISREISKFRDTHKVVFLSFHLIPI

SEQ ID NO: 19165 - protein, 620 aa, Homo sapiens
MDRVLLRWISLFWLTAMVEGLQVTVPDKKKVAMLFQPTVLRCHFSTSSHQPAVVQWKFKSYCQDRMGESLGMSSTRAQSLSKRNLEWDPYLDCLDSRRTVRVVASKQGSTVTLGDFYRGREITIVHDADLQIGKLMWGDSGLYYCIITTPDDLEGKNEDSVELLVLEWVFVGLVLLGVFLFFVLVGICWCQCCPHSCCCYVRCPCCPDSCCCPQALYEAGKAAKAGYPPSVSGVPGPYSIPSVPLGGAPSSGMLMDKPHPPPLAPSDSTGGSHSVRKGYRIQADKERDSMKVLYYVEKELAQFDPARRMRGRYNNTISELSSLHEEDSNFRQSFHQMRSKQFPVSGDLESNPDYWSGVMGGSSGASRGPSAMEYNKEDRESFRHSQPRSKSEMLSRKNFATGVPAVSMDELAAFADSYGQRPRRADGNSHEARGGSRFERSESRAHSGFYQDDSLEEYYGQRSRSREPLTDADRGWAFSPARRRPAEDAHLPRLVSRTPGTAPKYDHSYLGSARERQARPEGASRGGSLETPSKRSAQLGPRSASYYAWSPPGTYKAGSSQDDQEDASDDALPPYSELELTRGPSYRGRDLPYHSNSEKKRKKEPAKKTNDFPTRMSLVV

SEQ ID NO: 19166 - protein, 56 aa, Homo sapiens
EESTVHVGRMLKENHCLVALHMCKHDIKNSGIQQLCDALYLNSSLRYLDVSWHIQT

SEQ ID NO: 19167 - protein, 417 aa, Homo sapiens
METLSFPRYNVAEIVIHIRNKILTGADGKNLTKNDLYPNPKPEVLHMIYMRALQIVYGIRLEHFYMMPVNSEVMYPHLMEGFLPFSNLVTHLDSFLPICRVNDFETADILCPKAKRTSRFLSGIINFIHFREACRETYMEFLWQYKSSADKMQQLNAAHQEALMKLERLDSVPVEEQEEFKQLSDGIQELQQSLNQDFHQKTIVLQEGNSQKKSNISEKTKRLNELKLSVVSLKEIQESLKTKIVDSPEKLKNYKEKMKDTVQKLKNARSLNLEDQIESDESELKKLKTEENSFKRLMIVKKEKLATAQFKINKKHEDVKQYKRTVIEDCNKVQEKRGAVYERVTTINQEIQKIKLGIQQLKDAAEREKLKSQEIFLNLKTALEKYHDGIEKAAEDSYAKIDEKTAELKRKMFKMST

SEQ ID NO: 19168 - protein, 538 aa, Homo sapiens
MAVSWRSWLANEGVKHLCLFIWLSMNVLLFWKTFLLYNQGPEYHYLHQMLGLGLCLSRASASVLNLNCSLILLPMCRTLLAYLRGSQKVPSRRTRRLLDKSRTFHITCGVTICIFSGVHVAAHLVNALNFSVNYSEDFVELNAARYRDEDPRKLLFTTVPGLTGVCMVVVLFLMITASTYAIRVSNYDIFWYTHNLFFVFYMLLTLHVSGGLLKYQTNLDTHPPGCISLNRTSSQNISLPEYFSEHFHEPFPEGFSKPAEFTQHKFVKICMEEPRFQANFPQTWLWISGPLCLYCAERLYRYIRSNKPVTIISVMSHPSDVMEIRMVKENFKARPGQYITLHCPSVSALENHPFTLTMCPTETKATFGVHLKIVGDWTERFRDLLLPPSSQDSEILPFIQSRNYPKDDWKPYKLRRLYFIWVCRDIQSFRWFADLLCMLHNKFWQENRPDYVNIQLYLSQTDGIQKIIGEKYHALNSRLFIGRPRWKLLFDEIAKYNRGKTVGVFCCGPNSLSKTLHKLSNQNNSYGTRFEYNKESFS

SEQ ID NO: 19169 - protein, 407 aa, Homo sapiens
MLRSTSTVTLLSGGAARTPGAPSRRANVCRLRLTVPPESPVPEQCEKKIERKEQLLDLSNGEPTRKLPQGVVYGVVRRSDQNQQKEMVVYGWSTSQLKEEMNYIKDVRATLEKVRKRMYGDYDEMRQKIRQLTQELSVSHAQQEYLENHIQTQSSALDRFNAMNSALASDSIGLQKTLVDVTLENSNIKDQIRNLQQTYEASMDKLREKQRQLEVAQVENQLLKMKVESSQEANAEVMREMTKKLYSQYEEKLQEEQRKHSAEKEALLEETNSFLKAIEEANKKMQAAEISLEEKDQRIGELDRLIERMEKERHQLQLQLLEHETEMSGELTDSDKERYQQLEEASASLRERIRHLDDMVHCQQKKVKQMVEEIESLKKKLQQKQLLILQLLEKISFLEGEVTFSTK

SEQ ID NO: 19170 - protein, 395 aa, Homo sapiens
MDIATGPESLERCFPRGQTDCAKMLDGIKMEEHALRPGPATLGVLLGSDCPHPAVCEGCQRPISDRFLMRVNESSWHEECLQCAACQQALTTSCYFRDRKLYCKQDYQQLFAAKCSGCMEKIAPTEFVMRALECVYHLGCFCCCVCERQLRKGDEFVLKEGQLLCKGDYEKEKDLLSSVSPDESDSVKSEDEDGDMKPAKGQGSQSKGSGDDGKDPRRPKRPRTILTTQQRRAFKASFEVSSKPCRKVRETLAAETGLSVRVVQVWFQNQRAKMKKLARRHQQQQEQQNSQRLGQEVLSSRMEGMMASYTPLAPPQQQIVAMEQSPYGSSDPFQQGLTPPQMPGNDSIFHDIDSDTSLTSLSDCFLGSSDVGSLQARVGNPIDRLYSMQSSYFAS

SEQ ID NO: 19171 - protein, 191 aa, Homo sapiens
MEAQAQGLLETEPLQGTDEDAVASADFSSMLSEEEKEELKAELVQLEDEITTLRQVLSAKERHLVEIKQKLGMNLMNELKQNFSKSWHDMQTTTAYKKTHETLSHAGQKATAAFSNVGTAISKKFGDMRNSPTFKSFEERVETTVTSLKTKVGGTNPNGGSFEEVLSSTAHASAQSLAGGSRRTKEEELQC

SEQ ID NO: 19172 - protein, 548 aa, Homo sapiens
MAGGVWGRSRAREAPVGALTLTALTEGIRARQGQPQGPPSAGPQPKSWEVKPEAEPQTQALTAPSEAEPGRGATVPEAGSEPCSLNSALEPAPEGPHQVPQSSWEEGVLADLALYTAACLEEAGFAGTQATVLTLSSALEARGERLEDQVHALVRGLLAQVPSLAEGRPWRAALRVLSALALEHARDVVCALLPRSLPADRVAAELWRSLSRNQRVNGQVLVQLLWALKGASGPEPQALAATRALGEMLAVSGCVGATRGFYPHLLLALVTQLHKLARSPCSPDMPKIWVLSHRGPPHSHASSHCPPAHCPHHQLCCGGLEGAAHRGWRPHGGHVHGAGRRLEEAGGSPHPPGGRPAAGQCYGGTCRPPPARPLRRLAPSASQRGRPAASHGYGLLHRAVAEPAHRTAPAGGGHPGATPHLAGRPRTHCALVGPAGPGPPRAESQEGAAREHAAAGAPGRTGRRRRAARGCSAGRPEEAPAAAPGACAAPERGAGTAPPSATGRHTGLNPRLGRRAPWDSGAPGPGRAPAGAPRPPAEAGAAESRAAA

SEQ ID NO: 19173 - protein, 1323 aa, Homo sapiens
MPVVWPTLLDLSRDECKRILRKLELEAYAGVISALRAQGDLTKEKKDLLGELSKVLSISTERHRAEVRRAVNDERLTTIAHKMNLSLYLGERPSYSMSGPNSSSEWSIEGRRLVPLMPRLVPQTAFTVTANAVANAAIQHNASLPVPAETGSKEVVVCYSYTSTTSTPTSTPVPSGSIATVKSPRPASPASNVVVLPSGSTVYVKSVSCSDEDEKPRKRRRTNSSSSSPVVLKEVPKAVVPVSKTITVPVSGSPKMSNIMQSIANSLPPHMSPVKITFTKPSTQTTNTTTQKVIIVTTSPSSTFVPNILSKSHNYAAVTKLVPTSVIASTTQKPPVVITASQSSLVSNSSSGSSSSTPSPIPNTVAVTAVVSSTPSVVMSTVAQGVSTSAIKMASTRLPSPKSLVSAPTQILAQFPKQHQQSPKQQLYQVQQQTQQQVAQPSPVSHQQQPQQSPLPPGIKPTIQIKQESGVKIITQQVQPSKILPKPVTATLPTSSNSPIMVVSSNGAIMTTKLVTTPTGTQATYTRPTVSPSIGRMAATPGAATYVKTTSGSIITVVPKSLATLGGKIISSNIVSGTTTKITTIPMTSKPNVIVVQKTTGKGTTIQGLPGKNVVTTLLNAGGEKTIQTVPTGAKPAILTATRPITKMIVTQPKGIGSTVQPAAKIIPTKIVYGQQGKTQVLIKPKPVTFQATVVSEQTRQLVTETLQQASRVAEAGNSSIQEGKEEPQNYTDSSSSSTESSQSSQDSQPVVHVIASRRQDWSEHEIAMETSPTIIYQDVSSESQSATSTIKALLELQQTTVKEKLESKPRQPTIDLSQMAVPIQMTQEKRHSPESPSIAVVESELVAEYITTVSHRSQPQQPSQPQRTLLQHVAQSQTATQTSVVVKSIPASSPGAITHIMQQALSSHTAFTKHSEELGTEEGEVEEMDTLDPQTGLFYRSALTQSQSAKQQKLSQPPLEQTQLQVKTLQCFQTKQKQTIHLQADQLQHKLPQMPQLSIRHQKLTPLQQEQAQPKPDVQHTQHPMVAKDRQLPTLMAQPPQTVVQVLAVKTTQQLPKLQQAPNQPKIYVQPQTPQSQMSLPASSEKQTASQVEQPIITQGSSVTKITFEGRQPPTVTKITGGSSVPKLTSPVTSISPIQASEKTAVSDILKMSLMEAQIDTNVEHMIVDPPKKALATSMLTGEAGSLPSTHMVVAGMANSTPQQQKCRESCSSPSTVGSSLTTRKIDPPAVPATGQFMRIQNVGQKKAEESPAEIIIQAIPQYAIPCHSSSNVVVEPSGLLELNNFTSQQLDDEETAMEQDIDSSTEDGTEPSPSQSSAERS

SEQ ID NO: 19174 - protein, 553 aa, Homo sapiens
MLSAVTDLGSIESTVSKNLPVVSIHQLGLCLSRASASVLNLNCSLILLPMCRTLLAYLRGSQKVPSRRTRRLLDKSRTFHITCGVTICIFSGVHVAAHLVNALNFSVNYSEDFVELNAARYRDEDPRKLLFTTVPGLTGVCMVVVLFLMITASTYAIRVSNYDIFWYTHNLFFVFYMLLTLHVSGGLLKYQTNLDTHPPGCISLNRTSSQNISLPEYFSEHFHEPFPEGFSKPAEFTQHKFVKICMEEPRFQANFPQTWLWISGPLCLYCAERLYRYIRSNKPVTIISVMSHPSDVMEIRMVKENFKARPGQYITLHCPSVSALENHPFTLTMCPTETKATFGVHLKIVGDWTERFRDLLLPPSSQDSEILPFIQSRNYPKLYIDGPFGSPFEESLNYEVSLCVAGGIGVTPFASILNTLLDDWKPYKLRRLYFIWVCRDIQSFRWFADLLCMLHNKFWQENRPDYVNIQLYLSQTDGIQKIIGEKYHALNSRLFIGRPRWKLLFDEIAKYNRGKTVGVFCCGPNSLSKTLHKLSNQNNSYGTRFEYNKESFS

SEQ ID NO: 19175 - protein, 608 aa, Homo sapiens
MLPLLDSSKRAGTLGSGCGVPRVHSAALSREEGASRDIWRIKVWARVMTTPAGSGSGFGSVSWWGLSPALDLQAERDATVDALPTTMVPQPAVILPGPPVDPDSQADTVHSNPELDVLLLGSVDGRHLLRTLSRAKFWPRRRFNFFVLENNLEAVARHMLIFSLALEEPEKMGLQERSETFLEVWGNALLRPPVAAFVRAQADLLAHLVPEPDRLEEQLPWLSLRALKFRERDALEAVFRFWAGGEKGPQAFPMSRLWDSRLRHYLGSRYDARRGVSDWDLRMKLHDRGAQVIHPQEFRRWRDTGVAFELRDSSAYHVPNRTLASGRLLSYRGERVAARGYWGDIATGPFVAFGIEADDESLLRTSNGQPVKTAGEITQHNVTELLRDVAAWGRARATGGDLEEQQHAEGSPEPGTPAPTPESFTVHFLPLNSAQTLHHKSCYNGRFQLLYVACGMVHLLIPELGACVAPGGNLIVELARYLVDVRQEQLQGFNTRVRELAQAAGFAPQTGARPSETFARFCKSQESALGNTVPAVEPGTPPLDILAQPLEASNPALEGLTQPLQGGTPHCEPCQLPSESPGSLSEVLAQPQGALAPPNCESDSKTGV

SEQ ID NO: 19176 - protein, 248 aa, Homo sapiens
MTSQPVPNETIIVLPSNVINFSQAEKPEPTNQGQDSLKKHLHAEIKVIGTIQILCGMMVLSLGIILASASFSPNFTQVTSTLLNSAYPFIGPFFFIISGSLSIATEKRLTKLLVHSSLVGSILSALSALVGFIILSVKQATLNPASLQCELDKNNIPTRSYVSYFYHDSLYTTDCYTAKASLAGTLSLMLICTLLEFCLAVLTAVLRWKQAYSDFPGSVLFLPHSYIGNSGMSSKMTHDCGYEELLTS

SEQ ID NO: 19177 - protein, 774 aa, Homo sapiens
MEPGSAEMPRQFPKLNISEVDEQVRLLAEKVFAKVLREEDSKDALSLFTVPEDCPIGQKEAKERELQKELAEQKSVETAKRKKSFKMIRSQSLSLQMPPQQDWKGPPAASPAMSPTTPVVTGATSLPTPAPYAMPEFQRVTISGDYCAGITLEDYEQAAKSLAKALMIREKYARLAYHRFPRITSQYLGHPRADTAPPEEGLPDFHPPPLPQEDPYCLDDAPPNLDYLVHMQGGILFVYDNKKMLEHQEPHSLPYPDLETYTVDMSHILALITDGPTKTYCHRRLNFLESKFSLHEMLNEMSEFKELKSNPHRDFYNVRKVDTHIHAAACMNQKHLLRFIKHTYQTEPDRTVAEKRGRKITLRQVFDGLHMDPYDLTVDSLDVHAGRQTFHRFDKFNSKYNPVGASELRDLYLKTENYLGGEYFARMVKEVARELEESKYQYSEPRLSIYGRSPEEWPNLAYWFIQHKVYSPNMRWIIQVPRIYDIFRSKKLLPNFGKMLENIFLPLFKATINPQDHRELHLFLKYVTGFDSVDDESKHSDHMFSDKSPNPDVWTSEQNPPYSYYLYYMYANIMVLNNLRRERGLSTFLFRPHCGEAGSITHLVSAFLTADNISHGLLLKKSPVLQYLYYLAQIPIAMSPLSNNSLFLEYSKNPLREFLHKGLHVSLSTDDPMQFHYTKEALMEEYAIAAQVWKLSTCDLCEIARNSVLQSGLSHQEKQKFLGQNYYKEGPEGNDIRKTNVAQIRMAFRYETLCNELSFLSDAMKSEEITALTN

SEQ ID NO: 19178 - protein, 134 aa, Homo sapiens
MEERGDSEPTPGCSGLGPGGVRGFGDGGGAPSWAPEDAWMGTHPKYLEMMELDIGDATQVYVAFLVYLDLMESKSWHEVNCVGLPELQLICLVGTEIEGEGLQTVVPTPITASLSHNRIREILKASRKLQEYFS

SEQ ID NO: 19179 - protein, 275 aa, Homo sapiens
MSAHNRGTELDLSWISKIQVNHPAVLRRAEQIQARRTVKKEWQAAWLLKAVTFIDLTTLSGDDTSSNIQRLCYKAKYPIREDLLKALNMHDKGITTAAVCVYPARVCDAVKALKAAGCNIPVASVAAGFPAGQTHLKTRLEEIRLAVEDGATEIDVVINRSLVLTGQWEGSDFIKTSTGKETVNATFPVAIVMLRAIRDFFWKTGNKIGFKPAGGIRSAKDSLAWLSLVKEELGDEWLKPELFRIGASTLLSDIERQIYHHVTGRYAAYHDLPMS

SEQ ID NO: 19180 - protein, 1042 aa, Homo sapiens
MNVNQSVPPVPPFGQPQPIYPGYHQSSYGGQSGSTAPAIPYGAYNGPVPGYQQTPPQGMSRAPPSSGAPPASTAQAPCGQAAYGQFGQGDVQNGPSSTVQMQRLPGSQPFGSPLAPVGNQPPVLQPYGPPPTSAQVATQLSGMQISGAVAPAPPSSGLGFGPPTSLASASGSFPNSGLYGSYPQGQAPPLSQAQGHPGIQTPQRSAPSQASSFTPPASGGPRLPSMTGPLLPGQSFGGPSVSQPNHVSSPPQALPPGTQMTGPLGPLPPMHSPQQPGYQPQQNGSFGPARGPQSNYGGPYPAAPTFGSQPGPPQPLPPKRLDPDAIPSPIQVIEDDRNNRGTEPFVTGVRGQVPPLVTTNFLVKDQGNASPRYIRCTSYNIPCTSDMAKQAQVPLAAVIKPLARLPPEEASPYVVDHGESGPLRCNRCKAYMCPFMQFIEGGRRFQCCFCSCINDVPPQYFQHLDHTGKRVDAYDRPELSLGSYEFLATVDYCKNNKFPSPPAFIFMIDVSYNAIRTGLVRLLCEELKSLLDFLPREGGAEESAIRVGFVTYNKVLHFYNVKSSLAQPQMMVVSDVADMFVPLLDGFLVNVNESRAVITSLLDQIPEMFADTRETETVFVPVIQAGMEALKAAECAGKLFLFHTSLPIAEAPGKLKNRDDRKLINTDKEKTLFQPQTGAYQTLAKECVAQGCCVDLFLFPNQYVDVATLSVVPQLTGGSVYKYASFQVENDQERFLSDLRRDVQKVVGFDAVMRVRTSTGIRAVDFFGAFYMSNTTDVELAGLDGDKTVTVEFKHDDRLNEESGALLQCALLYTSCAGQRRLRIHNLALNCCTQLADLYRNCETDTLINYMAKFAYRGVLNSPVKAVRDTLITQCAQILACYRKNCASPSSAGQLILPECMKLLPVYLNCVLKSDVLQPGAEVTTDDRAYVRQLVTSMDVTETNVFFYPRLLPLTKSPVESTTEPPAVRASEERLSNGDIYLLENGLNLFLWVGASVQQGVVQSLFSVSSFSQITSGLVRAGSQGEYGCGSILCETIGSQYS

SEQ ID NO: 19181 - protein, 437 aa, Homo sapiens
MDRVLLRWISLFWLTAMVEGLQVTVPDKKKVAMLFQPTVLRCHFSTSSHQPAVVQWKFKSYCQDRMGESLGMSSTRAQSLSKRNLEWDPYLDCLDSRRTVRVVASKQGSTVTLGDFYRGREITIVHDADLQIGKLMWGDSGLYYCIITTPDDLEGKNEDSVELLVLGRTGLLADLLPSFAVEIMPEWVFVGLVLLGVFLFFVLVGICWCQCCPHSCCCYVRCPCCPDSCCCPQALYEAGKAAKAGYPPSVSGVPGPYSIPSVPLGGAPSSGMLMDKPHPPPLAPSDSTGGSHSVRKGYRIQADKERDSMKVLYYVEKELAQFDPARRMRGRYNNTISELSSLHEEDSNFRQSFHQMRSKQFPVSGDLESNPDYWSGVMGGSSGASRGPSAMEYNKEDRESFRHRMTFQPGCPLWSDVVNISLDNEKSDMDYGDKTQI

SEQ ID NO: 19182 - protein, 186 aa, Homo sapiens
GSRESSGSRKQEKTPKDYKEYKSYKDDSSREEKESKKEREEEFKTHHEMKEYSGFAGVSRPRGTFFRIRGRGRARGVFAGTNTGPNNSNTTFQKRPKEEEWDPEYTPKSKKYFLHDDRDDGVDYWAKRGRGRGTFQRGRGRFNFKKSGSSPKWTHDKYQGDGIVEDEEETMENNEEKKDRRKEEKE

SEQ ID NO: 19183 - protein, 1011 aa, Homo sapiens
MPAARPPAAGLRGISLFLALLLGSPAAALERDALPEGDASPLGPYLLPSGAPERGSPGKEHPEERVVTAPPSSSQSAEVLGELVLDGTAPSAHHDIPALSPLLPEEARPKHALPPKKKLPSLKQVNSARKQLRPKATSAATVQRAGSQPASQGLDLLSSSTEKPGPPGDPDPIVASEEASEVPLWLDRKESAVPTTPAPLQISPFTSQPYVAHTLPQRPEPGEPGPDMAQEAPQEDTSPMALMDKGENELTGSASEESQETTTSTIITTTVITTEQAPALCSVSFSNPEGYIDSSDYPLLPLNNFLECTYNVTVYTGYGVELQVKSVNLSDGELLSIRGVDGPTLTVLANQTLLVEGQVIRSPTNTISVYFRTFQDDGLGTFQLHYQAFMLSCNFPRRPDSGDVTVMDLHSGGVAHFHCHLGYELQGAKMLTCINASKPHWSSQEPICSAPCGGAVHNATIGRVLSPSYPENTNGSQFCIWTIEAPEGQKLHLHFERLLLHDKDRMTVHSGQTNKSALLYDSLQTESVPFEGLLSEGNTIRIEFTSDQARAASTFNIRFEAFEKGHCYEPYIQNGNFTTSDPTYNIGTIVEFTCDPGHSLEQGPAIIECINVRDPYWNDTEPLCRAMCGGELSAVAGVVLSPNWPEPYVEGEDCIWKIHVGEEKRIFLDIQFLNLSNSDILTIYDGDEVMPHILGQYLGNSGPQKLYSSTPDLTIQFHSDPAGLIFGKGQGFIMNYIEVSRNDSCSDLPEIQNGWKTTSHTELVRGARITYQCDPGYDIVGSDTLTCQWDLSWSSDPPFCEKIMYCTDPGEVDHSTRLISDPVLLVGTTIQYTCNPGFVLEGSSLLTCYSRETGTPIWTSRLPHCVSEESLACDNPGLPENGYQILYKRLYLPGESLTFMCYEGFELMGEVTIRCILGQPSHWNGPLPVCKEAAAETSLEGGNMALAIFIPVLIISLLLGGAYIYITRCRYYSNLRLPLMYSHPYSQITVETEFDNPIYETGETREYEVSI

SEQ ID NO: 19184 - protein, 618 aa, Homo sapiens
MIGEEVPSDQYYWAPLAQHERGSLASLDSLRKGGPPPPNWRQPELPEVIAMLGFRLDAVKSNAAAYLQHLCYRNDKVKTDVRKLKGIPVLVGLLDHPKKEVHLGACGALKNISFGRDQDNKIAIKNCDGVPALVRLLRKARDMDLTEVITGTLWNLSSHDSIKMEIVDHALHALTDEVIIPHSGWEREPNEDCKPRHIEWESVLTNTAGCLRNVSSERSEARRKLRECDGLVDALIFIVQAEIGQKDSDSKLVENCVCLLRNLSYQVHREIPQAERYQEAAPNVANNTGPHAASCFGAKKGKGKKPIEDPANDTVDFPKRTSPARGYELLFQPEVVRIYISLLKESKTPAILEASAGAIQNLCAGRWTYGRYIRSALRQEKALSAIADLLTNEHERVVKAASGALRNLAVDARNKELIGKHAIPNLVKNLPGGQQNSSWNFSEDTVISILNTINEVIAENLEAAKKLRETQGIEKLVLINKSGNRSEKEVRAAALVLQTIWGYKELRKPLEKEGWKKSDFQVNLNNASRSQSSHSYDDSTLPLIDRNQKSDNNYSTPNERGDHNRTLDRSGDLGDMEPLKGTTPLMQDEGQESLEEELDVLVLDDEGGQVSYPSMQKI

SEQ ID NO: 19185 - protein, 2028 aa, Homo sapiens
MGNSLGCFKEPKESIAIPEKAPISPKKRVRFKRRWRGKKIPTPEASHQEETSEGTGVIEETETLTKLTESLQKEDGVGGVEHTPPDILLPGDSAPNSRVVDRGMIVQVKERFQGEVQTAHLLLENESSVAGGVWDSLEEGMTVIAHLLDNPAERNCEKSVSQLVEFPRTASCSSRAVLLPLQGETAVEKGNIQRGFRSCALPRTDYPTDKGNQEQFSEGWSVEEGTKSVSGAPQTASWIIECSVSSLLLDQPGGQRRTEPSHVGQVPPQDSRLPTSQSDLSISGVTVSILPSSSGYGSDGPHIHGIQPKDTEPEKSSTSFSEEDGTLSLEISDIYISGESGDMSAKEKLLLWTQKVTAGYTGIKCTNFSSCWSDGKMFNALIHRYRPDLVDMERVQIQSNRENLEQAFEVAERLGVTRLLDAEDVDVPSPDEKSVITYVSSIYDAFPKVPEGGEGISATEVDSRWQEYQSRVDSLIPWIKQHTILMSDKTFPQNPVELKALYNQYIHFKETEILAKEREKGRIEELYKLLEVWIEFGRIKLPQGYHPNDVEEEWGKLIIEMLEREKSLRPAVERLELLLQIANKIQNGALNCEEKLTLAKNTLQADAAHLESGQPVQCESDVIMYIQECEGLIRQLQVDLQILRDENYYQLEELAFRVMRLQDELVTLRLECTNLYRKGHFTSLELVPPSTLTTTHLKAEPLTKATHSSSTSWFRKPMTRAELVAISSSEDEGNLRFVYELLSWVEEMQMKLERAEWGNDLPSVELQLETQQHIHTSVEELGSSVKEARLYEGKMSQNFHTSYAETLGKLETQYCKLKETSSFRMRHLQSLHKFVSRATAELIWLNEKEEEELAYDWSDNNSNISAKRNYFSELTMELEEKQDVFRSLQDTAELLSLENHPAKQTVEAYSAAVQSQLQWMKQLCLCVEQHVKENTAYFQFFSDARELESFLRNLQDSIKRKYSCDHNTSLSRLEDLLQDSMDEKEQLIQSKSSVASLVGRSKTIVQLKPRSPDHVLKNTISVKAVCDYRQIEITICKNDECVLEDNSQRTKWKVISPTGNEAMVPSVCFLIPPPNKDAIEMASRVEQSYQKVMALWHQLHVNTKSLISWNYLRKDLDLVQTWNLEKLRSSAPGECHQIMKNLQAHYEDFLQDSRDSVLFSVADRLRLEEEVEACKARFQHLMKSMENEDKEETVAKMYISELKNIRLRLEEYEQRVVKRIQSLASSRTDRDAWQDNALRIAEQEHTQEDLQQLRSDLDAVSMKCDSFLHQSPSSSSVPTLRSELNLLVEKMDHVYGLSTVYLNKLKTVDVIVRSIQDAELLVKGYEIKLSQEEVVLADLSALEAHWSTLRHWLSDVKDKNSVFSVLDEEIAKAKVVAEQMSRLTPERNLDLERYQEKGSQLQERWHRVIAQLEIRQSELESIQEVLGDYRACHGTLIKWIEETTAQQEMMKPGQAEDSRVLSEQLSQQTALFAEIERNQTKLDQCQKFSQQYSTIVKDYELQLMTYKAFVESQQKSPGKRRRMLSSSDAITQEFMDLRTRYTALVTLTTQHVKYISDALRRLEEEEKVVEEEKQEHVEKVKELLGWVSTLARNTQGKATSSETKESTDIEKAILEQQVLSEELTTKKEQVSEAIKTSQIFLAKHGHKLSEKEKKQISEQLNALNKAYHDLCDGSANQLQQLQSQLAHQTEQKTLQKQQNTCHQQLEDLCSWVGQAERALAGHQGRTTQQDLSALQKNQSDLKDLQDDIQNRATSFATVVKDIEGFMEENQTKLSPRELTALREKLHQAKEQYEALQEETRVAQKELEEAVTSALQQETEKSKAAKELAENKKKIDALLDWVTSVGSSGGQLLTNLPGMEQLSGASLEKGALDTTDGYMGVNQAPEKLDKQCEMMKARHQELLSQQQNFILATQSAQAFLDQHGHNLTPEEQQMLQQKLGELKEQYSTSLAQSEAELKQVQTLQDELQKFLQDHKEFESWLERSEKELENMHKGGSSPETLPSLLKRQGSFSEDVISHKGDLRFVTISG

SEQ ID NO: 19186 - protein, 948 aa, Homo sapiens
MADPGMMSLFGEDGNIFSEGLEGLGECGYPENPVNPMGQQMPIDQGFASLQPSLHHPSTNQNQTKLTHFDHYNQYEQQKMHLMDQPNRMMSNTPGNGLASPHSQYHTPPVPQVPHGGSGGGQMGVYPGMQNERHGQSFVDSSSMWGPRAVQVPDQIRAPYQQQQPQPQPPQPAPSGPPAQGHPQHMQQMGSYMARGDFSMQQHGQPQQRMSQFSQGQEGLNQGNPFIATSGPGHLSHVPQQSPSMAPSLRHSVQQFHHHPSTALHGESVAHSPRFSPNPPQQGAVRPQTLNFSSRSQTVPSPTINNSGQYSRYPYSNLNQGLVNNTGMNQNLGLTNNTPMNQSVPRYPNAVGFPSNSGQGLMHQQPIHPSGSLNQMNTQTMHPSQPQGTYASPPPMSPMKAMSNPAGTPPPQVRPGSAGIPMEVGSYPNMPHPQPSHQPPGAMGIGQRNMGPRNMQQSRPFIGMSSAPRELTGHMRPNGCPGVGLGDPQAIQERLIPGQQHPGQQPSFQQLPTCPPLQPHPGLHHQSSPPHPHHQPWAQLHPSPQNTPQKVPVHQHSPSEPFLEKPVPDMTQKPKQKRHRCRNPNKLDINTLTGEERVPVVNKRNGKKMGGAMAPPMKDLPRWLEENPEFAVAPDWTDIVKQSGFVPESMFDRLLTGPVVRGEGASRRGRRPKSEIARAAAAAAAVASTSGINPLLVNSLFAGMDLTSLQNLQNLQSLQLAGLMGFPPGLATAATAGGDAKNPAAVLPLMLPGMAGLPNVFGLGGLLNNPLSAATGNTTTASSQGEPEDSTSKGEEKGNENEDENKDSEKSTDAVSAADSANGSVGAATAPAGLPSNPLAFNPFLLSTMAPGLFYPSMFLPPGLGGLTLPGFPALAGLQNAVGSSEEKAADKAEGGPFKDGETLEGSDAEESLDKTAESSLLEDEIAQGEELDSLDGGDEIENNENDE

SEQ ID NO: 19187 - protein, 320 aa, Homo sapiens
MRLFGGNFAHQASVARVVGQQGRGRAGIEASLDVQYLMSAGANISTWVYSSPGRHEGQEPFLQWLMLLSNESALPHVHTVSYGDDEDSLSSAYIQRVNTELMKAAARGLTLLFASGDSGAGCWSVSGRHQFRPTFPASSPYVTTVGGTSFQEPFLITNEIVDYISGGGFSNVFPRPSYQEEAVTKFLSSSPHLPPSSYFNASGRAYPDVAALSDGYWVVSNRVPIPWVSGTSASTPVFGGILSLINEHRILSGRPPLGFLNPRLYQQHGAGLFDVTRGCHESCLDEEVEGQGFCSGPGWDPVTGWGTPNFPALLKTLLNP

SEQ ID NO: 19188 - protein, 272 aa, Homo sapiens
MFENLNTALTPKLQASRSFPHLSKPVAPGSAPLGSGEPGGPGLWVGSSQHLKNLGKAMGAKVNDFLRRKEPSSLGSVGVTEINKTAGAQLASGTDAAPEAWLEDERSVLQETFPRLDPPPPITRKRTPRALKTTQDMLISSQPVLSSLEYGTEPSPGQAQDSAPTAQPDVPADASQPEATMEREERGKVLPNGEVSLSVPDLIHKDSQDESKLKMTECRRASSPSLIERNGFKLSLSPISLAESWEDGSPPPQARTSSLDNEGPHPDLLSFE

SEQ ID NO: 19189 - protein, 2054 aa, Homo sapiens
MFNLMKKDKDKDGGRKEKKEKKEKKERMSAAELRSLEEMSLRRGFFNLNRSSKRESKTRLEISNPIPIKVASGSDLHLTDIDSDSNRGSVILDSGHLSTASSSDDLKGEEGSFRGSVLQRAAKFGSLAKQNSQMIVKRFSFSQRSRDESASETSTPSEHSAAPSPQVEVRTLEGQLVQHPGPGIPRPGHRSRAPELVTKKFPVDLRLPPVVPLPPPTLRELELQRRPTGDFGFSLRRTTMLDRGPEGQACRRVVHFAEPGAGTKDLALGLVPGDRLVEINGHNVESKSRDEIVEMIRQSGDSVRLKVQPIPELSELSRSWLRSGEGPRREPSDAKTEEQIAAEEAWNETEKVWLVHRDGFSLASQLKSEELNLPEGKVRVKLDHDGAILDVDEDDVEKANAPSCDRLEDLASLVYLNESSVLHTLRQRYGASLLHTYAGPSLLVLGPRGAPAVYSEKVMHMFKGCRREDMAPHIYAVAQTAYRAMLMSRQDQSIILLGSSGSGKTTSCQHLVQYLATIAGISGNKVFSVEKWQALYTLLEAFGNSPTIINGNATRFSQILSLDFDQAGQVASASIQTMLLEKLRVARRPASEATFNVFYYLLACGDGTLRTELHLNHLAENNVFGIVPLAKPEEKQKAAQQFSKLQAAMKVLGISPDEQKACWFILAAIYHLGAAGATKEAAEAGRKQFARHEWAQKAAYLLGCSLEELSSAIFKHQHKGGTLQRSTSFRQGPEESGLGDGTGPKLSALECLEGMAAGLYSELFTLLVSLVNRALKSSQHSLCSMMIVDTPGFQNPEQGGSARGASFEELCHNYTQDRLQRLFHERTFVQELERYKEENIELAFDDLEPPTDDSVAAVDQASHQSLVRSLARTDEARGLLWLLEEEALVPGASEDTLLERLFSYYGPQEGDKKGQSPLLHSSKPHHFLLGHSHGTNWVEYNVTGWLNYTKQNPATQNAPRLLQDSQKKIISNLFLGRAGSATVLSGSIAGLEGGSQLALRRATSMRKTFTTGMAAVKKKSLCIQMKLQVDALIDTIKKSKLHFVHCFLPVAEGWAGEPRSASSRRVSSSSELDLPSGDHCEAGLLQLDVPLLRTQLRGSRLLDAMRMYRQGYPDHMVFSEFRRRFDVLAPHLTKKHGRNYIVVDERRAVEELLECLDLEKSSCCMGLSRVFFRAGTLARLEEQRDEQTSRNLTLFQAACRGYLARQHFKKRKIQDLAIRCVQKNIKKNKGVKDWPWWKLFTTVRPLIEVQLSEEQIRNKDEEIQQLRSKLEKAEKERNELRLNSDRLESRISELTSELTDERNTGESASQLLDAETAERLRAEKEMKELQTQYDALKKQMEVMEMEVMEARLIRAAEINGEVDDDDAGGEWRLKYERAVREVDFTKKRLQQEFEDKLEVEQQNKRQLERRLGDLQADSEESQRALQQLKKKCQRLTAELQDTKLHLEGQQVRNHELEKKQRRFDSELSQAHEEAQREKLQREKLQREKDMLLAEAFSLKQQLEEKDMDIAGFTQKVVSLEAELQDISSQESKDEASLAKVKKQLRDLEAKVKDQEEELDEQAGTIQMLEQAKLRLEMEMERMRQTHSKEMESRDEEVEEARQSCQKKLKQMEVQLEEEYEDKQKVLREKRELEGKLATLSDQVNRRDFESEKRLRKDLKRTKALLADAQLMLDHLKNSAPSKREIAQLKNQLEESEFTCAAAVKARKAMEVEIEDLHLQIDDIAKAKTALEEQLSRLQREKNEIQNRLEEDQEDMNELMKKHKAAVAQASRDLAQINDLQAQLEEANKEKQELQEKLQALQSQVEFLEQSMVDKSLVSRQEAKIRELETRLEFERTQVKRLESLASRLKENMEKLTEERDQRIAAENREKEQNKRLQRQLRDTKEEMGELARKEAEASRKKHELEMDLESLEAANQSLQADLKLAFKRIGDLQAAIEDEMESDENEDLINSLQDMVTKYQKRKNKLEGDSDVDSELEDRVDGVKSWLSKNKGPSKAASDDGSLKSSSPTSYWKSLAPDRSDDEHDPLDNTSRPRYSHSYLSDSDTEAKLTETNA

SEQ ID NO: 19190 - protein, 271 aa, Homo sapiens
KQTHSKARNSPKLFPVRGNKEENSGPSHDPSQNETLGICSSNSLSSQDVAKLSEMIVPENRAIQLKPKEEHFGDGDPESTGKRSSELLDPTTPMRTKCIELLYAALTSSSTDQPKADLWQNFAREIEEHVFTLYSKNIKKYKTCIRSKVANLKNPRNSHLQQNLLSGTTSPREFAEMTVMEMANKELKQLRASYTESCIQEHYLPQVIDGTQTNKIKCRRCEKYNCKVTVIDRGTLFLPSWVRNSNPDEQMMTYVICNECGEQWYHSKWVC

SEQ ID NO: 19191 - protein, 198 aa, Homo sapiens
MLTCLVLSGVAQPVAFGQGQQFLPVHPQNPGFVQNPSGALPKAYPDNHLSQVDVNELFSKLLKTGILKLSQTDSATTQVSEVTAQPPPEEEEDQNEDQDVPDLTNFTVEELKQRYDSVINRLYTGIQCYSCGMRFTTSQTDVYADHLDWHYRQNRTEKDVSRKVTHRRWYYSLTDWIEFEEIADLEERAKSQFFEKVH

SEQ ID NO: 19192 - protein, 214 aa, Homo sapiens
MVDIIAKVTRRQSRALPAQVDDPPEPVYANIERQPRATSPGAAAAPLPSPVWETHTDAGTGRPYYYNPDTGVTTWESPFEAAEGAASPATSPASVDSHPPTPETDYPESLTSYPEEDYSPVGSFGEPGPTSPLTTPPGWSCHVSQDKQMLYTNHFTQEQWVRLEDPHGKPYFYNPEDSSVRWELPQVPVPAPRSIHKSSQDGDTPAQASPPEEK

SEQ ID NO: 19193 - protein, 475 aa, Homo sapiens
MELWQAALSTLNPNPTDSCPLYLNYATVAALPCRVSRHNSPSAAHFITRLVRTCLPPGAHRCIVMVCEQPEVFASACALARAFPLFTHRSGASRRLEKKTVTVEFFLVGQDNGPVEVSTLQCLANATDGVRLAARIVDTPCNEMNTDTFLEEINKVGKELGIIPTIIRDEELKTRGFGGIYGVGKAALHPPALAVLSHTPDGATQTIAWVGKGIVYDTGGLSIKGKTTMPGMKRDCGGAAAVLGAFRAAIKQGFKDNLHAVFCLAENSVGPNATRPDDIHLLYSGKTVEINNTDAEGRLVLADGVSYACKDLGADIILDMATLTGAQGIATGKYHAAVLTNSAEWEAACVKAGRKCGDLVHPLVYCPELHFSEFTSAVADMKNSVADRDNSPSSCAGLFIASHIGFDWPGVWVHLDIAAPVHAGERATGFGVALLLALFGRASEDPLLNLVSPLGCEVDVEEGDLGRDSKRRRLV

SEQ ID NO: 19194 - protein, 1263 aa, Homo sapiens
MGDSPGRGAPERRHKAQPGRARKYEWRPEGPTSMGSLGQREDLQDEDRNSAFTWKVQANNRAYNGQFKEKVILCWQRKKYKTNVIRTAKYNFYSFLPLNLYEQFHRVSNLFFLIIIILQSIPDISTLPWFSLSTPMVCLLFIRATRDLVDDMGRHKSDRAINNRPCQILMGKSFKQKKWQDLCVGDVVCLRKDNIVPADMLLLASTEPSSLCYVETVDIDGETNLKFRQALMVTHKELATIKKMASFQGTVTCEAPNSRMHHFVGCLEWNDKKYSLDIGNLLLRGCRIRNTDTCYGLVIYADGYMFVGFDTKIMKNCGKIHLKRTKLDLLMNKLVVVIFISVVLVCLVLAFGFGFSVKEFKDHHYYLSGVHGSSVAAESFFVFWSFLILLSVTIPMSMFILSEFIYLGNSVFIDWDVQMYYKPQDVPAKARSTSLNDHLGQVEYIFSDKTGTLTQNILTFNKCCISGRVYGPDSEATTRPKENPYLWNKFADGKLLFHNAALLHLVRTNGDEAVREFWRLLAICHTVMVRESPRERPDQLLYQAASPDEGALVTAARNFGYVFLSRTQDTVTIMELGEERVYQVLAIMDFNSTRKRMSVLVRKPEGAICLYTKGADTVIFERLHRRGAMEFATEEALAAFAQETLRTLCLAYREVAEDIYEDWQQRHQEASLLLQNRAQALQQVYNEMEQDLRLLGATAIEDRLQDGVPETIKCLKKSNIKIWVLTGDKQETAVNIGFACELLSENMLILEEKEISRILETYWENSNNLLTRESLSQVKLALVINGDFLDKLLVSLRKEPRALAQNVNMDEAWQELGQSRRDFLYARRLSLLCRRFGLPLAAPPAQDSRARRSSEVLQERAFVDLASKCQAVICCRVTPKQKALIVALVKKYHQVVTLAIGDGANDINMIKTADVGVGLAGQEGMQAVQNSDFVLGQFCFLQRLLLVHGRWSYVRICKFLRYFFYKSMASMMVQVWFACYNGFTGQPLYEGWFLALFNLLYSTLPVLYIGLFEQDVSAEQSLEKPELYVVGQKDELFNYWVFVQAIAHGVTTSLVNFFMTLWISRDTAGPASFSDHQSFAVVVALSCLLSITMEVILIIKYWTALCVATILLSLGFYAIMTTTTQSFWLFRVSPTTFPFLYADLSVMSSPSILLVVLLSVSINTFPVLALRVIFPALKELRAKEEKVEEGPSEEIFTMEPLPHVHRESRARRSSYAFSHREGYANLITQGTILRRGPGVSSDIASESLDPSDEEAASSPKESQ

SEQ ID NO: 19195 - protein, 1508 aa, Homo sapiens
MEPTAKGRTEESFSYVIRAPSSEGFDIMNVDVKIDTSWIFQDMEDSAEERECLQEEAAGRPDMDMGALRRQLESSEQKLSAAEDKYVTSESGLRSRIQELELSERKLLRKVDQLSTHVAQERSAWLQAQEKLAALQGELASQIREESVARRQQWRLRRLQERLRRKDEALGQQAAALERCRRTQRRQLGLVREQERVLREQVQRLERNVRRLCRAAGLLLAQWDTAAPGSQGATEAAAELRALQARAERSEREREEAARSLQEHRATERQLRGQLEELRCCIYGLKLSEIGLQGQVEDLAQQNQCLREELGAQAPIGHCSLDALGCVQGDSLPLPREEALDPCRSQDWRNSLRSNDAPRQRAPAGQSPEGPCTWSRIRPGRASSVLAPGPETTSELPRDLAGSNREQLTLAEPSLDEQILLLVCGCPPEECLDESLLRMDLAWISENLAADPAAEAFLLVQTSALPLWGPAGDSASWRPLLLQEVPSDGQKIQEELATRSPPPPKATGHPGWDCHQTRGRGASLFHEAPYISNHPFLKKHPKDLKDTWNNGGGSLAGRTEEGKARGTLGRKGKNLGDKYQLSQESHQNLSLENGAGAAEDVQDQNGASETKAATCRPGSWQEFLMPLLQGEASVSKEGPESLSRRERVEGYVWGLRGGLSSENEEVAPPATFSRAHETKEPWPTDSQLLAGKVRATGRTARGKEENQVWLGNALLLQGGSLEDKGLEEEDEMPHQEASGLGCRGAPEEPDSQEHESKEMLFFAGETGLPLFPRFALSVEGAEPTDHGHPQAVSKGHNRCALTIDELAQDVEACFQQLSTLQPGSRGWQCSASACRGENWSFAQKWHSGWERAHSQQVWGNWGICSNEEAKSKESGEGDKPGKTTALGTSEVPGNPGTLPHWDEASPNPPQGPAEPWGALERVRSRFHQLISGLKKQRSQILHDNTKLHGDQERFHERVCALEREREREVTKISRLERDNHRLVGDISQLKKELDQYLQAISDLEDCNGKSYCKILELEEENETLKGNLGQLQKATSESVRKSKDTMEQVTLENWKLQTLISELGVSYKELIKDIVLGIEDMIRALSGENEHLLRRVHVLEREVTLQRSTDQGRLVRGREHLQGKAKMHALDKEVQVTPLTGQLLSRACGPPLEEEMSLAAGQTGPSTGTGNSRRGADSPPPSLVWRNTGVANALQGNVSGAEVKEAHLEKEEKRPRCSVAQGQALSSLSNGPMLRDSEAEVTEEDPRLRAQQLHHRVLTLQCQLRDQGAAHQASLDEATRLQEELQAKLEELQKKQHEAKLAVTPLKAKIASLVRKCRERNRLITHLLQELHRHGLGNLLLSELAQNMLNDVALAEYTATFLAPGVPETSHHLDVKSEMTAALRAQTYLLNPEMDSVLQSSLSSESWPIPEPEWPAQTAQLDSLKLPLSLVSTLDPGTCLAAVTVEPGLPAQRLQEKGGMPCPALQVDNVPAPSELLSPARILAFHQELRQSICSNSQVHKSPLELEM

SEQ ID NO: 19196 - protein, 862 aa, Homo sapiens
MVAVVGEQFTLECGPPWGHPEPTVSWWKDGKPLALQPGRHTVSGGSLLMARAEKSDEGTYMCVATNSAGHRESRAARVSIQEPQDYTEPVELLAVRIQLENVTLLNPDPAEGPKPRPAVWLSWKVSGPAAPAQSYTALFRTQTAPGGQGAPWAEELLAGWQSAELGGLHWGQDYEFKVRPSSGRARGPDSNVLLLRLPEKVPSAPPQEVTLKPGNGTVFVSWVPPPAENHNGIIRGYQVWSLGNTSLPPANWTVVGEQTQLEIATHMPGSYCVQVAAVTGAGAGEPSRPVCLLLEQAMERATQEPSEHGPWTLEQLRATLKRPEVIATCGVALWLLLLGTAVCIHRRRRARVHLGPGLYRYTSEDAILKHRMDHSDSQWLADTWRSTSGSRDLSSSSSLSSRLGADARDPLDCRRSLLSWDSRSPGVPLLPDTSTFYGSLIAELPSSTPARPSPQVPAVRRLPPQLAQLSSPCSSSDSLCSRRGLSSPRLSLAPAEAWKAKKKQELQHANSSPLLRGSHSLELRACELGNRGSKNLSQSPGAVPQALVAWRALGPKLLSSSNELVTRHLPPAPLFPHETPPTQSQQTQPPVAPQAPSSILLPAAPIPILSPCSPPSPQASSLSGPSPASSRLSSSSLSSLGEDQDSVLTPEEVALCLELSEGEETPRNSVSPMPRAPSPPTTYGYISVPTASEFTDMGRTGGGVGPKGGVLLCPPRPCLTPTPSEGSLANGWGSASEDNAASARASLVSSSDGSFLADAHFARALAVAVDSFGFGLEPREADCVFIDASSPPSPRDEIFLTPNLSLPLWEWRPDWLEDMEVSHTQRLGRGMPPWPPDSQISSQRSQLHCRMPKAGASPVDYS

SEQ ID NO: 19197 - protein, 815 aa, Homo sapiens
MLWPRNLTSWDDSSSVSSGISDTIDNLSTDDINTSSSISSYANTPASSRKNLDVQTDAEKHSQVERNSLWSGDDVKKSDGGSDSGIKMEPGSKWRRNPSDVSDESDKSTSGKKNPVISQTGSWRRGMTAQVGITMPRTKPSAPAGALKTPGTGKTDDAKVSEKGRLSPKASQVKRSPSDAGRSSGDESKKPLPSSSRTPTANANSFGFKKQSGSAAGLAMITASGVTVTSRSATLGKIPKSSALVSRSAGRKSSMDGAQNQDDGYLALSSRTNLQYRSLPRPSKSNSRNGAGNRSSTSSIDSNISSKSAGLPVPKLREPSKTALGSSLPGLVNQTDKEKGISSDNESVASCNSVKVNPAAQPVSSPAQTSLQPGAKYPDVASPTLRRLFGGKPTKQVPIATAENMKNSVVISNPHATMTQQGNLDSPSGSGVLSSGSSSPLYSKNVDLNQSPLASSPSSAHSAPSNSLTWGTNASSSSAVSKDGLGFQSVSSLHTSCESIDISLSSGGVPSHNSSTGLIASSKDDSLTPFVRTNSVKTTLSERYTPTSQLRTQEDAKEWLRSHSAGGLQDTAANSPFSSGSSVTSPSGTRFNFSQLASPTTVTQMSLSNPTMLRTHSLSNADGQYDPYTDSRFRNSSMSLDEKSRTMSRSGSFRDGFEEVHGSSLSLVSSTSSVYSTPEEKCQSEIRKLRRELDASQEKVSALTTQLTANAHLVAAFEQSLGNMTIRLQSLTMTAEQKDSELNELRKTIELLKKQNAAAQAAINGVINTPELNCKGNGTAQSADLRIRRQHSSDSVSSINSATSHSSVGSNIESD

SEQ ID NO: 19198 - protein, 387 aa, Homo sapiens
MENKLPMETLVEECGENRERKCKLKDQSDKEEGTRDISSPKRLRDRQALFPAKVTNVSLLEKFERSESGGKIMTPESLSYPSCLKHDSEMKPQTSPACQDHNKAGQMKSLATREQNQKNAAYNLGVAEAIRNHKNEKPEFYKSFLFDKRPLSPALNALKQEEYSRSLLKQMDNRQENEIKQRQYRELMDRLEQVQLTEELAAQRAKFLKDKMEETQCYKRALDAQIKNKPSRLPPFEPDSSEPIFGKNEGELMVEKQKREQNYMKHQLEAAANHKRKAILHQLVDQRRDLQMLQRTQREHLADRTAELERVNRVNQCLQEDWERSAAMKKQRDLEDKAFERASDKLFLLDQCEKYRRCKQCQRRTSNVGESNLWPLNKFLPGSRLLV

SEQ ID NO: 19199 - protein, 290 aa, Homo sapiens
MAPEIHMTGPMCLIENTNGELVANPEALKILSAITQPVVVVAIVGLYRTGKSYLMNKLAGKNKGFSLGSTVKSHTKGIWMWCVPHPKKPEHTLVLLDTEGLGDVKKGDNQNDSWIFTLAVLLSSTLVYNSMGTINQQAMDQLYYVTELTHRIRSKSSPDENENEDSADFVSFFPDFVWTLRDFSLDLEADGQPLTPDEYLEYSLKLTQGTSQKDKNFNLPRLCIRKFFPKKKCFVFDLPIHRRKLAQLEKLQDEELDPEFVQQVADFCSYIFSNSKTKTLSGGIKVNGPR

SEQ ID NO: 19200 - protein, 763 aa, Homo sapiens
MPMDLILVVWFCVCTARTVVGFGMDPDLQMDIVTELDLVNTTLGVAQVSGMHNASKAFLFQDIEREIHAAPHVSEKLIQLFRNKSEFTILATVQQKPSTSGVILSIRELEHSYFELESSGLRDEIRYHYIHNGKPRTEALPYRMADGQWHKVALSVSASHLLLHVDCNRIYERVIDPPDTNLPPGINLWLGQRNQKHGLFKGIIQDGKIIFMPNGYITQCPNLNHTCPTCSDFLSLVQGIMDLQELLAKMTAKLNYAETRLSQLENCHCEKTCQVSGLLYRDQDSWVDGDHCRNCTCKSGAVECRRMSCPPLNCSPDSLPVHIAGQCCKVCRPKCIYGGKVLAEGQRILTKSCRECRGGVLVKITEMCPPLNCSEKDHILPENQCCRVCRGHNFCAEGPKCGENSECKNWNTKATCECKSGYISVQGDSAYCEDIDECAAKMHYCHANTVCVNLPGLYRCDCVPGYIRVDDFSCTEHDECGSGQHNCDENAICTNTVQGHSCTCKPGYVGNGTICRAFCEEGCRYGGTCVAPNKCVCPSGFTGSHCEKDIDECALRTHTCWNDSACINLAGGFDCLCPSGPSCSGDCPHEGGLKHNGQVWTLKEDRCSVCSCKDGKIFCRRTACDCQNPSADLFCCPECDTRVTSQCLDQNGHKLYRSGDNWTHSCQQCRCLEGEVDCWPLTCPNLSCEYTAILEGECCPRCVSDPCLADNITYDIRKTCLDSYGVSRLSGSVWTMAGSPCTTCKCKNGRVCCSVDFECLQNN

SEQ ID NO: 19201 - protein, 374 aa, Homo sapiens
MPQELPQSPRTRQPEPDFYCVKWIPWKGEQTPIITQSTNGPCPLLAIMNILFLQWKVKLPPQKEVITSDELMAHLGNCLLSIKPQEKSEGLQLNFQQNVDDAMTVLPKLATGLDVNVRFTGVSDFEYTPECSVFDLLGIPLYHGWLVDPQSPEAVRAVGKLSYNQLVERIITCKHSSDTNLVTEGLIAEQFLETTAAQLTYHGLCELTAAAKEGELSVFFRNNHFSTMTKHKSHLYLLVTDQGFLQEEQVVWESLHNVDGDSCFCDSDFHLSHSLGKGPGAEGGSGSPETQLQVDQDYLIALSLQQQQPRGPLGLTDLELAQQLQQEEYQQQQAAQPVRMRTRVLSLQGRGATSGRPAGERRQRPKHESDCILL

SEQ ID NO: 19202 - protein, 1701 aa, Homo sapiens
MGNSDSQYTLQGSKNHSNTITGAKQIPCSLKIRGIHAKEEKSLHGWGHGSNGAGYKSRSLARSCLSHFKSNQPYASRLGGPTCKVSRGVAYSTHRTNAPGKDFQGISAAFSTENGFHSVGHELADNHITSRDCNGHLLNCYGRNESIASTPPGEDRKSPRVLIKTLGKLDGCLRVEFHNGGNPSKVPAEDCSEPVQLLRYSPTLASETSPVPEARRGSSADSLPSHRPSPTDSRLRSSKGSSLSSESSWYDSPWGNAGELSEAEGSFLAPGMPDPSLHASFPPGDAKKPFNQSSSLSSLRELYKDANLGSLSPSGIRLSDEYMGTHASLSNRVSFASDIDVPSRVAHGDPIQYSSFTLPCRKPKAFVEDTAKKDSLKARMRRISDWTGSLSRKKRKLQEPRSKEGSDYFDSRSDGLNTDVQGSSQASAFLWSGGSTQILSQRSESTHAIGSDPLRQNIYENFMRELEMSRTNTENIETSTETAESSSESLSSLEQLDLLFEKEQGVVRKAGWLFFKPLVTVQKERKLELVARRKWKQYWVTLKGCTLLFYETYGKNSMDQSSAPRCALFAEDSIVQSVPEHPKKENVFCLSNSFGDVYLFQATSQTDLENWVTAVHSACASLFAKKHGKEDTLRLLKNQTKNLLQKIDMDSKMKKMAELQLSVVSDPKNRKAIENQIQQWEQNLEKFHMDLFRMRCYLASLQGGELPNPKSLLAAASRPSKLALGRLGILSVSSFHALVCSRDDSALRKRTLSLTQRGRNKKGIFSSLKGLDTLARKGKEKRPSITQVDELLHIYGSTVDGVPRDNAWEIQTYVHFQDNHGVTVGIKPEHRVEDILTLACKMRQLEPSHYGLQLRKLVDDNVEYCIPAPYEYMQQQVYDEIEVFPLNVYDVQLTKTGSVCDFGFAVTAQVDERQHLSRIFISDVLPDGLAYGEGLRKGNEIMTLNGEAVSDLDLKQMEALFSEKSVGLTLIARPPDTKATLCTSWSDSDLFSRDQKSLLPPPNQSQLLEEFLDNFKKNTANDFSNVPDITTGLKRSQTDGTLDQVSHREKMEQTFRSAEQITALCRSFNDSQANGMEGPRENQDPPPRSLARHLSDADRLRKVIQELVDTEKSYVKDLSCLFELYLEPLQNETFLTQDEMESLFGSLPEMLEFQKVFLETLEDGISASSDFNTLETPSQFRKLLFSLGGSFLYYADHFKLYSGFCANHIKVQKVLERAKTDKAFKAFLDARNPTKQHSSTLESYLIKPVQRVLKYPLLLKELVSLTDQESEEHYHLTEALKAMEKVASHINEMQKIYEDYGTVFDQLVAEQSGTEKEVTELSMGELLMHSTVSWLNPFLSLGKARKDLELTVFVFKRAVILVYKENCKLKKKLPSNSRPAHNSTDLDPFKFRWLIPISALQVRLGNPAGTENNSIWELIHTKSEIEGRPETIFQLCCSDSESKTNIVKVIRSILRENFRRHIKCELPLEKTCKDRLVPLKNRVPVSAKLASSRSLKVLKNSSSNEWTGETGKGTLLDSDEGSLSSGTQSSGCPTAEGRQDSKSTSPGKYPHPGLADFADNLIKESDILSDEDDDHRQTVKQGSPTKDIEIQFQRLRISEDPDVHPEAEQQPGPESGEGQKGGEQPKLVRGHFCPIKRKANSTKRDRGTLLKAQIRHQSLDSQSENATIDLNSVLEREFSVQSLTSVVSEECFYETESHGKS

SEQ ID NO: 19203 - protein, 500 aa, Homo sapiens
MSKGPAVGIDLGTTYSCVGVFQHGKVEIIANDQGNRTTPSYVAFTDTERLIGDAAKNQVAMNPTNTVFDAKRLIGRRFDDAVVQSDMKHWPFMVVNDAGRPKHKKDISENKRAVRRLRTACERAKRTLSSSTQASIEIDSLYEGIDFYTSITRARFEELNADLFRGTLDPVEKALRDAKLDKSQIHDIVLVGGSTRIPKIQKLLQDFFNGKELNKSINPDEAVAYGAAVQAAILSGDKSENVQDLLLLDVTPLSLGIETAGGVMTVLIKRNTTIPTKQTQTFTTYSDNQPGVLIQVYEGERAMTKDNNLLGKFELTGIPPAPRGVPQIEVTFDIDANGILNVSAVDKSTGKENKITITNDKGRLSKEDIERMVQEAEKYKAEDEKQRDKVSSKNSLESYAFNMKATVEDEKLQGKINDEDKQKILDKCNEIINWLDKNQTAEKEEFEHQQKELEKVCNPIITKLYQSAGGMPGGMPGGFPGGGAPPSGGASSGPTIEEVD

SEQ ID NO: 19204 - protein, 236 aa, Homo sapiens
MAALTIATGTGNWFSALALGVTLLKCLLIPTYHSTDFEVHRNWLAITHSLPISQWYYEATSEWTLDYPPFFAWFEYILSHVAKYFDQEMLNVHNLNYSSSRTLLFQRFSVIFMDVLFVYAVRECCKCIDGKKVGKELTEKPKFILSVLLLWNFGLLIVDHIHFQYNGFLFGLMLLSIARLFQRQGLPILSRLVLNSWGQAILPRRLTKVLGLQVKGIWKEHFSLLFSYISSISTSM

SEQ ID NO: 19205 - protein, 93 aa, Homo sapiens
MFCSGRKWVAEATICTKLMKREKRRMGKRRAKKAKREEKKKGGERRRNEKRGNQMKRMCERKKYETVLCFEKFRSTDNTSAVMRLSLYSRTDL

SEQ ID NO: 19206 - protein, 567 aa, Homo sapiens
MNVISSLVAITGITFTILSYRHQDKYCQMPSFEEICVFSRTLFIVLFFLPSDVTQNSEQPAPEENDQLQFVLQEEFSSDDSTTNAQSVIFGGYAFFKLTLSRSPLVSQPGNKGREFVPDEQKQSILPSPKFSEEEIEPLPPTLEKKPSENMSIQLDSTFKQMKDEDLQSAIVQPSQMQTKLLQDQAASLQVFPSHSALKLEDISPEDLPSQALPVEGLSEQTMPSKSTSSHVKQSSNLTANDLPPQGILSQDTSSQDMLFHDMTSQDMQSLDMLSQDTPSHAMPPQDIPSQDMLSQALSAHAILPEASTSHIVQFPEIQHLLQQPPDLQPENTEPQNQQILQMSYQDIRSEVMEETKEWKSEEELHRRKSSRRHSLNQQTKALQYLRRHSLDVQAKGQKSSKRHSLDQQSKGWQSPKQKSLDQQIKDWLSPKRHSVDKQAQLNQTKEQLPDQQAEDQQAKGEQYPEGQSKDGQVKDQQTDKEQNSKKQTQDQQTEDQPAQEKKSPKGQFQNVQAEGQQAQVEKVPKLLCQDSESQIQQYQFWQFHKGNLQAGQPRTVNLLAKNPLTG

SEQ ID NO: 19207 - protein, 155 aa, Homo sapiens
MPSKKKKYNARFPPARIKKIMQTDEEIGKVAAAVPVIISRALELFLESLLKKACQGDGEDNHMDGDKGARRGRKPGSGGRKNGGMGTKSKDKKLSGTDSEQEDESEDTDTDGEEETSQPPPQASHPSAHFQSPPTPFLPFASTLPLPPAPPGPSA

SEQ ID NO: 19208 - protein, 285 aa, Homo sapiens
LDAKENQSIRAFNSEHKIPYVRLERLKICAASSGEMPVFKLKPQKNDQDGSFLLIIECGTESSSMSIKRPPEVEGTSPEEHRLIPRTPGAKKGPPAPIENEDFCAVCLNGGELLCCDRCPKVFHLSCHVPALLSFPGGEWVCTLCRSLTQPEMEYDCENACYNQPGMRASPGLSMYDQKKCEKLVLSLCCNNLSLPFHEPVSPLARHYYQIIKRPMDLSIIRRKLQKKDPAHYTTPEEVVSDVRLMFWNCAKFNYPDSEVAEAGRCLEVFFEGWLKEIYPEKRFA

SEQ ID NO: 19209 - protein, 168 aa, Homo sapiens
LNVGHLKLTFCSVGPTECAALAFVLQHLRRPVALQLDYNSVGDIGVEQLLPCLGVCKALYLRDNNISDRGICKLIECALHCEQLQKLALGNNYITAAGAQVLAEGLRGNTSLQFLGFWGNRVGDEGAQALAEALGDHQSLRWLSLVGNNIGSVGAQALALMLAKNVML

SEQ ID NO: 19210 - protein, 63 aa, Homo sapiens
MNRPAPVEISYENMRFLITHNPTNATLNKFTEELKKYGVTTLVRVCDATYDKAPVEKEGIHVL

SEQ ID NO: 19211 - protein, 565 aa, Homo sapiens
MRKKDKQSIRDVRDIFGVSESPPRDTCGNHTNQLDGTKEERELPRVIKTNDASLNSTTLSDASQDKEGSFAVPRSDSVAILETIPVLPVHSNGSPEPGQPVQNAISDDDFLEKNIPPEAEELSFEVSYSEMVTEALKRNKLKKSEIKKEDYVLTKFNVQKTRFGLTEAGDLSAEDMKKIRHLSLIELTAFFDAFGIQLKRNKTEKVKGRDNGIFGVPLTVLLDGDRKKDPGVKVPLVLQKFFEKVEESGLESEGIFRLSGCTAKVKQYREELDAKFNADKFKWDKMCHREAAVMLKAFFRELPTSLFPVEYIPAFISLMERGPHVKVQFQALHLMVMALPDANRDAAQALMTFFNKVIANESKNRMSLWNISTVMAPNLFFSRSKHSDYEELLLANTAAHIIRLMLKYQKILWKVPSFLITQVRRMNEATMLLKKQLPSVRKLLRRKTLERETASPKTSKVLQKSPSARRMSDVPEGVIRVHAPLLSKVSMAIQLNNQTKAKDILAKFQYENSHGSSECIKIQNQRLYEIGGNIGEHCLDPDAYILDVYRINPQAEWVIKPQQSS

SEQ ID NO: 19212 - protein, 516 aa, Homo sapiens
MAAPEQPLAISRGCTSSSSLSPPRGDRTLLVRHLPAELTAEEKEDLLKYFGAQSVRVLSDKGRLKHTAFATFPNEKAAIKALTRLHQLKLLGHTLVVEFAKEQDRVHSPCPTSGSEKKKRSDDPVEDDKEKKELGYLTVENGIAPNHGLTFPLNSCLKYMYPPPSSTILANIVNALASVPKFYVQVLHLMNKMNLPTPFGPITARPPMYEDYMPLHAPLPPTSPQPPEEPPLPDEDEELSSEESEYESTDDEDRQRMNKLMELANLQPKRPKTIKQRHVRKKRKIKDMLNTPLCPSHSLHPVLLPSDVFDQPQPVGNKRIEFHISTDMPAAFKKDLEKEQNCEEKNHDLPATEVDASNIGFGKIFPKPNLDITEEIKEDSDEMPSECISRRELEKGRISREEMETLSVFRSYEPGEPNCRIYVKNLAKHVQEKDLKYIFGRYVDFSSETQRIMFDIRLMKEGRMKGQAFIGLPNEKAAAKALKEANGYVLFGKPMVVQFARSARPKQDPKEGKRKC

SEQ ID NO: 19213 - protein, 161 aa, Homo sapiens
MPSKKKKYNARFPPSRNAKTMTTSHLKQCIELEQQFDFLKDLVASVPDMQGDGEDNHMDGDKGARRGRKPGSGGRKNGGMGTKSKDKKLSGTDSEQEDESEDTDTDGEEETSQPPPQASHPSAHFQSPPTPFLPFASTLPLPPAPPGPSAPDEEDEEDYDS

SEQ ID NO: 19214 - protein, 228 aa, Homo sapiens
MGLLVFVRNLLLALCLFLVLGFLYYSAWKLHLLQWEEDSKYDRLGFLLNLDSKLPAELATKYANFSEGACKPGYASALMTAIFPRFSKPAPMFLDDSFRKWARIREFVPPFGIKGQDNLIKAILSVTKEYRLTPALDSLRCRRCIIVGNGGVLANKSLGSRIDDYDIVVRVHRMASGNLWPLECPRSPLRFESSTHISSRRPPSPSLACPSTMASWAGGTSLPLAVWQ

SEQ ID NO: 19215 - protein, 214 aa, Homo sapiens
MILNKALLLGALALTTVMSPCGGEDIVADHVASCGVNLYQFYGPSGQYTHEFDGDEQFYVDLERKETAWRWPEFSKFGGFDPQGALRNMAVAKHNLNIMIKRYNSTAATNEVPEVTVFSKSPVTLGQPNTLICLVDNIFPPVVNITWLSNGQSVTEGVSETSFLSKSDHSFFKISYLTFLPSADEIYDCKVEHWGLDQPLLKHWGASPSTGAEE

SEQ ID NO: 19216 - protein, 703 aa, Homo sapiens
MSGEDAEVRAVSEDVSNGSSGSPSPGDTLPWNLGKTQRSRRSGGGAGSNGSVLDPAERAVIRIADERDRVQKKTFTKWVNKHLIKHWRAEAQRHISDLYEDLRDGHNLISLLEVLSGDSLPRERDVSRSSRLPREKGRMRFHKLQNVQIALDYLRHRQVKLVNIRNDDIADGNPKLTLGLIWTIILHFQISDIQVSGQSEDMTAKEKLLLWSQRMVEGYQGLRCDNFTSSWRDGRLFNAIIHRHKPLLIDMNKVYRQTNLENLDQAFSVAERDLGVTRLLDPEDVDVPQPDEKSIITYVSSLYDAMPRVPDVQDGVRANELQLRWQEYRELVLLLLQWMRHHTAAFEERRFPSSFEEIEILWSQFLKFKEMELPAKEADKNRSKGIYQSLEGAVQAGQLKVPPGYHPLDVEKEWGKLHVAILEREKQLRSEFERLECLQRIVTKLQMEAGLCEEQLNQADALLQSDVRLLAAGKVPQRAGEVERDLDKADSMIRLLFNDVQTLKDGRHPQGEQMYRRVYRLHERLVAIRTEYNLRLKAGVAAPATQVAQVTLQSVQRRPELEDSTLRYLQDLLAWVEENQHRVDGAEWGVDLPSVEAQLGSHRGLHQSIEEFRAKIERARSDEGQLSPATRGAYRDCLGRLDLQYAKLLNSSKARLRSLESLHSFVAAATKELMWLNEKEEEEVGFDWSDRNTNMTAKKESYS

SEQ ID NO: 19217 - protein, 1493 aa, Homo sapiens
MLWPRNLTSWDDSSSVSSGISDTIDNLSTDDINTSSSISSYANTPASSRKNLDVQTDAEKHSQVERNSLWSGDDVKKSDGGSDSGIKMEPGSKWRRNPSDVSDESDKSTSGKKNPVISQTGSWRRGMTAQVGITMPRTKPSAPAGALKTPGTGKTDDAKVSEKGRLSPKASQVKRSPSDAGRSSGDESKKPLPSSSRTPTANANSFGFKKQSGSAAGLAMITASGVTVTSRSATLGKIPKSSALVSRSAGRKSSMDGAQNQDDGYLALSSRTNLQYRSLPRPSKSNSRNGAGNRSSTSSIDSNISSKSAGLPVPKLREPSKTALGSSLPGLVNQTDKEKGISSDNESVASCNSVKVNPAAQPVSSPAQTSLQPGAKYPDVASPTLRRLFGGKPTKQVPIATAENMKNSVVISNPHATMTQQGNLDSPSGSGVLSSGSSSPLYSKNVDLNQSPLASSPSSAHSAPSNSLTWGTNASSSSAVSKDGLGFQSVSSLHTSCESIDISLSSGGVPSHNSSTGLIASSKDDSLTPFVRTNSVKTTLSESDPHLDRNTLPKKGLRYTPTSQLRTQEDAKEWLRSHSAGGLQDTAANSPFSSGSSVTSPSGTRFNFSQLASPTTVTQMSLSNPTMLRTHSLSNADGQYDPYTDSRFRNSSMSLDEKSRTMSRSGSFRDGFEEVHGSSLSLVSSTSSVYSTPEEKCQSEIRKLRRELDASQEKVSALTTQLTANAHLVAAFEQSLGNMTIRLQSLTMTAEQKDSELNELRKTIELLKKQNAAAQAAINGVINTPELNCKGNGTAQSADLRIRRQHSSDSVSSINSATSHSSVGSNIESDSKKKKRKNWLRSSFKQAFGKKKSPKSASSHSDIEEMTDSSLPSSPKLPHNGSTGSTPLLRNSHSNSLISECMDSEAETVMQLRNELRDKEMKLTDIRLEALSSAHQLDQLREAMNRMQSEIEKLKAENDRLKSESQGSGCSRAPSQVSISASPRQSMGLSQHSLNLTESTSLDMLLDDTGECSARKEGGRHVKIVVSFQEEMKWKEDSRPHLFLIGCIGVSGKTKWDVLDGVVRRLFKEYIIHVDPVSQLGLNSDSVLGYSIGEIKRSNTSETPELLPCGYLVGENTTISVTVKGLAENSLDSLVFESLIPKPILQRYVSLLIEHRRIILSGPSGTGKTYLANRLSEYIVLREGRELTDGVIATFNVDHKSSKELRQYLSNLADQCNSENNAVDMPLVIILDNLHHVSSLGEIFNGLLNCKYHKCPYIIGTMNQATSSTPNLQLHHNFRWVLCANHTEPVKGFLGRFLRRKLMETEISGRVRNMELVKIIDWIPKVWHHLNRFLEAHSSSDVTIGPRLFLSCPIDVDGSRVWFTDLWNYSIIPYLLEAVREGLQLYGRRAPWEDPAKWVMDTYPWAASPQQHEWPPLLQLRPEDVGFDGYSMPREGSTSKQMPPSDAEGDPLMNMLMRLQEAANYSSPQSYDSDSNSNSHHDDILDSSLESTL

SEQ ID NO: 19218 - protein, 733 aa, Homo sapiens
MGKLITRMWKLLRRRSAPKELLSRTSLETQKLDLMTEVSELKLKLVGMEKEQREQEEKQRKAEELLQELRHLKIKVEELENERNQYEWKLKATKAEVAQLQEQVALKDAEIERLHSQLSRTAALHSESHTERDQEIQRLKMGMETLLLANEDKDRRIEELTGLLNQYRKVKEIVMVTQGPSERTLSINEEEPEGGFSKWNATNKDPEELFKQEMPPRCSSPTVGPPPLPQKSLETRAQKKLSCSLEDLRSESVDKCMDGNQPFPVLEPKDSPFLAEHKYPTLPGKLSGATPNGEAAKSPPTICQPDATGSSLLRLRDTESGWDDTAVVNDLSSTSSGTESGPQSPLTPDGKRNPKGIKKFWGKIRRTQSGNFYTDTLGMAEFRRGGLRATAGPRLSRTRDSKGQKSDANAPFAQWSTERVCAWLEDFGLAQYVIFARQWVSSGHTLLTATPQDMEKELGIKHPLHRKKLVLAVKAINTKQEEKSALLDHIWVTRWLDDIGLPQYKDQFHESRVDRRMLQYLTVNDLLFLKVTSQLHHLSIKCAIHVLHVNKFNPHCLHRRPADESNLSPSEVVQWSNHRVMEWLRSVDLAEYAPNLRGSGVHGGLIILEPRFTGDTLAMLLNIPPQKTLLRRHLTTKFNALIGPEAEQEKREKMASPAYTPLTTTAKVRPRKLGFSHFGNIRKKKFDESTDYICPMEPSDGVSDSHRVYSGYRGLSPLDAPELDGLDQVGQIS

SEQ ID NO: 19219 - protein, 781 aa, Homo sapiens
MGQLRDWFPNTQDLAGNDQENIRHADRNNSDDNHLASEDTSAKQSGKPGIYEDRDPLRVSISREQSFFGSPLAHDPFSCLQLVGQENVCGDDYDEAVKLKESVVENHAVLSYAVEEEHAYLGPTVKPDDKAKTLSYEPLSSATVSTGSLLSYENTDLSLTDPESFSEHMDDSKQESTTSKEEETNIISSIVPSTQDIYQRQNSSDVHKSLLPAVDETTCGHTHFQQMIDKYINEANLIPEKTDLQELEHIFPNLHHQLFKPLEPHPDFDLSSSSSGISPDNRDFYQRSDSSSESHCATGLSKSTVYFTALRRTSMHSSLNTSPNQQPDTNLAHVGAHSFATENIIGGSEQCFEQLQPEYSSQEESQHADLPSIFSIEARDSSQGMKNQNYPSEEHTEILQNKKKIVHFQLSIGNLSSVYSSSDEANVFDQLNVQHSTPCGSNSSECSTKHQLESRKESMGFEELSKRGVVTMLQSQGLIEDNKNETCRVLDINPQVEETDSRLCVRTVEMGTSIQAPYSLTTQNEKYFENSAETDIPKITKKLSQLGESELFASSGSFSLQSSIPVWETETGHGIMEEPELTLISTTDTSIAEMDFANLTLEEKSENEAKCFFQVSEFLPLVSATEASDYPAVSELSIEKPRTASTETPRRLTPVPGSLQEAFIKRKKSFMERSHQRQKEIRNKIHVSENSQIKTVKEKPSISSSVSRLKGVNKVRASFPEDRKTTQALRHQRGLRLYNQLAEVKQQKEEKTKQEAYAQNRARAKEFHKKTLEKLRAKNTC

SEQ ID NO: 19220 - protein, 861 aa, Homo sapiens
MQEPGQIVETYTEEDPEGAMSVVSVETSDDGTTRRTETTVKKVVKTVTTRTVQPVAMGPDGLPVDASSVSNNYIQTLGRDFRKNGNGGPGPYVGQAGTATLPRNFHYPPDGYSRHYEDGYPGGSDNYGSLSRVTRIEERYRPSMEGYRAPSRQDVYGPQPQVRVGGSSVDLHRFHPEPYGLEDDQRSMGYDDLDYGMMSDYGTARRTGTPSDPRRRLRSYEDMIGEEVPSDQYYWAPLAQHERGSLASLDSLRKGGPPPPNWRQPELPEVIAMLGFRLDAVKSNAAAYLQHLCYRNDKVKTDVRKLKGIPVLVGLLDHPKKEVHLGACGALKNISFGRDQDNKIAIKNCDGVPALVRLLRKARDMDLTEVITGTLWNLSSHDSIKMEIVDHALHALTDEVIIPHSGWEREPNEDCKPRHIEWESVLTNTAGCLRNVSSERSEARRKLRECDGLVDALIFIVQAEIGQKDSDSKLVENCVCLLRNLSYQVHREIPQAERYQEAAPNVANNTGPHAASCFGAKKGKGKKPIEDPANDTVDFPKRTSPARGYELLFQPEVVRIYISLLKESKTPAILEASAGAIQNLCAGRWTYGRYIRSALRQEKALSAIADLLTNEHERVVKAASGALRNLAVDARNKELIGKHAIPNLVKNLPGGQQNSSWNFSEDTVISILNTINEVIAENLEAAKKLRETQGIEKLVLINKSGNRSEKEVRAAALVLQTIWGYKELRKPLEKEGWKKSDFQVNLNNASRSQSSHSYDDSTLPLIDRNQKSDKKPDREEIQMSNMGSNTKSLDNNYSTPNERGDHNRTLDRSGDLGDMEPLKGTTPLMQDEGQESLEEELDVLVLDDEGGQVSYPSMQKI

SEQ ID NO: 19221 - protein, 791 aa, Homo sapiens
MFWKFDLHSSSHIDTLLEREDVTLKELMDEEDVLQECKAQNRKLIEFLLKAECLEDLVSFIIEEPPQDMDEKIRYKYPNISCELLTSDVSQMNDRLGEDESLLMKLYSFLLNDSPLNPLLASFFSKVLSILISRKPEQIVDFLKKKHDFVDLIIKHIGTSAIMDLLLRLLTCIEPPQPRQDVLNWLNEEKIIQRLVEIVHPSQEEDRHSNASQSLCEIVRLSRDQMLQIQNSTEPDPLLATLEKQEIIEQLLSNIFHKEKNESAIVSAIQILLTLLETRRPTFEGHIEICPPGMSHSACSVNKSVLEAIRGRLGSFHELLLEPPKNMFFKYTWNNFLHTQVEICIALILASPFENTENATITDQDSTGDNLLLKHLFQKCQLIERILEAWEMNEKKQAEGGRRHGYMGHLTRIANCIVHSTDKGPNSALVQQLIKDLPDEVRERWETFCTSSLGETNKRNTVDLAFSDYQMQQMTSNFIDQFGFNDEKFADQDDIGNVSFDRVSDINFTLNTNESGNIALFEACCKERIQQFDDGGSDEEDIWEEKHIAFTPESQRRSSSGSTDSEESTDSEEEDGAKQDLFEPSSANTEDKMEVDLSEPPNWSANFDVPMETTHGAPLDSVGSDVWSTEEPMPTKETGWASFSEFTSSLSTKDSLRSNSPVEMETSTEPMDPLTPSAAALAVQPEAAGSVAMEASSDGEEDAESTDKVTETVMNGGMKETLSLTVDAKTETAVFKSEEGKLSTSQDAACKDAEECPETAEAKCAAPRPPSSSPEQSGVEIPALPGQWSQQ

SEQ ID NO: 19222 - protein, 125 aa, Homo sapiens
DHSRSSSSSASPSSPSSREEKESKKEREEEFKTHHEMKEYSGFAGVSRPRGTFHDDRDDGVDYWAKRGRGRGTFQRGRGRFNFKKSGSSPKWTHDKYQGDGIVEDEEETMENNEEKKDRRKEEKE

SEQ ID NO: 19223 - protein, 940 aa, Homo sapiens
MESAGGFKLGEKKKLLKMTSRRLEESMGAVQMGLVNMFKGFQSKVLPPLSPKVVTEEEVNRMLTPSEFLKEMSLTTEQRLAKTRLMCRPQIIELLDMGETTHQKFSGIDLDQALFQPFPSEIIFQNYTPCEVYEVPLILRNNDKIPRLVKVVEESSPYFKVISPKDIGHKVAPGVPSIFRILFTPEENKDYAHTLTCVTEREKFIVPIKARGARAILDFPDKLNFSTCPVKYSTQKILLVRNIGNKNAVFHIKTCRPFSIEPAIGTLNVGESMQLEVEFEPQSVGDHSGRLIVCYDTGEKVFVSLYGAAIDMNIRLDKNSLTIEKTYISLANQRTITIHNRSNIIAHFLWKVFATQQEEDREKYRACDDLIKEEKDETDEFFEECITDPLLREHLSVLSRTFANQRRLVQGDSKLFFNNVFTVEPLEGDVWPNSSAEITVYFNPLEAKLYQQTIYCDILGREIRLPLRIKGEGMGPKIHFNFELLDIGKVFTGSAHCYEAILYNKGSIDALFNMTPPTSALGACFVFSPKEGIIEPSGVQAIQISFSSTILGNFEEEFLVNVNGSPEPVKLTIRGCVIGPTFHFNVPALHFGDVSFGFPHTLICSLNNTSLIPMTYKLRIPGDGLGHKSISYCEQHVDYKRPSWTKEEISSMKPKEFTISPDCGTIRPQGFAAIRVTLCSNTVQKYELALVVDVEGIGEEVLALLITARCVVPALHLVNTEVDFGHCFLKYPYEKTLQLANQDDLPGFYEVQPQVCEEVPTVLFSSPTPSGVISPSSTIHIPLVLETQVTGEHRSTVYISIFGSQDPPLVCHLKSAGEGPVIYVHPNQVDFGNIYVLKDSSRILNLCNQSFIPAFFQAHMAHKKSLWTIEPNEGMVPPETDVQLALTANLNDTLTFKDCVILDIENSSTYRIPVQASGTGSTIVSDKPFAPELNLGAHFR

SEQ ID NO: 19224 - protein, 485 aa, Homo sapiens
MDNNKHCKQDNCLLTPNSGQEDADNDGVGDQCDDDADGDGIKNVEDNCRLFPNKDQQNSDTDSFGDACDNCPNVPNNDQKDTDGNGEGDACDNDVDGDGIPNGLDNCPKVPNPLQTDRDEDGVGDACDSCPEMSNPTQTDADSDLVGDVCDTNEDSDGDGHQDTKDNCPQLPNSSQLDSDNDGLGDECDGDDDNDGIPDYVPPGPDNCRLVPNPNQKDSDGNGVGDVCEDDFDNDAVVDPLDVCPESAEVTLTDFRAYQTVVLDPEGDAQIDPNWVVLNQGMEIVQTMNSDPGLAVGYTAFNGVDFEGTFHVNTVTDDDYAGFLFSYQDSGRFYVVMWKQTEQTYWQATPFRAVAQPGLQLKAVTSVSGPGEHLRNALWHTGHTPDQVRLLWTDPRNVGWRDKTSYRWQLLHRPQVGYIRVKLYEGPQLVADSGVIIDTSMRGGRLGVFCFSQENIIWSNLQYRCNDTVPEDFEPFRRQLLQGRV

SEQ ID NO: 19225 - protein, 126 aa, Homo sapiens
MFGFHKPKMYRSIEGCCICRAKSSSSRFTDSKRYEKDFQSCFGLHETRSGDICNACVLLVKRWKKLPAGSKKNWNHVVDARAGPSLKTTLKPKKVKTLSGNRIKSNQISKLQKEFKRHNSDAHSTT

SEQ ID NO: 19226 - protein, 657 aa, Homo sapiens
MDLERRNEELEELYLLERCFPEAEKLKQETKLLSQWKHYIQCDGSPDPSVAQEMNTFISLWKEKTNETFEEVIEKSKVVLNLIEKLKFILLETPPCDLQDKNIIQYQESILQLQELLHLKFGVATEILLKQASTLADLDSGNMEKVIKDENVTLYVWANLKKNPRHRSVRFSETQIGFEIPRILATSDIAVRLLHTHYDHVSALHPVSTPSKEYTSAVTELVKDDVKNVEKAISKEVEEESKQQERGSHLIQEEEIKVEEEQGDIEVKMSSAEEESEAIKCEREMKVLSETVSAAQLLLVENSSEKPDFFEDNVVDLCQFTTLGGVYHLDILELPPQCKPVKGWMIVEILKEGLQKYTYPPETTEEFETENAFPPIEVTLEVHENVIFFEDPVVVRWDAEGKHWRTDGISNVSYKPKERLVTFSLDTFGPVTLIQDAHINMPYQSWELRPLDVNKVLLTVTTVFTEIQIQIKENLCMLSSIKLKDKKHISILEGTWMTPIPFIIALKEAGLNIFPTRHSHFYVIINNKVPLVEVKAYRQMALLSSAFAFGWSKWNLLCNSTKVVFKVREHLTEACTENPNWALLMFSGDRAQRLKIKEESEAFSEALKEETEFHSTLYHMVKDFASEEAMEKVRSSNCQFVNSVCHMLLSTRLLSYS

SEQ ID NO: 19227 - protein, 1171 aa, Homo sapiens
KQEKINQNVTVIRNNPHIPCKPQMVLNLYQLNQLDCPGGRLIGGWEDNPFKGDLKIVLRGNHTTQDWALPEGPNQGAKVLGVFGELDLHGIPHSIYKTKLSETAFAGSKVLSLMDAVDWQEGEEIVITTTSYDFHQTETRSIVKILHDHKILILNDSLSYTHFAEKYHVPGTGESYTLAADVGILSRNIKIVGEDYPGWSEDSFGARVLVGSFTENMMTFKGNARISNVEFYHSGQEGFRDSTDPRYAVTFLNLGQIQEHGSSYIRGCAFHHGFSPAIGVFGTDGLDIDDNIIHFTVGEGIRIWGNANRVRGNLIALSVWPGTYQNRKDLSSTLWHAAIEINRGTNTVLQNNVVAGFGRAGYRIDGEPCPGQFNPVEKWFDNEAHGGLYGIYMNQDGLPGCSLIQGFTIWTCWDYGIYFQTTESVHIYNVTLVDNGMAIFPMIYMPAAISHKISSKNVQIKSSLIVGSSPGFNCSDVLTNDDPNIELTAAHRSPRSPSGGRSGICWPTFASAHNMAPRKPHAGIMSYNAISGLLDISGSTFVGFKNVCSGETNVIFITNPLNEDLQHPIHVKNIKLVDTTEQSKIFIHRPDISKVNPSDCVDMVCDAKRKSFLRDIDGSFLGNAGSVIPQAEYEWDGNSQVGIGDYRIPKAMLTFLNGSRIPVTEKAPHKGIIRDSTCKYLPEWQSYQCFGMEYAMMVIESLDPDTETRRLSPVAIMGNGYVDLINGPQDHGWCAGYTCQRRLSLFHSIVALNKSYEVYFTGTSPQNLRLMLLNVDHNKAVLVGIFFSTLQRLDVYVNNLLVCPKTTIWNAQQKHCELNNHLYKDQFLPNLDSTVLGENYFDGTYQMLYLLVKGTIPVEIHTATVIFVSFQLSVATEDDFYTSHNLVKNLALFLKIPSDKIRISKIRGKSLRRKRSMGFIIEIEIGDPPIQFISNGTTGQMQLSELQEIAGSLGQAVILGNISSILGFNISSMSITNPLPSPSDSGWIKVTAQPVERSAFPVHHVAFVSSLLVITQPVAAQPGQPFPQQPSVKATDSDGNCVSVGITALTLRAILKDSNNNQVNGLSGNTTIPFSSCWANYTDLTPLRTGKNYKIEFILDNVVGVESRTFSLLAESVSSSGSSSSSNSKASTVGTYAQIMTVVISCLVGRMWLLEIFMAAVSTLNITLRSY

SEQ ID NO: 19228 - protein, 354 aa, Homo sapiens
MQLQFRSWMLAALTLLVVFLIFADISEIEEEIGAEVVINGSSSPAVVDRSNESIKHNIQPASSKWRHNQTLSLRIRKQILKFLDAEKDISVLKGTLKPGDIIHYIFDRDSTMNVSQNLYELLPRTSPLKNKHFGTCAIVGNSGVLLNSGCGQEIDAHSFVIRCNLAPVQEYARDVGLKTDLVTMNPSVIQRAFEDLVNATWREKLLQRLHSLNGSILWIPAFMARGGKERVEWVNELILKHHVNVRTAYPSLRLLHAVRGYWLTNKVHIKRPTTGLLMYTLATRFCKQIYLYGFWPFPLDQNQNPVKYHYYDSLKYGYTSQASPHTMPLEFKALKSLHEQGALKLTVGQCDGAT

SEQ ID NO: 19229 - protein, 339 aa, Homo sapiens
MVGDEASELRSMLEVNYPMENGIVRNWDDMKHLWDYTFGPEKLNIDTRNCKILLTEPPMNPTKNREKIVEVMFETYQFSGVYVAIQAVLTLYAQGLLTGVVVDSGDGVTHICPVYEGFSLPHLTRRLDIAGRDITRYLIKLLLLRGYAFNHSADFETVRMIKEKLCYVGYNIEQEQKLALETTVLVESYTLPDGRIIKVGGERFEAPEALFQPHLINVEGVGVAELLFNTIQAADIDTRSEFYKHIVLSGGSTMYPGLPSRLERELKQLYLERVLKGDVEKLSKFKIRIEDPPRRKHMVFLGGAVLADIMKDKDNFWMTRQEYQEKGVRVLEKLGVTVR

SEQ ID NO: 19230 - protein, 1332 aa, Homo sapiens
MAAGKASGESEEASPSLTAEEREALGGLDSRLFGFVRFHEDGARTKALLGKAVRCYESLILKAEGKVESDFFCQLGHFNLLLEDYPKALSAYQRYYSLQSDYWKNAAFLYGLGLVYFHYNAFQWAIKAFQEVLYVDPSFCRAKEIHLRLGLMFKVNTDYESSLKHFQLALVDCNPCTLSNAEIQFHIAHLYETQRKYHSAKEAYEQLLQTENLSAQVKATVLQQLGWMHHTVDLLGDKATKESYAIQYLQKSLEADPNSGQSWYFLGRCYSSIGKVQDAFISYRQSIDKSEASADTWCSIGVLYQQQNQPMDALQAYICAVQLDHGHAAAWMDLGTLYESCNQPQDAIKCYLNATRSKSCSNTSALAARIKYLQNTSDNWSGGHAVSHPPVQQQAHSWCLTPQKLQHLEQLRANRNNLNPAQKLMLEQLESQFVLMQQHQMRPTGVAQVRSTGIPNGPTADSSLPTNSVSGQQPQLALTRVPSVSQPGVRPACPGQPLANGPFSAGHVPCSTSRTLGSTDTILIGNNHITGSGSNGNVPYLQRNALTLPHNRTNLTSSAEEPWKNQLSNSTQGLHKGQSSHSAGPNGERPLSSTGPSQHLQAAGSGIQNQNGHPTLPSNSVTQGAALNHLSSHTATSGGQQGITLTKESKPSGNILTVPETSRHTGETPNSTASVEGLPNHVHQMTADAVCSPSHGDSKSPGLLSSDNPQLSALLMGKANNNVGTGTCDKVNNIHPAVHTKTDNSVASSPSSAISTATPSPKSTEQTTTNSVTSLNSPHSGLHTINGEGMEESQSPMKTDLLLVNHKPSPQIIPSMSVSIYPSSAEVLKACRNLGKNGLSNSSILLDKCPPPRPPSSPYPPLPKDKLNPPTPSIYLENKRDAFFPPLHQFCTNPNNPVTVIRGLAGALKLDLGLFSTKTLVEANNEHMVEVRTQLLQPADENWDPTGTKKIWHCESNRSHTTIAKYAQYQASSFQESLREENEKRSHHKDHSDSESTSSDNSGRRRKGPFKTIKFGTNIDLSDDKKWKLQLHELTKLPAFVRVVSAGNLLSHVGHTILGMNTVQLYMKVPGSRTPGHQENNNFCSVNINIGPGDCEWFVVPEGYWGVLNDFCEKNNLNFLMGSWWPNLEDLYEANVPVYRFIQRPGDLVWINAGTVHWVQAIGWCNNIAWNVGPLTACQYKLAVERYEWNKLQSVKSIVPMVHLSWNMARNIKVSDPKLFEMIKYCLLRTLKQCQTLREALIAAGKEIIWHGRTKEEPAHYCSICEVEVFDLLFVTNESNSRKTYIVHCQDCARKTSGNLENFVVLEQYKMEDLMQVYDQFTLAPPLPSASS

SEQ ID NO: 19231 - protein, 450 aa, Homo sapiens
AGRSRASPVSGREGGSSRPLEEGTGSSPACVRGAAPGSQDAFYPTRAKQARVSQELKKAAKRTVSISEGPDTLGDGMRERRETLALAPEPEPLEKEACEKWKRPFRSASATSLTLSHCVDVVKGLLDFKKRRGHSIGGAPEQRYQIIPVCVAARLPTRAQDVLDAHLSEVNAVRFGPNSSLLATGGADRLIHLWNVVGSRLEANQTLEGAGGSITSVDFDPSGYQVLAATYNQAAQLWKVGEAQSKETLSGHKDKVTAAKFKLTRHQAVTGSRDRTVKEWDLGRAYCSRTINVLSYCNDVVCGDHIIISGHNDQKIRFWDSRGPHCTQVIPVQGRVTSLSLSHDQLHLLSCSRDNTLKVIDLRVSNIRQVFRADGFKCGSDWTKAVFSPDRSYALAGSCDGALYIWDVDTGKLESRLQGPHCAAVNAVAWCYSGSHMVSVDQGRKVVLWQ

SEQ ID NO: 19232 - protein, 641 aa, Homo sapiens
MEILLIIRFCCNCTYALLYKPIDRVTRSTLVLHDLLKHTPVDHPDYPLLQDALRISQNFLSSINEDIDPRRTAVTTPKGETRQLVKDGFLVEVSESSRKLRHVFLFTDVLLCAKLKKTSAGKHQQYDCKWYIPLADLVFPSPEESEASPQVHPFPDHELEDMKMKISALKSEIQKEKANKGQSRAIERLKKKMFENEFLLLLNSPTIPFRIHNRNGKSYLFLLSSDYERSEWREAIQKLQKKDLQAFVLSSVELQVLTGSCFKLRTVHNIPVTSNKDDDESPGLYGFLHVIVHSAKGFKQSANLYCTLEVDSFGYFVSKAKTRVFRDTAEPKWDEEFEIELEGSQSLRILCYEKCYDKTKVNKDNNEIVDKIMGKGQIQLDPQTVETKNWHTDVIEMNGIKVEFSMKFTSRDMSLKRTPSKKQTGVFGVKISVVTKRERSKVPYIVRQCVEEVEKRGIEEVGIYRISGVATDIQALKAVFDANNKDILLMLSDMDINAIAGTLKLYFRELPEPLLTDRLYPAFMEGIALSDPAAKENCMMHLLRSLPDPNLITFLFLLEHLKRVAEKEPINKMSLHNLATVFGPTLLRPSEVESKAHLTSAADIWSHDVMAQVQVLLYYLQHPPISFAELKRNTLYFSTDV

SEQ ID NO: 19233 - protein, 313 aa, Homo sapiens
MQEITQHFAVCHVDAPGQQDGAASFPAGYMYPSMDQLAEMLPGVLQQFGLKSIIGMGTGAGAYILTRFALNNPEMVEGLVLINVNPCAEGWMDWAASKISGWTQALPDMVVSHLFGKEEMQSNVEVVHTYRQHIVNDMNPGNLHLFINAYNSRRDLEIERPMPGTHTVTLQCPALLVVGDSSPAVDAVVECNSKLDPTKTTLLKMADCGGLPQISQPAKLAEAFKYFVQGMGYMPSASMTRLMRSRTASGSSVTSLDGTRSRSHTSEGTRSRSHTSEGTRSRSHTSEGAHLDITPNSGAAGNSAGPKSMEVSC

SEQ ID NO: 19234 - protein, 552 aa, Homo sapiens
MADSSEGPRAGPGEVAELPGDESGTPGGEAFPLSSLANLFEGEDGSLSPSPADASRPAGPGDGRPNLRMKFQGAFRKGVPNPIDLLESTLYESSVVPGPKKAPMDSLFDYGTYRHHSSDNKRWRKKIIEKQPQSPKAPAPQPPPILKVFNRPILFDIVSRGSTADLDGLLPFLLTHKKRLTDEEFREPSTGKTCLPKALLNLSNGRNDTIPVLLDIAERTGNMREFINSPFRDIYYRGQTALHIAIERRCKHYVELLVAQGADVHAQARGRFFQPKDEGGYFYFGELPLSLAACTNQPHIVNYLTENPHKKADMRRQDSRGNTVLHALVAIADNTRENTKFVTKMYDLLLLKCARLFPDSNLEAVLNNDGLSPLMMAAKTGKIGIFQHIIRREVTDEDTRHLSRKFKDWAYGPVYSSLYDLSSLDTCGEEASVLEILVYNSKIENRHEMLAVEPINELLRDKWRKFGAVSFYINVVSYLCAMVIFTLTAYYQPLEGTPPYPYRTTVDYLRLAGEVITLFTGVLFFFTNIKDLFMKKCPGVNSLFIDGSFQLL

SEQ ID NO: 19235 - protein, 603 aa, Homo sapiens
MKGGCVSQWKAAAGFLFCVMVFASAERPVFTNHFLVELHKGGEDKARQVAAEHGFGVRKVKMALQQEGFDRKKRGYRDINEIDINMNDPLFTKQWYLINTGQADGTPGLDLNVAEAWELGYTGKGVTIGIMDDGIDYLHPDLASNYNAEASYDFSSNDPYPYPRYTDDWFNSHGTRCAGEVSAAANNNICGVGVAYNSKVAGIRMLDQPFMTDIIEASSISHMPQLIDIYSASWGPTDNGKTVDGPRELTLQAMADGVNKGRGGKGSIYVWASGDGGSYDDCNCDGYASSMWTISINSAINDGRTALYDESCSSTLASTFSNGRKRNPEAGVATTDLYGNCTLRHSGTSAAAPEAAGVFALALEANLGLTWRDMQHLTVLTSKRNQLHDEVHQWRRNGVGLEFNHLFGYGVLDAGAMVKMAKDWKTVPERFHCVGGSVQDPEKIPSTGKLVLTLTTDACEGKENFVRYLEHVQAVITVNATRRGDLNINMTSPMGTKSILLSRRPRDDDSKVGFDKWPFMTTHTWGEDARGTWTLELGFVGSAPQKGVLKEWTLMLHGTQSAPYIDQVVRDYQSKLAMSKKEELEEELDEAVERSLKSILNKN

SEQ ID NO: 19236 - protein, 701 aa, Homo sapiens
MGHLLSKEPRNRPSQKRPRCCSWCRRRRPLLRLPRRTPAKVPPQPAAPRSRDCFFRGPCMLCFIVHSPGAPAPAGPEEEPPLSPPPRDGAYAAASSSQHLARRYAALAAEDCAAAARRFLLSSAAAAAAAAASASSPASCCKELGLAAAAAWEQQGRSLFLASLGPVRFLGPPAAVQLFRGPTPSPAELPTPPEMVCKRKGAGVPACTPCKQPRCGGGGCGGGGGGGGGGGPAGGGASPPRPPDAGCCQAPEQPPQPLCPPPSSPTSEGAPTEAGGDAVRAGGTAPLSAQQQHECGDADCRESPENPCDCHREPPPETPDINQLPPSILLKIFSNLSLDERCLSASLVCKYWRDLCLDFQFWKQLDLSSRQQVTDELLEKIASRSQNIIEINISDCRSMSDNGVCVLAFKCPGLLRYTAYRCKQLSDTSIIAVASHCPLLQKVHVGNQDKLTDEGLKQLGSKCRELKDIHFGQCYKISDEGMIVIAKGCLKLQRIYMQENKLVTDQSVKAFAEHCPELQYVGFMGCSVTSKGVIHLTKLRNLSSLDLRHITELDNETVMEIVKRCKNLSSLNLCLNWIINDRCVEVIAKEGQNLKELYLVSCKITDYALIAIGRYSMTIETVDVGWCKEITDQGATLIAQSSKSLRYLGLMRCDKVNEVTVEQLVQQYPHITFSTVLQDCKRTLERAYQMGWTPNMSAASS

SEQ ID NO: 19237 - protein, 439 aa, Homo sapiens
MAPKKKRGPSAGSQPGGAAAAGAEQPLSERAQYLQREHALLSEQLDTCEESVDQVLRENAFLDREALRLREENRLYASYVSARAQRCAKAIVRLDEQNRVDLAQIHWQRAELASLYHGREDGVRAQLLEMEARAAQMAQQVQELQPYKVLQLEQLARIRALERELLHMRVEHTQLLHRVKRRFLEDKAAFEREARQRVQSLARRAEREAVRALVAHTQAIKADNGRLRQELLLLLRRTQLLHHTRRQLLEQREQLHREHEDTRDLARVHGWLRRGPGGPPLWERPAFSQPTSRPGSLAAPISPSRAASQTPSVVPSRAAPRASSVVPSREASRVPSLVLSSMDSRVPSLATSKVGSRMPSLTASRAGSRALSLVQSLEGSGISSGSSPRVSSQDTLRSTKSGPKLLSGLSRDRDPALLPPQSEDSVNAEAAAEASPGRA

SEQ ID NO: 19238 - protein, 154 aa, Homo sapiens
MSVKGCFTDFHIDFGGTSVWYHVFRGGKIFWLIPPTLHNLALYEEWVLSGKQSDIFLGDRVERCQRIELKQGYTFFIPSGWIHAVYTPVDSLVFGGNILHSFNVPMQLRIYEIEDRTRVQPKFRYPFYYEMCWYVLERYVYCVTQRSHLTQEYQ

SEQ ID NO: 19239 - protein, 354 aa, Homo sapiens
MASGLGSPSPCSAGSEEEDMDALLNNSLPPPHPENEEDPEEDLSETETPKLKKKKKPKKPRDPKIPKSKRQKKERMLLCRQLGDSSGEGPEFVEEEEEVALRSDSEGSDYTPGKKKKKKLGPKKEKKSKSKRKEEEEEEDDDDDSKEPKSSAQLLEDWGMEDIDHVFSEEDYRTLTNYKAFSQFVRPLIAAKNPKIAVSKMMMVLGAKWREFSTNNPFKGSSGASVAAAAAAAVAVVESMVTATEVAPPPPPVEVPIRKAKTKEGKGPNARRKPKGSPRVPDAKKPKPKKVAPLKIKLGGFGSKRKRSSSEDDDLDVESDFDDASINSYSVSDGSTSRSSRSRKKLRTTKKKKK

SEQ ID NO: 19240 - protein, 677 aa, Homo sapiens
MADKRLLFYKYVYKRYRTDPRSGIIIGAEGDPPKSIELDGTFVGAEAPGELGGLGPGPAEARELDASRREVIQILKDLKQKHPDKDLEQLVGIANYYALLHQQKSRAFYRIQATRLMTGAGNVLRRHAADASRRAAPAEGAGEDEDDGASRIFFEPSLYHCLENCGSVLLSVTCQGGEGNSTFYVDYRTEDGSAKAGSDYEYSEGTLVFKPGETQKELRIGIIDDDIFEEDEHFFVRLLNLRVGDAQGMFEPDGGGRPKGRLVAPLLATVTILDDDHAGIFSFQDRLLHVSECMGTVDVRVVRSSGARGTVRLPYRTVDGTARGGGVHYEDACGELEFGDDETMKTLQVKIVDDEEYEKKDNFFIELGQPQWLKRGISALLLNQGDGDRKLTAEEEEARRIAEMGKPVLGENCRLEVIIEESYDFKNTVDKLIKKTNLALVIGTHSWREQFLEAITVSAGDEEEEEDGSREERLPSCFDYVMHFLTVFWKVLFACVPPTEYCHGWACFGVSILVIGLLTALIGDLASHFGCTVGLKDSVNAVVFVALGTSIPDTFASKVAALQDQCADASIGNVTGSNAVNVFLGLGVAWSVAAVYWAVQGRPFEVRTGTLAFSVTLFTVFAFVGIAVLLYRRRPHIGGELGGPRGPKLATTALFLGLWLLYILFASLEAYCHIRGF

SEQ ID NO: 19241 - protein, 659 aa, Homo sapiens
MDSQGRVWAQEMLLRVSPDHVTLLDPASKEELESYPLGAIVRCDAVMPPGRSRSLLLLVCQEPERAQPDVHFFQGLRLGAELIREDIQGALHNYRSGRGERRAAALRATQEELQRDRSPAAETPPLQRRPSVRAVISTVERGAGRGRPQAKPIPEAEEAQRPEPVGTSSNADSASPDLGPRGPDLAVLQAEREVDILNHVFDDVESFVSRLQKSAEAARVLEHRERGRRSRRRAAGEGLLTLRAKPPSEAEYTDVLQKIKYAFSLLARLRGNIADPSSPELLHFLFGPLQMIVNTSGGPEFASSVRRPHLTSDAVALLRDNVTPRENELWTSLGDSWTRPGLELSPEEGPPYRPEFFSGWEPPVTDPQSRAWEDPVEKQLQHERRRRQQSAPQVAVNGHRDLEPESEPQLESETAGKWVLCNYDFQARNSSELSVKQRDVLEVLDDSRKWWKVRDPAGQEGYVPYNILTPYPGPRLHHSQSPARSLNSTPPPPPAPAPAPPPALARPRWDRPRWDSCDSLNGLDPSEKEKFSQMLIVNEELQARLAQGRSGPSRAVPGPRAPEPQLSPGSDASEVRAWLQAKGFSSGTVDALGVLTGAQLFSLQKEELRAVSPEEGARVYSQVTVQRSLLEDKEKVSELEAVMEKQKKKVEGEVEMEVI

SEQ ID NO: 19242 - protein, 591 aa, Homo sapiens
MKKQFNRMRQLANQTVGRAEKTEVLSEDLLQVEKRLELVKQVSHSTHKKLTACLQGQQGAEADKRSKKLPLTTLAQCLMEGSAILGDDTLLGKMLKLCGETEDKLAQELIHFELQVERDVIEPLFLLAEVEIPNIQKQRKHLAKLVLDMDSSRTRWQQTSKSSGLSSSLQPAGAKADALREEMEEAANRVEICRDQLSADMYSFVAKEIDYANYFQTLIEVQAEYHRKSLTLLQAVLPQIKAQQEAWVEKPSFGKPLEEHLTISGREIAFPIEACVTMLLECGMQEEGLFRVAPSASKLKKLKAALDCCVVDVQEYSADPHAIAGALKSYLRELPEPLMTFELYDEWIQASNVQEQDKKLQALWNACEKLPKANHNNIRYLIKFLSKLSEYQDVNKMTPSNMAIVLGPNLLWPQAEGNITEMMTTVSLQIVGIIEPIIQHADWFFPGEIEFNITGNYGSPVHVNHNANYSSMPSPDMDPADRRQPEQARRPLSVATDNMMLEFYKKDGFKEAGTDSTQGPLWPAGGYGRPVRWPAVPSQPVPHPAQHPVTLWTELPSGVLLGLGPALPSCSSSPGLSFCLYKHFEQIAAHS

SEQ ID NO: 19243 - protein, 837 aa, Homo sapiens
MEPQVTLNVTFKNEIQSFLVSDPENTTWADIEAMVSINSQGEYEEALKMAVKQGNQLQMQVHEGHHVVDEAPPPVVGAKRLAARAGKKPLAHYSSLVRVLGSDMKTPEDPAVQSFPLVPCDTDQPQDKPPDWFTSYLETFREQVVNETVEKLEQKLHEKLVLQNPSLGSCPSEVSMPTSEETLFLPENQFSWHIACNNCQRRIVGVRYQCSLCPSYNICEDCEAGPYGHDTNHVLLKLRRPVVGSSEPFCHSKYSTPRLPAALEQVRLQKQVDKNFLKAEKQRLRAEKKQRKAEVKELKKQLKLHRKIHLWNSIHGLQSPKSPLGRPESLLQSNTLMLPLQPCTSVMPMLSAAFVDENLPDGTHLQPGTKFIKHWRMKNTGNVKWSADTKLKFMWGNLTLASTEKKDVLVPCLKAGHVGVVSVEFIAPALEGTYTSHWRLSHKGQQFGPRVWCSIIVDPFPSEESPDNIEKGMISSSKTDDLTCQQEETFLLAKEERQLGEVTEQTEGTAACIPQKAKNVASERELYIPSVDLLTAQDLLSFELLDINIVQELERVPHNTPVDVTPCMSPLPHDSPLIEKPGLGQIEEENEGAGFKALPDSMVSVKRKAENIASVEEAEEDLSGTQFVCETVIRSLTLDAAPDHNPPCRQKSLQMTFALPEGPLGNEKEEIIHIAEEEAVMEEEEDEEDEEEEDELKDEVQSQSSASSEDYIIILPECFDTSRPLGDSMYSSALSQPGLERGAEGKPGVEAGQEPAEAGERLPGGENQPQEHSISDILTTSQTLETVPLIPEVVELPPSLPRSSPCVHHHGSPGVDLPVTIPEVSSVPDQIRGANNF

SEQ ID NO: 19244 - protein, 1182 aa, Homo sapiens
MESLLENPVRAVLYLKELTAIVQNQQSLIHTQRERIDELERRLDELSAENRSLWEHQQLLQAQPPPGLVPPSSAPLPAAPATAPAAAARAQEPLQDQGQRSAAAPHPAPDRPPRQHHGQLLEQPQRGPGSRAHTPQSPHKHLGTQGAVTDKEKERPPSCCAAAGALLQHKSPSALGKGVLSRRPENETVLHQFCCPAADACSDLASQSDGSCTQAGGGMEDSVVAAAAVAAGRPSAHAPKAQAQELQEEEERPGAGAASPRAGPQHKASPGRQQPALATALCPHAPAASDYELSLDLKNKQIEMLEHKYGGHLVSRRAACTIQTAFRQYQLSKNFEKIRNSLLESRLPRRISLRKVRSPTAESLAAEKALMEGYGLVGLPLVRSPSLPPTFAGTLTELEDSFTEQVQSLAKSIDDALSTWSLKTMCSLRESGAYQLHQALQAAAGPPGLEAEGRAPESAGPGPGDDAAETPGLPPAHSGTLMMAFRDVTVQIANQNISVSSSTALSVANCLGAQTVQAPAEPAAGKAEQGETSGREAPEAPAVGREDASAEDSCAEAAASGAADGATAPKTEEEEEEEETAEVGRGAEAEAGDLEQLSSSSTSTKSAKSGSEASASASKDALQAMILSLPRYHCENPASCKSPTLSTDTLRKRLYRIGLNLFNINPDKGIQFLISRGFIPDTPIGVAHFLLQRKGLSRQMIGEFLGNSKKQFNRDVLDCVVDEMDFSSMELDEALRKFQAHIRVQGEAQKVERLIEAFSQRYCMCNPEVVQQFHNPDTIFILAFAIILLNTDMYSPNIKPDRKMMLEDFIRNLRGVDDGADIPRELVVGIYERIQQKELKSNEDHVTYVTKVEKSIVGMKTVLSVPHRRLVCCSRLFEVTDVNKLQKQAAHQREVFLFNDLLVILKLCPKKKSSSTYTFCKSVGLLGMQFQLFENEYYSHGITLVTPLSGSEKKQVLHFCALGSDEMQKFVEDLKESIAEVTELEQIRIEWELEKQQGTKTLSFKPCGAQGDPQSKQGSPTAKREAALRERPAESTVEVSIHNRLQTSQHNSGLGAERGAPVPPPDLQPSPPRQQTPPLPPPPPTPPGTLVQCQQIVKVIVLDKPCLARMEPLLSQALSCYTSSSSDSCGSTPLGGPGSPVKVTHQPPLPPPPPPYNHPHQFCPPGSLLHGHRYSSGSRSLV

SEQ ID NO: 19245 - protein, 84 aa, Homo sapiens
LKATPIERCLDQIPIFTVFQENHQVEKRKCNTATCATQRLANFLVHSSNNFGAILSSTNVGSNTYGKRNAVEVLKREPLNYLPL

SEQ ID NO: 19246 - protein, 142 aa, Homo sapiens
MDTAAKAIILEQSGKNQGYRDADIRSFWPEGGVCLPGSPDVLESGVCMKAVCKRVAVEGVDVIFSRDAGRYVCDYTYYLSLHHGKGCAALIHVPPLSRGLPASLLGRALRVIIQEMLEEVGKPKHRAQFEENSTMVLPAKGN

SEQ ID NO: 19247 - protein, 681 aa, Homo sapiens
MPALPLDQLQITHKDPKTGKLRTSPALVIFDETLQKCLDSYLRYVPRKFDEGVASAPEVVDMQKRLHRSVFLTFLRMSTHKESKILDLCVLFGKGNSPLLQKMIGNIFTQQPSYYSDLDETLPTILQVFSNILQHCGLQGDGANTTPQKLEERGRLTPSDMPLLELKDIVLYLCDTCTTLWAFLDIFPLACQTFQKHDFCYRLASFYEAAIPEMESAIKKRRLEDSKLLGDLWQRLSHSRKKLMEIFHIILNQICLLPILESSCDNIQGFIEEFLQIFSSLLQEKRFLRDYDALFPVAEDISLLQQASSVLDETRTAYILQAVESAWEGVDRRKATDAKDPSVIEEPNGEPNGVTVTAEAVSQASSHPENSEEEECMGAAAAVGPAMCGVELDSLISQVKDLLPDLGEGFILACLEYYHYDPEQVINNILEERLAPTLSQLDRNLDREMKPDPTPLLTSRHNVFQNDEFDVFSRDSVDLSRVHKGKSTRKEENTRSLLNDKRAVAAQRQRYEQYSVVVEEVPLQPGESLPYHSVYYEDEYDDTYDGNQVGANDADSDDELISRRPFTIPQVLRTKVPREGQEEDDDDEEDDADEEAPKPDHFVQDPAVLREKAEARRMAFLAKKGYRHDSSTAVAGSPRGHGQSRETTQERRKKEANKATRANHNRRTMADRKRSKGMIPS

SEQ ID NO: 19248 - protein, 1024 aa, Homo sapiens
MGGWEEERNRRATDKKDDKDSPKKNKGKERRDLDDLKKEVAMTEHKMSVEEVCRKYNTDCVQGLTHSKAQEILARDGPNALTPPPTTPEWVKFCRQLFGGFSILLWIGAILCFLAYGIQAGTEDDPSGDNLYLGIVLAAVVIITGCFSYYQEAKSSKIMESFKNMVPQQALVIREGEKMQVNAEEVVVGDLVEIKGGDRVPADLRIISAHGCKVDNSSLTGESEPQTRSPDCTHDNPLETRNITFFSTNCVEGTARGVVVATGDRTVMGRIATLASGLEVGKTPIAIEIEHFIQLITGVAVFLGVSFFILSLILGYTWLEAVIFLIGIIVANVPEGLLATVTVCLTLTAKRMARKNCLVKNLEAVETLGSTSTICSDKTGTLTQNRMTVAHMWFDNQIHEADTTEDQSGTSFDKSSHTWVALSHIAGLCNRAVFKGGQDNIPVLKRDVAGDASESALLKCIELSSGSVKLMRERNKKVAEIPFNSTNKYQLSIHETEDPNDNRYLLVMKGAPERILDRCSTILLQGKEQPLDEEMKEAFQNAYLELGGLGERVLGFCHYYLPEEQFPKGFAFDCDDVNFTTDNLCFVGLMSMIDPPRAAVPDAVGKCRSAGIKVIMVTGDHPITAKAIAKGVGIISEGNETVEDIAARLNIPVSQVNPRDAKACVIHGTDLKDFTSEQIDEILQNHTEIVFARTSPQQKLIIVEGCQRQGAIVAVTGDGVNDSPALKKADIGVAMGIAGSDVSKQAADMILLDDNFASIVTGVEEGRLIFDNLKKSIAYTLTSNIPEITPFLLFIMANIPLPLGTITILCIDLGTDMVPAISLAYEAAESDIMKRQPRNPRTDKLVNERLISMAYGQIGMIQALGGFFSYFVILAENGFLPGNLVGIRLNWDDRTVNDLEDSYGQQWTYEQRKVVEFTCHTAFFVSIVVVQWADLIICKTRRNSVFQQGMKNKILIFGLFEETALAAFLSYCPGMDVALRMYPLKPSWWFCAFPYSFLIFVYDEIRKLILRRNPGGWVEKETYY

SEQ ID NO: 19249 - protein, 324 aa, Homo sapiens
WLFRLDISFESQHILLRGDKTSRDMWATGSLPDFPAAAKFLGFRQRCIPRSLCLSECPLEPPSLTRLCATLKDCPGPLELQLSCEFLSDQSLETLLDCLPQLPQLSLLQLSQTGLSPKSPFLLANTLSLCPRVKKVDLRSLHHATLHFRSNEEEEGVCCGFTGCSLSQEHVESLCWLLSKCKDLSQVDLSANLLGDSGLRCLLECLPQVPISGLLDLSHNSISQESALYLLETLPSCPRVREASVNLGSEQSFRIHFSREDQAGKTLRLSECSFRPEHVSRLATGLSKSLQLTELTLTQCCLGQKQLAILLSLVGRPAGLFSLS

SEQ ID NO: 19250 - protein, 798 aa, Homo sapiens
MAISSRLALWEQKIREEDKSPPPSSPPPLFSVIPGGFIKQLVRGTEKEAKEARQRKQLAVASPEREIPEISISQPNSKSSSGTRSGSQQISQDDQSSSPGSSDILGKESEGSRSPDPEQMTSINGEKAQELGSSATPTKKTVPFKRGVRRGDVLLMVAKLDPDSAKPEKTHPHDAPPCKTSPPATDTGKEKKGETSRTPCGSQASTEILAPKAEKTRTGGLGDPGQGTVALKKGEEGQSIVGKGLGTPKTTELKEAEPQGKDRQGTRPQAQGPGEGVRPGKAEKEGAEPTNTVEKGNVSKDVGSEGKHVRPQIPGRKWGGFLGRRSKWDGPQNKKDKEGVLLSKAEKTGEPQTQMEKTSQVQGELGDDLRMGEKAGELRSTTGKAGESWDKKEKMGQPQGKSGNAGEARSQTEKGCEAPKEVSTMVESPAAPGKGGWPGSRGQEAEEPCSRAGDGAGALETELEGPSQPALEKDAERPRIRKENQDGPAPQEEGKGGQSRDSDQAPEDRWYEAEKVWLAQKDGFTLATVLKPDEGTADLPAGRVRLWIDADKTITEVDEEHVHRANPPELDQVEDLASLISVNESSVLNTLLQRYKAQLLHTCTGPDLIVLQPRGPSVPSAGKVPKGRRDGLPAHIGSMAQRAYWALLNQRRDQSIVALGWSGAGKTTCCEQVLEHLVGMAGSVDGRVSVEKIRATFTVLRAFGSVSMAHSRSATRFSMVMSLDFNATGRITAAQLQTMLLEKSRVARQPEGESNFLVFSQMLAGLDLDLRTELNLHQMADSSSFGMGVWSKWVGSSS

SEQ ID NO: 19251 - protein, 544 aa, Homo sapiens
MAVMDLSSPWALTKQDSACFHLRNAEEERMIAVFLTTWLQEPMTFKDVAVEFTQEEWMMLDSAQRSLYRDVMLENYRNLTSVEYQLYRLTVISPLDQEEIRNMKKRIPQAICPDQKIQPKTKESTVQKILWEEPSNAVKMIKLTMHNWSSTLREDWECHKIRKQHKIPGGHWRQMIYAPKKTVPQELFRDYHELEENSKLGSKLIFSQSIFTSKHCQKCYSEIGCLKHNSIINNYVKNSISEKLYESHECDTTLWHFQRNQTVQKEYTYSKHGMHFTHNMFPVPNNLHMAQNACECNKDETLCHQSSLKKQGQTHTEKKHECNQCGKAFKRISNLTLYKKSHMGEKQYECKECGKVFNDSSTLRRHVRTHTGEKPYECNQCGKAFSQKTSLKAHMRTHTGEKPYECNQCGKSFGTSSYLIVHKRIHTGEKLYECSECGKAFNTSSHLKVHKKIHTGENVYECSDCGKVFSGVSSLRMHIRTHTGEKPYECKECRKAFSVSSSLRRHVRIHTGEKPYECIQCGKAFSQSSSLIIHKRIHTERETL

SEQ ID NO: 19252 - protein, 523 aa, Homo sapiens
MESSKPGPVQVVLVQKDQHSFELDEKALASILLQDHIRDLDVVVVSVAGAFRKGKSFILDFMLRYLYSQKESGHSNWLGDPEEPLTGFSWRGGSDPETTGIQIWSEVFTVEKPGGKKVAVVLMDTQGAFDSQSTVKDCATIFALSTMTSSVQIYNLSQNIQEDDLQQLQLFTEYGRLAMDEIFQKPFQTLMFLVRDWSFPYEYSYGLQGGMAFLDKRLQVKEHQHEEIQNVRNHIHSCFSDVTCFLLPHPGLQVATSPDFDGKLKDIAGEFKEQLQALIPYVLNPSKLMEKEINGSKVTCRGLLEYFKAYIKIYQGEDLPHPKSMLQATAEANNLAAAASAKDIYYNNMEEVCGGEKPYLSPDILEEKHCEFKQLALDHFKKTKKMGGKDFSFRYQQELEEEIKELYENFCKHNGSKNVFSTFRTPAVLFTGIVALYIASGLTGFIGLEVVAQLFNCMVGLLLIALLTWGYIRYSGQYRELGGAIDFGAAYVLEQASSHIGNSTQATVRDAVVGRPSMDKKAQ

SEQ ID NO: 19253 - protein, 101 aa, Homo sapiens
MSRSVALAVLALLSLSGLEAIQRTPKIQVYSRHPADIEVDLLKNGERIEKVEHSDLSFSKDWSFYLLYYTEFTPTEKDEYACRVNHVTLSQPKIVKWDRDM

SEQ ID NO: 19254 - protein, 978 aa, Homo sapiens
MSPSLGFPAQMNHQKGPSPSFGVQPCGPHDSARGGMIPHPQSRGPFPTCQLKSELDMLVGKCREEPLEGDMSSPNSTGIQDPLLGMLDGREDLEREEKREPESVYETDCRWDGCSQEFDSQEQLVHHINSEHIHGERKEFVCHWGGCSRELRPFKAQYMLVVHMRRHTGEKPHKCTFEGCRKSYSRLENLKTHLRSHTGEKPYMCEHEGCSKAFSNASDRAKHQNRTHSNEKPYVCKLPGCTKRYTDPSSLRKHVKTVHGPDAHVTKRHRGDGPLPRAPSISTVEPKREREGGPIREESRLTVPEGAMKPQPSPGAQSSCSSDHSPAGSAANTDSGVEMTGNAGGSTEDLSSLDEGPCIAGTGLSTLRRLENLRLDQLHQLRPIGTRGLKLPSLSHTGTTVSRRVGPPVSLERRSSSSSSISSAYTVSRRSSLASPFPPGSPPENGASSLPGLMPAQHYLLRARYASARGGGTSPTAASSLDRIGGLPMPPWRSRAEYPGYNPNAGVTRRASDPAQAADRPAPARVQRFKSLGCVHTPPTVAGGGQNFDPYLPTSVYSPQPPSITENAAMDARGLQEEPEVGTSMVGSGLNPYMDFPPTDTLGYGGPEGAAAEPYGARGPGSLPLGPGPPTNYGPNPCPQQASYPDPTQETWGEFPSHSGLYPGPKALGGTYSQCPRLEHYGQVQVKPEQGCPVGSDSTGLAPCLNAHPSEGPPHPQPLFSHYPQPSPPQYLQSGPYTQPPPDYLPSEPRPCLDFDSPTHSTGQLKAQLVCNYVQSQQELLWEGGGREDAPAQEPSYQSPKFLGGSQVSPSRAKAPVNTYGPGFGPNLPNHKSGSYPTPSPCHENFVVGANRASHRAAAPPRLLPPLPTCYGPLKVGGTNPSCGHPEVGRLGGGPALYPPPEGQVCNPLDSLDLDNTQLDFVAILDEPQGLSPPPSHDQRGSSGHTPPPSGPPNMAVGNMSVLLRSLPGETEFLNSSA

SEQ ID NO: 19255 - protein, 347 aa, Homo sapiens
MGNWTAAVTEFVLLGFSLSREVELLLLVLLLPTFLLTLLGNLLIISTVLSCSRLHTPMYFFLCNLSILDILFTSVISPKVLANLGSRDKTISFAGCITQCYFYFFLGTVEFLLLTVMSYDRYATICCPLRYTTIMRPSVCIGTVVFSWVGGFLSVLFPTILISQLPFCGSNIINHFFCDSGPLLALACADTTAIELMDFMLSSMVILCCIVLVAYSYTYIILTIVRIPSASGRKKAFNTCASHLTIVIISSGITVFIYVTPSQKEYLEINKIPLVLSSVVTPFLNPFIYTLRNDTVQGVLRDVWVRVRGVFEKRMRAVLRSRLSSNKDHQGRACSSPPCVYSVKLQC

SEQ ID NO: 19256 - protein, 733 aa, Homo sapiens
MVSYWDTGVLLCALLSCLLLTGSSSGSKLKDPELSLKGTQHIMQAGQTLHLQCRGEAAHKWSLPEMVSKESERLSITKSACGRNGKQFCSTLTLNTAQANHTGFYSCKYLAVPTSKKKETESAIYIFISDTGRPFVEMYSEIPEIIHMTEGRELVIPCRVTSPNITVTLKKFPLDTLIPDGKRIIWDSRKGFIISNATYKEIGLLTCEATVNGHLYKTNYLTHRQTNTIIDVQISTPRPVKLLRGHTLVLNCTATTPLNTRVQMTWSYPDEKNKRASVRRRIDQSNSHANIFYSVLTIDKMQNKDKGLYTCRVRSGPSFKSVNTSVHIYDKAFITVKHRKQQVLETVAGKRSYRLSMKVKAFPSPEVVWLKDGLPATEKSARYLTRGYSLIIKDVTEEDAGNYTILLSIKQSNVFKNLTATLIVNVKPQIYEKAVSSFPDPALYPLGSRQILTCTAYGIPQPTIKWFWHPCNHNHSEARCDFCSNNEESFILDADSNMGNRIESITQRMAIIEGKNKMASTLVVADSRISGIYICIASNKVGTVGRNISFYITDVPNGFHVNLEKMPTEGEDLKLSCTVNKFLYRDVTWILLRTVNNRTMHYSISKQKMAITKEHSITLNLTIMNVSLQDSGTYACRARNVYTGEEILQKKEITIRDQEAPYLLRNLSDHTVAISSSTTLDCHANGVPEPQITWFKNNHKIQQEPELYTSTSPSSSSSSPLSSSSSSSSSSSS

SEQ ID NO: 19257 - protein, 617 aa, Homo sapiens
MPSYTVTVATGSQWFAGTDDYIYLSLVGSAGCSEKHLLDKPFYNDFERGAVDSYDVTVDEELGEIQLVRIEKRKYWLNDDWYLKYITLKTPHGDYIEFPCYRWITGDVEVVLRDGRAKLARDDQIHILKQHRRKELETRQKQYRWMEWNPGFPLSIDAKCHKDLPRDIQFDSEKGVDFVLNYSKAMENLFINRFMHMFQSSWNDFADFEKIFVKISNTISERVMNHWQEDLMFGYQFLNGCNPVLIRRCTELPEKLPVTTEMVECSLERQLSLEQEVQQGNIFIVDFELLDGIDANKTDPCTLQFLAAPICLLYKNLANKIVPIAIQLNQIPGDENPIFLPSDAKYDWLLAKIWVRSSDFHVHQTITHLLRTHLVSEVFGIAMYRQLPAVHPIFKLLVAHVRFTIAINTKAREQLICECGLFDKANATGGGGHVQMVQRAMKDLTYASLCFPEAIKARGMESKEDIPYYFYRDDGLLVWEAIRTFTAEVVDIYYEGDQVVEEDPELQDFVNDVYVYGMRGRKSSGFPKSVKSREQLSEYLTVVIFTASAQHAAVNFGQLFLGMYPEEHFIEKPVKEAMARFRKNLEAIVSVIAERNKKKQLPYYYLSPDRIPNSVAI

SEQ ID NO: 19258 - protein, 570 aa, Homo sapiens
MNISIDLDTNYAELVLNVGRVTLGENNRKKMKDCQLRKQQNENVSRAVCALLNSGGGVIKAEVENKGYSYKKDGIGLDLENSFSNMLPFVPNFLDFMQNGNYFHIFVKSWSLETSGPQIATLSSSLYKRDVTSAKVMNASAALEFLKDMEKTGGRAYLRPEFPAKRACVDVQEESNMEALAADFFNRTELGYKEKLTFTESTHVEIKNFSTEKLLQRITEILPQYVSAFANTDGGYLFVGLNEDKEVIGFKAEKSYLTKLEEVTKNSIGKLPVHHFCVEKGTINYLCKFLGVYDKGRLCGYVYALRVERFCCAVFAKKPDSWHVKDNRVKQLTEKEWIQFMVDSEPVCEELPSPASTSSPVSQSYPLREYINFKIQPLRYHLPGLSEKITCAPKTFCRNLFSQHEGLKQLICEEMGSVNKGSLIFSRSWSLDLGLQENHKVLCDALLISQDKPPVLYTFHMVQDEEFKDYSTQTAQTLKQKLAKIGGYTKKVCVMTKIFYLSPEGKTSCQYDLNSQVIYPESYYWTTAQTMKDLEKALSNILPKENQIFLFVCLFRFCLFVCWFVCFFLR

SEQ ID NO: 19259 - protein, 682 aa, Homo sapiens
MGPWGWKLRWTVALLLAAAGTAVGDRCERNEFQCQDGKCISYKWVCDGSAECQDGSDESQETCLSVTCKSGDFSCGGRVNRCIPQFWRCDGQVDCDNGSDEQGCPVATCRPDEFQCSDGNCIHGSRQCDREYDCKDMSDEVGCVNVTLCEGPNKFKCHSGECITLDKVCNMARDCRDWSDEPIKECGTNECLDNNGGCSHVCNDLKIGYECLCPDGFQLVAQRRCEDIDECQDPDTCSQLCVNLEGGYKCQCEEGFQLDPHTKACKAVGSIAYLFFTNRHEVRKMTLDRSEYTSLIPNLRNVVALDTEVASNRIYWSDLSQRMICSTQLDRAHGVSSYDTVISRDIQAPDGLAVDWIHSNIYWTDSVLGTVSVADTKGVKRKTLFRENGSKPRAIVVDPVHGFMYWTDWGTPAKIKKGGLNGVDIYSLVTENIQWPNGITLDLLSGRLYWVDSKLHSISSIDVNGGNRKTILEDEKRLAHPFSLAVFEDKVFWTDIINEAIFSANRLTGSDVNLLAENLLSPEDMVLFHNLTQPREAEAAVATQETSTVRLKVSSTAVRTQHTTTRPVPDTSRLPGATPGLTTVEIVTMSHQALGDVAGRGNEKKPSSVRALSIVLPIVLLVFLCLGVFLLWKNWRLKNINSINFDNPVYQKTTEDEVHICHNQDGYSYPSRQMVSLEDDVA

SEQ ID NO: 19260 - protein, 919 aa, Homo sapiens
EFLQEGLEKGDEELRPALPFQPDPPAPFTPSPLPRLANQDSRPVFTSPTPAMAAVPTQPQSKEGPWSPESESPMLRITAPLPPGPSMAVPTLGPGEIASTTPPSRAWTPTQEGPGDMGRPWVAEVVSQGAGIGIQGTITSSTASGDDEETTTTTTIITTTITTVQTPGPCSWNFSGPEGSLDSPTDLSSPTDVGLDCFFYISVYPGYGVEIKVQNISLREGETVTVEGLGGPDPLPLANQSFLLRGQVIRSPTHQAALRFQSLPPPAGPGTFHFHYQAYLLSCHFPRRPAYGDVTVTSLHPGGSARFHCATGYQLKGARHLTCLNATQPFWDSKEPVCIAACGGVIRNATTGRIVSPGFPGNYSNNLTCHWLLEAPEGQRLHLHFEKVSLAEDDDRLIIRNGDNVEAPPVYDSYEVEYLPIEGLLSSGKHFFVELSTDSSGAAAGMALRYEAFQQGHCYEPFVKYGNFSSSTPTYPVGTTVEFSCDPGYTLEQGSIIIECVDPHDPQWNETEPACRAVCSGEITDSAGVVLSPNWPEPYGRGQDCIWGVHVEEDKRIMLDIRVLRIGPGDVLTFYDGDDLTARVLGQYSGPRSHFKLFTSMADVTIQFQSDPGTSVLGYQQGFVIHFFEVPRNDTCPELPEIPNGWKSPSQPELVHGTVVTYQCYPGYQVVGSSVLMCQWDLTWSEDLPSCQRVTSCHDPGDVEHSRRLISSPKFPVGATVQYICDQGFVLMGSSILTCHDRQAGSPKWSDRAPKCLLEQLKPCHGLSAPENGARSPEKQLHPAGATIHFSCAPGYVLKGQASIKCVPGHPSHWSDPPPICRAASLDGFYNSRSLDVAKAPAASSTLDAAHIAAAIFLPLVAMVLLVGGVYFYFSRLQGKSSLQLPRPRPRPYNRITIESAFDNPTYETGETREYEVSI

SEQ ID NO: 19261 - protein, 1004 aa, Homo sapiens
METESEQNSNSTNGSSSSGGSSRPQIAQMSLYERQAVQALQALQRQPNAAQYFHQFMLQQQLSNAQLHSLAAVQQATIAASRQASSPNTSTTQQQTTTTQASINLATTSAAQLISRSQSVSSPSATTLTQSVLLGNTTSPPLNQSQAQMYLRPQLGNLLQVNRTLGRNVPLASQLILMPNGAVAAVQQEVPSAQSPGVHADADQVQNLAVRNQQASAQGPQMQGSTQKAIPPGASPVSSLSQASSQALAVAQASSGATNQSLNLSQAGGGSGNSIPGSMGPGGGGQAHGGLGQLPSSGMGGGSCPRKGTGVVQPLPAAQTVTVSQGSQTEAESAAAKKAEADGSGQQNVGMNLTRTATPAPSQTLISSATYTQIQPHSLIQQQQQIHLQQKQVVIQQQIAIHHQQQFQHRQSQLLHTATHLQLAQQQQQQQQQQQQQQQPQATTLTAPQPPQVPPTQQVPPSQSQQQAQTLVVQPMLQSSPLSLPPDAAPKPPIPIQSKPPVAPIKPPQLGAAKMSAAQQPPPHIPVQVVGTRQPGTAQAQALGLAQLAAAVPTSRGMPGTVQSGQAHLASSPPSSQAPGALQECPPTLAPGMTLAPVQGTAHVVKGGATTSSPVVAQVPAAFYMQSVHLPGKPQTLAVKRKADSEEERDDVSTLGSMLPAKASPVAESPKVMDEKSSLGEKAESVANVNANTPSSELVALTPAPSVPPPTLAMVSRQMGDSKPPQAIVKPQILTHIIEGFVIQEGAEPFPVGCSQLLKESEKPLQTGLPTGLTENQSGGPLGVDSPSAELDKKANLLKCEYCGKYAPAEQFRGSKRFCSMTCAKRYNVSCSHQFRLKRKKMKEFQEANYARVRRRGPRRSSSDIARAKIQGKCHRGQEDSSRGSDNSSYDEALSPTSPGPLSVRAGHGERDLGNPNTAPPTPELHGINPVFLSSNPSRWSVEEVYEFIASLQGCQEIAEEFRSQEIDGQALLLLKEEHLMSAMNIKLGPALKICAKINVLKET

SEQ ID NO: 19262 - protein, 330 aa, Homo sapiens
MHRRRLALGLGFCLLAGTSLSVLWVYLENWLPVSYVPYYLPCPEILSQYPQPKLLEHRPTQLLTLTPWLAPIVSEGTFNPELLQHIYQPLNLTIGVTVFAVGKYTHFIQSFLESAEEFFMRGYRVHYYIFTDNPAAVPGVPLGPHRLLSSIPIQGHSHWEETSMRRMETISQHIAKRAHREVDYLFCLDVDMVFRNPWGPETLGDLVAAIHPSYYAVPRQQFPYERRRVSTAFVADSEGDFYYGGAVFGGQVARVYEFTRGCHMAILADKANGIMAAWREESHLNRHFISNKPSKVLSPEYLWDDRKPQPPSLKLIRFSTLDKDISCLRS

SEQ ID NO: 19263 - protein, 247 aa, Homo sapiens
MFTLSQTSRAWFIDRARQAREERLVQKERERAAVVIQAHVRSFLCRSRLQRDIRREIDDFFKADDPESTKRSALCIFKIARKLLFLFRIKEDNERFEKLCRSILSSMDAENEPKVWYVSLACSKDLTLLWIQQIKNILWYCCDFLKQLKPEILQDSRLITLYLTMLVTFTDTSTWKILRGKGESLRPAMNHICANIMGHLNQHGFYSVLQVCDSCPPVCNFSTLQHLHLDFYICIQHTWCPPQKHFS

SEQ ID NO: 19264 - protein, 164 aa, Homo sapiens
MDYDFKVKLSSERERVEDLFEYEGCKVGRGTYGHVYKAKRKDGKDDKDYALKQIEGTGISMSACREIALLRELKHPNVISLQKVFLSHADRKVWLLFDYAEHDLWHIIKFHRASKANKKPVQLPRGMVKSLLYQILDGIHYLHANWVLHRDLLTWALPDYLIHL

SEQ ID NO: 19265 - protein, 752 aa, Homo sapiens
MPLAAYCYLRVVGKGSYGEVTLVKHRRDGKQYLHEKHILHRDLKTQNVFLTRTNIIKVGDLGIARVLENHCDMASTLIGTPYYMSPELFSNKPYNYKSDVWALGCCVYEMATLKHAFNAKDMNSLVYRIIEGKLPPMPRDYSPELAELIRTMLSKRPEERPSVRSILRQPYIKRQISFFLEATKIKTSKNNIKNGDSQSKPFATVVSGEAESNHEVIHPQPLSSEGSQTYIMGEGKCLSQEKPRASGLLKSPASLKAHTCKQDLSNTTELATISSVNIDILPAKGRDSVSDGFVQENQPRYLDASNELGGICSISQVEEEMLQDNTKSSAQPENLIPMWSSDIVTGEKNEPVKPLQPLIKEQKPKDQSLALSPKLECSGTILAHSNLRLLGSSDSPASASRVAGITGVCHHAQDQVAGECIIEKQGRIHPDLQPHNSGSEPSLSRQRRQKRREQTEHRGEKRQVRRDLFAFQESPPRFLPSHPIVGKVDVTSTQKEAENQRRVVTGSVSSSRSSEMSSSKDRPLSARERRRLKQSQEEMSSSGPSVRKASLSVAGPGKPQEEDQPLPARRLSSDCSVTQERKQIHCLSEDELSSSTSSTDKSDGDYGEGKGQTNEINALVQLMTQTLKLDSKESCEDVPVANPVSEFKLHRKYRDTLILHGKVAEEAEEIHFKELPSAIMPGSEKIRRLVEVLRTDVIRGLGVQLLEQVYDLLEEEDEFDREVRLREHMGEKYTTYSVKARQLKFFEENMNF

SEQ ID NO: 19266 - protein, 537 aa, Homo sapiens
MRKPRLMNPCCYYPCQHQGICVRFGLDRYQCDCTRTGYSGPNCTIPGLWTWLRNSLRPSPSFTHFLLTHGRWFWEFVNATFIREMLMRLVLTVRSNLIPSPPTYNSAHDYISWESFSNVSYYTRILPSVPKDCPTPMGTKGKKQLPDAQLLARRFLLRRKFIPDPQGTNLMFAFFAQHFTHQFFKTSGKMGPGFTKALGHGVDLGHIYGDNLERQYQLRLFKDGKLKYQVLDGEMYPPSVEEAPVLMHYPRGIPPQSQMAVGQEVFGLLPGLMLYATLWLREHNRVCDLLKAEHPTWGDEQLFQTTRLILIGETIKIVIEEYVQQLSGYFLQLKFDPELLFGVQFQYRNRIAMEFNHLYHWHPLMPDSFKIGGGRNMDHHILHVAVDVIRESREMRLQPFNEYRKRFGMKPYTSFQELVGEKEMAAELEELYGDIDALEFYPGLLLEKCHPNSIFGESMIEIGAPFSLKGLLGNPICSPEYWKPSTFGGEVGFNIVKTATLKKLVCLNTKTCPYVSFRVPDASQDDGPAVERPSTEL

SEQ ID NO: 19267 - protein, 522 aa, Homo sapiens
MYRDPEAASPGAPSRDVLLVSAIITVSLSVTVVLCGLCHWCQRKLGKRYKNSLETVGTPDSGRGRSEKKAINDLDRDFWNNNESTVQQKWSSYPPKEFILNISPYAPYGDPRLSLNGTLLSGAKVAAAAGLAVEREGRLGEKPAPVPPPGEDALRSGGAAPSEPGSGGKAGRGRWRTVQSHLAAGKLNLSKLPAGGKAVNTAPVPGQTPHDESDRRTEPRSSVSDLVNSLTSEMLMLSPGSEEDEAHEGCSRENLGRIQFSVGYNFQESTLTVKIMKAQELPAKDFSGTSDPFVKIYLLPDKKHKLETKVKRKNLNPHWNETFLFEGFPYEKVVQRILYLQVLDYDRFSRNDPIGEVSIPLNKVDLTQMQTFWKDLKPCSDGSGSRGELLLSLCYNPSANSIIVNIIKARNLKAMDIGGTSDPYVKVWLMYKDKRVEKKKTVTMKRNLNPIFNESFAFDIPTEKLRETTIIITVMDKDKLSRNDVIGKIYLSWKSGPGEVKHWKDMIARPRQPVAQWHQLKA

SEQ ID NO: 19268 - protein, 743 aa, Homo sapiens
MSCKIPQISYASTAPDLSDNSRYDFFSRVVPSDTYQAQAMVDIVRALKWNYVSTVASEGSYGESGVEAFIQKSREDGGVCIAQSVKIPREPKAGEFDKIIRRLLETSNARAVIIFANEDDIRRVLEAARRANQTGHFFWMGSDSWGSKIAPVLHLEEVAEGAVTILPKRMSVRGFDRYFSSRTLDNNRRNIWFAEFWEDNFHCKLSRHALKKGSHVKKCTNRERIGQDSAYEQEGKVQFVIDAVYAMGHALHAMHRDLCPGRVGLCPRMDPVDGTQLLKYIRNVNFSGIAGNPVTFNENGDAPGRYDIYQYQLRNDSAEYKVIGSWTDHLHLRIERMHWPGSGQQLPRSICSLPCQPGERKKTVKGMPCCWHCEPCTGYQYQVDRYTCKTCPYDMRPTENRTGCRPIPIIKLEWGSPWAVLPLFLAVVGIAATLFVVITFVRYNDTPIVKASGRELSYVLLAGIFLCYATTFLMIAEPDLGTCSLRRIFLGLGMSISYAALLTKTNRIYRIFEQGKRSVSAPRFISPASQLAITFSLISLQLLGICVWFVVDPSHSVVDFQDQRTLDPRFARGVLKCDISDLSLICLLGYSMLLMVTCTVYAIKTRGVPETFNEAKPIGFTMYTTCIVWLAFIPIFFGTSQSADKLYIQTTTLTVSVSLSASVSLGMLYMPKVYIILFHPEQNVPKRKRSLKAVVTAATMSNKFTQKGNFRPNGEAKSELCENLEAPALATKQTYVTYTNHAI

SEQ ID NO: 19269 - protein, 1003 aa, Homo sapiens
MYGASGGRAKPERKSGAKEEAGPGGAGGGGSRVELLVFGYACKLFRDDERALAQEQGQHLIPWMGDHKILIDRYDGRGHLHDLSEYDAEYSTWNRDYQLSEEEARIEALCDEERYLALHTDLLEEEARQEEEYKRLSEALAEDGSYNAVGFTYGSDYYDPSEPTEEEEPSKQREKNEAENLEENEEPFVAPLGLSVPSDVELPPTAKMHAIIERTASFVCRQGAQFEIMLKAKQARNSQFDFLRFDHYLNPYYKFIQKAMKEGRYTVLAENKSDEKKKSGVSSDNEDDDDEEDGNYLHPSLFASKKCNRLEELMKPLKVVDPDHPLAALVRKAQADSSTPTPHNADGAPVQPSQVEYTADSTVAAMYYSYYMLPDGTYCLAPPPPGIDVTTYYSTLPAGVTVSNSPGVTTTAPPPPGTTPLPPPTTAETSSGATSTTTTTSALAPVAAIIPPPPDVQPVIDKLAEYVARNGLKFETSVRAKNDQRFEFLQPWHQYNAYYEFKKQFFLQKEGGDSMQAVSAPEEAPTDSAPEKPSDAGEDGAPEDAAEVGARAGSGGKKEASSSKTVPDGKLVKASFAPISFAIKAKENDLLPLEKNRVKLDDDSDDDEESKEGQESSSSAANTNPAVAPPCVVVEEKKPQLTQEELEAKQAKQKLEDRLAAAAREKLAQASKESKEKQLQAERKRKAALFLQTLKNPLPEAEAGKIEESPFSVEESSTTPCPLLTGGRPLPTLEVKPPDRPSSKSKDPPREEEKEKKKKKHKKRSRTRSRSPKYHSSSKSRSRSHSKAKHSLPSAYRTVRRSRVTASPGTLRAEPCQSSASVTAAAEPGSYQAASTTTRFDSASSFEGKPGKTSRSRSRSPRRRAHSPERRREERSVPTAYRVSRSPGASRKRTRSRSPHEKKKKRRSRSRTKSKARSQSVSPSKQAAPRPAAPAAHSAHSASVSPVESRGSSQERSRGVSQEKEAQISSAIVSSVQSKITQDLMAKVRAMLAASKNLQTSAS

SEQ ID NO: 19270 - protein, 167 aa, Homo sapiens
MGADGFVPLGTLLQLPQFRGFSAEDVQRVVDTNRKQRFALQLGDPSTGLLIRANQGHSLQVPKLELMPLETPQALPPMLVHGTFWKHWPSILLKGLSCQGRTHIHLAPGLPGDPGIISGMRSHCEIAVFIDGPLALAGKPLSLAGDEETECQSSPKHSSRERRRIQQ

SEQ ID NO: 19271 - protein, 580 aa, Homo sapiens
MYATDSRGHSPAFLQPQNGNSRHPSGYVPGKVVPLRPPPPPKSQASAKFTSIRREDRATFAFSPEEQQAQRESQKQKRHKNTFICFAITSFSFFIALAIILGISSKYAPDENCPDQNPRLRNWDPGQDSAKQVVIKEGDMLRLTSDATVHSIVIQDGGLLVFGDNKDGSRNITLRTHYILIQDGGALHIGAEKCRYKSKATITLYGKSDEGESMPTFGKKFIGVEAGGTLELHGARKASWTLLARTLNSSGLPFGSYTFEKDFSRGLNVRVIDQDTAKILESERFDTHEYRNESRRLQEFLRFQDPGRIVAIAVGDSAAKSLLQGTIQMIQERLGSELIQGLGYRQAWALVGVIDGGSTSCNESVRNYENHSSGGKALAQREFYTVDGQKFSVTAYSEWIEGVSLSGFRVEVVDGVKLNLLDDVSSWKPGDQIVVASTDYSMYQAEEFTLLPCSECSHFQVKVKETPQFLHMGEIIDGVDMRAEVGILTRNIVIQGEVEDSCYAENQCQFFDYDTFGGHIMIMKNFTSVHLSYVELKHMGQQQMGRYPVHFHLCGDVDYKGGYRHATFVDGLSIHHSFSR

SEQ ID NO: 19272 - protein, 320 aa, Homo sapiens
MELCEFAFNMKKDEVCVNPYHYQRVETPVLPPVLVPRHTEIPAEFPPLDDYSHSIPENTNFPAGIEPQSNIPETPPPGYLSEDGETSDHQMNHSMDAGSPNLSPNPMSPAHNNLDLQPVTYCEPAFWCSISYYELNQRVGETFHASQPSMTVDGFTDPSNSERFCLGLLSNVNRNAAVELTRRHIGRGVRLYYIGGEVFAECLSDSAIFVQSPNCNQRYGWHPATVCKIPPGCNLKIFNNQEFAALLAQSVNQGFEAVYQLTRMCTIRMSFVKGWGAEYRRQTVTSTPCWIELHLNGPLQWLDKVLTQMGSPSIRCSSVS

SEQ ID NO: 19273 - protein, 568 aa, Homo sapiens
MAQFGGQKNPPWATQFTATAVSQPAALGVQQPSLLGASPTIYTQQTALAAAGLTTQTPANYQLTQTAALQQQAAAAAAALQQQYSQPQQALYSVQQQLQQPQQTLLTQPAVALPTSLSLSTPQPTAQITVSYPTPRSSQQQTQPQKQRVFTGVVTKLHDTFGFVDEDVFFQLSAVKGKTPQVGDRVLVEATYNPNMPFKWNAQRIQTLPNQNQSQTQPLLKTPPAVLQPIAPQTTFGVQTQPQPQSLLQAQISAASITPLLQTQPQPLLQQPQQKAGLLQPPVRIVSQPQPARRLDPPSRFSGRNDRGDQVPNRKDDRSRERERERRRSRERSPQRKRSRERSPRRERERSPRRVRRVVPRYTVQFSKFSLDCPSCDMMELRRRYQNLYIPSDFFDAQFTWVDAFPLSRPFQLGNYCNFYVMHREVESLEKNMAILDPPDADHLYSAKVMLMASPSMEDLYHKSCALAEDPQELRDGFQHPARLVKFLVGMKGKDEAMAIGGHWSPSLDGPDPEKDPSVLIKTAIRCCKALTGIDLSVCTQWMKKRRMMVKLKKFLHLPIGLNLIQRQ

SEQ ID NO: 19274 - protein, 617 aa, Homo sapiens
MELYTGLQKLTIKNSGLRSIQPRAFAKNPHLRYINLSSNRLTTLSWQLFQTLSLRELQLEQNFFNCSCDIRWMQLWQEQGEAKLNSQNLYCINADGSQLPLFRMNISQCDLPEISVSHVNLTVREGDNAVITCNGSGSPLPDVDWIVTGLQSINTHQTNLNWTNVHAINLTLVNVTSEDNGFTLTCIAENVVGMSNASVALTVYYPPRVVSLEEPELRLEHCIEFVVRGNPPPTLHWLHNGQPLRESKIIHVEYYQEGEISEGCLLFNKPTHYNNGNYTLIAKNPLGTANQTINGHFLKEPFPESTDNFILFDEVSPTPPITVTHKPEEDTFGVSIAVGLAAFACVLLVVLFVMINKYGRRSKFGMKGPVAVISGEEDSASPLHHINHGITTPSSLDAGPDTVVIGMTRIPVIENPQYFRQGHNCHKPDTYVQHIKRRDIVLKRELGEGAFGKVFLAECYNLSPTKDKMLVAVKALKDPTLAARKDFQREAELLTNLQHEHIVKFYGVCGDGDPLIMVFEYMKHGDLNKFLRAHGPDAMILVDGQPRQAKGELGLSQMLHIASQIASGMVYLASQHFVHRDLATRNCLVGANLLVKIGDFGMSRDVYSTDYYRVVQA

SEQ ID NO: 19275 - protein, 706 aa, Homo sapiens
MVKAPQSEERLARGGKENNSVLACGAQASWSIFGADAAEVPGTRGHSQQEAAMPHIPEDEEPPGEPQAAQSPAGQGPPAAGVSCSPTPTIVLTGDATSPEGETDKNLANRVHSPHKRLSHRHLKVSTASLTSVDPAGHIIDLVNDQLPDISISEEDKKKNLALLEEAKLVSERFLTRRGRKSRSSPGDSPSAVSPNLSPSASPTSSRSNSLTVPTPPGLDVCSGPPSPLPGAPPQKGDEADVSSPHPGEPEHILMRNQNLVGLKLPDLSEAAEQEKGLPSELSPAIEEEESKSGLDVMPNISDVLLRKLRVHRSLPGSAPPLTEKEVENVFVQLSLAFRNDSYTLESRINQAERERNLTEENTEKELENFKASITSSASLWHHCEHRETYQKLLEDIAVLHRLAARLSSRAEVVGAVRQEKRMSKATEVMMQYVENLKRTYEKDHAELMEFKKLANQNSSRSCGPSEDGVPRTARSMSLTLGKNMPRRRVSVAVVPKFNALNLPGQTPSSSSIPSLPALSESPNGKGSLPVTSALPALLENGKTNGDPDCEASAPALTLSCLEELSQETKARMEEEAYSKGFQEGLKKTKELQDLKEEEEEQKSESPEEPEEVEETEEEEKGPRSSKLEELVHFLQVMYPKLCQHWQVIWMMAAVMLVLTVVLGLYNSYNSCAEQADGPLGRSTCSAAQRDSWWSSGLQHEQPTEQ

SEQ ID NO: 19276 - protein, 433 aa, Homo sapiens
MPAKGRYFLNEGEEGPDQDALYEKYQLTSQHGPLLLTLLLVAATACVALIIIAFSQGDPSRHQAILGMAFLVLAVFAALSVLMYVECLLRRWLRALALLTWACLVALGYVLVFDAWTKAACAWEQVPFFLFIVFVVYTLLPFSMRGAVAVGAVSTASHLLVLGSLMGGFTTPSVRVGLQLLANAVIFLCGNLTGAFHKHQMQDASRDLFTYTVKCIQIRRKLRIEKRQQENLLLSVLPAHISMGMKLAIIERLKEHGDRRCMPDNNFHSLYVKRHQNVSILYADIVGFTQLASDCSPKELVVVLNELFGKFDQIAKANECMRIKILGDCYYCVSGLPVSLPTHARNCVKMGLDMCQAIKQVREATGVDINMRVGIHSGNVLCGVIGLRKWQYDVWSHDVSLANRMEAAGVPGRVHITEATLKHLDKALLLQVR

SEQ ID NO: 19277 - protein, 828 aa, Homo sapiens
MRPRPEGRGLRAGVALSPALLLLLLLPPPPTLLGRLWAAGTPSPSAPGARQDGALGAGRVKRGWVWNQFFVVEEYTGTEPLYVGKIHSDSDEGDGAIKYTISGEGAGTIFLIDELTGDIHAMERLDREQKTFYTLRAQARDRATNRLLEPESEFIIKVQDINDSEPRFLHGPYIGSVAELSPTGTSVMQVMASDADDPTYGSSARLVYSVLDGEHHFTVDPKTGVIRTAVPDLDRESQERYEVVIQATDMAGQLGGLSGSTTVTIVVTDVNDNPPRFPQKMYQFSIQESAPIGTAVGRVKAEDSDVGENTDMTYHLKDESSSGGDVFKVTTDSDTQEAIIVVQKRLDFESQPVHTVILEALNKFVDPRFADLGTFRDQAIVRVAVTDVDEPPEFRPPSGLLEVQEDAQVGSLVGVVTARDPDAANRPVRYAIDRESDLDQIFDIDADTGAIVTGKGLDRETAGWHNITVLAMEADNHAQLSRASLRIRILDVNDNPPELATPYEAAVCEDAKPGQLIQTISVVDRDEPQGGHRFYFRLVPEAPSNPHFSLLDIQDNTAAVHTQHVGFNRQEQDVFFLPILVVDSGPPTLSSTGTLTIRICGCDSSGTIQSCNTTAFVMAASLSPGALIALLVCVLILVVLVLLILTLRRHHKSHLSSDEDEDMRDNVIKYNDEGGGEQDTEAYDMSALRSLYDFGELKGGDGGGSAGGGAGGGSGGGAGSPPQAHLPSERHSLPQGPPSPEPDFSVFRDFISRKVALADGDLSVPPYDAFQTYAFEGADSPAASLSSLHSGSSGSEQDFAYLSSWGPRFRPLAALYAGHRGDDEAQAS

SEQ ID NO: 19278 - protein, 610 aa, Homo sapiens
MKDYDELLKYYELHETIGTGGFAKVKLACHILTGEMVAIKIMDKNTLGSDLPRIKTEIEALKNLRHQHICQLYHVLETANKIFMVLEYCPGGELFDYIISQDRLSEEETRVVFRQIVSAVAYVHSQGYAHRDLKPENLLFDEYHKLKLIDFGLCAKPKGNKDYHLQTCCGSLAYAAPELIQGKSYLGSEADVWSMGILLYVLMCGFLPFDDDNVMALYKKIMRGKYDVPKWLSPSSILLLQQMLQVDPKKRISMKNLLNHPWIMQDYNYPVEWQSKNPFIHLDDDCVTELSVHHRNNRQTMEDLISLWQYDHLTATYLLLLAKKARGKPVRLRLSSFSCGQASATPFTDIKFTKYWTESNGVESKSLTPALCRTPANKLKNKENVYTPKSAVKNEEYFMFPEPKTPVNKNQHKREILTTPNRYTTPSKARNQCLKETPIKIPVNSTGTDKLMTGVISPERRCRSVELDLNQAHMEETPKRKGAKVFGSLERGLDKVITVLTRSKRKGSARDGPRRLKLHYNVTTTRLVNPDQLLNEIMSILPKKHVDFVQKGYTLKCQTQSDFGKVTMQFELEVCQLQKPDVVGIRRQRLKGDAWVYKRLVEDILSSCKV

SEQ ID NO: 19279 - protein, 757 aa, Homo sapiens
MQMVPKFCFPFDVEREPPSPAVQHFTFALTDLAGNRRFGFCRLRAGTQSCLCILSHLPWFEVFYKLLNTVGDLLAQDQVTEAEELLQNLFQQSLSGPQASVGLELGSGVTVSSGQGIPPPTRGNSKPLSCFVAPDSGRLPSIPENRNLTELVVAVTDENIVGLFAALLAERRVLLTASKLSTLTSCVHASCALLYPMRWEHVLIPTLPPHLLDYCCAPMPYLIGVHASLAERVREKALEDVVVLNVDANTLETTFNDVQALPPDVVSLLRLRLRKVALAPGEGVSRLFLKAQALLFGGYRDALVCSPGQPVTFSEEVFLAQKPGAPLQAFHRRAVHLQLFKQFIEARLEKLNKGEGFSDQFEQEITGCGASSGALRSYQLWADNLKKGGGALLHSVKAKTQPAVKNMYRSAKSGLKGVQSLLMYKDGDSVLQRGGSLRAPALPSRSDRLQQRLPITQHFGKNRPLRPSRRRQLEEGTSEPPGAGTPPLSPEDEGCPWAEEALDSSFLGSGEELDLLSEILDSLSMGAKSAGSLRPSQSLDCCHRGDLDSCFSLPNIPRWQPDDKKLPEPEPQPLSLPSLQNASSLDATSSSKDSRSQLIPSESDQEVTSPSQSSTASADPSIWGDPKPSPLTEPLILHLTPSHKAAEDSTAQENPTPWLSTAPTEPSPPESPQILAPTKPNFDIAWTSQPLDPSSDPSSLEDPRARPPKALLAERAHLQPREEPGALNSPATPTSNCQKSQPSSRPRVADLKKCFEG

SEQ ID NO: 19280 - protein, 1067 aa, Homo sapiens
MAPRKRSHHGLGFLCCFGGSDIPEINLRDNHPLQFMEFSSPIPNAEELNIRFAELVDELDLTDKNREAMFALPPEKKWQIYCSKKKEQEDPNKLATSWPDYYIDRINSMAAMQSLYAFDEEETEMRNQVVEDLKTALRTQPMRFVTRFIELEGLTCLLNFLRSMDHATCESRIHTSLIGCIKALMNNSQGRAHVLAQPEAISTIAQSLRTENSKTKVAVLEILGAVCLVPGGHKKVLQAMLHYQVYAAERTRFQTLLNELDRSLGRYRDEVNLKTAIMSFINAVLNAGAGEDNLEFRLHLRYEFLMLGIQPVIDKLRQHENAILDKHLDFFEMVRNEDDLELARRFDMVHIDTKSASQMFELIHKKLKYTEAYPCLLSVLHHCLQMPYKRNGGYFQQWQLLDRILQQIVLQDERGVDPDLAPLENFNVKNIVNMLINENEVKQWRDQAEKFRKEHMELVSRLERKERECETKTLEKEEMMRTLNKMKDKLARESQELRQARGQVAELVAQLSELSTGPVSSPPPPGGPLTLSSSMTTNDLPPPPPPLPFACCPPPPPPPLPPGGPPTPPGAPPCLGMGLPLPQDPYPSSDVPLRKKRVPQPSHPLKSFNWVKLNEERVPGTVWNEIDDMQVFRILDLEDFEKMFSAYQRHQKELGSTEDIYLASRKVKELSVIDGRRAQNCIILLSKLKLSNEEIRQAILKMDEQEDLAKDMLEQLLKFIPEKSDIDLLEEHKHEIERMARADRFLYEMSRIDHYQQRLQALFFKKKFQERLAEAKPKVEAILLASRELVRSKRLRQMLEVILAIGNFMNKGQRGGAYGFRVASLNKIADTKSSIDRNISLLHYLIMILEKHFPDILNMPSELQHLPEAAKVNLAELEKEVGNLRRGLRAVEVLEYQRRQVREPSDKFVPVMSDFITVSSFSFSELEDQLNEARDKFAKALMHFGEHDSKMQPDEFFGIFDTFLQAFSEARQDLEAMRRRKEEEERRARMEAMLKEQRERERWQRQRKVLAAGSSLEEGGEFDDLVSALRSGEVFDKDLCKLKRSRKRSGSQALEVTRERAINRLNY

SEQ ID NO: 19281 - protein, 661 aa, Homo sapiens
MDLKTLKLFNSQLRCGWLLYIWNKAFMAHLRVPQDEWTGYTPRGKDDEIPCRRMRSGSYIKAMGDEDSGDSDTSPKPSPKVAARRESYLKATQPSLTELTTLKISNEHSPKLQIRSHSYLRAVSEVSINRSLDSLDPAGLLTSPKFRSRNESYMRAMSTISQVSEMEVNGQFESVCESVFSELESQAVEALDLPMPGCFRMRSHSYVRAIEKGCSQDDECVSLRSSSPPRTTTTVRTIQSSTAQSSTESAQDAYMDGQGQRGDIISQSGLSNSTESLDSMKALTAAIEAANAQIHGPASQHMGNNTATVTTTTTIATVTTEDRKKDHFKKNRCLSIGIQVDDAEEPDKTGENKAPSKFQSVGVQVEEEKCFRRFTRSNSVTTAVQADLDFHDNLENSLESIEDNSCPGPMARQFSRDASTSTVSIQGSGNHYHACAADDDFDTDFDPSILPPPDPWIDSITEDPLEAVQRSVCHRDGHWFLKLLQAERDRMEGWCQQMEREERENNLPEDILGKIRTAVGSAQLLMAQKFYQFRELCEENLNPNAHPRPTSQDLAGFWDMLQLSIENISMKFDELHQLKANNWKQMDPLDKKERRAPPPVPKKPAKGPAPLIRERSLESSQRQEARKRLMAAKRAASVRQNSATESAESIEIYIPEAQTRL

SEQ ID NO: 19282 - protein, 704 aa, Homo sapiens
MKKFGGPGRMKQSCIMRQCIAPVLPHTAVCLVCGEAGKEDTVEEEEGKFNLMLMECSICNEIIHPGCLKIKESEGVVNDELPNCWECPKCNHAGKTGKQKRGPGFKYASNLPGSLLKEQKMNRDNKEGQEPAKRRSECEEAPRRRSDEHSKKVPPDGLLRRKSDDVHLRKKRKYEKPQELSGRKRASSLQTSPGSSSHLSPRPPLGSSLSPWWRSSLTYFQQQLKPGKEDKLFRKKRRSWKNAEDRMALANKPLRRFKQEPEDELPEAPPKTRESDHSRSSSPTAGPSTEGAEGPEEKKKVKMRRKRRLPNKELSRELSKELNHEIQRTENSLANENQQPIKSEPESEGEEPKRPPGICERPHRFSKGLNGTPRELRHQLGPSLRSPPRVISRPPPSVSPPKCIQMERHVIRPPPISPPPDSLPLDDGAAHVMHREVWMAVFSYLSHQDLCVCMRVCRTWNRWCCDKRLWTRIDLNHCKSITPLMLSGIIRRQPVSLDLSWTNISKKQLSWLINRLPGLRDLVLSGCSWIAVSALCSSSCPLLRTLDVQWVEGLKDAQMRDLLSPPTDNRPGQMDNRSKLRNIVELRLAGLDITDASLRLIIRHMPLLSKLHLSYCNHVTDQSINLLTAVGTTTRDSLTEINLSDCNKVTDQCLSFFKRCGNICHIDLRYCKQVTKEGCEQFIAEMSVSVQFGQVEEKLLQKLS

SEQ ID NO: 19283 - protein, 361 aa, Homo sapiens
MNSDLLVDSDGFYKEPITMEDLISYSFQVARGMEFLSSRKCIHRDLAARNILLSENNVVKICDFGLARDIYKNPDYVRKGDTRLPLKWMAPESIFDKIYSTKSDVWSYGVLLWEIFSLGGSPYPGVQMDEDFCSRLREGMRMRAPEYSTPEIYQIMLDCWHRDPKERPRFAELVEKLGDLLQANVQQDGKDYIPINAILTGNSGFTYSTPAFSEDFFKESISAPKFNSGSSDDVRYVNAFKFMSLERIKTFEELLPNATSMFDDYQGDSSTLLASPMLKRFTWTDSKPKASLKIDLRVTSKSKESGLSDVSRPSFCHSSCGHVSEGKRRFTYDHAELERKIACCSPPPDYNSVVLYSTPPI

SEQ ID NO: 19284 - protein, 504 aa, Homo sapiens
MKNVLQWTPPEGLQGVKVTYTVQYFIYGQKKWLNKSECRNINRTYCDLSAETSDYEHQYYAKVKAIWGTKCSKWAESGRFYPFLETQIGPPEVALTTDEKSISVVLTAPEKWKRNPEDLPVSMQQIYSNLKYNVSVLNTKSNRTWSQCVTNHTLVLTWLEPNTLYCVHVESFVPGPPRRAQPSEKQCARTLKDQSSEFKAKIIFWYVLPVSITVFLFSVMGYSIYRYIHVGKEKHPANLILIYGNEFDKRFFVPAEKIVINFITLNISDDSKISHQDMSLLGKSSDVSSLNDPQPSGNLRPPQEEEEVKHLGYASHLMEIFCDSEENTEGTSLTQQESLSRTIPPDKTVIEYEYDVRTTDICAGPEEQELSLQEEVSTQGTLLESQAALAVLGPQTLQYSYTPQLQDLDPLAQEHTDSEEGPEEEPSTTLVDWDPQTGRLCIPSLSSFDQDSEGCEPSEGDGLGEEGLLSRLYEEPAPDRPPGENETYLMQFMEEWGLYVQMEN

SEQ ID NO: 19285 - protein, 1642 aa, Homo sapiens
MSSFKRGSLKSSTSGSQKGQKSWIEKTFCKRECIFVIPSMKDSNRCCCGQFTNQHIPPLPSATPSKNEEESKQVETQPEKWSVAKHTQSYPTDSYGVLEFQGGGYSNKAMYIRVSYDTKPDSLLHLMVKDWQLELPKLLISVHGGLQNFEMQPKLKQVFGKGLIKAAMTTGAWIFTGGVSTGVISHVGDALKDHSSKSRGRVCAIGIAPWGIVENKEDLVGKDVTRVYQTMSNPLSKLSVLNNSHTHFILADNGTLGKYGAEVKLRRLLEKHISLQKINTRLGQGVPLVGLVVEGGPNVVSIVLEYLQEEPPIPVVICDGSGRASDILSFAHKYCEEGGIINESLREQLLVTIQKTFNYNKAQSHQLFAIIMECMKKKELVTVFRMGSEGQQDIEMAILTALLKGTNVSAPDQLSLALAWNRVDIARSQIFVFGPHWPPLGSLAPPTDSKATEKEKKPPMATTKGGRGKGKGKKKGKVKEEVEEETDPRKIELLNWVNALEQAMLDALVLDRVDFVKLLIENGVNMQHFLTIPRLEELYNTRLGPPNTLHLLVRDVKKSNLPPDYHISLIDIGLVLEYLMGGAYRCNYTRKNFRTLYNNLFGPKRPKALKLLGMEDDEPPAKGKKKKKKKKEEEIDIDVDDPAVSRFQYPFHELMVWAVLMKRQKMAVFLWQRGEESMAKALVACKLYKAMAHESSESDLVDDISQDLDNNSKDFGQLALELLDQSYKHDEQIAMKLLTYELKNWSNSTCLKLAVAAKHRDFIAHTCSQMLLTDMWMGRLRMRKNPGLKVIMGILLPPTILFLEFRTYDDFSYQTSKENEDGKEKEEENTDANADAGSRKGDEENEHKKQRSIPIGTKICEFYNAPIVKFWFYTISYLGYLLLFNYVILVRMDGWPSLQEWIVISYIVSLALEKIREILMSEPGKLSQKIKVWLQEYWNITDLVAISTFMIGAILRLQNQPYMGYGRVIYCVDIIFWYIRVLDIFGVNKYLGPYVMMIGKMMIDMLYFVVIMLVVLMSFGVARQAILHPEEKPSWKLARNIFYMPYWMIYGEVFADQIDLYAMEINPPCGENLYDEEGKRLPPCIPGAWLTPALMACYLLVANILLVNLLIAVFNNTFFEVKSISNQVWKFQRYQLIMTFHDRPVLPPPMIILSHIYIIIMRLSGRCRKKREGDQEERDRGLKLFLSDEELKRLHEFEEQCVQEHFREKEDEQQSSSDERIRVTSERVENMSMRLEEINERETFMKTSLQTVDLRLAQLEELSNRMVNALENLAGIDRSDLIQARSRASSECEATYLLRQSSINSADGYSLYRYHFNGEELLFEDTSLSTSPGTGVRKKTCSFRIKEEKDVKTHLVPECQNSLHLSLGTSTSATPDGSHLAVDDLKNAEESKLGPDIGISKEDDERQTDSKKEETISPSLNKTDVIHGQDKSDVQNTQLTVETTNIEGTISYPLEETKITRYFPDETINACKTMKSRSFVYSRGRKLVGGVNQDVEYSSITDQQLTTEWQCQVQKITRSHSTDIPYIVSEAAVQAEHKEQFADMQDEHHVAEAIPRIPRLSLTITDRNGMENLLSVKPDQTLGFPSLRSKSLHGHPRNVKSIQGKLDRSGHASSVSSLVIVSGMTAEEKKVKKEKASTETEC

SEQ ID NO: 19286 - protein, 131 aa, Homo sapiens
MAMTAGTTTTFPMSNHTRERVTVAKLTLENFYSNLILQHEERETRQKKLEVAMEEEGLADEEKKLRRSQHARKETEFLRLKRTRLGLDDFESLKVIGRGAFGEVRLVQKKDTGHIYAMKILRKSDMLEKEQ

SEQ ID NO: 19287 - protein, 106 aa, Homo sapiens
EHSIKATLIWRLFFLIMFLTIIVCGMVAALSAIRANCHQEPSVCLQAACPESWIGFQRKCFYFSDDTKNWTSSQRFCDSQDADLAQVESFQELVSYPGSRRVCLFE

SEQ ID NO: 19288 - protein, 729 aa, Homo sapiens
MAEDKETKHGGHKNGRKGGLSGTSFFTWFMVIALLGVWTSVAVVWFDLVDYEEVLGKLGIYDADGDGDFDVDDAKVLLGLKERSTSEPAVPPEEAEPHTEPEEQVPVEAEPQNIEDEAKEQIQSLLHEMVHAEHVEGEDLQQEDGPTGEPQQEDDEFLMATDVDDRFETLEPEVSHEETEHSYHVEETVSQDCNQDMEEMMSEQENPDSSEPVVEDERLHHDTDDVTYQVYEEQAVYEPLENEGIEITEVTAPPEDNPVEDSQVIVEEVSIFPVEEQQEVPPETNRKTDDPEQKAKVKKKKPKLLNKFDKTIKAELDAAEKLRKRGKIEEAVNAFKELVRKYPQSPRARYGKAQCEDDLAEKRRSNEVLRGAIETYQEVASLPDVPADLLKLSLKRRSDRQQFLGHMRGSLLTLQRLVQLFPNDTSLKNDLGVGYLLIGDNDNAKKVYEEVLSVTPNDGFAKVHYGFILKAQNKIAESIPYLKEGIESGDPGTDDGRFYFHLGDAMQRVGNKEAYKWYELGHKRGHFASVWQRSLYNVNGLKAQPWWTPKETGYTELVKSLERNWKLIRDEGLAVMDKAKGLFLPEDENLREKGDWSQFTLWQQGRRNENACKGAPKTCTLLEKFPETTGCRRGQIKYSIMHPGTHVWPHTGPTNCRLRMHLGLVIPKEGCKIRCANETKTWEEGKVLIFDDSFEHEVWQDASSFRLIFIVDVWHPELTPQQRRSLPAI

SEQ ID NO: 19289 - protein, 488 aa, Homo sapiens
MVLQKEPAGAVIWGFGTPGATVTVTLRQGQETIMKKVTSVKAHSDTWMVVLDPMKPGGPFEVMAQQTLEKINFTLRVHDVLFGDVWLCSGQSNMQMTVLQIFNATRELSNTAAYQSVRILSVSPIQAEQELEDLVAVDLQWSKPTSENLGHGYFKYMSAVCWLFGRHLYDTLQYPIGLIASSWGGTPIEAWSSGRSLKACGVPKQGSIPYDSVTGPSKHSVLWNAMIHPLCNMTLKGVVWYQGESNINYNTDLYNCTFPALIEDWRETFHRGSQGQTERFFPFGLVQLSSDLSKKSSDDGFPQIRWHQTADFGYVPNPKMPNTFMAVAMDLCDRDSPFGSIHPRDKQTVAYRLHLGARALAYGEKNLTFEGPLPEKIELLAHKGLLNLTYYQQIQVQKKDNKIFEISCCSDHRCKWLPASMNTVSTQSLTLAIDSCHGTVVALRYAWTTWPCEYKQCPLYHPSSALPAPPFIAFITDQGPGHQSNVAK

SEQ ID NO: 19290 - protein, 1181 aa, Homo sapiens
MAVAVAMAGALIGSEPGPAEELAKLEYLSLVSKVCTELDNHLGINDKDLAEFVISLAEKNTTFDTFKASLVKNGAEFTDSLISNLLRLIQTMRPPAKPSTSKDPVVKPKTEKEKLKELFPVLCQPDNPSVRTMLDEDDVKVAVDVLKELEALMPSAAGQEKQRDAEHRDRTKKKKRSRSRDRNRDRDRDRERNRDRDHKRRHRSRSRSRSRTRERNKVKSRYRSRSRSQSPPKDRKDRDKYGERNLDRWRDKHVDRPPPEEPTIGDIYNGKVTSIMQFGCFVQLEGLRKRWEGLVHISELRREGRVANVADVVSKGQRVKVKVLSFTGTKTSLSMKDVDQETGEDLNPNRRRNLVGETNEETSMRNPDRPTHLSLVSAPEVEDDSLERKRLTRISDPEKWEIKQMIAANVLSKEEFPDFDEETGILPKVDDEEDEDLEIELVEEEPPFLRGHTKQSMDMSPIKIVKNPDGSLSQAAMMQSALAKERRELKQAQREAEMDSIPMGLNKHWVDPLPDAEGRQIAANMRGIGMMPNDIPEWKKHAFGGNKASYGKKTQMSILEQRESLPIYKLKEQLVQAVHDNQILIVIGETGSGKTTQITQYLAEAGYTSRGKIGCTQPRRVAAMSVAKRVSEEFGCCLGQEVGYTIRFEDCTSPETVIKYMTDGMLLRECLIDPDLTQYAIIMLDEAHERTIHTDVLFGLLKKTVQKRQDMKLIVTSATLDAVKFSQYFYEAPIFTIPGRTYPVEILYTKEPETDYLDASLITVMQIHLTEPPGDILVFLTGQEEIDTACEILYERMKSLGPDVPELIILPVYSALPSEMQTRIFDPAPPGSRKVVIATNIAETSLTIDGIYYVVDPGFVKQKVYNSKTGIDQLVVTPISQAQAKQRAGRAGRTGPGKCYRLYTERAYRDEMLTTNVPEIQRTNLASTVLSLKAMGINDLLSFDFMDAPPMETLITAMEQLYTLGALDDEGLLTRLGRRMAEFPLEPMLCKMLIMSVHLGCSEEMLTIVSMLSVQNVFYRPKDKQALADQKKAKFHQTEGDHLTLLAVYNSWKNNKFSNPWCYENFIQARSLRRAQDIRKQMLGIMDRHKLDVVSCGKSTVRVQKAICSGFFRNAAKKDPQEGYRTLIDQQVVYIHPSSALFNRQPECPKHFLPVVAVAVSLEQCLSKFEDLNKELGLVTC

SEQ ID NO: 19291 - protein, 646 aa, Homo sapiens
MSNVTLRKMSPTGNEMKSTTQGTTRKQQDFHEVNKRRTFLQDNSWIKKRPEEEKDENYGRVVLNRHNSHDALDRKVNERDVPKATISRYSSDDTLDRISDRNDAAKTYKANTLDNQLTNRSMSMFRSLEVTKLQPGGSLNANTSNTIASTSATTPVKKKREPGVHPPIPPKPSSPVSSPNQLRQDNRQIHPPKPGVYTETNRSAERNIRSQDLDNIVKVATSLQRSDKGEELDNLIKMNKSLNRNQGLDSLFRANPKVEEREKRAKSLESLIYMSTRTDKDGKGIQSLGSPIKVNQRTDKNEKGRQNLESVAKVNARMNKTSRRSEDLDNATEVNPKGHENTTGGQSLDNLIKVTPEVKRSNQGSKDLNNFIKVYPGTEKSTEGGQSLDSLIKVTPERNRTNQGNQDLENLIKVIPSANKSSEQGLDEHINVSPKAVKNTDGKQDLDKLIKVNPEIFTNNQRNQDLANLIKVNPAVIRNNQSQDLDNLIKVKPSALRNTNRDQNLENLIEVNSHVSENKNGSSNTGAKQAGPQDTVVYTRTYVENSKSPKDGYQENISGKYIQTVYSTSDRSVIERDMCTYCRKPLGVETKMILDELQICCHSTCFKCEICKQPLENLQAGDSIWIYRQTIHCEPCYSKIMAKWIP

SEQ ID NO: 19292 - protein, 537 aa, Homo sapiens
MQVEKGATGISLSPHLPGELAICSRSGAVCLWSPEDGLRQIYRDPETLVFRDSSSWRWADFTAHPRVLTVGDRTGVKMLDTQGPPGCGLLLFRLGAEASCQKGERVLLTQYLGHSSPKCLPPTLHLVCTQFSLYLVDERLPLVPMLKWNHGLPSPLLLARLLPPPRPSCVQPLLLGGQGGQLQLLHLAGEGASVPRLAGPPQSLPSRIDSLPAFPLLEPKIQWRLQERLKAPTIGLAAVVPPLPSAPTPGLVLFQLSAAGDVFYQQLRPQVDSSLRRDAGPPGDTQPDCHAPTASWTSQDTAGCSQWLKALLKVPLAPPVWTAPTFTHRQMLGSTELRREEEEGQRLGVLRKAMARGQLLLQRDLGSLPAAEPPPAPESGLEDKLSERLGEAWAGRGAAWWERQQGRTSEPGRQTRRPKRRTQLSSSFSLSGHVDPSEDTSSPHSPEWPPADALPLPPTTPPSQELTPDACAQGVPSEQRQMLRDYMAKLPPQRDTPGCATTPPHSQASSVRATRSQQHTPVLSSSQPLRKKPRMGF

SEQ ID NO: 19293 - protein, 731 aa, Homo sapiens
MDQGNDEEKINTVQRLLDQLPRANVVLLRYLFGVLHNIEQHSSSNQMTAFNLAVCVAPSILWPPASSSPELENEFTKKVSLLIQFLIENCLRIFGEEITSLFREVSVRCDTRENASDISCFQLNDSSYDSLENELNEDVDAPCSDLVKKLGQGSRSMDSVLTLSDYDLDQPEVEGLLTLSDFDLAHSKDEDVQMKRPLESKPVNILVYTKIPLRDHARAPSAMCTPSYLSTAAANAAKSLRRHRRCSEPSIDYLDSKLSYLREFYQKKLRKSSCDAILSQKDEDYLKQNQPLQEEGKTCFKQSLVTGTDVSKKNATTQNTKKKSLSGSEGNHVKLFPKSKPVAISVASYSPMSSQDHSKNQPFDVNTSGYSPPHTADALKGPRTHRRCSEPNIEDQNRKLTYLRGIYSKKQHKTSCEAGLLHGEEDYLKRHKSLQMEGQKLINQSLVMGIEVGKSSATNQNTEKVLPPRLNLCPRTSYSSLSSPGTSPSGSSVSSQDSAFSQISEHSVFTPTETSSPIDCTFQAQRKREDLSPDFSNASHVSGMPGPSSGQACSRPAYTKKDTMEWHSQMHSVTLHPSTWLRNGVASLKNWSLKKKAKAARPEEEKIASPKGPLEPPPHASGVPEANSLQEEQKDLPLRAAEGLSPVQSAQRCSSSPFQDSERHCSSPFSLVESRLKLCMKSHEEIEPGSQSSSGSLPWERASASSWTLEDATSPDSGPTVVCDIEDRNCC

SEQ ID NO: 19294 - protein, 779 aa, Homo sapiens
MAVPLGAPCWASALPAWAPPGLPHRSLLTRLLSQHVKPAKIPQISYASTAPDLSDNSRYDFFSRVVPSDTYQAQAMVDIVRALKWNYVSTVASEGSYGESGVEAFIQKSREDGGVCIAQSVKIPREPKAGEFDKIIRRLLETSNARAVIIFANEDDIRRVLEAARRANQTGHFFWMGSDSWGSKIAPVLHLEEVAEGAVTILPKRMSVRGFDRYFSSRTLDNNRRNIWFAEFWEDNFHCKLSRHALKKGSHVKKCTNRERIGQDSAYEQEGKVQFVIDAVYAMGHALHAMHRDLCPGRVGLCPRMDPVDGTQLLKYIRNVNFSGIAGNPVTFNENGDAPGRYDIYQYQLRNDSAEYKVIGSWTDHLHLRIERMHWPGSGQQLPRSICSLPCQPGERKKTVKGMPCCWHCEPCTGYQYQVDRYTCKTCPYDMRPTENRTGCRPIPIIKLEWGSPWAVLPLFLAVVGIAATLFVVITFVRYNDTPIVKASGRELSYVLLAGIFLCYATTFLMIAEPDLGTCSLRRIFLGLGMSISYAALLTKTNRIYRIFEQGKRSVSAPRFISPASQLAITFSLISLQLLGICVWFVVDPSHSVVDFQDQRTLDPRFARGVLKCDISDLSLICLLGYSMLLMVTCTVYAIKTRGVPETFNEAKPIGFTMYTTCIVWLAFIPIFFGTSQSADKLYIQTTTLTVSVSLSASVSLGMLYMPKVYIILFHPEQNVPKRKRSLKAVVTAATMSNKFTQKGNFRPNGEAKSELCENLEAPALATKQTYVTYTNHAI

SEQ ID NO: 19295 - protein, 319 aa, Homo sapiens
MATMSSAQLISAPSLQAKLGPTGPQVVQASELFQFWSGGSGPPWNVPDVKPFSQTPFTLSLTPPSTDLPGYEPPQALSPLPPPTPSPPAWQARGLGTARLQLVEFSAFVEPPDAVDSYQRHLFVHISQHCPSPGAPPLESVDVRQIYDKFPEKKGGLRELYDRGPPHAFFLVKFWADLNWGPSGEEAGAGGSISSGGFYGVSSQYESLEHMTLTCSSKVCSFGKQVVEKVETERAQLEDGRFVYRLLRSPMCEYLVNFLHKLRQLPERYMMNSVLENFTILQVVTNRDTQELLLCTAYVFEVSTSERGAQHHIYRLVRD

SEQ ID NO: 19296 - protein, 73 aa, Homo sapiens
AKQARVSQELKKAAKRTVSISEGPDTLGDGMRERRETLALAPEPEPLEKEACEKWKRPFSLSLQVPGVQALGQ

SEQ ID NO: 19297 - protein, 556 aa, Homo sapiens [sequence omitted]

SEQ ID NO: 19298 - protein, 631 aa, Homo sapiens
MFGHGLKHLFHSRRRSREREHQTSQDSQQHQQQQGMSDHDSPDEKERSPEMHRVSYAMSLHDLPARPTAFNRVLQQIRSRPSIKRGASLHSSSGGGSSGSSSRRTKSSSLEPQRGSPHLLRKAPQDSSLAAILHQHQCRPRSSSTTDTALLLADGSNVYLLAEEAEGIGDKVDKGDLVALSLPAGHGDTDGPISLDVPDGAPDPQRTKAAIDHLHQKILKITEQIKIEQEARDDNVAEYLKLANNADKQQVSRIKQVFEKKNQKSAQTIAQLHKKLEHYRRRLKEIEQNGPSRQPKDVLRDMQQGLKDVGANVRAGISGFGGGVVEGVKGSLSGLSQATHTAVVSKPREFASLIRNKFGSADNIAHLKDPLEDGPPEEAARALSGSATLVSSPKYGSDDECSSASASSAGAGSNSGAGPGGALGSPKSNALYGAPGNLDALLEELREIKEGQSHLEDSMEDLKTQLQRDYTYMTQCLQEERYRYERLEEQLNDLTELHQNEMTNLKQELASMEEKVAYQSYERARDIQEAVESCLTRVTKLELQQQQQQVVQLEGVENANARALLGKFINVILALMAVLLVFVSTIANFITPLMKTRLRITSTTLLVLVLFLLWKHWDSLTYLLEHVLLPS

SEQ ID NO: 19299 - protein, 1022 aa, Homo sapiens
MRVQLLQDLQDFFRKKAEIETEYSRNLEKLAERFMAKTRSTKDHQQYKKDQNLLSPVNCWYLLLNQVRRESKDHATLSDIYLNNVIMRFMQISEDSTRMFKKSKEIAFQLHEDLMKVLNELYTVMKTYHMYHAESISAESKLKEAEKQEEKQIGRSGDPVFHIRLEERHQRRSSVKKIEKMKEKRQAKYSENKLKSIKARNEYLLTLEATNASVFKYYIHDLSDLIDCCDLGYHASLNRALRTYLSAEYNLETSRHEGLDIIENAVDNLEPRSDKQRFMEMYPAAFCPPMKFEFQSHMGDEVCQVSAQQPVQAELMLRYQQLQSRLATLKIENEEVKKTTEATLQTIQDMVTIEDYDVSECFQHSRSTESVKSTVSETYLSKPSIAKRRANQQETEQFYFMKLREYLEGSNLITKLQAKHDLLQRTLGEGHRAEYMTTSRGRRNSHTRHQDSGQVIPLIVESCIRFINLYGLQHQGIFRVSGSQVEVNDIKNSFERGENPLADDQSNHDINSVAGVLKLYFRGLENPLFPKERFNDLISCIRIDNLYERALHIRKLLLTLPRSVLIVMRYLFAFLNHLSQYSDENMMDPYNLAICFGPTLMPVPEIQDQVSCQAHVNEIIKTIIIHHETIFPDAKELDGPVYEKCMAGDDYCDSPYSEHGTLEEVDQDAGTEPHTSEDECEPIEAIAKFDYVGRSARELSFKKGASLLLYHRASEDWWEGRHNGIDGLVPHQYIVVQDMDDTFSDTLSQKADSEASSGPVTEDKSSSKDMNSPTDRHPDGYLARQRKRGEPPPPVRRPGRTSDGHCPLHPPHALSNSSVDLGSPSLASHPRGLLQNRGLNNDSPERRRRPGHGSLTNISRHDSLKKIDSPPIRRSTSSGQYTGFNDHKPLDPETIAQDIEETMNTALNELRELERQSTAKHAPDVVLDTLEQVKNSPTPATSTESLSPLHNVALRSSEPQIRRSTSSSSDTMSTFKPMVAPRMGVQLKPPALRPKPAVLPKTNPTIGPAPPPQGPTDKSCTM

SEQ ID NO: 19300 - protein, 749 aa, Homo sapiens
MIPFLPMFSLLLLLIVNPINANNHYDKILAHSRIRGRDQGPNVCALQQILGTKKKYFSTCKNWYKKSICGQKTTVLYECCPGYMRMEGMKGCPAVLPIDHVYGTLGIVGATTTQRYSDASKLREEIEGKGSFTYFAPSNEAWDNLDSDIRRGLESNVNVELLNALHSHMINKRMLTKDLKNGMIIPSMYNNLGLFINHYPNGVVTVNCARIIHGNQIATNGVVHVIDRVLTQIGTSIQDFIEAEDDLSSFRAAAITSDILEALGRDGHFTLFAPTNEAFEKLPRGVLERIMGDKVASEALMKYHILNTLQCSESIMGGAVFETLEGNTIEIGCDGDSITVNGIKMVNKKDIVTNNGVIHLIDQVLIPDSAKQVIELAGKQQTTFTDLVAQLGLASALRPDGEYTLLAPVNNAFSDDTLSMDQRLLKLILQNHILKVKVGLNELYNGQILETIGGKQLRVFVYRTAVCIENSCMEKGSKQGRNGAIHIFREIIKPAEKSLHEKLKQDKRFSTFLSLLEAADLKELLTQPGDWTLFVPTNDAFKGMTSEEKEILIRDKNALQNIILYHLTPGVFIGKGFEPGVTNILKTTQGSKIFLKEVNDTLLVNELKSKESDIMTTNGVIHVVDKLLYPADTPVGNDQLLEILNKLIKYIQIKFVRGSTFKEIPVTVYSPEIKYTRISTGGGETEETLKKLLQEEVTKVTKFIEGGDGHLFEDEEIKRLLQGDTPVRKLQANKKVQGSRRRLREGRSQ

SEQ ID NO: 19301 - protein, 850 aa, Homo sapiens
MSSQCRSLENKFVFLKEGLGNSKPEELEEIRIENGRISSERRKEKSRDAARSRRSKESEVFYELAHQLPLPHNVSSHLDKASVMRLTISYLRVRKLLDAGDLDIEDDMKAQMNCFYLKALDGFVMVLTDDGDMIYISDNVNKYMGLTQFELTGHSVFDFTHPCDHEEMREMLTHRNGLVKKGKEQNTQRSFFLRMKCTLTSRGRTMNIKSATWKVLHCTGHIHVYDTNSNQPQCGYKKPPMTCLVLICEPIPHPSNIEIPLDSKTFLSRHSLDMKFSYCDERITELMGYEPEELLGRSIYEYYHALDSDHLTKTHHDMFTKGQVTTGQYRMLAKRGGYVWVETQATVIYNTKNSQPQCIVCVNYVVSGIIQHDLIFSLQQTECVLKPVESSDMKMTQLFTKVESEDTSSLFDKLKKEPDALTLLAPAAGDTIISLDFGSNDTETDDQQLEEVPLYNDVMLPSPNEKLQNINLAMSPLPTAETPKPLRSSADPALNQEVALKLEPNPESLELSFTMPQIQDQTPSPSDGSTRQSSPEPNSPSEYCFYVDSDMVNEFKLELVEKLFAEDTEAKNPFSTQDTDLDLEMLAPYIPMDDDFQLRSFDQLSPLESSSASPESASPQSTVTVFQQTQIQEPTANATTTTATTDELKTVTKDRMEDIKILIASPSPTHIHKETTSATSSPYRDTQSRTASPNRAGKGVIEQTEKSHPRSPNVLSVALSQRTTVPEEELNPKILALQNAQRKRKMEHDGSLFQAVGIGTLLQQPDDHAATTSLSWKRVKGCKSSEQNGMEQKTIILIPSDLACRLLGQSMDESGLPQLTSYDCEVNAPIQGSRNLLQGEELLRALDQVN

SEQ ID NO: 19302 - protein, 781 aa, Homo sapiens
MIPFLPMFSLLLLLIVNPINANNHYDKILAHSRIRGRDQGPNVCALQQILGTKKKYFSTCKNWYKKSICGQKTTVLYECCPGYMRMEGMKGCPAVLPIDHVYGTLGIVGATTTQRYSDASKLREEIEGKGSFTYFAPSNEAWDNLDSDIRRGLESNVNVELLNALHSHMINKRMLTKDLKNGMIIPSMYNNLGLFINHYPNGVVTVNCARIIHGNQIATNGVVHVIDRVLTQIGTSIQDFIEAEDDLSSFRAAAITSDILEALGRDGHFTLFAPTNEAFEKLPRGVLERIMGDKVASEALMKYHILNTLQCSESIMGGAVFETLEGNTIEIGCDGDSITVNGIKMVNKKDIVTNNGVIHLIDQVLIPDSAKQVIELAGKQQTTFTDLVAQLGLASALRPDGEYTLLAPVNNAFSDDTLSMDQRLLKLILQNHILKVKVGLNELYNGQILETIGGKQLRVFVYRTAVCIENSCMEKGSKQGRNGAIHIFREIIKPAEKSLHEKLKQDKRFSTFLSLLEAADLKELLTQPGDWTLFVPTNDAFKGMTSEEKEILIRDKNALQNIILYHLTPGVFIGKGFEPGVTNILKTTQGSKIFLKEVNDTLLVNELKSKESDIMTTNGVIHVVDKLLYPADTPVGNDQLLEILNKLIKYIQIKFVRGSTFKEIPVTVYRPTLTKVKIEGEPEFRLIKEGETITEVIHGEPIIKKYTKIIDGVPVEITEKETREERIITGPEIKYTRISTGGGETEETLKKLLQEDTPVRKLQANKKVQGSRRRLREGRSQ

SEQ ID NO: 19303 - protein, 329 aa, Homo sapiens
MESFLTSMGKFMKLIPDHRPKDLESIIRPKCQVIYFPIRFPDVSRFMPKHKTTHLKKMLGLKGNGGAVLSMALPFQPEQRDSEDLLKNFNSECDTHCGLDTARQEYLGNSLRQESDLKKSTSSDNSSSHHGENKQNLTVDPCDILGGVDNQQRLLHIVWPHRWEHDKDPESFFKVLMHLKDLGLNFHVSVLGETFTDVPDIFSEAKKALGSSVLHWGYLPSKDDYFQVLCMADVVISTAKHEFFGVAMLEAVYCGCYPLCPKDLVYPEIFPAEYLYSTPEQLSKRLQNFCKRPDIIRKHLYKGEIAPFSWAALHGKFRSLLTTEPREDL

SEQ ID NO: 19304 - protein, 2046 aa, Homo sapiens
MELAHSLLLNEEAYNQLGEVQKAEFIFEWLRYLEKLLLATSRNDVREKQKTLVEQLLSLLNSSPGPPTRKLLAKNLAILYSIGDTFSVHEAIDKCNDLIRSKDDSPSYLPTKLAAVVCLGSLYKKLGRILGNTFTDTVGNILKAMKSAESQGRYEIMLSLQNILNGLGAAAAPCHRDVYKAARSCLTDRSMAVRCAAAKCLLELQNEAIFMWSTDLDSVATLCFKSFEGSNYDVRISVSKLLGIILAKAVISKHPGTAASRQSIRRVSLEEVLELLGTGFLRGSSGFLRASGDMLKGTSSVSRDVRVGVTQAYVVFVSTLGGAWLEKNFAAFFSHILSLASPSHPKATQTQIDAVCCRRCVSFILRTTIGGLLGEKAQLAAVKDICQAIWKLKKVMDAVMSDGNLETRLGSTDVAASQHMLVCALQELGNLIHNLGTTAAPLLQDSSTGLLDSILSVILHPSISVRLAAAWCLHCIAVALPSYLTPLLDRCLERLTGHKSSPEAVTGFSFAVAALLGAVKHCPLGIPHGKGKIIMTLAEDLLCSAAQNSRLSAQRTQAGWLLISALMTLGPAVVSHHLARVLLLWKCVFPASPKDLETEKSRGDSFTWQVTLEGRAGALCAIKSFVSHCGDLLTEEVTQRLLPPLPCAVDLLTQLSSILKMYGSPLKTPSVVYRQRLYELLILLPPETYEGNLCAILRELAADLTAPDIQVAASTFLLPPLCHQDDLLILSPFLQETDHRFIEEQLLLGNGVACGSLEYDPYSIYEKDVEGDSVPKPLPPALSVISSASKLFGVVCAHVGETQRLLILEQLLDSIKHTKGARQQVVQLHVVSSVSSFLKYVAGSKGCLGPEEMKRFALTLVMGALESPNPLLRCAAAESWARLAQVVDDGAFTAGLAQVSFDKLKSARDVVTRTGHSLALGSLHRYLGGISSSQHLNSCIGILYTLAQDSTSPDVQTWALHSLSLIIDSAGPLYYVHVEPTLSLIIMLLLNVPPTHAEVHQSLGRCLNALITTLGPELQGNSTSISTLRTSCLLGCAVMQDNPDCLVQAQAISCLQQLHMFAPRHVNLSSLVSCLCVNLCSPYLLLRRAVLACLRQLVQREAAEVSEHAVMLAKDSREELTPDANIREVGLEGALLILLDKETDERLCHDIKETLNYMLTSMAVEKLSLWLKLCKDVLAASADFTAVTCVDTMQEEEGDKGDDASVLTTRRDEKSHPFTNPRWATRVFAAECVCRIINQCENANSAHFDIALAQEMKKRDSRNDFLVLHLADLIRMAFMAATDHSDQLRLSGLEMLLVVIRRFATVPEPEFPGHVILEQYQANVGAALRPAFTSETPPDVTAKACQVCSAWIASGVVSDLNDLRRVHQLLVSSLTKIQAGKEALSHLYNESASTMEILAVLKAWAEVYIIAVQRHKNHRQPLKTTTCLEDGIRNGSCSSDGLLDLVYADLGTLSRLWLAALQDFALLTLPSEFASQLPAEGGAFYTAETSENAKLHYYNSWALILHATALWLTSTGFVVADPDEGASNLSRPVTPTSMCQGSSSGATIKSPEDVYTDRFHLILGISVEFLCSLRSDATMESITACLHALQALLDVPWPRSKIGSDQDLGIELLNVLHRVILTRESPSIQLASLEVVRQIICAAQEHVKEKRRSAEVDDGAAEKETLPEFGEGKDTGGLVPGKSLVFATLELCVCILVRQLPELNPKLTGSPGVKATKPQILLEDGSRLVSAALVILSELPAVCSPEGSISILPTILYLTIGVLRETAVKLPGGQLSSTVAASLQALKGILSSPMARAEKSRTAWTDLLRSALTTILDCWDPVDETHQELDEVSLLTAITVFILSTSPEVTTIPCLQKRCIDKFKATLEIKDPVVQIKTYQLLHSIFQYPNPAVSYPYIYSLASCIMEKLQEIDKRKPENTAELEIFQEGIKVLETLVTVAEEHHRAQLVACLLPILISFLLDENSLGSATSIMRNLHDFALQNLMQIGPQYSSVFKSLVASSPALKARLEAAIKGNQESVKVKIPTSKYTKSPGKNSSIQLKTSFL

SEQ ID NO: 19305 - protein, 403 aa, Homo sapiens
MFTSSRMSSFNRHMKTHTSEKPHLCHLCLKTFRTVTLLRNHVNTHTGTRPYKCNDCNMAFVTSGELVRHRRYKHTHEKPFKCSMCKYASVEASKLKRHVRSHTGERPFQCCQCSYASRDTYKLKRHMRTHSGEKPYECHICHTRFTQSGTMKIHILQKHGENVPKYQCPHCATIIARKSDLRVHMRNLHAYSAAELKCRYCSAVFHERYALIQHQKTHKNEKRFKCKHCSYACKQERHMTAHIRTHTGEKPFTCLSCNKCFRQKQLLNAHFRKYHDANFIPTVYKCSKCGKGFSRWINLHRHSEKCGSGEAKSAASGKGRRTRKRKQTILKEATKGQKEAAKGWKEAANGDGVISAHRNLCLLGSSDSHASVSGAGITDARHHAWLIVLLFLVEMGFYHVSHS

SEQ ID NO: 19306 - protein, 702 aa, Homo sapiens
MKSAKPQVNHSQHGESQRALSPLQSTLSSAASPSQAYETYIENGLICLKHKIRNIEKKKLKLEDYKDRLKSGEHLNPDQLEAVEKYEEVLHNLEFAKELQKTFSGLSLDLLKAQKKAQRREHMLKLEAEKKKLRTILQVQYVLQNLTQEHVQKDFKGGLNGAVYLPSKELDYLIKFSKLTCPERNESLSVEDQMEQSSLYFWDLLEGSEKAVVGTTYKHLKDLLSKLLNSGYFESIPVPKNAKEKEVPLEEEMLIQSEKKTQLSKTESVKESESLMEFAQPEIQPQEFLNRRYMTEVDYSNKQGEEQPWEADYARKPNLPKRWDMLTEPDGQEKKQESFKSWEASGKHQEVSKPAVSLEQRKQDTSKLRSTLPEEQKKQEISKSKPSPSQWKQDTPKSKAGYVQEEQKKQETPKLWPVQLQKEQDPKKQTPKSWTPSMQSEQNTTKSWTTPMCEEQDSKQPETPKSWENNVESQKHSLTSQSQISPKSWGVATASLIPNDQLLPRKLNTEPKDVPKPVHQPVGSSSTLPKDPVLRKEKLQDLMTQIQGTCNFMQESVLDFDKPSSAIPTSQPPSATPGSPVASKEQNLSSQSDFLQEPLQATSSPVTCSSNACLVTTDQASSGSETEFMTSETPEAAIPPGKQPSSLASPNPPMAKGSEQGFQSPPASSSSVTINTAPFQAMQTVFNVNAPLPPRKEQEIKE

SEQ ID NO: 19307 - protein, 791 aa, Homo sapiens
MIRDRKYHLKTYRQCCVGTELVDWMMQQTPCVHSRTQAVGMWQVLLEDGVLNHVDQEHHFQDKYLFYRFLDDEHEDAPLPTEEEKKECDEELQDTMLLLSQMGPDAHMRMILRKPPGQRTVDDLEIIYEELLHIKALSHLSTTVKRELAGVLIFESHAKGGTVLFNQGEEGTSWYIILKGSVNVVIYGKGVVCTLHEGDDFGKLALVNDAPRAASIVLREDNCHFLRVDKEDFNRILRDVEANTVRLKEHDQDVLVLEKVPAGNRASNQGNSQPQQKYTVMSGTPEKILEHFLETIRLEATLNEATDSVLNDFIMMHCVFMPNTQLCPALVAHYHAQPSQGTEQEKMDYALNNKRRVIRLVLQWAAMYGDLLQEDDVSMAFLEEFYVSVSDDARMIAALKEQLPELEKIVKQISEDAKAPQKKHKVLLQQFNTGDERAQKRQPIRGSDEVLFKVYCMDHTYTTIRVPVATSVKEVISAVADKLGSGEGLIIVKMSSGGEKVVLKPNDVSVFTTLTINGRLFACPREQFDSLTPLPEQEGPTVGTVGTFELMSSKDLAYQMTIYDWELFNCVHELELIYHTFGRHNFKKTTANLDLFLRRFNEIQFWVVTEICLCSQLSKRVQLLKKFIKIAAHCKEYKNLNSFFAIVMGLSNVAVSRLALTWEKLPSKFKKFYAEFESLMDPSRNHRAYRLTVAKLEPPLIPFMPLLIKDMTFTHEGNKTFIDNLVNFEKMRMIANTARTVRYYRSQPFNPDAAQANKNHQDVRSYVRQLNVIDNQRTLSQMSHRLEPRRP

SEQ ID NO: 19308 - protein, 314 aa, Homo sapiens
MDKNQTEVMREFFLSGFSQTPSIEAGLFVLFLFFYMSIWVGNVLIMVTVASDKYLNSSPMYFLLGNLSFLDLCYSTVTTPKLLADFFNHEKLISYDQCIVQLFFLHFVGAAEMFLLTVMAYDRYVAICRPLHYTTVMSRGLCCVLVAASWMGGFVHSTVQTILTVHLPFCGPNQVENFFLUCSPCHQTCLCUHFCHUIAHGIUQWVDLHHLLCGADFLLHHYPSQDSLQGRKAKGTLHVCLSPHGGNTVFWTLYFHLRSSFLYIFCGQDGVCTLQCYYPNAKPPHLHTSEQRGKVSHAEALGQKWAYLEKAGDM

SEQ ID NO: 19309 - protein, 695 aa, Homo sapiens
MSYGSITFGDVAIDFSHQEWEYLSLVQKTLYQEVMMENYDNLVSLGHSVSKPDLITLLEQGKEPWMIVREETRGECTDLDSRCEIISDGKMQLYRKHSCVTLHQRIHNGQKPYECKQCQKSFSHLTELMVHQTIHTSEEPDQCEKFRKAFSHLTDLRKHQKINAREKPYECEECGKVFSYPANLAQHGKVHVEKPYECKECGEAFRTSRQLTVHHRFHYGEKPYECKECGKAFSVYGRLSRHQSIHTGEKPFECNKCGKSFRLKAGLKVHQSIHTGEKPHECKECGKAFRQFSHLVGHKRIHTGEKPYECKECGKGFTCRYQLTMHQRIYSGEKHYECKENGEAFSSGHQLTAPHTFESVEKPYKCEECGKAFSVHGRLTRHQGIHSGKKPYECNKCGKSFRLNSSLKIHQNIHTGEKPYKCKECGKAFSQRAHLAHHNRIHTGYKPFECKECGKSFRCASYLVIHERIHTGEKPYVCQECGKGFSYSHKLTIHRRVHTGEKPYECKECGKAFSVSGQLTQHLSIHSGKKPFECNKCGKSFRFISVLKAHQNIHSAEKPYECKECGKAFRHATSLIYHDRTHAGEKSYECKECGETFSHASHLIIHERIHTSDKPYECKRCGKAFHCASYLVRHESVHADGNPYMCEECGKAFNSSHELSIHHRVHTGEKPFKCNKCRRSFRLRSILEVHQRIHI

SEQ ID NO: 19310 - protein, 393 aa, Homo sapiens
MHRVCFLSFQTRKQHSEATNSSNRVFVYCAFLDFSSGEGVWSNHGCALTRGNLTYSVCRCTHLTNFAILMQVVPLELARGHQVALSSISYVGCSLSVLCLVATLVTFAVLSSVSTIRNQRYHIHANLSFAVLVAQVLLLISFRLEPGTTPCQVMAVLLHYFFLSAFAWMLVEGLHLYSMVIKVFGSEDSKHRYYYGMGWGFPLLICIISLSFAMDSYGTSNNCWLSLASGAIWAFVAPALFVIVVNIGILIAVTRVISQISADNYKIHGDPSAFKLTAKAVAVLLPILGTSWVFGVLAVNGCAVVFQYMFATLNSLQGLFIFLFHCLLNSEVRAAFKHKTKVWSLTSSSARTSNAKPFHSDLMNGTRPGMASTKLSPWDKSSHSAHRVDLSAV

SEQ ID NO: 19311 - protein, 1286 aa, Homo sapiens
MAEAGLRGWLLWALLLRLAQSEPYTTIHQPGYCAFYDECGKNPELSGSLMTLSNVSCLSNTPARKITGDHLILLQKICPRLYTGPNTQACCSAKQLVSLEASLSITKALLTRCPACSDNFVNLHCHNTCSPNQSLFINVTRVAQLGAGQLPAVVAYEAFYQHSFAEQSYDSCSRVRVPAAATLAVGTMCGVYGSALCNAQRWLNFQGDTGNGLAPLDITFHLLEPGQAVGSGIQPLNEGVARCNESQGDDVATCSCQDCAASCPAIARPQALDSTFYLGQMPGSLVLIIILCSVFAVVTILLVGFRVAPARDKSKMVDPKKGTSLSDKLSFSTHTLLGQFFQGWGTWVASWPLTILVLSVIPVVALAAGLVFTELTTDPVELWSAPNSQARSEKAFHDQHFGPFFRTNQVILTAPNRSSYRYDSLLLGPKNFSGILDLDLLLELLELQERLRHLQVWSPEAQRNISLQDICYAPLNPDNTSLYDCCINSLLQYFQNNRTLLLLTANQTLMGQTSQVDWKDHFLYCANAPLTFKDGTALALSCMADYGAPVFPFLAIGGYKGKDYSEAEALIMTFSLNNYPAGDPRLAQAKLWEEAFLEEMRAFQRRMAGMFQVTFMAERSLEDEINRTTAEDLPIFATSYIVIFLYISLALGSYSSWSRVMVDSKATLGLGGVAVVLGAVMAAMGFFSYLGIRSSLVILQVVPFLVLSVGADNIFIFVLEYQRLPRRPGEPREVHIGRALGRVAPSMLLCSLSEAICFFLGALTPMPAVRTFALTSGLAVILDFLLQMSAFVALLSLDSKRQEASRLDVCCCVKPQELPPPGQGEGLLLGFFQKAYAPFLLHWITRGVVVGAPVYFVTTLGYNFSSEAGMNAICSSAGCNNFSFTQKIQYATEFPEQSYLAIPASSWVDDFIDWLTPSSCCRLYISGPNKDKFCPSTVNSLNCLKNCMSITMGSVRPSVEQFHKYLPWFLNDRPNIKCPKGGLAAYSTSVNLTSDGQVLASRFMAYHKPLKNSQDYTEALRAARELAANITADLRKVPGTDPAFEVFPYTITNVFYEQYLTILPEGLFMLSLCLVPTFAVSCLLLGLDLRSGLLNLLSIVMILVDTVGFMALWGISYNAVSLINLVSAVGMSVEFVSHITRSFAISTKPTWLERAKEATISMGSAVFAGVAMTNLPGILVLGLAKAQLIQIFFFRLNLLITLLGLLHGLVFLPVILSYVGPDVNPALALEQKRAEEAVAAVMVASCPNHPSRVSTADNIYVNHSFEGSIKGAGAISNFLPNNGRQF

SEQ ID NO: 19312 - protein, 353 aa, Homo sapiens
MEEEGKKGKKPGIVSPFKRVFLKGEKSRDKKAHEKVTERRPLHTVVLSLPERVEPDRLLSDYIEKEVKYLGQLTSIPGYLNPSSRTEILHFIDNAKRAHQLPGHLTQEHDAVLSLSAYNVKLAWRDGEDIILRVPIHDIAAVSYVRDDAAHLVVLKTDDSSTKVDIKETYEVEASTFCFPESVDVGGASPHSKTISESELSASATELLQDYMLTLRTKLSSQEIQQFAALLHEYRNGASIHEFCINLRQLYGDSRKFLLLGLRPFIPEKDSQHFENFLETIGVKDGRGIITDSFGRHRRALSTTSSSTTNGNRATGSSDDRSAPSEGDEWDRMISDISSDIEALGCSMDQDSA

SEQ ID NO: 19313 - protein, 792 aa, Homo sapiens
MVACRAIGILSRFSAFRILRSRGYICRNFTGSSALLTRTHINYGVKGDVAVVRINSPNSKVNTLSKELHSEFSEVMNEIWASDQIRSAVLISSKPGCFIAGADINMLAACKTLQEVTQLSQEAQRIVEKLEKSTKPIVAAINGSCLGGGLEVAISCQYRIATKDRKTVLGTPEVLLGALPGAGGTQRLPKMVGVPAALDMMLTGRSIRADRAKKMGLVDQLVEPLGPGLKPPEERTIEYLEEVAITFAKGLADKKISPKRDKGLVEKLTAYAMTIPFVRQQVYKKVEEKVRKQTKGLYPAPLKIIDVVKTGIEQGSDAGYLCESQKFGELVMTKESKALMGLYHGQVLCKKNKFGAPQKDVKHLAILGAGLMGAGIAQVSVDKGLKTILKDATLTALDRGQQQVFKGLNDKVKKKALTSFERDSIFSNLTGQLDYQGFEKADMVIEAVFEDLSLKHRVLKEVEAVIPDHCIFASNTSALPISEIAAVSKRPEKVIGMHYFSPVDKMQLLEIITTEKTSKDTSASAVAVGLKQGKVIIVVKDGPGFYTTRCLAPMMSEVIRILQEGVDPKKLDSLTTSFGFPVGAATLVDEVGVDVAKHVAEDLGKVFGERFGGGNPELLTQMVSKGFLGRKSGKGFYIYQEGVKRKDLNSDMDSILASLKLPPKSEVSSDEDIQFRLVTRFVNEAVMCLQEGILATPAEGDIGAVFGLGFPPCLGGWSRRLGRKLTLAWSPCCVSFNEVLFLYSGPFRFVDLYGAQKIVDRLKKYEAAYGKQFTPCQLLADHANSPNKKFYQ

SEQ ID NO: 19314 - protein, 842 aa, Homo sapiens
MALVLGSLLLLGLCGNSFSGGQPSSTDAPKAWNYELPATNYETQDSHKAGPIGILFELVHIFLYVVQPRDFPEDTLRKFLQKAYESKIDYDKPETVILGLKIVYYEAGIILCCVLGLLFIILMPLVGYFFCMCRCCNKCGGEMHQRQKENGPFLRKCFAISLLVICIIISIGIFYGFVANHQVRTRIKRSRKLADSNFKDLRTLLNETPEQIKYILAQYNTTKDKAFTDLNSINSVLGGGILDRLRPNIIPVLDEIKSMATAIKETKEALENMNSTLKSLHQQSTQLSSSLTSVKTSLRSSLNDPLCLVHPSSETCNSIRLSLSQLNSNPELRQLPPVDAELDNVNNVLRTDLDGLVQQGYQSLNDIPDRVQRQTTTVVAGIKRVLNSIGSDIDNVTQRLPIQDILSAFSVYVNNTESYIHRNLPTLEEYDSYWWLGGLVICSLLTLIVIFYYLGLLCGVCGYDRHATPTTRGCVSNTGGVFLMVGVGLSFLFCWILMIIVVLTFVFGANVEKLICEPYTSKELFRVLDTPYLLNEDWEYYLSGKLFNKSKMKLTFEQVYSDCKKNRGTYGTLHLQNSFNISEHLNINEHTGSISSELESLKVNLNIFLLGAAGRKNLQDFAACGIDRMNYDSYLAQTGKSPAGVNLLSFAYDLEAKANSLPPGNLRNSLKRDAQTIKTIHQQRVLPIEQSLSTLYQSVKILQRTGNGLLERVTRILASLDFAQNFITNNTSSVIIEETKKYGRTIIGYFEHYLQWIEFSISEKVASCKPVATALDTAVDVFLCSYIIDPLNLFWFGIGKATVFLLPALIFAVKLAKYYRRMDSEDVYDDVETIPMKNPSQH

SEQ ID NO: 19315 - protein, 1621 aa, Homo sapiens
MLGAPDESSVRVAVRIRPQLAKEKIEGCHICTSVTPGEPQVFLGKDKAFTFDYVFDIDSQQEQIYIQCIEKLIEGCFEGYNATVFAYGQTGAGKTYTMGTGFDVNIVEEELGIISRAVKHLFKSIEEKKHIAIKNGLPAPDFKVNAQFLELYNEEVLDLFDTTRDIDAKSKKSNIRIHEDSTGGIYTVGVTTRTVNTESEMMQCLKLGALSRTTASTQMNVQSSRSHAIFTIHVCQTRVCPQIDADNATDNKIISESAQMNEFETLTAKFHFVDLAGSERLKRTGATGERAKEGISINCGLLALGNVISALGDKSKRATHVPYRDSKLTRLLQDSLGGNSQTIMIACVSPSDRDFMETLNTLKYANRARNIKNKVMVNQDRASQQINALRSEITRLQMELMEYKTGKRIIDEEGVESINDMFHENAMLQTENNNLRVRIKAMQETVDALRSRITQLVSDQANHVLARAGEGNEEISNMIHSYIKEIEDLRAKLLESEAVNENLRKNLTRATARAPYFSGSSTFSPTILSSDKETIEIIDLAKKDLEKLKRKEKRKKKSVAGKEDNTDTDQEKKEEKGVSERENNELEVEESQEVSDHEDEEEEEEEEEDDIDGGESSDESDSESDEKANYQADLANITCEIAIKQKLIDELENSQKRLQTLKKQYEEKLMMLQHKIRDTQLERDQVLQNLGSVESYSEEKAKKVRSEYEKKLQAMNKELQRLQAAQKEHARLLKNQSQYEKQLKKLQQDVMEMKKTKVRLMKQMKEEQEKARLTESRRNREIAQLKKDQRKRDVTALRRQVRPMSDKVAGKVTRKLSSSDAPAQDTGSSAAAVETDASRTGAQQKMRIPVARVQALPTPATNGNRKKYQRKGLTGRVFISKTARMKWQLLERRVTDIIMQKMTISNMEADMNRLLKQREELTKRREKLSKRREKIVKENGEGDKNVANINEEMESLTANIDYINDSISDCQANIMQMEEAKEEGETLDVTAVINACTLTEARYLLDHFLSMGINKGLQAAQKEAQIKVLEGRLKQTEITSATQNQLLFHMLKEKAELNPELDALLGHALQDLDSVPLENVEDSTDEDAPLNSPGSEGSTLSSDLMKLCGEVKPKNKARRRTTTQMELLYADSSELASDTSTGDASLPGPLTPVAEGQEIGMNTETSGTSAREKELSPPPGLPSKIGSISRQSSLSEKKIPEPSPVTRRKAYEKAEKSKAKEQKHSDSGTSEASLSPPSSPPSRPRNELNVFNRLTVSQGNTSVQQDKGIINPFPASKGIRAFPLQCIHIAEGHTKAVLCVDSTDDLLFTGSKDRTCKVWNLVTGQEIMSLGGHPNNVVSVKYCNYTSLVFTVSTSYIKVWDIRDSAKCIRTLTSSGQVTLGDACSASTSRTVAIPSGENQINQIALNPTGTFLYAASGNAVRMWDLKRFQSTGKLTGHLGPVMCLTVDQISSGQDLIITGSKDHYIKMFDVTEGALGTVSPTHNFEPPHYDGIEALTIQGDNLFSGSRDNGIKKWDLTQKDLLQQVPNAHKDWVCALGVVPDHPVLLSGCRGGILKVWNMDTFMPVGEMKGHDSPINAICVNSTHIFTAADDRTVRIWKARNLQDGQISDTGDLGEDIASN

SEQ ID NO: 19316 - protein, 723 aa, Homo sapiens
MAEAEGESLESWLNKATNPSNRQEDWEYIIGFCDQINKELEGPQIAVRLLAHKIQSPQEWEALQALTVLEACMKNCGRRFHNEVGKFRFLNELIKVVSPKYLGDRVSEKVKTKVIELLYSWTMALPEEAKIKDAYHMLKRQGIVQSDPPIPVDRTLIPSPPPRPKNPVFDDEEKSKLLAKLLKSKNPDDLQEANKLIKSMVKEDEARIQKVTKRLHTLEEVNNNVRLLSEMLLHYSQEDSSDGDRELMKELFDQCENKRRTLFKLASETEDNDNSLGDILQASDNLSRVINSYKTIIEGQVINGEVATLTLPDSEGNSQCSNQGTLIDLAELDTTNSLSSVLAPAPTPPSSGIPILPPPPQASGPPRSRSSSQAEATLGPSSTSNALSWLDEELLCLGLADPAPNVPPKESAGNSQWHLLQREQSDLDFFSPRPGTAACGASDAPLLQPSAPSSSSSQAPLPPPFPAPVVPASVPAPSAGSSLFSTGVAPALAPKVEPAVPGHHGLALGNSALHHLDALDQLLEEAKVTSGLVKPTTSPLIPTTTPARPLLPFSTGPGSPLFQPLSFQSQGSPPKGPELSLASIHVPLESIKPSSALPVTAYDKNGFRILFHFAKECPPGRPDVLVVVVSMLNTAPLPVKSIVLQAAVPKSMKVKLQPPSGTELSPFSPIQPPAAITQVMLLANPLKEKVRLRYKLTFALGEQLSTEVGEVDQFPPVEQWGNL

SEQ ID NO: 19317 - protein, 335 aa, Homo sapiens
MADTPRDAGLKQAPASRNEKAPVDFGYVGIDSILEQMRRKAMKQGFEFNIMVVGQSGLGKSTLINTLFKSKISRKSVQPTSEERIPKTIEIKSITHDIEEKGVRMKLTVIDTPGFGDHINNENCWQPIMKFINDQYEKYLQEEVNINRKKRIPDTRVHCCLYFIPATGHSLRPLDIEFMKRLSKVVNIVPVIAKADTLTLEERVHFKQRITADLLSNGIDVYPQKEFDEDSEDRLVNEKFREMIPFAVVGSDHEYQVNGKRILGRKTKWGTIEVENTTHCEFAYLRDLLIRTHMQNIKDITSSIHFEAYRVKRLNEGSSAMANGMEEKEPEAPEM

SEQ ID NO: 19318 - protein, 870 aa, Homo sapiens
MALKNINYLLIFYLSFSLLIYIKNSFCNKNNTRCLSNSCQNNSTCKDFSKDNDCSCSDTANNLDKDCDNMKDPCFSNPCQGSATCVNTPGERSFLCKCPPGYSGTICETTIGSCGKNSCQHGGICHQDPIYPVCICPAGYAGRFCEIDHDECASSPCQNGAVCQDGIDGYSCFCVPGYQGRHCDLEVDECASDPCKNEATCLNEIGRYTCICPHNYSGVNCELEIDECWSQPCLNGATCQDALGAYFCDCAPGFLGDHCELNTDECASQPCLHGGLCVDGENRYSCNCTGSGFTGTHCETLMPLCWSKPCHNNATCEDSVDNYTCHCWPGYTGAQCEIDLNECNSNPCQSNGECVELSSEKQYGRITGLPSSFSYHEASGYVCICQPGFTGIHCEEDVNECSSNPCQNGGTCENLPGNYTCHCPFDNLSRTFYGGRDCSDILLGCTHQQCLNNGTCIPHFQDGQHGFSCLCPSGYTGSLCEIATTLSFEGDGFLWVKSGSVTTKGSVCNIALRFQTVQPMALLLFRSNRDVFVKLELLSGYIHLSIQVNNQSKVLLFISHNTSDGEWHFVEVIFAEAVTLTLIDDSCKEKCIAKAPTPLESDQSICAFQNSFLGGLPVGMTSNGVALLNFYNMPSTPSFVGCLQDIKIDWNHITLENISSGSSLNVKAGCVRKDWCESQPCQSRGRCINLWLSYQCDCHRPYEGPNCLRGKFCRQSRLPSTVCGNEKTNLTCYNGGNCTEFQTELKCMCRPGFTGEWCEKDIDECASDPCVNGGLCQDLLNKFQCLCDVAFAGERCEVDLADDLISDIFTTIGSVTVALLLILLLAIVASVVTSNKRATQGTYSPSRQEKEGSRVEMWNLMPPPAMERLI

SEQ ID NO: 19319 - protein, 1838 aa, Homo sapiens
MGAMTQLLAGVFLAFLALATEGGVLKKVIRHKRQSGVNATLPEENQPVVFNHVYNIKLPVGSQCSVDLESASGEKDLAPPSEPSESFQEHTVDGENQIVFTHRINIPRRACGCAAAPDVKELLSRLEELENLVSSLREQCTAGAGCCLQPATGRLDTRPFCSGRGNFSTEGCGCVCEPGWKGPNCSEPECPGNCHLRGRCIDGQCICDDGFTGEDCSQLACPSDCNDQGKCVNGVCICFEGYAGADCSREICPVPCSEEHGTCVDGLCVCHDGFAGDDCNKPLCLNNCYNRGRCVENECVCDEGFTGEDCSELICPNDCFDRGRCINGTCYCEEGFTGEDCGKPTCPHACHTQGRCEEGQCVCDEGFAGVDCSEKRCPADCHNRGRCVDGRCECDDGFTGADCGELKCPNGCSGHGRCVNGQCVCDEGYTGEDCSQLRCPNDCHSRGRCVEGKCVCEQGFKGYDCSDMSCPNDCHQHGRCVNGMCVCDDGYTGEDCRDRQCPRDCSNRGLCVDGQCVCEDGFTGPDCAELSCPNDCHGQGRCVNGQCVCHEGFMGKDCKEQRCPSDCHGQGRCVDGQCICHEGFTGLDCGQHSCPSDCNNLGQCVSGRCICNEGYSGEDCSEVSPPKDLVVTEVTEETVNLAWDNEMRVTEYLVVYTPTHEGGLEMQFRVPGDQTSTIIQELEPGVEYFIRVFAILENKKSIPVSARVATYLPAPEGLKFKSIKETSVEVEWDPLDIAFETWEIIFRNMNKEDEGEITKSLRRPETSYRQTGLAPGQEYEISLHIVKNNTRGPGLKRVTTTRLDAPSQIEVKDVTDTTALITWFKPLAEIDGIELTYGIKDVPGDRTTIDLTEDENQYSIGNLKPDTEYEVSLISRRGDMSSNPAKETFTTGLDAPRNLRRVSQTDNSITLEWRNGKAAIDSYRIKYAPISGGDHAEVDVPKSQQATTKTTLTGLRPGTEYGIGVSAVKEDKESNPATINAATELDTPKDLQVSETAETSLTLLWKTPLAKFDRYRLNYSLPTGQWVGVQLPRNTTSYVLRGLEPGQEYNVLLTAEKGRHKSKPARVKASTAKEPEIGNLNVSDITPESFNLSWMATDGIFETFTIEIIDSNRLLETVEYNISGAERTAHISGLPPSTDFIVYLSGLAPSIRTKTISATATTEPKPQLGTLIFSNITPKSFNMSWTTQAGLFAKIVINVSDAHSLHESQQFTVSGDAKQAHITGLVENTGYDVSVAGTTLAGDPTRPLTAFVITEAEPEVDNLLVSDATPDGFRLSWTADEGVFDNFVLKIRDTKKQSEPLEITLLAPERTRDITGLREATEYEIELYGISKGRRSQTVSAIATTAMGSPKEVIFSDITENSATVSWRAPTAQVESFRITYVPITGGTPSMVTVDGTKTQTRLVKLIPGVEYLVSIIAMKGFEESEPVSGSFTTALDGPSGLVTANITDSEALARWQPAIATVDSYVISYTGEKVPEITRTVSGNTVEYALTDLEPATEYTLRIFAEKGPQKSSTITAKFTTDLDSPRDLTATEVQSETALLTWRPPRASVTGYLLVYESVDGTVKEVIVGPDTTSYSLADLSPSTHYTAKIQALNGPLRSNMIQTIFTTIGLLYPFPKDCSQAMLNGDTTSGLYTIYLNGDKAEALEVFCDMTSDGGGWIVFLRRKNGRENFYQNWKAYAAGFGDRREEFWLGLDNLNKITAQGQYELRVDLRDHGETAFAVYDKFSVGDAKTRYKLKVEGYSGTAGDSMAYHNGRSFSTFDKDTDSAITNCALSYKGAFWYRNCHRVNLMGRYGDNNHSQGVNWFHWKGHEHSIQFAEMKLRPSNFRNLEGRRKRA

SEQ ID NO: 19320 - protein, 200 aa, Homo sapiens
MLSEVLLVSAPGKVILHGEHAVVHGKVALAVSLNLRTFLRLQPHSNGKVDLSLPNIGIKRAWDVARLQSLDTSFLEQGDVTTPTSEQVEKLKEVAGLPDDCAVTERLAVLAFLYLYLSICRKQRALPSLDIVVWSELPPGAGLGSSAAYSVCLAAALLTVCEEIPNPLKDGDCVNRWTKEDLELINKWAFQGERMIHGNP

SEQ ID NO: 19321 - protein, 437 aa, Homo sapiens
MPGFDYKFLEKPKRRLLCPLCGKPMREPVQVSTCGHRFCDTCLQEFLSEGVFKCPEDQLPLDYAKIYPDPELEVQVLGLPIRCIHSEEGCRWSGPLRHLQGHLNTCSFNVIPCPNRCPMKLSRRDLPAHLQHDCPKRRLKCEFCGCDFSGEAYESHEGMCPQESVYCENKCGARMMRRLLAQHATSECPKRTQPCTYCTKEFVFDTIQSHQYQCPRLPVACPNQCGVGTVAREDLPGHLKDSCNTALVLCPFKDSGCKHRCPKLAMARHVEESVKPHLAMMCALVSRQRQELQELRRELEELSVGSDGVLIWKIGSYGRRLQEAKAKPNLECFSPAFYTHKYGYKLQVSAFLNGNGSGEGTHLSLYIRVLPGAFDNLLEWPFARRGLSPFLGRADMPWCRSHSTRTEVPAQVLCPKSHKGVGIGEGERVVQRVCLEI

SEQ ID NO: 19322 - protein, 821 aa, Homo sapiens
MAEANPRRGKMRFRRNAASFPGNLHLVLVLRPTSFLQRTFTDIGFWFSQEDFMLKLPAIENFALTVKEMAQMLQSFGTELAETELPDDIPSIEEILAIRAERYHLLKNDITAVTKEGKILLTNLEVPDTEGAVSSRLECHRQISGDWQTINKLLTQVHDMETAFDGFWEKHQLKMEQYLQLWKFEQDFQQLVTEVEFLLNQQAELADVTGTIAQVKQKIKKLENLDENSQELLSKAQFVILHGHKLAANHHYALDLICQRCNELRYLSDILVNEIKAKRIQLSRTFKMHKLLQQARQCCDEGECLLANQEIDKFQSKEDAQKALQDIENFLEMALPFINYEPETLQYEFDVILSPELKVQMKTIQLKLENIRSIFENQQAGFRNLADKHVRPIQFVVPTPENLVTSGTPFFSSKQGKKTWRQNQSNLKIEVVPDCQEKRSSGPSSSLDNGNSLDVLKNHVLNELIQTERVYVRELYTVLLGYRAEMDNPEMFDLMPPLLRNKKDILFGNMAEIYEFHNDIFLSSLENCAHAPERVGPCFLERKDDFQMYAKYCQNKPRSETIWRKYSECAFFQECQRKLKHRLRLDSYLLKPVQRITKYQLLLKELLKYSKDCEGSALLKKALDAMLDLLKSVNDSMHQIAINGYIGNLNELGKMIMQGGFSVWIGHKKGATKMKDLARFKPMQRHLFLYEKAIVFCKRRVESGEGSDRYPSYSFKHCWKMDEVGITEYVKGDNRKFEIWYGEKEEVYIVQASNVDVKMTWLKEIRNILLKQQELLTVKKRKQQDQLTERDKFQISLQQNDEDLCRRWLSYIDEATMSNGK

SEQ ID NO: 19323 - protein, 351 aa, Homo sapiens
MLTARCLSDDTLAHLEAAGHVCVLKDAFDFESRSEIANLILAENCEAALALHLYRGGRLLQGHRIPFGVIFGGTDVNEDANQAEKNTVMGRVLEEARFAVAFTESMKEMAQAQWKARQISLAVTSAVPVQPHAKGKVYVQSQGIATTPNAAFNWNTFLQRSEINQSADNLHIFLLICGLRQVKDPLYLVDAFSAWHQEEPNVHLVIVGPEVDPVFTREVKAKVKRAAGVRLIGEMPQEDLHAVVKNCFAVVNSSVSEGMSAAILEAMDLEVPVLARNIPGNAAVVKHEVTGLLFSNPQEFVHLAKRLVSDPALEKEIVVNGREYVRMYHSWQVERDTYQQLIRKLEGSTED

SEQ ID NO: 19324 - protein, 544 aa, Homo sapiens
MSGSRERDNMLHLHHSWTPNIDRLAEDGVKLTQHISAASLCTPSRAAFLTGRYPVRSGMVSSIGYRVLQWTGASGGLPTNETTFAKILKEKGYATGLIGKWHLGLNCESASDHCHHPLHHGFDHFYGMPFSLMGDCARWELSEKRVNLEQKLNFLFQVLALVALTLVAGKLTHLIPVSWMPVIWSALSAVLLLASSYFVGALIVHADCFLMRNHTITEQPMCFQRTTPLILQEVASFLKRNKHGPFLLFVSFLHVHIPLITMENFLGKSLHGLYGDNVEEMDWMVGRILDTLDVEGLSNSTLIYFTSDHGGSLENQLGNTQYGGWNGIYKGGKGMGGWEGGIRVPGIFRWPGVLPAGRVIGEPTSLMDVFPTVVRLAGGEVPQDRVIDGQDLLPLLLGTAQHSDHEFLMHYCERFLHAARWHQRDRGTMWKVHFVTPVFQPEGAGACYGRKVCPCFGEKVVHHDPPLLFDLSRDPSETHILTPASEPVFYQVMERVQQAVWEHQRTLSPVPLQLDRLGNIWRPWLQPCCGPFPLCWCLREDDPQ

SEQ ID NO: 19325 - protein, 445 aa, Homo sapiens
MDPLNLSWYDDDLERQNWSRPFNGSDGKADRPHYNYYATLLTLLIAVIVFGNVLVCMAVSREKALQTTTNYLIVSLAVADLLVATLVMPWVVYLEVVGEWKFSRIHCDIFVTLDVMMCTASILNLCAISIDRYTAVAMPMLYNTRYSSKRRVTVMISIVWVLSFTISCPLLFGLNNADQNECIIANPAFVVYSSIVSFYVPFIVTLLVYIKIYIVLRRRRKRVNTKRSSRAFRAHLRAPLKGNCTHPEDMKLCTVIMKSNGSFPVNRRRVVQEAARRAQELEMEMLSSTSPPERTRYSPIPPSHHQLTLPDPSHHGLHSTPDSPAKPEKNGHAKDHPKIAKIFEIQTMPNGKTRTSLKTMSRRKLSQQKEKKATQMLAIVLGVFIICWLPFFITHILNIHCDCNIPPVLYSAFTWLGYVNSAVNPIIYTTFNIEFRKAFLKILHC

SEQ ID NO: 19326 - protein, 576 aa, Homo sapiens
MTMDTESEIDPCKVDGTCPEVIKVYIFKADPGEDDLGGTVDIVESEPENDHGVELLDQNSSIRVPREKMVYMTVNDSQPEDEDLNVAEIADEVYMEVIVGEEDAAAAAAAAAVHEQQMDDNEIKTFMPIAWAAAYGNNSDGIENRNGTASALLHIDESAGLGRLAKQKPKKRRRPDSRQYQTAIIIGPDGHPLTVYPCMICGKKFKSRGFLKRHMKNHPEHLAKKKYRCTDCDYTTNKKISLHNHLESHKLTSKAEKAIECDECGKHFSHAGALFTHKMVHKEKGANKMHKCKFCEYETAEQGLLNRHLLAVHSKNFPHICVECGKGFRHPSELKKHMRIHTGEKPYQCQYCEYRSADSSNLKTHVKTKHSKEMPFKCDICLLTFSDTKEVQQHALIHQESKTHQCLHCDHKSSNSSDLKRHIISVHTKDYPHKCDMCDKGFHRPSELKKHVAAHKGKKMHQCRHCDFKIADPFVLSRHILSVHTKDLPFRCKRCRKGFRQQSELKKHMKTHSGRKVYQCEYCEYSTTDASGFKRHVISIHTKDYPHRCEYCKKGFRRPSEKNQHIMRHHKEVGLP

SEQ ID NO: 19327 - protein, 231 aa, Homo sapiens
MASLLKVDQEVKLKVDSFRERITSEAEDLVANFFPKKLLELDSFLKEPILNIHDLTQIHSDMNLPVPDPILLTNSHDGLDGPTYKKRRLDECEEAFQGTKVFVMPNGMLKSNQQLVDIIEKVKPEIRLLIEKCNTEETVAELRTVESEAASYLDQISRYYITRAKLVSKIAKYPHVEDYRRTVTEIDEKEYISLRLIISELRNQYVTLHDMILKNIEKIKRPRSSNAETLY

SEQ ID NO: 19328 - protein, 266 aa, Homo sapiens
MPAAGMPPLPQSPPEIPPQGPPKISPQGPPQSPPQSPLDSCSSPLLWTRLDEESSSEEEDTATWHALPESESLPRYALDEKVAELVQFLLLKYQTKEPVTKAEMLTTVIKKYKDYFPMIFGKAHEFIELIFGIALTDMDPDNHSYFFEDTLDLTYEGSLIDDQGMPKNCLLILILSMIFIKGSCVPEEVIWEVLSAIGVCAGREHFIYGDPRKLLTIHWVQRKYLEYREVPNSAPPRYEFLWGPRAHSEASKRSLRVFIQAIQYHP

SEQ ID NO: 19329 - protein, 1221 aa, Homo sapiens
MKTAQALHRMWIQAVKKLRRWKGRVSPSASSPLVFPNLSSWEGEGSKTILTAPGMEELIWEQYTVTLQKDSKRGFGIAVSGGRDNPHFENGETSIVISDVLPGGPADGLLQENDRVVMVNGTPMEDVLHSFAVQQLRKSGKVAAIVVKRPRKVQVAALQASPPLDQDDRAFEVMDEFDGRSFRSGYSERSRLNSHGGRSRSWEDSPERGRPHERARSRERDLSRDRSRGRSLERGLDQDHARTRDRSRGRSLERGLDHDFGPSRDRDRDRSRGRSIDQDYERAYHRAYDPDYERAYSPEYRRGARHDARSRGPRSRSREHPHSRSPSPEPRGRPGPIGVLLMKSRANEEYGLRLGSQIFVKEMTRTGLATKDGNLHEGDIILKINGTVTENMSLTDARKLIEKSRGKLQLVVLRDSQQTLINIPSLNDSDSEIEDISEIESNRSFSPEERRHQYSDYDYHSSSEKLKERPSSREDTPSRLSRMGATPTPFKSTGDIAGTVVPETNKEPRYQEDPPAPQPKAAPRTFLRPSPEDEAIYGPNTKMVRFKKGDSVGLRLAGGNDVGIFVAGIQEGTSAEQEGLQEGDQILKVNTQDFRGLVREDAVLYLLEIPKGEMVTILAQSRADVYRDILACGRGDSFFIRSHFECEKETPQSLAFTRGEVFRVVDTLYDGKLGNWLAVRIGNELEKGLIPNKSRAEQMASVQNAQRDNAGDRADFWRMRGQRSGVKKNLRKSREDLTAVVSVSTKFPAYERVLLREAGFKRPVVLFGPIADIAMEKLANELPDWFQTAKTEPKDAGSEKSTGVVRLNTVRQIIEQDKHALLDVTPKAVDLLNYTQWFPIVIFFNPDSRQGVKTMRQRLNPTSNKSSRKLFDQANKLKKTCAHLFTATINLNSANDSWFGSLKDTIQHQQGEAVWVSEGKMEGMDDDPEDRMSYLTAMGADYLSCDSRLISDFEDTDGEGGAYTDNELDEPAEEPLVSSITRSSEPVQHEESIRKPSPEPRAQMRRAASSDQLRDNSPPPAFKPEPPKAKTQNKEESYDFSKSYEYKSNPSAVAGNETPGASTKGYPPPVAAKPTFGRSILKPSTPIPPQEGEEVGESSEEQDNAPKSVLGKVKIFEKMDHKARLQRMQELQEAQNARIEIAQKHPDIYAVPIKTHKPDPGTPQHTSSRPPEPQKAPSRPYQDTRGSYGSDAEEEEYRQQLSEHSKRGYYGQSARYRDTEL

SEQ ID NO: 19330 - protein, 560 aa, Homo sapiens
MASVFHYFLLVLVFLDTHAAQPFCLPGCTCSEESFGRTLQCTSVSLGKIPGNLSEEFKQVRIENSPLFEMPQGSFINMSTLEYLWLNFNNISVIHLGALEHLPELRELRLEGNKLCSVPWTAFRATPLLRVLDLKRNKIDALPELALQFLVSLTYLDLSSNRLTVVSKSVFLNWPAYQKCRQPDCGAEILSSLVVALHDNPWVCDCRLRGLVQFVKSITLPVILVNSYLICQGPLSKAGQLFHETELSACMKPQISTPSANITIRAGQNVTLRCLAQASPSPSIAWTYPLSMWREFDGLLGGKHLTPVLTSSTGEDTALSELAIPAAHLVDSGNYTCMASNSIGKSNLVISLHVQPAQALHAPDSLSIPSEGNAYIDLRVVKQTVHGILLEWLAVADTSKEEWFTLYIASDEAFRKEVVHIGPGINTYAVDDLLPGTKYEACLSLEGQPPHQGQCVAFVTGRDAGGLEAREHLLHVTVVLCVVLLAVPVGAYAWAAQGPCSCSKWVLRGCLHRRKAPSCTPAAPQSKDGSFREHPAVCDDGEGHIDTEGDKEKGGTEDNS

SEQ ID NO: 19331 - protein, 528 aa, Homo sapiens
MQASPLQTSQPTPPEELHAAAYVFTNDGQQMRSDEVNLVATGHQSKKKHSRKSKRHSSSKRRKSMSSWLDKQEDAAVTHSICEERINNGQPVADNVLSTAPPWPDATIAHNIREERMENGQSRTDKVLSTAPPQLVHMAAAGIPSMSTRDLHATVTQNVHEERMENNQPQPSYDLSTVLPGLTYLTVAGIPAMSTRDQYATVTHNVHEEKIKNGQAASDNVFSTVPPAFINMAATGVSSMSTRDQYAAVTHNIREEKINNSQPAPGNILSTAPPWLRHMAAAGISSTITRDLYVTATHSVHEEKMTNGQQAPDNSLSTVPPGCINLSGAGISCRSTRDLYATVIHDIQEEEMENDQTPPDGFLSNSDSPELINMTGHCMPPNALDSFSHDFTSLSKDELLYKPDSNEFAVGTKNYSVSAGDPPVTVMSLVETVPNTPQISPAMAKKINDDIKYQLMKEVRRFGQNYERIFILLEEVQGSMKVKRQFVEFTIKEAARFKKVVLIQQLEKALKEIDSHCHLRKVKHMRKR

SEQ ID NO: 19332 - protein, 96 aa, Homo sapiens
MAATNLENQLHSAQKNLLFLQREHASTLKGLHSEIRRLQQHCTDLTYELTVKSSEQTGDGTSKSSELKKRCEELEAQLKVKENENAELLKELEQKN

SEQ ID NO: 19333 - protein, 1055 aa, Homo sapiens
MASLEEPLAPRPQGPLPAAGDEPGCGPGKLRPEPRLSAAGGGSAAGPGPAPEWPGRGRAERAAPPRPPLSSAGRPSPAGGPGALSARGGGCGWVAARAPLALAFSSRVPSSSPSFFYFWPPPPPPPPSFLPSSSAFHLPVRLPGREGAAAAAAAGGGGDAGGGGGGGQEAAPLSVPTSSSHRGGGGSGGGRRRLFLSPALQGLLLPARAGPRPPPPPRLPLGQAARRAGSPGFPGAGPGGGGQTPRRPQGASFALAAAAALLFGSDMEDGPSNNASCFRRLTECFLSPSLTDEKVKAYLSLHPQVLDEFVSESVSAETVEKWLKRKNNKSEDESAPKEVSRYQDTNMQGVVYELNSYIEQRLDTGGDNQLLLYELSSIIKIATKADGFALYFLGECNNSLCIFTPPGIKEGKPRLIPAGPITQGTTVSAYVAKSRKTLLVEDILGDERFPRGTGLESGTRIQSVLCLPIVTAIGDLIGILELYRHWGKEAFCLSHQEVATANLAWASVAIHQVQVCRGLAKQTELNDFLLDVSKTYFDNIVAIDSLLEHIMIYAKNLVNADRCALFQVDHKNKELYSDLFDIGEEKEGKPVFKKTKEIRFSIEKGIAGQVARTGEVLNIPDAYADPRFNREVDLYTGYTTRNILCMPIVSRGSVIGVVQMVNKISGSAFSKTDENNFKMFAVFCALALHCANMYHRIRHSECIYRVTMEKLSYHSICTSEEWQGLMQFTLPVRLCKEIELFHFDIGPFENMWPGIFVYMVHRSCGTSCFELEKLCRFIMSVKKNYRRVPYHNWKHAVTVAHCMYAILQNNHTLFTDLERKGLLIACLCHDLDHRGFSNSYLQKFDHPLAALYSTSTMEQHHFSQTVSILQLEGHNIFSTLSSSEYEQVLEIIRKAIIATDLALYFGNRKQLEEMYQTGSLNLNNQSHRDRVIGLMMTACDLCSVTKLWPVTKLTANDIYAEFWAEGDEMKKLGIQPIPMMDRDKKDEVPQGQLGFYNAVAIPCYTTLTQILPPTEPLLKACRDNLSQWEKVIRGEETATWISSPSVAQKAAASED

SEQ ID NO: 19334 - protein, 963 aa, Homo sapiens
MLIGKGSLVMEGQKHLNSKKKGLKASFSLSLTFTSRLAPDPSLVIYAIFPSGGVVADKIQFSVEMCFDNQVSLGFSPSQQLPGAEVELQLQAAPGSLCALRAVDESVLLLRPDRELSNRSVYGMFPFWYGHYPYQVAEYDQCPVSGPWDFPQPLIDPMPQGHSSQRSIIWRPSFSEGTDLFSFFRDVGLKILSNAKIKKPVDCSHRSPEYSTAMGAGGGHPEAFESSTPLHQAEDSQVRQYFPETWLWDLFPIGNSGKEAVHVTVPDAITEWKAMSFCTSQSRGFGLSPTVGLTAFKPFFVDLTLPYSVVRGESFRLTATIFNYLKDCIRVQTDLAKSHEYQLESWADSQTSSCLCADDAKTHHWNITAVKLGHINFTISTKILDSNEPCGGQKGFVPQKGRSDTLIKPVLVKPEGVLVEKTHSSLLCPKGKVASESVSLELPVDIVPDSTKAYVTVLGDIMGTALQNLDGLVQMPSGCGEQNMVLFAPIIYVLQYLEKAGLLTEEIRSRAVGFLEIGYQKELMYKHSNGSYSAFGERDGNGNTWLTAFVTKCFGQAQKFIFIDPKNIQDALKWMAGNQLPSGCYANVGNLLHTAMKGGVDDEVSLTAYVTAALLEMGKDVDDPMVSQGLRCLKNSATSTTNLYTQALLAYIFSLAGEMDIRNILLKQLDQQAIISGESIYWSQKPTPSSNASPWSEPAAVDVELTAYALLAQLTKPSLTQKEIAKATSIVAWLAKQHNAYGGFSSTQDTVVALQALAKYATTAYMPSEEINLVVKSTENFQRTFNIQSVNRLVFQQDTLPNVPGMYTLEASGQGCVYVQTVLRYNILPPTNMKTFSLSVEIGKARCEQPTSPRSLTLTIHTSYVGSRSSSNMAIVEVKMLSGFSPMEGTNQLLLQQPLVKKVEFGTDTLNIYLDELIKNTQTYTFTISQSVLVTNLKPATIKVYDYYLPDEQATIQYSDPCE

SEQ ID NO: 19335 - protein, 497 aa, Homo sapiens
MKNQCETVWLKSPIKLKLIFINNEWQNSESGRVFPVYNPATGEQVCEVQEADKADIDKAVQAARLAFSLGSVWRRMDASERGRLLDKLADLVERDRAVLATMESLNGGKPFLQAFYVDLQGVIKTFRYYAGWADKIHGMTIPVDGDYFTFTRHEPIGVCGQIIPWNFPLLMFAWKIAPALCCGNTVVIKPAEQTPLSALYMGALIKEAGFPPGVINILPGYGPTAGAAIASHIGIDKIAFTGSTEVGKLIQEAAGRSNLKRVTLELGGKSPNIIFADADLDYAVEQAHQGVFFNQGQCCTAGSRIFVEESIYEEFVRRSVERAKRRVVGSPFDPTTEQGPQIDKKQYNKILELIQSGVAEGAKLECGGKGLGRKGFFIEPTVFSNVTDDMRIAKEEIFGPVQEILRFKTMDEVIERANNSDFGLVAAVFTNDINKALTVSSAMQAGTVWINCYNALNAQSPFGGFKMSGNGREMGEFGLREYSEVKTVTVKIPQKNS

SEQ ID NO: 19336 - protein, 672 aa, Homo sapiens
MDTLAVALRVAEEAIEEAISKAEAYGDSLDKQNEASYLRDHKEELTEELATTILQKIIRKQKSKSEQQVEEEPGWPHPQSCSTKVADEGTSASPGGYRAPAALWRSQSAFSITGEEALKTPPVEAPSRQPRDQGQHPRAESALPSWKSVDRLDETNLAPVLQSPDGNWVALKDGAPPPTRLLAKPKSGTFQALEVASSVASAYDEMGSDSEEDFDWSEALSKLCPRSRALPRNPQPQPTQAQSSDQGPIAASPSSALSPNPEAMCSDSETSSAGSSREVGHQARLSWLQRKAPRNPAAEKMRLHGELDVNFNPQLASRETSDSSEPEEAPHTTDRRARRWRRARLGSEEPSKEPSSPSAQLRDLDTHQVSDDLSETDISNEARDPQTLTDTTEEKRRNRLYELAMKMSEKETSSGEDQESEPKTESENQKESLSSEDNSQSVQEELKKKFSAVSLCNISTEVLKVINATEELIAGSTGPWESPQVPPDRQKGMFPRGTDQVRLDEQLTSLEENVYLAAGTVYGLETQLTELEDAARCIHSGTDETHLADLEDQVATAAAQVHHAELQISDIESRISALTIAGLNIAPCVRFTRRRDQKQRTQVQTIDTSRQQRRKLPAPPVKAEKIETSSVTTIKTFNHNFILQGSSTNRTKERKGTTKDLMEPALESAVMY

SEQ ID NO: 19337 - protein, 411 aa, Homo sapiens
MNSEKSMHRKSTELVNEITCENTEWPGQRSTNFQIISSYPDDESVYCTTEKYNVMEHRHNDMHYECMTPCQVTSDSDKEKTIAFLLKELDILRTSNKKLQQKLAKEDKEQRKLKFKLELQEKETEAKIAEKTAALVEEVYFAQKERDEAVMSRLQLAIEERDEAIARAKHMEMSLKVLENINPEENDMTLQELLNRINNADTGIAIQKNGAIIVDRIYKTKECKMRITAEEMSALIEERDAALSKCKRLEQELHHVKEQNQTSANNMRHLTAENNQERALKAKLLSMQQARETAVQQYKKLEEEIQTLRVYYSLHKSLSQEENLKDQFNYTLSTYEEALKNRENIVSITQQQNEELATQLQQALTERANMELQLQHAREASQVANEKVQKLERLVDVLRKKVGTGTMRTVI

SEQ ID NO: 19338 - protein, 192 aa, Homo sapiens
MLFKTNEEKKTVQMMFKEAKFKMGYADEVHTQVLELPYVEEELSMVILLPDDNTDLAVVEKALTYEKFKAWTNSEKLTKSKVQVFLPRLKLEESYDLEPFLRRLGMIDAFDEAKADFSGMSTEKNVPLSKVAHKCFVEVNEEGTEAAAATAVVRNSRCSRMEPRFCADHPFLFFIRHHKTNCILFCGRFSSP

SEQ ID NO: 19339 - protein, 1054 aa, Homo sapiens
MGDTLSPGHGNHRESSPFLSPLEASRGIDYYDRNLALFEEELDIRPKVSSLLGKLVSYTNLTQGAKEHEEAESGEGTRRRAAEAPSMGTLMGVYLPCLQNIFGVILFLRLTWMVGTAGVLQALLIVLICCCCTLLTAISMSAIATNGVVPAGGSYFMISRSLGPEFGGAVGLCFYLGTTFAAAMYILGAIEILLTYIAPPAAIFYPSGAHDTSNATLNNMRVYGTIFLTFMTLVVFVGVKYVNKFASLFLACVIISILSIYAGGIKSIFDPPVFPVCMLGNRTLSRDQFDICAKTAVVDNETVATQLWSFFCHSPNLTTDSCDPYFMLNNVTEIPGIPGAAAGVLQENLWSAYLEKGDIVEKHGLPSADAPSLKESLPLYVVADIATSFTVLVGIFFPSVTGIMAGSNRSGDLRDAQKSIPVGTILAIITTSLVYFSSVVLFGACIEGVVLRDKYGDGVSRNLVVGTLAWPSPWVIVIGSFFSTCGAGLQSLTGAPRLLQAIAKDNIIPFLRVFGHGKVNGEPTWALLLTALIAELGILIASLDMVAPILSMFFLMCYLFVNLACAVQTLLRTPNWRPRFKYYHWALSFLGMSLCLALMFVSSWYYALVAMLIAGMIYKYIEYQGAEKEWGDGIRGLSLSAARYALLRLEEGPPHTKNWRPQLLVLLKLDEDLHVKYPRLLTFASQLKAGKGLTIVGSVIQGSFLESYGEAQAAEQTIKNMMEIEKVKGFCQVVVASKVREGLAHLIQSCGLGGMRHNSVVLGWPYGWRQSEDPRAWKTFIDTVRCTTAAHLALLVPKNIAFYPSNHERYLEGHIDVWWIVHDGGMLMLLPFLLRQHKVWRKCRMRIFTVAQMDDNSIQMKKDLAVFLYHLRLEAEVEVVEMHNSDISAYTYERTLMMEQRSQMLRQMRLTKTEREREAQLVKDRHSALRLESLYSDEEDESAVGADKIQMTWTRDKYMTETWDPSHAPDNFRELVHIKPDQSNVRRMHTAVKLNEVIVTRSHDARLVLLNMPGPPRNSEGDENYMEFLEVLTEGLERVLLVRGGGREVITIYS

SEQ ID NO: 19340 - protein, 783 aa, Homo sapiens
MRHLEGQLEEKNQELQRARQREKMNEEHNKRLSDTVDRLLTESNERLQLHLKERMAALEEKNVLIQESETFRKNLEESLHDKERLAEEIEKLRSELDQLKMRTGSLIEPTIPRTHLDTSAELRYSVGSLVDSQSDYRTTKVIRRPRRGRMGVRRDEPKVKSLGDHEWNRTQQIGVLSSHPFESDTEMSDIDDDDRETIFSSMDLLSPSGHSDAQTLAMMLQEQLDAINKEIRLIQEEKESTELRAEEIENRVASVSLEGLNLARVHPGTSITASVTASSLASSSPPSGHSTPKLTPRSPAREMDRMGVMTLPSDLRKHRRKIAVVEEDGREDKATIKCETSPPPTPRALRMTHTLPSSYHNDARSSLSVSLEPESLGLGSANSSQDSLHKAPKKKGIKSSIGRLFGKKEKARLGQLRGFMETEAAAQESLGLGKLGTQAEKDRRLKKKHELLEEARRKGLPFAQWDGPTVVAWLELWLGMPAWYVAACRANVKSGAIMSALSDTEIQREIGISNPLHRLKLRLAIQEMVSLTSPSAPPTSRTCPVFLQTLAYGDMNHEWIGNEWLPSLGLPQYRSYFMECLVDARMLDHLTKKDLRVHLKMVDSFHRTSLQYGIMCLKRLNYDRKELERRREASQHEIKDVLVWSNDRVIRWIQAIGLREYANNILESGVHGSLIALDENFDYSSLALLLQIPTQNTQARQILEREYNNLLALGTERRLDESDDKNFRRGSTWRRQFPPREVHGISMMPGSSETLPAGFRLTTTSGQSRKMTTDDGVFSVYST

SEQ ID NO: 19341 - protein, 412 aa, Homo sapiens
MGLSTVPDLLLPLVLLELLVGIYPSGVIGLVPHLGDREKRDSVCPQGKYIHPQNNSICCTKCHKEMGQVEISSCTVDRDTVCGCRKNQYRHYWSENLFQCFNCSLCLNGTVHLSCQEKQNTVCTCHAGFFLRENECVSCSNCKKSLECTKLCLPQIENVKGTEDSGTTVLLPLVIFFGLCLLSLLFIGLMYRYQRWKSKLYSIVCGKSTPEKEGELEGTTTKPLAPNPSFSPTPGFTPTLGFSPVPSSTFTSSSTYTPGDCPNFAAPRREVAPPYQGADPILATALASDPIPNPLQKWEDSAHKPQSLDTDDPATLYAVVENVPPLRWKEFVRRLGLSDHEIDRLELQNGRCLREAQYSMLATWRRRTPRREATLELLGRVLRDMDLLGCLEDIEEALCGPAALPPAPSLLR

SEQ ID NO: 19342 - protein, 95 aa, Homo sapiens
MGETEKRIETHRIRCLSKLKMFLLAITCAFVSKTLSGSYMNSMLTQIERQFNIPTSLVGFINGSFEIDMNMNLQFQFQATCPQTVSCVWKMEPRF

SEQ ID NO: 19343 - protein, 141 aa, Homo sapiens
MFRSDRMWSCHWKWKPSPLLFLFALYIMCVPHSAVWGCANCRVVLSNPSGTFTSPCYPNDYPNSQACMWTLRAPTGYIIQITFNDFDIEEAPNCIYDSLSLDNGESQTKFCGATAKGLSFNSSANEMHVSFSSDFSIQKKG

SEQ ID NO: 19344 - protein, 544 aa, Homo sapiens
MSPSSKSVSTPSEAGSQDSGDLGPLTRTLQWDTDPSVLQLQSDSELGRRLHKLGVSKVTQVDFLPREVVSYSKETQTPLATHQSEEDEEDEEMVESKVGQDSELENQDKKQEVKEAPPRELTEEEKQQILHSEEFLIFFDRTIRVIERALAEDSDIFFDYSGRELEEKDGDVQAGANLSFNRQFYDEHWSKHRVVTCMDWSLQYPELMVASYNNNEDAPHEPDGVALVWNMKFKKTTPEYVFHCQSSVMSVCFARFHPNLVVGGTYSGQIVLWDNRSHRRTPVQRTPLSAAAHTHPVYCVNVVGTQNAHNLITVSTDGKMCSWSLDMLSTPQESMELVYNKSKPVAVTGMAFPTGDVNNFVVGSEEGTVYTACRHGSKAGIGEVFEGHQGPVTGINCHMAVGPIDFSHLFVTSSFDWTVKLWTTKHNKPLYSFEDNADYVYDVMWSPVHPALFACVDGMGRLDLWNLNNDTEVPTASVAIEGASALNRVRWAQAGKEVAVGDSEGRIWVYDVGEGLAMLPGWSQNSWTQAILLCWPPKVLGLQT

SEQ ID NO: 19345 - protein, 355 aa, Homo sapiens
MAGPGGWRDREVTDLGHLPDPTGIFSLDKTIGLGTYGRIYLGLHEKTGAFTAVKVMNARKTPLPEIGRRVRVNKYQKSVGWRYSDEEEDLRTELNLLRKYSFHKNIVSFYGAFFKLSPPGQRHQLWMVMELCAAGSVTDVVRMTSNQSLKEDWIAYICREILQGLAHLHAHRVIHRDIKGQNVLLTHNAEVKLVDFGVSAQVSRTNGRRNSFIGTPYWMAPEVIDCDEDPRRSYDYRSDVWSVGITAIEMAEGAPPLCNLQPLEALFVILRESAPTVKSSGWSRKFHNFMEKCTIKNFLFRPTSANMLQHPFVRDIKNERHVVESLTRHLTGIIKKRQKKGFAVSQDHATALQPG

SEQ ID NO: 19346 - protein, 686 aa, Homo sapiens
MTYVSCFYHAFAGAEQVRQSLKAHSALWKDPPPESSTCSYQEMRRSSVNSSAMAETAANRICKVLAVNQENERLMEEYERLASELLEWIRRTIPWLENRTPEKTMQAMQKKLEDFRDYRRKHKPPKVQEKCQLEINFNTLQTKLRISNRPAFMPSEGKMVSDIAGAWQRLEQAEKGYEEWLLNEIRRLERLEHLAEKFRQKASTHETWAYGKEQILLQKDYESASLTEVRALLRKHEAFESDLAAHQDRVEQIAAIAQELNELDYHDAVNVNDRCQKICDQWDRLGTLTQKRREALERMEKLLETIDQLHLEFAKRAAPFNNWMEGAMEDLQDMFIVHSIEEIQSLITAHEQFKATLPEADGERQSIMAIQNEVEKVIQSYNIRISSSNPYSTVTMDELRTKWDKVKQLVPIRDQSLQEELARQHANERLRRQFAAQANAIGPWIQNKMEEIARSSIQITGALEDQMNQLKQYEHNIINYKNNIDKLEGDHQLIQEALVFDNKHTNYTMEHIRVGWELLLTTIARTINEVETQILTRDAKGITQEQMNEFRASFNHFDRRKNGLMDHEDFRACLISMGYDLGEAEFARIMTLVDPNGQGTVTFQSFIDFMTRETADTDTAEQVIASFRILASDKPYILAEELRRELPPDQAQYCIKRMPAYSGPGSVPGALDYAAFSSALYGESDL

SEQ ID NO: 19347 - protein, 1791 aa, Homo sapiens
MAGASVKVAVRVRPFNSREMSRDSKCIIQMSGSTTTIVNPKQPKETPKSFSFDYSYWSHTSPEDINYASQKQVYRDIGEEMLQHAFEGYNVCIFAYGQTGAGKSYTMMGKQEKDQQGIIPQLCEDLFSRINDTTNDNMSYSVEVSYMEIYCERVRDLLNPKNKGNLRVREHPLLGPYVEDLSKLAVTSYNDIQDLMDSGNKARTVAATNMNETSSRSHAVFNIIFTQKRHDAETNITTEKVSKISLVDLAGSERADSTGAKGTRLKEGANINKSLTTLGKVISALAEMDSGPNKNKKKKKTDFIPYRDSVLTWLLRENLGGNSRTAMVAALSPADINYDETLSTLRYADRAKQIRCNAVINEDPNNKLIRELKDEVTRLRDLLYAQGLGDITDTNTVPGGPKLTNALVGMSPSSSLSALSSRAASVSSLHERILFAPGSEEAIERLKETEKIIAELNETWEEKLRRTEAIRMEREALLAEMGVAMREDGGTLGVFSPKKTPHLVNLNEDPLMSECLLYYIKDGITRVGREDGERRQDIVLSGHFIKEEHCVFRSDSRGGSEAVVTLEPCEGADTYVNGKKVTEPSILRSGNRIIMGKSHVFRFNHPEQARQERERTPCAETPAEPVDWAFAQRELLEKQGIDMKQEMEQRLQELEDQYRREREEATYLLEQQRLDYESKLEALQKQMDSRYYPEVNEEEEEPEDEVQWTERECELALWAFRKWKWYQFTSLRDLLWGNAIFLKEANAISVELKKKVQFQFVLLTDTLYSPLPPDLLPPEAAKDRETRPFPRTIVAVEVQDQKNGATHYWTLEKLRQRLDLMREMYDRAAEVPSSVIEDCDNVVTGGDPFYDRFPWFRLVGSSAISGCNSYPLLNTCMSERMAALTPSPTFSSPDSDATEPAEEQSVGEEEEEEEEEEDEEEEDLEDDVFPEHALCDGRDPFYDRPPLFSLVGRAFVYLSNLLYPVPLVHRVAIVSEKGEVKGFLRVAVQAISADEEAPDYGSGVRQSGTAKISFDDQHFEKFQSESCPVVGMSRSGTSQEELRIVEGQGQGADVGPSADEVNNNTCSAVPPEGLLLDSSEKAALDGPLDAALDHLRLGNTFTFRVTVLQASSISAEYADIFCQFNFIHRHDEAFSTEPLKNTGRGPPLGFYHVQNIAVEVTKSFIEYIKSQPIVFEVFGHYQQHPFPPLCKDVLSPLRPSRRHFPRVMPLSKPVPATKLSTLTRPCPGPCHCKYDLLVYFEICELEANGDYIPAVVDHRGGMPCMGTFLLHQGIQRRITVTLLHETGSHIRWKEVRELVVGRIRNTPETDESLIDPNILSLNILSSGYIHPAQDDRTFYQFEAAWDSSMHNSLLLNRVTPYREKIYMTLSAYIEMENCTQPAVVTKDFCMVFYSRDAKLPASRSIRNLFGSGSLRASESNRVTGVYELSLCHVADAGSPGMQRRRRRVLDTSVAYVRGEENLAGWRPRSDSLILDHQWELEKLSLLQEVEKTRHYLLLREKLETAQRPVPEALSPAFSEDSESHGSSSASSPLSAEGRPSPLEAPNERQRELAVKCLRLLTHTFNREYTHSHVCVSASESKLSEMSVTLLRDPSMSPLGVATLTPSSTCPSLVEGRYGATDLRTPQPCSRPASPEPELLPEADSKKLPSPARATETDKEPQRLLVPDIQEIRVSPIVSKKGYLHFLEPHTSGWARRFVVVRRPYAYMYNSDKDTVERFVLNLATAQVEYSEDQQAMLKTPNTFAVCTEHRGILLQAASDKDMHDWLYAFNPLLAGTIRSKLSRRRSAQMRV

SEQ ID NO: 19348 - protein, 220 aa, Homo sapiens
MALIFRTAMQSVGLLLSLLGWILSIITTYLPHWKNLNLDLNEMENWTMGLWQTCVIQEEVGMQCKDFDSFLALPAELRVSRILMFLSNGLGFLGLLVSGFGLDCLRIGESQRDLKRRLLILGGILSWASGITALVPVSWVAHKTVQEFWDENVPDFVPRWEFGEALFLGWFAGLSLLLGGCLLNCAACSSHAPLALGHYAVAQMQTQCPYLEDGTADPQV

SEQ ID NO: 19349 - protein, 782 aa, Homo sapiens
MATEGMILTNHDHQIRVGVLTVSDSCFRNLAEDRSGINLKDLVQDPSLLGGTISAYKIVPDEIEEIKETLIDWCDEKELNLILTTGGTGFAPRDVTPEKFPTFPFCGLQKGATKEVIEREAPGMALAMLMGSLNVTPLGMLSRPVCGIRGKTLIINLPGSKKGSQECFQFILPALPHAIDLLRDAIVKVKEVHDELEDLPSPPPPLSPPPTTSPHKQTEDKGVQCEEEEEEKKDSGVASTEDSSSSHITAAAIAAKIPDSIISRGVQVLPRDTASLSTTPSESPRAQATSRLSTASCPTPKQIRRPDESKGVASRVGSLKARLPSCSSTYSVSEVQSRCSSKENILRASHSAVDITKVARRHRMSPFPLTSMDKAFITVLEMTPVLGTEIINYRDGMGRVLAQDVYAKDNLPPFPASVKDGYAVRAADGPGDRFIIGESQAGEQPTQTVMPGQVMRVTTGAPIPCGADAVVQVEDTELIRESDDGTEELEVRILVQARPGQDIRPIGHDIKRGECVLAKGTHMGPSEIGLLATVGVTEVEVNKFPVVAVMSTGNELLNPEDDLLPGKIRDSNRSTLLATIQEHGYPTINLGIVGDNPDDLLNALNEGISRADVIITSGGVSMGEKDYLKQVLDIDLHAQIHFGRVFMKPGLPTTFATLDIDGVRKIIFALPGNPVSAVVTCNLFVVPALRKMQGILDPRPTIIKARLSCDVKLDPRPEYHRCILTWHHQEPLPWAQSTGNQMSSRLMSMRSANGLLMLPPKTEQYVELHKGEVVDVMVIGRL

SEQ ID NO: 19350 - protein, 357 aa, Homo sapiens
MDPKGLLSLTFVLFLSLAFGASYGTGGRMMNCPKILRQLGSKVLLPLTYERINKSMNKSIHIVVTMAKSLENSVENKIVSLDPSEAGPPRYLGDRYKFYLENLTLGIRESRKEDEGWYLMTLEKNVSVQRFCLQLRLYEQVSTPEIKVLNKTQENGTCTLILGCTVEKGDHVAYSWSEKAGTHPLNPANSSHLLSLTLGPQHADNIYICTVSNPISNNSQTFSPWPGCRTDPSETKPWAVYAGLLGGVIMILIMVVILQLRRRATLTTTNQYWSQNVLTQDQERCPGCLPMVKRTITRQQWKKKALRSMPKSRNQVLFRRNLTPSQLRTLAPPYMLLPQSLSQSLSRKQIPSQSMLV

SEQ ID NO: 19351 - protein, 583 aa, Homo sapiens
MGKIENNERVILNVGGTRHETYRSTLKTLPGTRLALLASSEPPGDCLTTAGDKLQPSPPPLSPPPRAPPLSPGPGGCFEGGAGNCSSRGGRASDHPGGGREFFFDRHPGVFAYVLNYYRTGKLHCPADVCGPLFEEELAFWGIDETDVEPCCWMTYRQHRDAEEALDIFETPDLIGGDPGDDEDLAAKRLGIEDAAGLGGPDGKSGRWRRLQPRMWALFEDPYSSRAARFIAFASLFFILVSITTFCLETHEAFNIVKNKTEPVINGTSVVLQYEIETDPALTYVEGVCVVWFTFEFLVRIVFSPNKLEFIKNLLNIIDFVAILPFYLEVGLSGLSSKAAKDVLGFLRVVRFVRILRIFKLTRHFVGLRVLGHTLRASTNEFLLLIIFLALGVLIFATMIYYAERVGAQPNDPSASEHTQFKNIPIGFWWAVVTMTTLGYGDMYPQTWSGMLVGALCALAGVLTIAMPVPVIVNNFGMYYSLAMAKQKLPRKRKKHIPPAPQASSPTFCKTELNMACNSTQSDTCLGKDNRLLEHNRSGYEKSRSLNNIAGLAGNALRLSPVTSPYNSPCPLRRSRSPIPSIL

SEQ ID NO: 19352 - protein, 613 aa, Homo sapiens
MLVGSQSFSPGGPNGIIRSQSFAGFSGLQERRSRCNSFIENSSALKKPQAKLKKMHNLGHKNNNPPKEPQPKRVEEVYRALKNGLDEYLEVHQTELDKLTAQLKDMKRNSRLGVLYDLDKQIKTIERYMRRLEFHISKVDELYEAYCIQRRLQDGASKMKQAFATSPASKAARESLTEINRSFKEYTENMCTIEVELENLLGEFSIKMKGLAGFARLCPGDQYEIFMKYGRQRWKLKGKIEVNGKQSWDGEETVFLPLIVGFISIKVTELKGLATHILVGSVTCETKELFAARPQVVAVDINDLGTIKLNLEITWYPFDVEDMTASSGAGNKAAALQRRMSMYSQGTPETPTFKDHSFFSNLPDDIFENGKAAEEKMPLSLSFSDLPNGDCALTSHSTGSPSNSTNPEITITPAEFNLSSLASQNEGMDDTSSASSRNSLGEGQEPKSHLKEEDPEEPRKPASAPSEACRRQSSGAGAEHLFLENDVAEALLQESEEASELKPVELDTSEGNITKQLVKRLTSAEVPMATDRLLSEGSVGGESEGCRSFLDGSLEDAFNGLLLALEPHKEQYKEFQDLNQEVMNLDDILKDAKHLDDQKLNGAASWTEITEGE

SEQ ID NO: 19353 - protein, 454 aa, Homo sapiens
MPAHRDPDVQGHRLQHDSYAQPDGPREPARGSHPVARVRAAGGVRLPRPPPLLPVLAVRADVHRAGLYPHPRLPGHVRAGPAQVLPDYGAVQLQVARLPGLPETPQQERPQLPVHGGAQQRLGRAHPGLGPVPAAVPAAAAPQRAGAPAEGRGPRARRLRQPGQVPPRGEERVVRAALHARRGRVLEPRGQALRSGLAGHLGGAVLLLQRLHRAHLPHRPGPLPLPRAPHHLPLHVLLRLLRGLPHPPLRRRREHRLRPGQRPALCHPGGTGEHRLHAGLPGPLLLRHGQLAVVGGPHAHLVPGRRQEVGPRGHRSQQQLLPPGSLGHPGGEDHPDPGHAQGGGGRAHRGLLRGQHGRQRAHRLRAHSPGLLPGHRHVLHPLGLRGPVPHPEGDEDGRREHGQAGEAHGAYRALLCAVHRAGHLCDRLLLLRTPQHGLLEDPGGAAQVQNEQPD

SEQ ID NO: 19354 - protein, 494 aa, Homo sapiens
MSLGLGSAERGVLGTRGARERCRRRRPGQPGEHEEELDQEFELETDTLFGGLKKDATDFEWSFWMEWGKQWLVWLLLGHMVVSQMATLLARKHRPWILMLYGMWACWCVLGTPGVAMVLLHTTISFCVAQFRSQLLTWLCSLLLLSTLRLQGVEEVKRRWYKTENEYYLLQFTLTVRCLYYTSFSLELCWQQLPAASTSYSFPWMLAYVFYYPVLHNGPILSFSEFIKQMQQQEHDSLKASLCVLALGLGRLLCWWWLAELMAHLMYMHAIYSSIPLLETVSCWTLGGLALAQVLFFYVKYLVLFGVPALLMRLDGLTPPALPRCVSTMFSFTGMWRYFDVGLHNFLIRYVYIPVGGSQHGLLGTLFSTAMTFAFVSYWHGGYDYLWCWAALNWLGVTVENGVRRLVETPCIQDSLARYFSPQARRRFHAALASCSTSMLILSNLVFLGGNEVGKTYWNRIFIQGWPWVTLSVLGFLYCYSHVGIAWAQTYATD

SEQ ID NO: 19355 - protein, 365 aa, Homo sapiens
MAVSESQLKKMVSKYKYRDLTVRETVNVITLYKDLKPVLDSYVFNDGSSRELMNLTGTIPVPYRGNTYNIPICLWLLDTYPYNPPICFVKPTSSMTIKTGKHVDANGKIYLPYLHEWKHPQSDLLGLIQVMIVVFGDEPPVFSRPISASYPPYQATGPPNTSYMPGMPGGISPYPSGYPPNPSGYPGCPYPPGGPYPATTSSQYPSQPPVTTVGPSRDGTISEDTIRASLISAVSDKLRWRMKEEMDRAQAELNALKRTEEDLKKGHQKLEEMVTRLDQEVAEVDKNIELLKKKDEELSSALEKMENQSENNDIDEVIIPTAPLYKQILNLYAEENAIEDTIFYLGEALRRGVIDLDVFLKTSVP

SEQ ID NO: 19356 - protein, 320 aa, Homo sapiens
RKGPAPAGRSRASPVSGREGGSSRPLEEGTGSSPACVRGAAPGSQDAFYPTRAKQARVSQELKKAAKRTVSISEGPDTLGDGMRERRETLALAPEPEPLEKEACEKWKRPFRSASATSLTLSHCVDVVKGLLDFKKRRGHSIGGAPEQRYQIIPVCVAARLPTRAQDVLDAHLSEVNAVRFGPNSSLLATGGADRLIHLWNVVGSRLEANQTLEGAGGSITSVDFDPSGYQVLAATYNQAAQLWKVGEAQSKETLSGHKDKVTAAKFKLTRHQAVTGSRDRTVKEWDLGRAYCSRTINVLSYCNDVVCGDHIIISGHNDQ

SEQ ID NO: 19357 - protein, 536 aa, Homo sapiens
MTKKTRDLRRQLRKAVMDHVSDSFLETNVPLLVLIEAAKNGNEKEVKEYAQVFREHANKLIEVANLACSISNNEEGVKLVRMSASQLEALCPQVINAALALAAKPQSKLAQENMDLFKEQWEKQVRVLTDAVDDITSIDDFLAVSENHILEDVNKCVIALQEKDVDGLDRTAGAIRGRAARVIHVVTSEMDNYEPGVYTEKVLEATKLLSNTVMPRFTEQVEAAVEALSSDPAQPMDENEFIDASRLVYDGIRDIRKAVLMIRTPEELDDSDFETEDFDVRSRTSVQTEDDQLIAGQSARAIMAQLPQEQKAKIAEQVASFQEEKSKLDAEVSKWDDSGNDIIVLAKQMCMIMMEMTDFTRGKGPLKNTSDVISAAKKIAEAGSRMDKLGRTIADHCPDSACKQDLLAYLQRIALYCHQLNICSKVKAEVQNLGGELVVSGVDSAMSLIQAAKNLMNAVVQTVKASYVASTKYQKSQGMASLNLPAVSWKMKAPEKKPLVKREKQDETQTKIKRASQKKHVNPVQALSEFKAMDSI

SEQ ID NO: 19358 - protein, 474 aa, Homo sapiens
MAAAALRAPTQGCVTFEDIAIYFSQDEWGLLDEAQRLLYLEVMLENFALVASLGCGHGTEDEETPSDQNVSVGVSQSKAGSSTQKTQSCEMCVPVLKDILHLADLPGQKPYLVGECTNHHQHQKHHSAKKSLKRDMDRASYVKCCLFCMSLKPFRKWEVGKDLPAMLRLLRSLVFPGGKKPGTITECGEDIRSQKSHYKSGECGKASRHKHTPVYHPRVYTGKKLYECSKCGKAFRGKYSLVQHQRVHTGERPWECNECGKFFSQTSHLNDHRRIHTGERPYECSECGKLFRQNSSLVDHQKIHTGARPYECSQCGKSFSQKATLVKHQRVHTGERPYKCGECGNSFSQSAILNQHRRIHTGAKPYECGQCGKSFSQKATLIKHQRVHTGERPYKCGDCGKSFSQSSILIQHRRIHTGARPYECGQCGKSFSQKSGLIQHQVVHTGERPYECNKCGNSFSQCSSLIHHQKCHNT

SEQ ID NO: 19359 - protein, 1005 aa, Homo sapiens
MAHESERSSRLGVPCGEPAELGGDASEEDHPQVCAKCCAQFTDPTEFLAHQNACSTDPPVMVIIGGQENPNNSSASSEPRPEGHNNPQVMDTEHSNPPDSGSSVPTDPTWGPERRGEESSGHFLVAATGTAAGGGGGLILASPKLGATPLPPESTPAPPPPPPPPPPPGVGSGHLNIPLILEELRVLQQRQIHQMQMTEQICRQVLLLGSLGQTVGAPASPSELPGTGTASSTKPLLPLFSPIKPVQTSKTLASSSSSSSSSSGAETPKQAFFHLYHPLGSQHPFSAGGVGRSHKPTPAPSPALPGSTDQLIASPHLAFPSTTGLLAAQCLGAARGLEATASPGLLKPKNGSGELSYGEVMGPLEKPGGRHKCRFCAKVFGSDSALQIHLRSHTGERPYKCNVCGNRFTTRGNLKVHFHRHREKYPHVQMNPHPVPEHLDYVITSSGLPYGMSVPPEKAEEEAATPGGGVERKPLVASTTALSATESLTLLSTSAGTATAPGLPAFNKFVLMKAVEPKNKADENTPPGSEGSAISGVAESSTATRMQLSKLVTSLPSWALLTNHFKSTGSFPFPYVLEPLGASPSETSKLQQLVEKIDRQGAVAVTSAASGAPTTSAPAPSSSASSGPNQCVICLRVLSCPRALRLHYGQHGGERPFKCKVCGRAFSTRGNLRAHFVGHKASPAARAQNSCPICQKKFTNAVTLQQHVRMHLGGQIPNGGTALPEGGGAAQENGSEQSTVSGARSFPQQQSQQPSPEEELSEEEEEEDEEEEEDVTDEDSLAGRGSESGGEKAISVRGDSEEASGAEEEVGTVAAAATAGKEMDSNEKTTQQSSLPPPPPPDSLDQPQPMEQGSSGVLGGKEEGGKPERSSSPASALTPEGEATSVTLVEELSLQEAMRKEPGESSSRKACEVCGQAFPSQAALEEHQKTHPKEGPLFTCVFCRQGFLERATLKKHMLLAHHQVQPFAPHGPQNIAALSLVPGCSPSITSTGLSPFPRKDDPTIP

SEQ ID NO: 19360 - protein, 149 aa, Homo sapiens
MKKEGTTLGLTVSGGIDKDGKPRVSNLRQGGIAARSDQLDVGDYIKAVNGINLAKFRHDEIISLLKNVGERVVLEVEYELPPVSVQGSSVIFRTVEVTLHKEGNTFGFVIRGGAHDDRNKSRPVVITCVRPGGPADREGTIKPGDRLLS

SEQ ID NO: 19361 - protein, 612 aa, Homo sapiens
MQFQHSVLSTSTQLLFKDLLQNTDAHKRAFHEIYRTRSVNGIPVPPDQLEDMAERFHFVSSTSELHLMKMEFLELKYRLLSLLVLAESKLKSWIIKYGRRESVEQLLQNYVSFIENSKFFEQYEVTYQILKQTAEMYVKADGSVEEAENVMKFMNETTAQWRNLSVEVRSVRSMLEEVISNWDRYGNTVASLQAWLEDAEKMLNQSENAKKDFFRNLPHWIQQHTAMNDAGNFLIETCDEMVSRDLKQQLLLLNGRWRELFMEVKQYAQADEMDRMKKEYTDCVVTLSAFATEAHKKLSEPLEVSFMNVKLLIQDLEDIEQRVPVMDAQYKIITKTAHLITKESPQEEGKEMFATMSKLKEQLTKVKECYSPLLYESQQLLIPLEELEKQMTSFYDSLGKINEIITVLEREAQSSALFKQKHQELLACQENCKKTLTLIEKGSQSVQKFVTLSNVLKHFDQTRLQRQIADIHVAFQSMVKKTGDWKKHVETNSRLMKKFEESRAELEKVLRIAQEGLEEKGDPEELLRRHTEFFSQLDQRVLNAFLKACDELTDILPEQEQQGLQEAVRKLHKQWKVSQDRTETPCILNEGRSLSVLRSKCKRNLEIPGKSL

SEQ ID NO: 19362 - protein, 396 aa, Homo sapiens
MDLDKPSVWGSLKQRTRPLLINLSKKKVKKNPSKPPDLRARHHLDRRLSLSVPDLLEAEALAPEGRPYSGPQSSYTSVPSSLSTAGIFPKSSSSSLKQSEEELDWSQEEASHLHVVETDSEEAYASPAERRRVSSNGIFDLQKTSLGGDAPEEPEKLCGSSDLNASMTSQHFEEQSVPGEASDGLSNLPSPFAYLLTIHLKEGRNLVVRDRCGTSDPYVKFKLNGKTLYKSKVIYKNLNPVWDEIVVLPIQSLDQKLRVKVYDRDLTTSDFMGSAFVILSDLELNRTTEHILKLEDPNSLEDDMGVIVLNLNLVVKQGDFKRHRWSNRKRLSASKSSLIRNLRLSESLKKNQLWNGIISITLLEGKNVSGGSMTEMFVQLKLGDQRYKSKDGHFGH

SEQ ID NO: 19363 - protein, 721 aa, Homo sapiens
MMCWPWPLSSKCRTSSRPAMPSSHLLSRLPALGEMRRPWPQKVCPVPSPGGDKRAKEEKVATSTLSRLEQAGRSTPIGPSRDLKEERGGQAQSAASGAEQTEKADAPREPPPVELKPDPTSGMAAAEAEAALSESSEQEMEVEPARKGEEEQKEQEEQEEEGAGPAEVKEEGSQLENGEAPEENENEESAGTDSGQELGSEARGLRSGTYGDRTESKAYGSVIHKCEDCGKEFTHTGNFKRHIRIHTGEKPFSCRECSKAFSDPAACKAHEKTHSPLKPYGCEECGKSYRLISLLNLHKKRHSGEARYRCEDCGKLFTTSGNLKRHQLVHSGEKPYQCDYCGRSFSDPTSKMRHLETHDTDKEHKCPHCDKKFNQVGNLKAHLKIHIADGPLKCRECGKQFTTSGNLKRHLRIHSGEKPYVCIHCQRQFADPGALQRHVRIHTGEKPCQCVMCGKAFTQASSLIAHVRQHTGEKPYVCERCGKRFVQSSQLANHIRHHDNIRPHKCSVCSKAFVNVGDLSKHIIIHTGEKPYLCDKCGRGFNRVDNLRSHVKTVHQGKAGIKILEPEEGSEVSVVTVDDMVTLATEALAATAVTQLTVVPVGAAVTADETEVLKAEISKAVKQVQEEDPNTHILYACDSCGDKFLDANSLAQHVRIHTAQALVMFQTDADFYQQYGPGGTWPAGQVLQAGELVFRPRDGAEGQPALAETSPTAPECPPPAE

SEQ ID NO: 19364 - protein, 1214 aa, Homo sapiens
MEATGVLPFVRGVDLSGNDFKGGYFPENVKAMTSLRWLKLNRTGLCYLPEELAALQKLEHLSVSHNNLTTLHGELSSLPSLRAIVARANSLKNSGVPDDIFKLDDLSVLDLSHNQLTECPRELENAKNMLVLNLSHNRQLPAMTALQTLHLRSTQRTQSNLPTSLEGLSNLADVDLSCNDLTRVPECLYTLPSLRRLNLSSNQITELSLCIDQWVHVETLNLSRNQLTSLPSAICKLSKLKKLYLNSNKLDFDGLPSGIGKLTNLEEFMAANNNLELVPESLCRCPKLRKLVLNKNHLVTLPEAIHFLTEIEVLDVRENPNLVMPPKPADRAAEWYNIDFSLQNQLRLAGASPATVAAAAAGSGPKDPMARKMRLRRRKDSAQDDQAKQVLKGMSDVAQEKNKKQEESADARAPSGKVRRWDQGLEKPRLDYSEFFTEDVGQLPGLTIWQIENFVPVLVEEAFHGKFYEADCYIVLKTFLDDSGSLNWEIYYWIGGEATLDKKACSAIHAVNLRNYLGAECRTVREEMGDESEEFLQVFDNDISYIEGGTASGFYTVEDTHYVTRMYRVYGKKNIKLEPVPLKGTSLDPRFVFLLDRGLDIYVWRGAQATLSSTTKARLFAEKINKNERKGKAEITLLVQGQELPEFWEALGGEPSEIKKHVPEDFWPPQPKLYKVGLGLGYLELPQINYKLSVEHKQRPKVELMPRMRLLQSLLDTRCVYILDCWSDVFIWLGRKSPRLVRAAALKLGQELCGMLHRPRHATVSRSLEGTEAQVFKAKFKNWDDVLTVDYTRNAEAVLQSPGLSGKVKRDAEKKDQMKADLTALFLPRQPPMSLAEAEQLMEEWNEDLDGMEGFVLEGKKFARLPEEEFGHFYTQDCYVFLCRYWVPVEYEEEEKKEDKEEKAEGKEGEEATAEAEEKQPEEDFQCIVYFWQGREASNMGWLTFTFSLQKKFESLFPGKLEVVRMTQQQENPKFLSHFKRKFIIHRGKRKAVQGAQQPSLYQIRTNGSALCTRCIQINTDSSLLNSEFCFILKVPFESEDNQGIVYAWVGRASDPDEAKLAEDILNTMFDTSYSKQVINEGEEPENFFWVGIGAQKPYDDDAEYMKHTRLFRCSNEKGYFAVTEKCSDFCQDDLADDDIMLLDNGQEVYMWVGTQTSQVEIKLSLKACQVYIQHMRSKEHERPRRLRLVRKGNEQHAFTRCFHAWSAFCKALA

SEQ ID NO: 19365 - protein, 1165 aa, Homo sapiens
MSFLPVRSVIGGGDTKLKTVRGVVTRYCSDYGMIDDMIYFSSDAVTSRVLLNVGQEVIAVVEENKVSNGLKAIRVEAVSDKWEDDSRNHGSPSDCGPRVLIGCVTSLVEGAGCISQTTYFSLESVCEGFEPCKGDWVEAEYRIRPGTWSSEATSVKPLRYKRVDKVCISSLCGRNGVLEESIFFTLDSLKLPDGYTPRRGDVVNAVVVESSQSCYVWRALCMTLVKRRDAAPVHEATHFYGTILLKNKGDIEVTQVTHFGTLKEGRSKTMVIWIENKGDIPQNLVSCKLAGWDKSKQFRFQMLDKDQMCPVVSFVSVPEKENSSDENINSLNSHTKNKTSQMSESSLVNNRGISPGDCTCKGENGEKDNILSRKQMTEPEPGGLVPPGGKTFIVVICDGKNPGRCKELLLLCFSDFLIGRYLEVNVISGEESLIAAREPFSWKKLKSSQALTSAKTTVVVTAQKRNSRRQLPSFLPQYPIPDRLRKCVEQKIDILTFQPLLAELLNMSNYKEKFSTLLWLEEIYAEMELKEYNMSGIILRRNGDLLVLEVPGLAEGRPSLYAGDKLILKTQEYNGHAIEYISYVTEIHEEDVTLKINPEFEQAYNFEPMDVEFTYNRTTSRRCHFALEHVIHLGVKVLFPEEIILQSPQVTGNWNHAQDTKSSGQSTSKKNRKTMTDQAEHGTEERRVGDKDLPVLAPFTAEMSDWVDEIQTPKARKMEFFNPVLNENQKLAVKRILSGDCRPLPYILFGPPGTGKTVTIIEAVLQVHFALPDSRILVCAPSNSAADLVCLRLHESKVLQPATMVRVNATCRFEEIVIDAVKPYCRDGEDIWKASRFRIIITTCSSSGLFYQIGVRVGHFTHVFVDEAGQASEPECLIPLGLMSDISGQIVLAGDPMQLGPVIKSRLAMAYGLNVSFLERLMSRPAYQRDENAFGACGAHNPLLVTKLVKNYRSHEALLMLPSRLFYHRELEVCADPTVVTSLLGWEKLPKKGFPLIFHGVRGSEAREGKSPSWFNPAEAVQVLRYCCLLAHSISSQVSASDIGVITPYRKQVEKIRILLRNVDLMDIKVGSVEEFQGQEYLVIIISTVRSNEDRFEDDRYFLGFLSNSKRFNVAITRPKALLIVLGNPHVLVRLWRGGGRPLLPSGARIHRTREASGAQLICSG

SEQ ID NO: 19366 - protein, 540 aa, Homo sapiens
MAAEEEAAAGGEVAGGEATAPGKVLREENQCIAPVVSSRVSPGTRPTAMGSFSSHMTEFPRKRKGSDSDPSQEAHSQTEKRRRDKMNNLIEELSAMIPQCNPMARKLDKLTVLRMAVQHLRSLKGLTNSYVGSNYRPSFLQDNELRHLILKTAEGFLFVVGCERGKILFVSKSVSKILNYDQASLTGQSLFDFLHPKDVAKVKEQLSSFDISPREKLIDAKTGLQVHSNLHAGRTRVYSGSRRSFFCRIKSCKISVKEEHGCLPNSKKKEHRKFYTIHCTGYLRSWPPNIVGMEEERNSKKDNSNFTCLVAIGRLQPYIVPQNSGEINVKPTEFITRFAVNGKFVYVDQRATAILGYLPQELLGTSCYEYFHQDDHNNLTDKHKAVLQSKEKILTDSYKFRAKDGSFVTLKSQWFSFTNPWTKELEYIVSVNTLVLGHSEPGEASFLPCSSQSSEESSRQSCMSVPGMSTGTVLGAGSIGTDIANEILDLQRLQSSSYLDDSSPTGLMKDTHTVNCRSVMVHSWISMPYVTMMTQPWLHL

SEQ ID NO: 19367 - protein, 386 aa, Homo sapiens
ELPLSSRRMRLTHCGLQEKHLEQLCKALGGSCHLGHLHLDFSGNALGDEGAARLAQLLPGLGALQSLNLSENGLSLDAVLGLVRCFSTLQWLFRLDISFESQHILLRGDKTSRDMWATGSLPDFPAAAKFLGFRQRCIPRSLCLSECPLEPPSLTRLCATLKDCPGPLELQLSCEFLSDQSLETLLDCLPQLPQLSLLQLSQTGLSPKSPFLLANTLSLCPRVKKVDLRSLHHATLHFRSNEEEEGVCCGLSANLLGDSGLRCLLECLPQVPISGLLDLSHNSISQESALYLLETLPSCPRVREASVNLGSEQSFRIHFSREDQAGKTLRLSECSFRPEHVSRLATGLSKSLQLTELTLTQCCLGQKQLAILLSLVGRPAGLFSLS

SEQ ID NO: 19368 - protein, 55 aa, Homo sapiens
MDDDDFGGFEAAETFDGGSGETQTTSPAIPWAAFPAGKHAIFIVSCLPEFMVELH

SEQ ID NO: 19369 - protein, 653 aa, Homo sapiens
MFTLQDSYVKQMVMSLRVSELQVLLGYAGRNKHGRKHELLTKALHLLKAGCSPAVQMKIKELYRRRFPQKIMTPADLSIPNVHSSPMPATLSPSTIPQLTYDGHPASSPLLPVSLLGPKHELELPHLTSALHPVHPDIKLQKLPFYDLLDELIKPTSLASDNSQRFRETCFAFALTPQQVQQISSSMDISGTKCDFTVQVQLRFCLSETSCPQEDHFPPNLCVKVNTKPCSLPGYLPPTKNGVEPKRPSRPINITSLVRLSTTVPNTIVVSWTAEIGRNYSMAVYLVKQLSSTVLLQRLRAKGIRNPDHSRALIKEKLTADPDSEIATTSLRVSLLCPLGKMRLTIPCRALTCSHLQCFDATLYIQMNEKKPTWVCPVCDKKAPYEHLIIDGLFMEILKYCTDCDEIQFKEDGTWAPMRSKKEVQEVSASYNGVDGCLSSTLEHQVASHHQSSNKNKKVEVIDLTIDSSSDEEEEEPSAKRTCPSLSPTSPLNNKGILSLPHQASPVSRTPSLPAVDTSYINTSLIQDYRHPFHMTPMPYDLQGLDFFPFLSGDNQHYNTSLLAAAAAAVSDDQDLLHSSRFFPYTSSQMFLDQLSAGGSTSLPTTNGSSSGSNSSLVSSNSLRESHSHTVTNRSSTDTASIFGIIPDIISLD

SEQ ID NO: 19370 - protein, 1058 aa, Homo sapiens
MVTGNGSLKRKSSRKETPSATKQATSISSETKNTLRAFSAPQNSESQAHVSGGGDDSSRPTVWYHETLEWLKEEKRRDEHRRRPDHPDFDASTLYVPEDFLNSCTPGMRKWWQIKSQNFDLVICYKVGKFYELYHMDALIGVSELGLVFMKGNWAHSGFPEIAFGRYSDSLVQKGYKVARVEQTETPEMMEARCRKMAHISKYDRVVRREICRIITKGTQTYSVLEGDPSENYSKYLLSLKEKEEDSSGHTRAYGVCFVDTSLGKFFIGQFSDDRHCSRFRTLVAHYPPVQVLFEKGNLSKETKTILKSSLSCSLQEGLIPGSQFWDASKTLRTLLEEEYFREKLSDGIGVMLPQVLKGMTSESDSIGLTPGEKSELALSALGGCVFYLKKCLIDQELLSMANFEEYIPLDSDTVSTTRSGAIFTKAYQRMVLDAVTLNNLEIFLNGTNGSTEGTLLERVDTCHTPFGKRLLKQWLCAPLCNHYAINDRLDAIEDLMVVPDKISEVVELLKKLPDLERLLSKIHNVGSPLKSQNHPDSRAIMYEETTYSKKKIIDFLSALEGFKVMCKIIGIMEEVADGFKSKILKQVISLQTKNPEGRFPDLTVELNRWDTAFDHEKARKTGLITPKAGFDSDYDQALADIRENEQSLLEYLEKQRNRIGCRTIVYWGIGRNRYQLEIPENFTTRNLPEEYELKSTKKGCKRYWTKTIEKKLANLINAEERRDVSLKDCMRRLFYNFDKNYKDWQSAVECIAVLDVLLCLANYSRGGDGPMCRPVILLPEDTPPFLELKGSRHPCITKTFFGDDFIPNDILIGCEEEEQENGKAYCVLVTGPNMGGKSTLMRQAGLLAVMAQMGCYVPAEVCRLTPIDRVFTRLGASDRIMSGESTFFVELSETASILMHATAHSLVLVDELGRGTATFDGTAIANAVVKELAETIKCRTLFSTHYHSLVEDYSQNVAVRLGHMACMVENECEDPSQETITFLYKFIKGACPKSYGFNAARLANLPEEVIQKGHRKAREFEKMNQSLRLFREVCLASERSTVDAEAVHKLLTLIKEL

SEQ ID NO: 19371 - protein, 694 aa, Homo sapiens
MTFGQSKLYRSEDYGKNFKDITDLINNTFIRTEFGMAIGPENSGKVVLTAEVSGGSRGGRIFRSSDFAKNFVQTDLPFHPLTQMMYSPQNSDYLLALSTENGLWVSKNFGGKWEEIHKAVCLAKWGSDNTIFFTTYANGSCTDLGALELWRTSDLGKSFKTIGVKIYSFGLGGRFLFASVMADKDTTRRIHVSTDQGDTWSMAQLPSVGQEQFYSILAANDDMVFMHVDEPGDTGFGTIFTSDDRGIVYSKSLDRHLYTTTGGETDFTNVTSLRGVYITSVLSEDNSIQTMITFDQGGRWTHLRKPENSECDATAKNKNECSLHIHASYSISQKLNVPMAPLSEPNAVGIVIAHGSVGDAISVMVPDVYISDDGGYSWTKMLEGPHYYTILDSGGIIVAIEHSSRPINVIKFSTDEGQCWQTYTFTRDPIYFTGLASEPGARSMNISIWGFTESFLTSQWVSYTIDFKDILERNCEEKDYTIWLAHSTDPEDYEDGCILGYKEQFLRLRKSSVCQNGRDYVVTKQPSICLCSLEDFLCDFGYYRPENDSKCVEQPELKGHDLEFCLYGREEHLTTNGYRKIPGDKCQGGVNPVREVKDLKKKCTSNFLSPEKQNSKSNSVPIILAIVGLMLVTVVAGVLIVKKYVCGGRFLVHRYSVLQQHAEANGVDGVDALDTASHTNKSGYHDDSDEDLLE

SEQ ID NO: 19372 - protein, 772 aa, Homo sapiens
MAQFGGQKNPPWATQFTATAVSQPAALGVQQPSLLGASPTIYTQQTALAAAGLTTQTPANYQLTQTAALQQQAAAAAAALQQPAVALPTSLSLSTPQPTAQITVSYPTPRSSQQQTQPQKQRVFTGVVTKLHDTFGFVDEDVFFQLSAVKGKTPQVGDRVLVEATYNPNMPFKWNAQRIQTLPNQNQSQTQPLLKTPPAVLQPIAPQTTFGVQTQPQPQSLLQAQISAASITPLLQTQPQPLLQQPQQKAGLLQPPVRIVSQPQPARRLDPPSRFSGRNDRGDQVPNRKDDRSRERERERRRSRERSPQRKRSRERSPRRERERSPRRVRRVVPRYTVQFSKFSLDCPSCDMMELRRRYQNLYIPSDFFDAQFTWVDAFPLSRPFQLGNYCNFYVMHREVESLEKNMAILDPPDADHLYSAKVMLMASPSMEDLYHKSCALAEDPQELRDGFQHPARLVKFLVGMKGKDEAMAIGGHWSPSLDGPDPEKDPSVLIKTAIRCCKALTGIDLSVCTQWYRFAEIRYHRPEETHKGRTVPAHVETVVLFFPDVWHCLPTRSEWETLSRGYKQQLVEKLQGERKEADGEQDEEEKDDGEAKEISTPTHWSKLDPKTMKVNDLRKELESRALSSKGLKSQLIARLTKQLKVEEQKEEQKELEKSEKEEDEDDDRKSEDDKEEEERKRQEEIERQRRERRYILPDEPAIIVHPNWAAKSGKFDCSIMSLSVLLDYRLEDNKEHSFEVSLFAELFNEMLQRDFGVRIYKSLLSLPEKED

SEQ ID NO: 19373 - protein, 166 aa, Homo sapiens
MTAPTGERLLNSGLICSPFWKRELKQRGQIQDDFRGGKINLEKTQRLLEKLDIRCSYIHVKQIFKTSDYPVVLSLENHCSTAQQEVMADNLQATFGESLLSDMLDDFPDTLPSPEALKFKILVKNKKIGTLKETHERKGSDKRGDNQDKETGVKKLPGVMLFKKKK

SEQ ID NO: 19374 - protein, 189 aa, Homo sapiens
MSFSLAPFLSPQSWPPPLPPAQSEIMKVVNLKQAILQAWKERWSDYQWAINMKKFFPKGATWDILNLADALLEQAMIGPSPNPLILSYLKYAISSQFDDFSRDLCVQALLDIMDMFCDRLSCHGKAEECIGLCRALLSALHWLLRCTAASAERLREGLEAGTPAAGEKQLAMCLQRLEKTLSSTKNRAL

SEQ ID NO: 19375 - protein, 671 aa, Homo sapiens
MWLLYLLVPALFCRAGGSIPIPQKLFGEVTSPLFPKPYPNNFETTTVITVPTGYRVKLVFQQFDLEPSEGCFYDYVKMLLTFHTDFSNEENGTIMFYKGFLAYYQAVDLDECASRSKSGEEDPQPQCQHLCHNYVGGYFCSCRPGYELQEDRHSCQAECSSELYTEASGYISSLEYPRSYPPDLRCNYSIRVERGLTLHLKFLEPFDIDDHQQVHCPYDQLQIYANGKNIGEFCGKQRPPDLDTSSNAVDLLFFTDESGDSRGWKLRYTTEIIKCPQPKTLDEFTIIQNLQPQYQFRDYFIATCKQGYQLIEGNQVLHSFTAVCQDDGTWHRAMPRCKIKDCGQPRNLPNGDFRYTTTMGVNTYKARIQYYCHEPYYKMQTRAGSRESEQGVYTCTAQGIWKNEQKGEKIPRCLPVCGKPVNPVEQRQRIIGGQKAKMGNFPWQVFTNIHGRGGGALLGDRWILTAAHTLYPKEHEAQSNASLDVFLGHTNVEELMKLGNHPIRRVSVHPDYRQDESYNFEGDIALLELENSVTLGPNLLPICLPDNDTFYDLGLMGYVSGFGVMEEKIAHDLRFVRLPVANPQACENWLRGKNRMDVFSQNMFCAGHPSLKQDACQGDSGGVFAVRDPNTDRWVATGIVSWGIGCSRGYGFYTKVLNYVDWIKKEMEEED

SEQ ID NO: 19376 - protein, 663 aa, Homo sapiens
MDTSSKENIQLFCKTSVQPVGRPSFKTEYPSSEEKQPCCGELKVFLCALSFVYFAKALAEGYLKSTITQIERRFDIPSSLVGVIDGSFEIGNLLVITFVSYFGAKLHRPKIIGAGCVIMGVGTLLIAMPQFFMEQYKYERYSPSSNSTLSISPCLLESSSQLPVSVMEKSKSKISNGCVQTVAIIGPIFGFLLGSLCAKLYVDIGFVNLDHITITPKDPQWVGAWWLGYLIAGIISLLAAVPFWYLPKSLPRSQSREDSNSSSEKSKFIIDDHTDYQTPQGENAKIMEMARDFLPSLKNLFGNPVYFLYLCTSTVQFNSLFGMVTYKPKYIEQQYGQSSSRANFVIGLINIPAVALGIFSGGIVMKKFRISVCGAAKLYLGSSVFGYLLFLSLFALGCENSDVAGLTVSYQGTKPVSYHERALFSDCNSRCKCSETKWEPMCGENGITYVSACLAGCQTSNRSGKNIIFYNCTCVGIAASKSGNSSGIVGRCQKDNGCPQMFLYFLVISVITSYTLSLGGIPGYILLLRCIKPQLKSFALGIYTLAIRVLAGIPAPVYFGVLIDTSCLKWGFKRCGSRGSCRLYDSNVFRHIYLGLTVILGTVSILLSIAVLFILKKNYVSKHRSFITKRERTMVSTRFQKENYTTSDHLLQPNYWPGKETQL

SEQ ID NO: 19377 - protein, 1307 aa, Homo sapiens
MKSLKSRLRRQDVPGPASSGAAAASAHAADWNKYDDRLMKAAERGDVEKVTSILAKKGVNPGKLDVEGRSVFHVVTSKGNLECLNAILIHGVDITTSDTAGRNALHLAAKYGHALCLQKLLQYNCPTEHADLQGRTALHDAAMADCPSSIQLLCDHGASVNAKDVRNLTHMQDEVNVKSHQREHQNIQDLEIENEDLKERLRKIQQEQRILLDKVNGLQLQLNEEVMVADDLESEREKLKSLLAAKEKQHEESLRTIEALKNRFKYFESDHLGSGSHFSNRKEDMLLKQGQMYMADSQCTSPGIPAHMQSRSMLRPLELSLPSQTSYSENEILKKELEAMRTFCESAKQDRLKLQNELAHKVAECKALALECERVKEDSDEQIKQLEDALKDVQKRMYESEGKVKQMQTHFLALKEHLTSEAASGNHRLTEELKDQLKDLKVKYEGASAEVGKLRNQIKQNEMIVEEFKRDEGKLIEENKRLQKELSMCEMEREKKGRKVTEMEGQAKELSAKLALSIPAEKFENMKSSLSNEVNEKAKKLVEMEREHEKSLSEIRQLKRELENVKAKLAQHVKPEEHEQVKSRLEQKSGELGKKITELTLKNQTLQKEIEKVYLDNKLLKEQAHNLTIEMKNHYVPLKVSEDMKKSHDAIIDDLNRKLLDVTQKYTEKKLEMEKLLLENDSLSKDVSRLETVFVPPEKHEKEIIALKSNIVELKKQLSELKKKCGEDQEKIHALTSENTNLKKMMSNQYVPVKTHEEVKMTLNDTLAKTNRELLDVKKKFEDINQEFVKIKDKNEILKRNLENTQNQIKAEYISLAEHEAKMSSLSQSMRKVQDSNAEILANYRKGQEEIVTLHAEIKAQKKELDTIQECIKVKYAPIVSFEECERKFKATEKELKDQLSEQTQKYSVSEEEVKKNKQENDKLKKEIFTLQKDLRDKTVLIEKSHEMERALSRKTDELNKQLKDLSQKYTEVKNVKEKLVEENAKQTSEILAVQNLLQKQHVPLEQVEALKKSLNGTIENLKEELKSMQRCYEKEQQTVTKLHQLLENQKNSSVPLAEHLQIKEAFEKEVGIIKASLREKEEESQNKMEEVSKLQSEVQNTKQALKKLETREVVDLSKYKATKSDLETQISSLNEKLANLNRKYEEVCEEVLHAKKKEISAKDEKELLHFSIEQEIKDQKERCDKSLTTITELQRRIQESAKQIEAKDNKITELLNDVERLKQALNGLSQLTYTSGNPTKRQSQLIDTLQHQVKSLEQQLADADRQHQEVIAIYRTHLLSAAQGHMDEDVQEALLQIIQMRQGLVC

SEQ ID NO: 19378 - protein, 216 aa, Homo sapiens
MNFSGGGRQEAAGSRGRRAPRPREQDRDVQLSKALSYALRHGALKLGLPMGADGFVPLGTLLQLPQFRGFSAEDVQRVVDTNRKQRFALQLGDPSTGLLIRANQGHSLQVPKLELMPLETPQALPPMLVHGTFWKHWPSILLKGLSCQGRTHIHLAPGLPGDPGIISGMRSHCEIAVFIDGPLALAGKPLSLAGDEETECQSSPKHSSRERRRIQQ

SEQ ID NO: 19379 - protein, 445 aa, Homo sapiens
MAKTPSDHLLSTLEELVPYDFEKFKFKLQNTSVQKEHSRIPRSQIQRARPVKMATLLVTYYGEEYAVQLTLQVLRAINQRLLAEELHRAAIQGRPPDTAASPRCHAQEGDPVDGTCVRDSCSFPEAVSGHPQASGSRSPGCPRCQDSHERKSPGSLSPQPLPQCKRHLKQVQLLFCEDHDEPICLICSLSQEHQGHRVRPIEEVALEHKKKIQKQLEHLKKLRKSGEEQRSYGEEKAVSFLKQTEALKQRVQRKLEQVYYFLEQQEHFFVASLEDVGQMVGQIRKAYDTRVSQDIALLDALIGELEAKECQSEWELLQDIGDILHRAKTVPVPEKWTTPQEIKQKIQLLHQKSEFVEKSTKYFSETLRSEMEMFNDHSPQHGLGSWEERDYTQHSMQGPKQGVPCLSLLSGQCNLAPLNANAQDFFPYLIFLRSSGADWRSGTCC

SEQ ID NO: 19380 - protein, 1050 aa, Homo sapiens
MSAAPAYSEDKGGSAGPGEPEYGHDPASGGIFSSDYKRHDDLKEMLDTNKDSLKLEAMKRIVAMIARGKNASDLFPAVVKNVACKNIEDPNQLIRASALRVLSSIRVPIIVPIMMLAIKEAASDMSPYVRKTAAHAIPKLYSLDSDQKDQLIEVIEKLLADKTTLVAGSVVMAFEEVCPERIDLIHKNYRKLCNLLIDVEEWGQVVIISMLTRYARTQFLSPTQNESLLEENAEKAFYGSEEDEAKGAGSEETAAAAAPSRKPYVMDPDHRLLLRNTKPLLQSRSAAVVMAVAQLYFHLAPKAEVGVIAKALVRLLRSHSEVQYVVLQNVATMSIKRRGMFEPYLKSFYIRSTDPTQIKILKLEVLTNLANETNIPTVLREFQTYIRSMDKDFVAATIQAIGRCATNIGRVRDTCLNGLVQLLSNRDELVVAESVVVIKKLLQMQPAQHGEIIKHLAKLTDNIQVPMARASILWLIGEYCEHVPRIAPDVLRKMAKSFTAEEDIVKLQVINLAAKLYLTNSKQTKLLTQYVLSLAKYDQNYDIRDRARFTRQLIVPSEQGGALSRHAKKLFLAPKPAPVLESSFKDRDHFQLGSLSHLLNAKATGYQELPDWPEEAPDPSVRNVEVPEWTKCSNREKRKEKEKPFYSDSEGESGPTESADSDPESESESDSKSSSESGSGESSSESDNEDQDEDEEKGRGSESEQSEEDGKRKTKKKVPERKGEASSSDEGSDSSSSSSESEMTSESEEEQLEPASWSRKTPPSSKSAPATKEISLLDLEDFTPPSVQPVSPPAIVSTSLAADLEGLTLTDSTLVPSLLSPVSGVGRQELLHRVAGEGLAVDYTFSRQPFSGDPHMVSVHIHFSNSSDTPIKGLHVGTPKLPAGISIQEFPEIESLAPGESATAVMGINFCDSTQAANFQLCTQTRQFYVSIQPPVGELMAPVFMSENEFKKEQGKLMGMNEITEKLMLPDTCRSDHIVVQKVTATANLGRVPCGTSDEYRFAGRTLTGGSLVLLTLDARPAGAAQLTVNSEKMVIGTMLVKDVIQALTQ

SEQ ID NO: 19381 - protein, 80 aa, Homo sapiens
MFLTIIVCGMVAALSAIRANCHQEPSVCLQAACPESWIGFQRKCFYFSDDTKNWTSSQRFCDSQDADLAQVESFQELVRK

SEQ ID NO: 19382 - protein, 692 aa, Homo sapiens
MSSIKGNKLEEQDPRPLQPIPGLMEGNKLEEQDSSPPQSTPGLMKGNKREEQGLGPEPAAPQQPTAEEEALIEFHRSYRELFEFFCNNTTIHGAIRLVCSQHNRMKTAFWAVLWLCTFGMMYWQFGLLFGEYFSYPVSLNINLNSDKLVFPAVTICTLNPYRYPEIKEELEELDRITEQTLFDLYKYSSFTTLVAGSRSRRDLRGTLPHPLQRLRVPPPPHGARRARSVASSLRDNNPQVDWKDWKIGFQLCNQNKSDCFYQTYSSGVDAVREWYRFHYINILSRLPETLPSLEEDTLGNFIFACRFNQVSCNQANYSHFHHPMYGNCYTFNDKNNSNLWMSSMPGINNGLSLMLRAEQNDFIPLLSTVTGARVMVHGQDEPAFMDDGGFNLRPGVETSISMRKETLDRLGGDYGDCTKNGSDVPVENLYPSKYTQQVCIHSCFQESMIKECGCAYIFYPRPQNVEYCDYRKHSSWGYCYYKLQVDFSSDHLGCFTKCRKPCSVTSYQLSAGYSRWPSVTSQEWVFQMLSRQNNYTVNNKRNGVAKVNIFFKELNYKTNSESPSVTMVTLLSNLGSQWSLWFGSSVLSVVEMAELVFDLLVIMFLMLLRRFRSRYWSPGRGGRGAQEVASTLASSPPSHFCPHPMSLSLSQPGPAPSPALTAPPPAYATLGPRPSPGGSAGASSSTCPLGGP

SEQ ID NO: 19383 - protein, 1063 aa, Homo sapiens
LGKNDGAVAGTRYFQCQPKYGLFAPVHKVTKIGFPSTTPAKAKANAVRRVMATTSASLKRSPSASSLSSMSSVASSVSSRPSRTGLLTETSSRYARKISGTTALQEALKEKQQHIEQLLAERDLERAEVAKATSHVGEIEQELALARDGHDQHVLELEAKMDQLRTMVEAADREKVELLNQLEEEKRKVEDLQFRVEEESITKGDLETQTKLEHARIKELEQSLLFEKTKADKLQRELEDTRVATVSEKSRIMELEKDLALRVQEVAELRRRLESNKPAGDVDMSLSLLQEISSLQEKLEVTRTDHQREITSLKEHFGAREETHQKEIKALYTATEKLSKENESLKSKLEHANKENSDVIALWKSKLETAIASHQQAMEELKVSFSKGLGTETAEFAELKTQIEKMRLDYQHEIENLQNQQDSERAAHAKEMEALRAKLMKVIKEKENSLEAIRSKLDKAEDQHLVEMEDTLNKLQEAEIKKEKFAEASEEAVSVQRSMQETVNKLHQKEEQFNMLSSDLEKLRENLADMEAKFREKDEREEQLIKAKEKLENDIAEIMKMSGDNSSQLTKMNDELRLKERDVEELQLKLTKANENASFLQKSIEDMTVKAEQSQQEAAKKHEEEKKELERKLSDLEKKMETSHNQCQELKARYERATSETKTKHEEILQNLQKTLLDTEDKLKGAREENSGLLQELEELRKQADKAKAAQTAEDAMQIMEQMTKEKTETLASLEDTKQTNAKLQNELDTLKENNLKNVEELNKSKELLTVENQKMEEFRKEIETLKQAAAQKSQQLSALQEENVKLAEELGRSRDEVTSHQKLEEERSVLNNQLLEMKKRESKFIKDADEEKASLQKSISITSALLTEKDAELEKLRNEVTVLRGENASAKSLHSVVQTLESDKVKLELKVKNLELQLKENKRQLSSSSGNTDTQADEDERAQESQIDFLNSVIVDLQRKNQDLKMKVEMMSEAALNGNGDDLNNYDSDDQEKQSKKKPRLFCDICDCFDLHDTEDCPTQAQMSEDPPHSTHHGSRGEERPYCEICEMFGHWATNCNDDETF

SEQ ID NO: 19384 - protein, 316 aa, Homo sapiens
MKSCDDEDDYSLRGLLPSEGIVHLHSETKPKTKNIDPVNKVQNKLHSANKGRKTNSSVKLKYSDVQTADDVAIPEDFSDFSLAKTISKIEGQLEEEGLPEYIDDIFSGVSNDIGTEAQIRFLKAKLHVMQEELDNVVCECNKKEDEIQNLKSQVKNFEEDFMRQQRTINMQQSQVEKYKTLFEEANKKYDGLQQQLSSVERELENKRRLQKQAASSQSATEVRLNRALEEAEKYKLELSKLRQNNKDIANEEHKKIEVLKSENKKLEKQKGELMIGFKKQLKLIDVLKRQKMHIEAAKMLSFTEEEFMKALEWGNS

SEQ ID NO: 19385 - protein, 421 aa, Homo sapiens
MIYFDDFSCQSWLYVLGQKRSDSYVLLEHSVKKAVHFGLPYLASLGIQSLVQQRAFAGKTANKLMDALKDSDLLHWKHSLSELIDISIAQKTAIWRLYGRSTMALQQAQMLLSMNSLEAVNAGVQQNNTESFAVALCHLAELHAEQGCFAAASEVLKHLKERFPPNSQHAQLWMLCDQKIQFDRAMNDGKYHLADSLVTGITALNSIEGVYRKAVVLQAQNQMSEAHKLLQKLLVHCQKLKNTEMVISVLLSVAELYWRSSSPTIALPMLLQALALSKEYRLQYLASETVLNLAFAQLILGIPEQALSLLHMAIEPILADGAILDKGRAMFLVAKCQVASAASYDQPKKAEALEAAIENLNEAKNYFAKVDCKERIRDVVYFQARLYHTLGKTQERNRCAMLFRQLHQELPSHGVPLINHL

SEQ ID NO: 19386 - protein, 163 aa, Homo sapiens
MSFSLAPFLSPQSWPPPLPPAQSEIMKVVNLKQAILQAWKERWSDYQWAINMKKFFPKGATWDILNLADALLEQAMIGPSPNPLILSYLKYAISSQMVSYSSVLTAISKFDDFSRDLCVQALLDIMDMFCDRLSCHGKAEECIGLCRALLSALHWLLRCTAAS

SEQ ID NO: 19387 - protein, 380 aa, Homo sapiens
MKSWQLIAVVGDALQDIKADCNTCVEIEDRKVSRQQMNCEREQLRGNQEAAAAPDTMAQPYASAQFAPPQNGIPAEYTAPHPHPAPEYTGQTTVPEHTLNLYPPAQTHSEQSPADTSAQTVSGTATQFGKILDVEIIFNERGSKVNNATARVMTNKKTVNPYTNGWKLNPVVGAVYSPEFYAGTVLLCQANQEGSSMYSAPSSLVYTSAMPGFPYPAATAAAAYRGAHLRGRGRTVYNTFRAAAPPPPIPAYGGVVYQDGFYGADIYGGYAAYRYAQPTPATAAAYSDRNQFVFVAADEISCNTSAVTDEFMLPTPTTTHLLQPPPTALVPCPKVPAPAQTSEELSCTLPGLCCQAAENLTASPPLLQFMFKVIVAQERK

SEQ ID NO: 19388 - protein, 486 aa, Homo sapiens
MAERKPNGGSGGASTSSSGTNLLFSSSATEFSFNVPFIPVTQASASPASLLLPGEDSTDVGEEDSFLGQTSIHTSAPQTFSYFSQVSSSSDPFGNIGQSPLTTAATSVGQSGFPKPLTALPFTTGSQDVSNAFSPSISKAQPGAPPSSLMGINSYLPSQPSSLPPSYFGNQPQGIPQPGYNPYRHTPGSSRANPYIAPPQLQQCQTPGPPAHPPPSGPPVQMYQMPPGSLPPVPSSVQSPAQQQVPARPGAPSVQVPSPFLLQNQYEPVQPHWFYCKEVEYKQLWMPFSVFDSLNLEEIYNSVQPDPESVVLGTDGGRYDVYLYDRIRKAAYWEEEPAEVRRCTWFYKGDTDSRFIPYTEEFSEKLEAEYKKAVTTNQWHRRLEFPSGETIVMHNPKVIVQFQPSSVPDEWGTTQDGQTRPRVVKRGIDDNLDEIPDGEMPQVDHLVFVVHGIGPVCDLRFRSIIECVDDLGWFLSNCCGHISRNL

SEQ ID NO: 19389 - protein, 335 aa, Homo sapiens
MPDRENTFVVKVEGPSEYIMETVDAQHVKAWVSDIQECLSPGPCPATSPRPMTLPLAPGTSFLTRENTDSLELSCLNHSESLPSQDLLLGPSESNDRLSQGAYGGLSDRPSASISPSSASIAASHFDSMELLPPELPPRIPIEEGPPTGTVHPLSAPYPPLDTPETATGSFLFQGEPEGGEGDQPLSGYPWFHGMLSRLKAAQLVLTGGTGSHGVFLVRQSETRRGEYVLTFNFQGKAKHLRLSLNEEGQCRVQHLWFQSIFDMLEHFRVHPIPLESGGSSDVVLVSYVPSSQRQQGREQAGSHAGVCEGDGCHPDASCTLMPFGASDCVTDHLP

SEQ ID NO: 19390 - protein, 1382 aa, Homo sapiens
MKDPCFSNPCQGSATCVNTPGERSFLCKCPPGYSGTICETTIGSCGKNSCQHGGICHQDPIYPVCICPAGYAGRFCEIDHDECASSPCQNGAVCQDGIDGYSCFCVPGYQGRHCDLEVDECASDPCKNEATCLNEIGRYTCICPHNYSGVNCELEIDECWSQPCLNGATCQDALGAYFCDCAPGFLGDHCELNTDECASQPCLHGGLCVDGENRYSCNCTGSGFTGTHCETLMPLCWSKPCHNNATCEDSVDNYTCHCWPGYTGAQCEIDLNECNSNPCQSNGECVELSSEKQYGRITGLPSSFSYHEASGYVCICQPGFTGIHCEEDVNECSSNPCQNGGTCENLPGNYTCHCPFDNLSRTFYGGRDCSDILLGCTHQQCLNNGTCIPHFQDGQHGFSCLCPSGYTGSLCEIATTLSFEGDGFLWVKSGSVTTKGSVCNIALRFQTVQPMALLLFRSNRDVFVKLELLSGYIHLSIQVNNQSKVLLFISHNTSDGEWHFVEVIFAEAVTLTLIDDSCKEKCIAKAPTPLESDQSICAFQNSFLGGLPVGMTSNGVALLNFYNMPSTPSFVGCLQDIKIDWNHITLENISSGSSLNVKAGCVRKDWCESQPCQSRGRCINLWLSYQCDCHRPYEGPNCLREYVAGRFGQDDSTGYVIFTLDESYGDTISLSMFVRTLQPSGLLLALENSTYQYIRVWLERGRLAMLTPNSPKLVVKFVLNDGNVHLISLKIKPYKIELYQSSQNLGFISASTWKIEKGDVIYIGGLPDKQETELNGGFFKGCIQDVRLNNQNLEFFPNPTNNASLNPVLVNVTQGCAGDNSCKRQTNVGRALTELGSRGPKYQVSLFRFCVGSWATGNTFFLSSIKPGSNPCHNGGVCHSRWDDFSCSCPALTSGKACEEVQWCGFSPCPHGAQCQPVLQGFECIANAVFNGQSGQILFRSNGNITRELTNITFGFRTRDANVIILHAEKEPEFLNISIQDSRLFFQLQSGNSFYMLSLTSLQSVNDGTWHEVTLSMTDPLSQTSRWQMEVDNETPFVTSTIATGSLNFLKDNTDIYVGDRAIDNIKGLQGCLSTIEIGGIYLSYFENVHGFINKPQEEQFLKISTNSVVTGCLQLNVCNSNPCLHGGNCEDIYSSYHCSCPLGWSGKHCELNIDECFSNPCIHGNCSDRVAAYHCTCEPGYTGVNCEVDIDNCQSHQCANGATCISHTNGYSCLCFGNFTGKFCRQSRLPSTVCGNEKTNLTCYNGGNCTEFQTELKCMCRPGFTGEWCEKDIDECASDPCVNGGLCQDLLNKFQCLCDVAFAGERCEVDLADDLISDIFTTIGSVTVALLLILLLAIVASVVTSNKRATQGTYSPSRQEKEGSRVEMWNLMPPPAMERLI

SEQ ID NO: 19391 - protein, 762 aa, Homo sapiens; identical to SEQ ID NO: 12236

SEQ ID NO: 19392 - protein, 638 aa, Homo sapiens
MVSKLSQLQTELLAALLESGLSKEALIQALGEPGPYLLAGEGPLDKGESCGGGRGELAELPNGLGETRGSEDETDDDGEDFTPPILKELENLSPEEAAHQKAVVETLLQEDPWRVAKMVKSYLQQHNIPQREVVDTTGLNQSHLSQHLNKGTPMKTQKRAALYTWYVRKQREVAQQFTHAGQGGLIEEPTGDELPTKKGRRNRFKWGPASQQILFQAYERQKNPSKEERETLVEECNRAECIQRGVSPSQAQGLGSNLVTEVRVYNWFANRRKEEAFRHKLAMDTYSGPPPGPGPGPALPAHSSPGLPPPALSPSKVHGVRYGQPATSETAEVPSSSGGPLVTVSTPLHQVSPTGLEPSHSLLSTEAKLVSAAGGPLPPVSTLTALHSLEQTSPGLNQQPQNLIMASLPGVMTIGPGEPASLGPTFTNTGASTLVIGLASTQAQSVPVINSMGSSLTTLQPVQFSQPLHPSYQQPLMPPVQSHVTQSPFMATMAQLQSPHALYSHKPEVAQYTHTGLLPQTMLITDTTNLSALASLTPTKQEAALLPQVFTSDTEASSESGLHTPASQATTLHVPSQDPASIQHLQPAHRLSASPTVSSSSLVLYQSSDSSNGQSHLLPSNHSVIETFISTQMASSSQ

SEQ ID NO: 19393 - protein, 724 aa, Homo sapiens
MIKVEHLKEKLISQAQEVSRLRSELGGTDLEKHRDLLMVENERLRQEMRRCEAELQELRTKPAGPCPGCEHSQESAQLRDKLSQLQLEMAESKGMLSELNLEVQQKTDRLAEVELRLKDCLAEKAQEEERLSRRLRDSHETIASLRAQSPPVKYVIKTVEVESSKTKQALSESQARNQHLQEQVAMQRQVLKEMEQQLQSSHQLTARLRAQIAMYESELERAHGQMLEEMQSLEEDKNRAIEEAFARAQVEMKAVHENLAGVRTNLLTLQPALRTLTNDYNGLKRQVRGFPLLLQEALRSVKAEIGQAIEEVNSNNQELLRKYRRELQLRKKCHNELVRLKGNIRVIARVRPVTKEDGEGPEATNAVTFDADDDSIIHLLHKGKPVSFELDKVFSPQASQQDVFQEVQALVTSCIDGFNVCIFAYGQTGAGKTYTMEGTAENPGINQRALQLLFSEVQEKASDWEYTITVSAAEIYNEVLRDLLGKEPQEKLEIRLCPDGSGQLYVPGLTEFQVQSVDDINKVFEFGHTNRTTEFTNLNEHSSRSHALLIVTVRGVDCSTGLRTTGKLNLVDLAGSERVGKSGAEGSRLREAQHINKSLSALGDVIAALRSRQGHVPFRNSKLTYLLQDSLSGDSKTLMVVQVSPVEKNTSETLYSLKFAERVRSVELGPGLRRAELGSWSSQEHLEWEPACQTPQPSARAHSAPSSGTSSRPGSIRRKLQPSA

SEQ ID NO: 19394 - protein, 853 aa, Homo sapiens
MPSTNRAGSLKDPEIAELFFKEDPEKLFTDLREIGHGSFGAVYFARDVRTNEVVAIKKMSYSGKQSTEKWQDIIKEVKFLQRIKHPNSIEYKGCYLREHTAWLVMEYCLGSASDLLEVHKKPLQEVEIAAITHGALQGLAYLHSHTMIHRDIKAGNILLTEPGQVKLADFGSASMASPANSFVGTPYWMAPEVILAMDEGQYDGKVDVWSLGITCIELAERKPPLFNMNAMSALYHIAQNESPTLQSNEWSDYFRNFVDSCLQKIPQDRPTSEELLKHIFVLRERPETVLIDLIQRTKDAVRELDNLQYRKMKKLLFQEAHNGPAVEAQEEEEEQDHGVGRTGTVNSVGSNQSIPSMSISASSQSSSVNSLPDVSDDKSELDMMEGDHTVMSNSSVIHLKPEEENYREEGDPRTRASDPQSPPQVSRHKSHYRNREHFATIRTASLVTRQMQEHEQDSELREQMSGYKRMRRQHQKQLMTLENKLKAEMDEHRLRLDKDLETQRNNFAAEMEKLIKKHQAAMEKEAKVMSNEEKKFQQHIQAQQKKELNSFLESQKREYKLRKEQLKESKELQIKKQFQDTCKIQTRQYKALRNHLLETTPKSEHKAVLKRLKEEQTRKLAILAEQYDHSINEMLSTQALRLDEAQEAECQVLKMQLQQELELLNAYQSKIKMQAEAQHDRELRELEQRVSLRRALLEQKIEEEMLALQNERTERIRSLLERQAREIEAFDSESMRLGFSNMVLSNLSPEAFSHSYPGASGWSHNPTGGPGPHWGHPMGGPPQAWGHPMQGGPQPWGHPSGPMQGVPRGSSMGVRNSPQALRRTASGGRTEQGMSRSTSVTSQISNGSHMSYT

SEQ ID NO: 19395 - protein, 93 aa, Homo sapiens
MRKGVLKDPEIADLFYKDDPEELFIGLHEIGHGSFGAVYFATNAHTSEVVAIKKMSYSGKQTHEKWQDILKEVKFLRQLKHPNTIEYKGCYLK

SEQ ID NO: 19396 - protein, 335 aa, Homo sapiens
MCVCAEDGKTLPVAVPIEDMQRIHLRFMFRHRSSLESKDKGEKNFAMSYVKLMKEDGTTLHDGFHDLVVLKGDSKKMEDASAYLTLPSYRHHVENKGATLSRSSSSVGGLSVSSRDVFSISTLVCSTKLTQNVGLLGLLKWRMKPQLESMRRLFESINNLMKSQYKTTILLQVAALKYIPSVLHDVEMVFDAKLLSQLLYEFYTCIPPVKLQKQKVQSMNEIVQSNLFKKQECRDILLPVITKELKELLEQKDDMQHQVLERKYCVELLNSILEVLSYQDAAFTYHHIQEIMVQLLRTVNRTVITMGRDHILIGACCNCGFPSSTPHSLIQWLWG

SEQ ID NO: 19397 - protein, 508 aa, Homo sapiens
MDEAGNHHSEQTITRTENQTPHALAHRRMGPCLSCSQLYSQYLGLSQTHSSPPLALDPPRRQRQERTVYTESQQKVLEFYFQKDQYPNYDQRLNLAEMLSLREQQLQVWFKNRRAKLARERRLQQQPQRVPGQRGRGARAAPLVPAASASAPQRGPSGILPAAEPTICSLHQAWGGPGCRAQKGIPAALSPGPGPIPAPIPGPAQIPGPLPGSIPGPIPGPAQIPSPIPAPIPGPISGPVQIPGPFRGPIPGPISGPAPIPGPISGPFSGPNPGPIPGPNPGPIPGPISGPIPGPISVPIPGPIPGPISGPISGPNPGPIPGPIPGPISGPNPGPIPGPISGPNPGLIPGPIPGPISGPGPIIGPIPSPAQIPGPGRLQGPGPILSPGRMRSPGSLPGLAPILGPGSGPGSGSVPAPIPGPGSLPAPAPLWPQSPDASDFLPDTQLFPHFTELLLPLDPLEGSSVSTMTSQYQEGDDSMGKKHSGSQPQEEGGSVNENHSGPRLLLDL

SEQ ID NO: 19398 - protein, 353 aa, Homo sapiens
MLCRLCWLVSYSLAVLLLGCLLFLRKAAKPAGDPTAHQPFWAPPTPRHSRCPPNHTVSSASLSLPSRHRLFLTYRHCRNFSILLEPSGCSKDTFLLLAIKSQPGHVERRAAIRSTWGRVGGWARGRQLKLVFLLGVAGSAPPAQLLAYESREFDDILQWDFTEDFFNLTLKELHLQRWVVAACPQAHFMLKGDDDVFVHVPNVLEFLDGWDPAQDLLVGDVIRQALPNRNTKVKYFIPPSMYRATHYPPYAGGGGYVMSRATVRRLQAIMEDAELFPIDDVFVGMCLRRLGLSPMHHAGFKTFGIRRPLDPLDPCLYRGLLLVHRLSPLEMWTMWALVTDEGLKCAAGPIPQR

SEQ ID NO: 19399 - protein, 440 aa, Homo sapiens
MALLPRALSAGAGPSWRRAARAFRGFLLLLPEPAALTRALSRAMACRQEPQPQGPPPAAGAVASYDYLVIGGGSGGLASARRAAELGARAAVVESHKLGGTCVNVGCVPKKVMWNTAVHSEFMHDHADYGFPSCEGKFNWRVIKEKRDAYVSRLNAIYQNNLTKSHIEIIRGHAAFTSDPKPTIEVSGKKYTAPHILIATGGMPSTPHESQIPGASLGITSDGFFQLEELPGRSVIVGAGYIAVEMAGILSALGSKTSLMIRHDKGIQTDDKGHIIVDEFQNTNVKGIYAVGDVCGKALLTPVAIAAGRKLAHRLFEYKEDSKLDYNNIPTVVFSHPPIGTVGLTEDEAIHKYGIENVKTYSTSFTPMYHAVTKRKTKCVMKMVCANKEEKVVGIHMQGLGCDEMLQGFAVAVKMGATKADFDNTVAIHPTSSEELVTLR

SEQ ID NO: 19400 - protein, 245 aa, Homo sapiens
MLQACKMEGFPLVPPPSEDLVPYDTDLYQRQTHEYYPYLSSDGESHSDHYWDFHPHHVHSEFESFAENNFTELQSVQPPQLQQLYRHMELEQMHVLDTPMVPPHPSLGHQVSYLPRMCLQYPSLSPAQPSSDEEEGERQSPPLEVSDGEADGLEPGPGLLPGETGGAPGPPPWPRPWPCLCPAPTQPGQLTQQPRHRVACVCVCMFASVCVLWGCLWLSLCVCICCVVHTGISMKCARCVCLSVP

SEQ ID NO: 19401 - protein, 411 aa, Homo sapiens
MIRQERSTSYQEAVRPALPSSKPCLLTSPAVLVKLLSSSASTSRPPNLGHLWQPSSSVPLHRAASLAKVRQFQLSEELVQVVENSELADEQDKETVRVQGPGILPGLDSESASSSIRFSKACLKNVFSVLLIFIYLLLMAVAVFLVYRTITDFREKLKHPVMSVSYKEVDRYDAPGIALYPGQAQLLSCKHHYEVIPPLTSPGQPGDMNCTTQRINYTDPFSNQTVKSALIVQGPREVKKRELVFLQFRLNKSSEDFSAIDYLLFSSFQEFLQSPNRVGFMQACESAYSSWKFSGGFRTWVKMSLVKTKEEDGREAVEFRQETSVVNYIDQRPAAKKSAQLFFVVFEWKDPFIQKVQDIVTANPWNTIALLCGAFLALFKAAEFAKLSIKWMIKIRKRYLKRRGQATSHIS

SEQ ID NO: 19402 - protein, 507 aa, Homo sapiens
MMAAAPIQQNGTHTGVPIDLDPPDSRKRPLEAPPEAGSTKRTNTGEDGQYFLKVLIPSYAAGSIIGKGGQTIVQLQKETGATIKLSKSKDFYPGTTERVCLIQGTVEALNAVHGFIAEKIREMPQNVAKTEPVSILQPQTTVNPDRIKQTLPSSPTTTKSSPSDPMTTSRANQVKIIVPNSTAGLIIGKGGATVKAVMEQSGAWVQLSQKPDGINLQERVVTVSGEPEQNRKAVELIIQKIQEDPQSGSCLNISYANVTGPVANSNPTGSPYANTAEVLPTAAAAAGLLGHANLAGVAAFPAVLSGFTGNDLVAITSALNTLASYGYNLNTLGLGLSQAAATGALAAAAASANPAAAAANLLATYASEASASGSTAGGTAGTFALGSLAAATAATNGYFGAASPLAASAILGTEKSTDGSKDVVEIAVPENLVGAILGKGGKTLVEYQELTGARIQISKKGEFVPGTRNRKVTITGTPAATQAAQYLITQRITYEQGVRAANPQKVG

SEQ ID NO: 19403 - protein, 239 aa, Homo sapiens
MGDLWLFLLLPLSAFHGVKGCLECDPKFIEDVGSLLGNLIPSEVPGRTQLLERQIKEMIHLSFKVSHSDKRLRVLAVQQVVKLRTWLKNEFYKLGNETWKGVFIYQGKLLDVCQNLESKLKELLKNFSEIACSEDCIVVEGPILDCWTCLRMTNRCFKGEYCGDEDPRKAENREIALFLILLATAVILGSAVLLFHFCIFHRRKMKAIRRSLKEYVEKKLEELMGKIDEKEEKDFRLRK

SEQ ID NO: 19404 - protein, 538 aa, Homo sapiens
MVKINQNLHRLQVAWRDAQQSSSPAADNLREQFERLMTIYLSTKTAMTEPQMLQNCLNLQVSMAVLLVQLAIGNEGSQPIELTFPLPDGYSSLAYVPEFFADNLGDFLIFLRRFADDILETSADSLEHVLHFITIFTGSIERMKNPHLRAKLAEVLEAVMPHLDQTPNPLVSSVFHRKRVFCNFQYAPQLAEALIKVFVDIEFTGDPHQFEQKFNYRRPMYPILRYMWGTDTYRESIKDLADYASKNLEAMNPPLFLRFLNLLMNDAIFLLDEAIQYLSKIKIQQIEKDRGEWDSLTPEARREKEAGLQMFGQLARFHNIMSNETIGTLAFLTSEIKSLFVHPFLAERIISMLNYFLQHLVGPKMGALKVKDFSEFDFKPQQLVSDICTIYLNLGDEENFCATVPKDGRSYSPTLFAQTVRVLKKINKPGNMIMAFSNLAERIKSLADLQQQEEETYADACDEFLDPIMSTLMCDPVVLPSSRVTVDRSTIARHLLSDQTDPFNRSPLTMDQIRPNTELKEKIQRWLAERKQQKEQLE

SEQ ID NO: 19405 - protein, 188 aa, Homo sapiens
MDRFLGFVKAIRRSRRRKGKKYRPEEDYHEGYEDVYYYASEHFRNESPYTKSASQTKPPDGALAVRRQSIPEEFKGSTVVELMKKEGTTLGLTVSGGIDKDGKPRVSNLRQGGIAARSDQLDVGDYIKAVNGINLAKFRHDEIISLLKNVGERVVLEVEYELPPVSVQGSSVIFRTVEVTLHKEGNTF

SEQ ID NO: 19406 - protein, 2789 aa, Homo sapiens
MRLGGGQLVSEELMNLGESFIQTNDPSLKLFQCAVCNKFTTDNLDMLGLHMNVERSLSEDEWKAVMGDSYQCKLCRYNTQLKANFQLHCKTDKHVQKYQLVAHIKEGGKANEWRLKCVAIGNPVHLKCNACDYYTNSLEKLRLHTVNSRHEASLKLYKHLQQHESGVEGESCYYHCVLCNYSTKAKLNLIQHVRSMKHQRSESLRKLQRLQKGLPEEDEDLGQIFTIRRCPSTDPEEAIEDVEGPSETAADPEELAKDQEGGASSSQAEKELTDSPATSKRISFPGSSESPLSSKRPKTAEEIKPEQMYQCPYCKYSNADVNRLRVHAMTQHSVQPMLRCPLCQDMLNNKIHLQLHLTHLHSVAPDCVEKLIMTVTTPEMVMPSSMFLPAAVPDRDGNSNLEEAGKQPETSEDLGKNILPSASTEQSGDLKPSPADPGSVREDSGFICWKKGCNQVFKTSAALQTHFNEVHAKRPQLPVSDRHVYKYRCNQCSLAFKTIEKLQLHSQYHVIRAATMCCLCQRSFRTFQALKKHLETSHLELSEADIQQLYGGLLANGDLLAMGDPTLAEDHTIIVEEDKEEESDLEDKQSPTGSDSGSVQEDSGSEPKRALPFRKGPNFTMEKFLDPSRPYKCTVCKESFTQKNILLVHYNSVSHLHKLKRALQESATGQPEPTSSPDNKPFKCNTCNVAYSQSSTLEIHMRSVLHQTKARAAKLEAASGSSNGTGNSSSISLSSSTPSPVSTSGSNTFTTSNPSSAGIAPSSNLLSQVPTESVGMPPLGNPIGANIASPSEPKEANRKKLADMIASRQQQQQQQQQQQQQQQQQQQAQTLAQAQAQVQAHLQQELQQQAALIQSQLFNPTLLPHFPMTTETLLQLQQQQHLLFPFYIPSAEFQLNPEVSLPVTSGALTLTGTGPGLLEDLKAQVQVPQQSHQQILPQQQQNQLSIAQSHSALLQPSQHPEKKNKLVIKEKEKESQRERDSAEGGEGNTGPKETLPDALKAKEKKELAPGGGSEPSMLPPRIASDARGNATKALLENFGFELVIQYNENKQKVQKKNGKTDQGENLEKLECDSCGKLFSNILILKSHQEHVHQNYFPFKQLERFAKQYRDHYDKLYPLRPQTPEPPPPPPPPPPPPLPAAPPQPASTPAIPASAPPITSPTIAPAQPSVPLTQLSMPMELPIFSPLMMQTMPLQTLPAQLPPQLGPVEPLPADLAQLYQHQLNPTLLQQQNKRPRTRITDDQLRVLRQYFDINNSPSEEQIKEMADKSGLPQKVIKHWFRNTLFKERQRNKDSPYNFSNPPITSLEELKIDSRPPSPEPPKQEYWGSKRSSRTRFTDYQLRVLQDFFDANAYPKDDEFEQLSNLLNLPTRVIVVWFQNARQKARKNYENQGEGKDGERRELTNDRYIRTSNLNYQCKKCSLVFQRIFDLIKHQKKLCYKDEDEEGQDDSQNEDSMDAMEILTPTSSSCSTPMPSQAYSAPAPSANNTASSAFLQLTAEAEELATFNSKTEAGDEKPKLAEAPSAQPNQTQEKQGQPKPELQQQEQPEQKTNTPQQKLPQLVSLPSLPQPPPQAPPPQCPLPQSSPSPSQLSHLPLKPLHTSTPQQLANLPPQLIPYQCDQCKLAFPSFEHWQEHQQLHFLSAQNQFIHPQFLDRSLDMPFMLFDPSNPLLASQLLSGAIPQIPASSATSPSTPTSTMNTLKRKLEEKASASPGENDSGTGGEEPQRDKRLRTTITPEQLEILYQKYLLDSNPTRKMLDHIAHEVGLKKRVVQVWFQNTRARERKGQFRAVGPAQAHRRCPFCRALFKAKTALEAHIRSRHWHEAKRAGYNLTLSAMLLDCDGGLQMKGDIFDGTSFSHLPPSSSDGQGVPLSPVSKTMELSPRTLLSPSSIKVEGIEDFESPSMSSVNLNFDQTKLDNDDCSSVNTAITDTTTGDEGNADNDSATGIATETKSSSAPNEGLTKAAMMAMSEYEDRLSSGLVSPAPSFYSKEYDNEGTVDYSETSSLADPCSPSPGASGSAGKSGDSGDRPGQKRFRTQMTNLQLKVLKSCFNDYRTPTMLECEVLGNDIGLPKRVVQVWFQNARAKEKKSKLSMAKHFGINQTSYEGPKTECTLCGIKYSARLSVRDHIFSQQHISKVKDTIGSQLDKEKEYFDPATVRQLMAQQELDRIKKANEVLGLAAQQQGMFDNTPLQALNLPTAYPALQGIPPVLLPGLNSPSLPGFTPSNTALTSPKPNLMGLPSTTVPSPGLPTSGLPNKPSSASLSSPTPAQATMAMGPQQPPQQQQQQQQPQVQQPPPPPAAQPPPTPQLPLQQQQQRKDKDSEKVKEKEKAHKGKGEPLPVPKKEKGEAPTATAATISAPLPTMEYAVDPAQLQALQAALTSDPTALLTSQFLPYFVPGFSPYYAPQIPGALQSGYLQPMYGMEGLFPYSPALSQALMGLSPGSLLQQYQQYQQSLQEAIQQQQQRQLQQQQQQKVQQQQPKASQTPVPPGAPSPDKDPAKESPKPEEQKNTPREVSPLLPKLPEEPEAESKSADSLYDPFIVPKVQYKLVCRKCQAGFSDEEAARSHLKSLCFFGQSVVNLQEMVLHVPTGGGGGGSGGGGGGGGGGGGGGSYHCLACESALCGEEALSQHLESALHKHRTITRAARNAKEHPSLLPHSACFPDPSTASTSQSAAHSNDSPPPPSAAAPSSASPHASRKSWPQVVSRASAAKPPSFPPLSSSSTVTSSSCSTSGVQPSMPTDDYSEESDTDLSQKSDGPASPVEGPKDPSCPKDSGLTSVGTDTFRL

SEQ ID NO: 19407 - protein, 1907 aa, Homo sapiens
MLSHGAGLALWITLSLLQTGLAEPERCNFTLAESKASSHSVSIQWRILGSPCNFSLIYSSDTLGAALCPTFRIDNTTYGCNLQDLQAGTIYNFRIISLDEERTVVLQTDPLPPARFGVSKEKTTSTSLHVWWTPSSGKVTSYEVQLFDENNQKIQGVQIQESTSWNEYTFFNLTAGSKYNIAITAVSGGKRSFSVYTNGSTVPSPVKDIGISTKANSLLISWSHGSGNVERYRLMLMDKGILVHGGVVDKHATSYAFHGLTPGYLYNLTVMTEAAGLQNYRWKLVRTAPMEVSNLKVTNDGSLTSLKVKWQRPPGNVDSYNITLSHKGTIKESRVLAPWITETHFKELVPGRLYQVTVSCVSGELSAQKMAVGRTFPDKVANLEANNNGRMRSLVVSWSPPAGDWEQYRILLFNDSVVLLNITVGKEETQYVMDDTGLVPGRQYEVEVIVESGNLKNSERCQGRTVPLAVLQLRVKHANETSLSIMWQTPVAEWEKYIISLADRDLLLIHKSLSKDAKEFTFTDLVPGRKYMATVTSISGDLKNSSSVKGRTVPAQVTDLHVANQGMTSSLFTNWTQAQGDVEFYQVLLIHENVVIKNESISSETSRYSFHSLKSGSLYSVVVTTVSGGISSRQVVVEGRTVPSSVSGVTVNNSGRNDYLSVSWLLAPGDVDNYEVTLSHDGKVVQSLVIAKSVRECSFSSLTPGRLYTVTITTRSGKYENHSFSQERTVPDKVQGVSVSNSARSDYLRVSWVHATGDFDHYEVTIKNKNNFIQTKSIPKSENECVFVQLVPGRLYSVTVTTKSGQYEANEQGNGRTIPEPVKDLTLRNRSTEDLHVTWSGANGDVDQYEIQLLFNDMKVFPPFHLVNTATEYRFTSLTPGRQYKILVLTISGDVQQSAFIEGFTVPSAVKNIHISPNGATDSLTVNWTPGGGDVDSYTVSAFRHSQKVDSQTIPKHVFEHTFHRLEAGEQYQIMIASVSGSLKNQINVVGRTVPAAVTDLRITENSTRHLSFRWTASEGELSWYNIFLYNPDGNLQERAQVDPLVQSFSFQNLLQGRMYKMVIVTHSGELSNESFIFGRTVPASVSHLRGSNRNTTDSLWFNWSPASGDFDFYELILYNPNGTKKENWKDKDLTEWRFQGLVPGRKYVLWVVTHSGDLSNKVTAESRTAPSPPSLMSFADIANTSLAITWKGPPDWTDYNDFELQWLPRDALTVFNPYNNRKSEGRIVYGLRPGRSYQFNVKTVSGDSWKTYSKPIFGSVRTKPDKIQNLHCRPQNSTAIACSWIPPDSDFDGYSIECRKMDTQEVEFSRKLEKEKSLLNIMMLVPHKRYLVSIKVQSAGMTSEVVEDSTITMIDRPPPPPPHIRVNEKDVLISKSSINFTVNCSWFSDTNGAVKYFTVVVREADGSDELKPEQQHPLPSYLEYRHNASIRVYQTNYFASKCAENPNSNSKSFNIKLGAEMESLGGKCDPTQQKFCDGPLKPHTAYRISIRAFTQLFDEDLKEFTKPLYSDTFFSLPITTESEPLFGAIEGVSAGLFLIGMLVAVVALLICRQKVSHGRERPSARLSIRRDRPLSVHLNLGQKGNRKTSCPIKINQFEGHFMKLQADSNYLLSKEYEELKDVGRNQSCDIALLPENRGKNRYNNILPYDATRVKLSNVDDDPCSDYINASYIPGNNFRREYIVTQGPLPGTKDDFWKMVWEQNVHNIVMVTQCVEKGRVKCDHYWPADQDSLYYGDLILQMLSESVLPEWTIREFKICGEEQLDAHRLIRHFHYTVWPDHGVPETTQSLIQFVRTVRDYINRSPGAGPTVVHCSAGVGRTGTFIALDRILQQLDSKDSVDIYGAVHDLRLHRVHMVQTECQYVYLHQCVRDVLRARKLRSEQENPLFPIYENVNPEYHRDPVYSRH

SEQ ID NO: 19408 - protein, 905 aa, Homo sapiens
MTLTERLREKISRAFYNHGLLCASYPIPIILFGYFTLVPAIQEFCLFAVVGLVSDFFLQMLFFTTVLSIDIRRMELADLNKRLPPEACLPSAKPVGQPTRYERQLAVRPSTPHTITLQPSSFRNLRLPKRLRVVYFLARTRLAQRLIMAGTVVWIGILVYTDPAGLRNYLAAQVTEQSPLGEGALAPMPVPSGMLPPSHPDPAFSIFPPDAPKLPENQTSPGESPERGGPAEVVHDSPVPEVTWGPEDEELWRKLSFRHWPTLFSYYNITLAKRYISLLPVIPVTLRLNPREALEGRHPQDGRSAWPPPGPIPAGHWEAGPKGPGGVQAHGDVTLYKVAALGLATGIVLVLLLLCLYRVLCPRNYGQLGGGPGRRRRGELPCDDYGYAPPETEIVPLVLRGHLMDIECLASDGMLLVSCCLAGHVCVWDAQTGDCLTRIPRPGQRRDSGVGSGLEAQESWERLSDGGKAGPEEPGDSPPLRHRPRGPPPPSLFGDQPDLTCLIDTNFSAQPRSSQPTQPEPRHRAVCGRSRDSPGYDFSCLVQRVYQEEGLAAVCTPALRPPSPGPVLSQAPEDEGGSPEKGSPSLAWAPSAEGSIWSLELQGNLIVVGRSSGRLEVWDAIEGVLCCSSEEVSSGITALVFLDKRIVAARLNGSLDFFSLETHTALSPLQFRGTPGRGSSPASPVYSSSDTVACHLTHTVPCAHQKPITALKAAAGRLVTGSQDHTLRVFRLEDSCCLFTLQGHSGAITTVYIDQTMVLASGGQDGAICLWDVLTGSRVSHVFAHRGDVTSLTCTTSCVISSGLDDLISIWDRSTGIKFYSIQQDLGCGASLGVISDNLLVTGGQGCVSFWDLNYGDLLQTVYLGKNSEAQPARQILVLDNAAIVCNFGSELSLVYVPSVLEKLD

SEQ ID NO: 19409 - protein, 555 aa, Homo sapiens
MRRPLSKCGMEPGGGDASLTLHGLQNRSHGKIKLRKRKSTLYFNTQEKSARRRGDLLGENIYLLLFTIALRILNCFLVQTSFVPDEYWQSLEVSHHMVFNNYGYLTWEWTERLRSYTYPLIFASIYKILHLLGKDSVQLLIWIPRLAQALLSAVADVRLYSLMKQLENQEVARWVFFCQLCSWFTWYCCTRTLTNTMETVLTIIALFYYPLEGSKSMNSVKYSSLVALAFIIRPTAVILWTPLLFRHFCQEPRKLDLILHHFLPVGFVTLSLSLMIDRIFFGQWTLVQFNFLKFNVLQNWGTFYGSHPWHWYFSQGFPVILGTHLPFFIHGCYLAPKRYRILLVTVLWTLLVYSMLSHKEFRFIYPVLPFCMVFCGYSLTHLKTWKKPALSFLFLSNLFLALYTGLVHQRGTLDVMSHIQKVCYNNPNKSSASIFIMMPCHSTPYYSHVHCPLPMRFLQCPPDLTGKSHYLDEADVFYLNPLNWLHREFHDDASLPTHLITFSILEEEISAFLISSNYKRTAVFFHTHLPEGRIGSHIYVYERKLKGKFNMKMKF

SEQ ID NO: 19410 - protein, 475 aa, Homo sapiens
MEDIQTNAELKSTQEQSVPADDSMKVKDEYSERDENVLKSEPMGNAEEPEIPYSYSREYNEYENIKLERHVVSFDSSRPTSGKMNCDVCGLSCISFNVLMVHKRSHTGERPFQCNQCGASFTQKGNLLRHIKLHTGEKPFKCHLCNYACQRRDALTGHLRTHSVEKPYKCEFCGRSYKQRSSLEEHKERCRTFLQSTDPGDTASAEARHIKAEMGSERALVLDRLASNVAKRKSSMPQKFIGEKRHCFDVNYNSSYMYEKESELIQTRMMDQAINNAISYLGAEALRPLVQTPPAPTSEMVPVISSMYPIALTRAEMSNGAPQELEKKSIHLPEKSVPSERGLSPNNSGHDSTDTDSNHEERQNHIYQQNHMVLSRARNGMPLLKEVPRSYELLKPPPICPRDSVKVINKEGEVMDVYRCDHCRVLFLDYVMFTIHMGCHGFRDPFECNMCGYRSHDRYEFSSHIARGEHRALLK

SEQ ID NO: 19411 - protein, 736 aa, Homo sapiens [sequence omitted]

SEQ ID NO: 19412 - protein, 998 aa, Homo sapiens
ELDEDPAAEPAEAGVGTTVAPLPPAPAPSSQPVPAGMTVPPPPAAAPPLPRALAKPAVFIPVNRSPEMQEERLKLPILSEEQVIMEAVAEHPIVIVCGETGSGKTTQVPQFLYEAGFSSEDSIIGVTEPRRVAAVAMSQRVAKEMNLSQRVVSYQIRYEGNVTEETRIKFMTDGVLLKEIQKDFLLLRYKVVIIDEAHERSVYTDILIGLLSRIVTLRAKRNLPLKLLIMSATLRVEDFTQNPRLFAKPPPVIKVESRQFPVTVHFNKRTPLEDYSGECFRKVCKIHRMLPAGGILVFLTGQAEVHALCRRLRKAFPPSRARPQEKDDDQKDSVEEMRKFKKSRARAKKARAEVLPQINLDHYSVLPAGEGDEDREAEVDEEEGALDSDLDLDLGDGGQDGGEQPDASLPLHVLPLYSLLAPEKQAQVFKPPPEGTRLCVVATNVAETSLTIPGIKYVVDCGKVKKRYYDRVTGVSSFRVTWVSQASADQRAGRAGRTEPGHCYRLYSSAVFGDFEQFPPPEITRRPVEDLILQMKALNVEKVINFPFPTPPSVEALLAAEELLIALGALQPPQKAERVKQLQENRLSCPITALGRTMATFPVAPRYAKMLALSRQHGCLPYAITIVASMTVRELFEELDRPAASDEELTRLKSKRARVAQMKRTWAGQGASLKLGDLMVLLGAVGACEYASCTPQFCEANGLRYKAMMEIRRLRGQLTTAVNAVCPEAELFVDPKMQPPTESQVTYLRQIVTAGLGDHLARRVQSEEMLEDKWRNAYKTPLLDDPVFIHPSSVLFKELPEFVVYQEIVETTKMYMKGVSSVEVQWIPALLPSYCQFDKPLEEPAPTYCPERGRVLCHRASVFYRVGWPLPAIEVDFPEGIDRYKHFARFLLEGQVFRKLASYRSCLLSSPGTMLKTWARLQPRTESLLRALVAEKADCHEALLAAWKKNPKCEFDQGQGVGVDRMGSLRQGLCALCTVSPGLAEGSGPTAAGQLFAT

SEQ ID NO: 19413 - protein, 494 aa, Homo sapiens [sequence omitted]

SEQ ID NO: 19414 - protein, 301 aa, Homo sapiens
MNTGVEAGETACKLARKWGYTVKGIQKYKAKIVFAAGNFWGRTLSAISSSTDPTSYDGFGPFMPGFDIIPYNDLPALERALQDPNVAAFMVEPIQGEAGVVVPDPGYLMGVRELCTRHQVLFIADEIQTGLARTGRWLAVDYENVRPDIVLLGKALSGGLYPVSAVLCDDDIMLTIKPGEHGSTYGGNPLGCRVAIAALEVLEEENLAENADKLGIILRNELMKLPSDVVTAVRGKGLLNAIVIKETKDWDAWKVCLRLRDNGLLAKPTHGDIIRFAPPLVIKEDELRESIEIINKTILSF

SEQ ID NO: 19415 - protein, 927 aa, Homo sapiens
PGGPADREGTIKPGDRLLSVDGIRLLGTTHAEAMSILKQCGQEAALLIEYDVSVMDSVATASGPLLVEVAKTPGASLGVALTTSMCCNKQVIVIDKIKSASIADRCGALHVGDHILSIDGTSMEYCTLAEATQFLANTTDQVKLEILPHHQTRLALKGPDHVKIQRSDRQLTWDSWASNHSSLHTNHHYNTYHPDHCRVPALTFPKAPPPNSPPALVSSSFSPTSMSAYSLSSLNMGTLPRSLYSTSPRGTMMRRRLKKKDFKSSLSLASSTVGLAGQVVHTETTEVVLTADPVTGFGIQLQGSVFATETLSSPPLISYIEADSPAERCGVLQIGDRVMAINGIPTEDSTFEEASQLLRDSSITSKVTLEIEFDVAESVIPSSGTFHVKLPKKHNVELGITISSPSSRKPGDPLVISDIKKGSVAHRTGTLELGDKLLAIDNIRLDNCSMEDAVQILQQCEDLVKLKIRKDEDNSDEQESSGAIIYTVELKRYGGPLGITISGTEEPFDPIIISSLTKGGLAERTGAIHIGDRILAINSSSLKGKPLSEAIHLLQMAGETVTLKIKKQTDAQSASSPKKFPISSHLSDLGDVEEDSSPAQKPGKLSDMYPSTVPSVDSAVDSWDGSAIDTSYGTQGTSFQASGYNFNTYDWRSPKQRGSLSPVTKPRSQTYPDVGLSYEDWDRSTASGFAGAADSAETEQEENFWSQALEDLETCGQSGILRELEATIMSGSTMSLNHEAPTPRSQLGRQASFQERSSSRPHYSQTTRSNTLPSDVGRKSVTLRKMKQEIKEIMSPTPVELHKVTLYKDSDMEDFGFSVADGLLEKGVYVKNIRPAGPGDLGGLKPYDRLLQVNHVRTRDFDCCLVVPLIAESGNKLDLVISRNPLASQKSIDQQSLPGDWSEQNSAFFQQPSHGGNLETREPTNTL

SEQ ID NO: 19416 - protein, 1438 aa, Homo sapiens
MSMLKPSGLKAPTKILKPGSTALKTPTAVVAPVEKTISSEKASSTPSSETQEEFVDDFRVGERVWVNGNKPGFIQFLGETQFAPGQWAGIVLDEPIGKNDGSVAGVRYFQCEPLKGIFTRPSKLTRKVQAEDEANGLQTTPASRATSPLCTSTASMVSSSPSTPSNIPQKPSQPAAKEPSATPPISNLTKTASESISNLSEAGSIKKGERELKIGDRVLVGGTKAGVVRFLGETDFAKGEWCGVELDEPLGKNDGAVAGTRYFQCQPKYGLFAPVHKVTKIGFPSTTPAKAKANAVRRVMATTSASLKRSPSASSLSSMSSVASSVSSRPSRTGLLTETSSRYARKISGTTALQEALKEKQQHIEQLLAERDLERAEVAKATSHVGEIEQELALARDGHDQHVLELEAKMDQLRTMVEAADREKVELLNQLEEEKRKVEDLQFRVEEESITKGDLEQKSQISEDPENTQTKLEHARIKELEQSLLFEKTKADKLQRELEDTRVATVSEKSRIMELEKDLALRVQEVAELRRRLESNKPAGDVDMSLSLLQEISSLQEKLEVTRTDHQREITSLKEHFGAREETHQKEIKALYTATEKLSKENESLKSKLEHANKENSDVIALWKSKLETAIASHQQAMEELKVSFSKGLGTETAEFAELKTQIEKMRLDYQHEIENLQNQQDSERAAHAKEMEALRAKLMKVIKEKENSLEAIRSKLDKAEDQHLVEMEDTLNKLQEAEIKVKELEVLQAKCNEQTKVIDNFTSQLKATEEKLLDLDALRKASSEGKSEMKKLRQQLEAAEKQIKHLEIEKNAESSKASSITRELQGRELKLTNLQENLSEVSQVKETLEKELQILKEKFAEASEEAVSVQRSMQETVNKLHQKEEQFNMLSSDLEKLRENLADMEAKFREKDEREEQLIKAKEKLENDIAEIMKMSGDNSSQLTKMNDELRLKERDVEELQLKLTKANENASFLQKSIEDMTVKAEQSQQEAAKKHEEEKKELERKLSDLEKKMETSHNQCQELKARYERATSETKTKHEEILQNLQKTLLDTEDKLKGAREENSGLLQELEELRKQADKAKAAQTAEDAMQIMEQMTKEKTETLASLEDTKQTNAKLQNELDTLKENNLKNVEELNKSKELLTVENQKMEEFRKEIETLKQAAAQKSQQLSALQEENVKLAEELGRSRDEVTSHQKLEEERSVLNNQLLEMKKRESKFIKDADEEKASLQKSISITSALLTEKDAELEKLRNEVTVLRGENASAKSLHSVVQTLESDKVKLELKVKNLELQLKENKRQLSSSSGNTDTQADEDERAQESQIDFLNSVIVDLQRKNQDLKMKVEMMSEAALNGNGDDLNNYDSDDQEKQSKKKPRLFCDICDCFDLHDTEDCPTQAQMSEDPPHSTHHGSRGEERPYCEICEMFGHWATNCNDDETF

SEQ ID NO: 19417 - protein, 469 aa, Homo sapiens
MVNYSYDEDLEELCPVCGDKVSGYHYGLLTCESCKGFFKRTVQNNKRYTCIENQNCQIDKTQRKRCPYCRFQKCLSVGMKLEAVRADRMRGGRNKFGPMYKRDRALKQQKKALIRANGLKLEAMSQVIQAMPSDLTISSAIQNIHSASKGLPLNHAALPPTDYDRSPFVTSPISMTMPPHGSLQGYQTYGHFPSRAIKSEYPDPYTSSPESIMGYSYMDSYQTSSPASIPHLILELLKCEPDEPQVQAKIMAYLQQEQANRSKHEKLSTFGLMCKMADQTLFSIVEWARSSIFFRELKVDDQMKLLQNCWSELLILDHIYRQVVHGKEGSIFLVTGQQVDYSIIASQAGATLNNLMSHAQELVAKLRSLQFDQREFVCLKFLVLFSLDVKNLENFQLVEGVQEQVNAALLDYTMCNYPQQTEKFGQLLLRLPEIRAISMQAEEYLYYKHLNGDVPYNNLLIEMLHAKRA

SEQ ID NO: 19418 - protein, 210 aa, Homo sapiens
MIAVSFKCRCQILRRLTKEEFKGSTVVELMKKEGTTLGLTVSGGIDKDGKPRVSNLRQGGIAARSDQLDVGDYIKAVNGINLAKFRHDEIISLLKNVGERVVLEVEYELPPVSVQGSSVIFRTVEVTLHKEGNTFGFVIRGGAHDDRNKSRPVVITCVRPGGPADREGTIKPGDRLLSVDGIRLLGTTHAEAMSILKQCGQEAALLIEYD

SEQ ID NO: 19419 - protein, 100 aa, Homo sapiens
MKVVNLKQAILQAWKERWSDYQWAINMKKFFPKGATWDILNLADALLEQAMIGPSPNPLILSYLKYAISSQMVSYSSVLTAISKLSRQSRGMHRTVPSPS

SEQ ID NO: 19420 - protein, 722 aa, Homo sapiens
MEKNGNNRKLRVCVATCNRADYSKLAPIMFGIKTEPEFFELDVVVLGSHLIDDYGNTYRMIEQDDFDINTRLHTIVRGEDEAAMVESVGLALVKLPDVLNRLKPDIMIVHGDRFDALALATSAALMNIRILHIEGGEVSGTIDDSIRHAITKLAHYHVCCTRSAEQHLISMCEDHDRILLAGCPSYDKLLSAKNKDYMSIIRMWLGDDVKSKDYIVALQHPVTTDIKHSIKMFELTLDALISFNKRTLVLFPNIDAGSKEMVRVMRKKGIEHHPNFRAVKHVPFDQFIQLVAHAGCMIGNSSCGVREVGAFGTPVINLGTRQIGRETGENVLHVRDADTQDKILQALHLQFGKQYPCSKIYGDGNAVPRILKFLKSIDLQEPLQKKFCFPPVKENISQDIDHILETLSALAVDLGGTNLRVAIVSMKGEIVKKYTQFNPKTYEERINLILQMCVEAAAEAVKLNCRILGVGISTGGRVNPREGIVLHSTKLIQEWNSVDLRTPLSDTLHLPVWVDNDGNCAALAERKFGQGKGLENFVTLITGTGIGGGIIHQHELIHGSSFCAAELGHLVVSLDGPDCSCGSHGCIEAYASGMALQREAKKLHDEDLLLVEGMSVPKDEAVGALHLIQAAKLGNAKAQSILRTAGTALGLGVVNILHTMNPSLVILSGVLASHYIHIVKDVIRQQALSSVQDVDVVVSDLVDPALLGAASMVLDYTTRRIY

SEQ ID NO: 19421 - protein, 388 aa, Homo sapiens
MYFQQYWRDKRLAYSGIPLNLTLDNRVADQLWVPDTYFLNDKKSFVHGVTVKNRMIRLHPDGTVLYGLRITTTAACMMDLRRYPLDEQNCTLEIESYGYTTDDIEFYWRGGDKAVTGVERIELPQFSIVEHRLVSRNVVFATGAYPRLSLSFRLKRNIGYFILQTYMPSILITILSWVSFWINYDASAARVALGITTVLTMTTINTHLRETLPKIPYVKAIDMYLMGCFVFVFLALLEYAFVNYIFFGRGPQRQKKLAEKTAKAKNDRSKSESNRVDAHGNILLTSLEVHNEMNEVSGGIGDTRNSAISFDNSGIQYRKQSMPREGHGRFLGDRSLPHKKTHLRRRSSQLKIKIPDLTDVNAIDRWSRIVFPFTFSLFNLVYWLYYVN

SEQ ID NO: 19422 - protein, 1038 aa, Homo sapiens
MESKKEDVRRKHIRLHMEGALTARDKVGVQDFVLLDAYTSESAFVDNLRKRFSENLIYTYIGTLLVSVNPYQELGIYTVSQMELYQGVNFFELPPHVYAIADNAYRMMCAELNNHFILISGESGAGKTEASKKILEYFAVTCPMTQSLQIARDRLLFSNPVLEAFGNARTLRNDNSSRFGKYMDIQFDFQGIPVGGHIISYLIEKSRVVYQNEGERNFHIFYQLLAGGEEERLSYLGLERDPQLYKYLSQGHCAKESSISDKNDWKTVSNAFSVIDFTEADLENLFGIIASVLHLGNIGFEEDDQGCATIPDTHEIKWIAKLLGVHPSVLLEALTHRKIEAKTEEVICPLTLELSVYARDAMAKAVYGRTFTWLVNKINSSLVNKDFTRKTVIGLLDIYGFEVFDKNGFEQFCINYCNEKLQQLLIERTLKAEQAEYEMEGIEWEPIKYFNNKIICDLVEERHKGIISILDEECIRPGPATDLSFLEKLEEKVGKHAHFETRKLAGPKGRKRIGWMEFRLLHYAGEVTYCTKGFLEKNNDLLYRHLKEVLCKSKNIILRECFLLAELENRRRPPTVGTQFKNSLSSLLETLISKEPSYIRCIKPNDRKEPSKFDDFLIRHQIKYLGLMEHLRVRRAGFAYRRKYEHFLQRYKSLCPDTWPHWHGPPAEGVERLIKYIGYKPEEYKLGKTKIFIRFPRTLFATEDAFEFSKHQLVARIQATYKRCLGRREYVKKRQAAIKLEAHWRGALARKAIQRRKWAVRIIRKFIKGFISRNKPLCPDNEEFIVFVRKNYILNLRYHLPKTVLDKSWLRPPGILENASDLLRKMCVRNLVQKYCRGITAERKAMMQQKVVTSEIFRGRKDGYTESLNQPFVNSRIDEGDINPKVLQLISHEKIQYGVPVIKYDRKGFKARQRQLILTQKAAYVVELAKIKQKIEYSALKGVSTSNLSDGILVIHVSPEDSKQKGDAVLQCGHVFEAVTKLVMLVKKENIVNVVQGSLQFFISPGKEGTIVFDTGLEEQVYKNKNGQLTVVSVRRKS

SEQ ID NO: 19423 - protein, 520 aa, Homo sapiens
MVLEENLLFDEYHKLKLIDFGLCAKPKGNKDYHLQTCCGSLAYAAPELIQGKSYLGSEADVWSMGILLYVLMCGFLPFDDDNVMALYKKIMRGKYDVPKWLSPSSILLLQQMLQVDPKKRISMKNLLNHPWIMQDYNYPVEWQSKNPFIHLDDDCVTELSVHHRNNRQTMEDLISLWQYDHLTATYLLLLAKKARGKPVRLRLSSFSCGQASATPFTDIKSNNWSLEDVTASDKNYVAGLIDYDWCEDDLSTGAATPRTSQFTKYWTESNGVESKSLTPALCRTPANKLKNKENVYTPKSAVKNEEYFMFPEPKTPVNKNQHKREILTTPNRYTTPSKARNQCLKETPIKIPVNSTGTDKLMTGVISPERRCRSVELDLNQAHMEETPKRKGAKVFGSLERGLDKVITVLTRSKRKGSARDGPRRLKLHYNVTTTRLVNPDQLLNEIMSILPKKHVDFVQKGYTLKCQTQSDFGKVTMQFELEVCQLQKPDVVGIRRQRLKGDAWVYKRLVEDILSSCKV

SEQ ID NO: 19424 - protein, 401 aa, Homo sapiens
MSHCSGYSDPSSFAEDGPEVLDEEGTQEDLEYKLKGLIDLTLDKSAKTRQAALEGIKNALASKMLYEFILERRMTLTDSIERCLKKGKSDEQRAAAALASVLCIQLGPGIESEEILKTLGPILKKIICDGSASMQARQTCATCFGVCCFIATDDITELYSTLECLENIFTKSYLKEKDTTVICSTPNTVLHISSLLAWTLLLTICPINEVKKKLEMHFHKLPSLLSCDDVNMRIAAGESLALLFELARGIESDFFYEDMESLTQMLRALATDGNKHRAKVDKRKQRSVFRDVLRAVEERDFPTETIKFGPERMYIDCWVKKHTYDTFKEVLGSGMQYHLQSNEFLRNVFELGPPVMLDAATLKTMKISRFERHLYNSAAFKARTKARSKCRDKRADVGEFF

SEQ ID NO: 19425 - protein, 1075 aa, Homo sapiens
MVVEVDSMPAASSVKKPFGLRSKMGKWCCRCFPCYRESGKSNVGTSGDHDDSAMKTLRSKMGKWCHHCFPCCRGSGKSNVGASGDHDDSAMKTLRNKMGKWCCHCFPCCRGSGKSKVGAWGDYDDSAFMEPRYHVRGEDLDKLHRAAWWGKVPRKDLIVMLRDTDVNKKDKQKRTALHLASANGNSEVVKLLLDRRCQLNVLDNKKRTALIKAVQCQEDECALMLLEHGTDPNIPDEYGNTTLHYAIYNEDKLMAKALLLYGADIESKNKHGLTPLLLGVHEQKQQVVKFLIKKKANLNALDRYGRTALILAVCCGSASIVSLLLEQNIDVSSQDLSGQTAREYAVSSHHHVICQLLSDYKEKQMLKISSENSNPEQELKLTSEEESQRFKGSENSQPEKMSQELEINKDGDREVEEEMKKHESNNVGLLENLTNGVTAGNGDNGLIPQRKSRTPENQQFPDNESEEYHRICELLSDYKEKQMPKYSSENSNPEQDLKLTSEEESQRLKGSENGQPEKRSQEPEINKDGDRELENFMAIEEMKKHGSTHVGFPENLTNGATAGNGDDGLIPPRKSRTPESQQFPDTENEEYHSDEQNDTQKQFCEEQNTGILHDEILIHEEKQIEVVEKMNSELSLSCKKEKDVLHENSTLREEIAMLRLELDTMKHQSQLREKKYLEDIESVKKKNDNLLKALQLNELTMDDDTAVLVIDNGSGMCKAGFAGDDAPRAVFPSIVGRPRQQGMMGGMHQKESYVGKEAQSKRGILTLKYPMEHGIITNWDDMEKIWHHTFYNELRVAPEEHPILLTEAPLNPKANREKMTQIMFETFNTPAMYVAIQAVPSLYTSGRTTGIVMDSGDGVTHTVPIYEGNALPHATLRLDLAGRELPDYLMKILTERGYRFTTMAEREIVRDIKEKLCYVALDFEQEMATAASSSSLEKSYELPDGQVITIGNERFRCPEALFQPCFLGMESCGIHETTFNSIMKSDVDIRKDLYTNTVLSGGTTMYPGMAHRMQKEIAALAPSMMKIRIIAPPKRKYSVWVGGSILASLSTFQQMWISKQEYDESGPSIVHRKCF

SEQ ID NO: 19426 - protein, 1081 aa, Homo sapiens
MGKLIRMGPQERWLLRTKRLHWSRLLFLLGMLIIGSTYQHLRRPRGLSSLWAAVSSHQPIKLASRDLSSEEMMMMSSSPSKPSSEMGGKMLVPQASVGSDEATLSMTVENIPSMPKRTAKMIPTTTKNNYSPTAAGTERRKEDTPTSSRTLTYYTSTSSRQIVKKYTPTPRGEMKSYSPTQVREKVKYTPSPRGRRVGTYVPSTFMTMETSHAITPRTTVKDSDITATYKILETNSLKRIMEETTPTTLKGMFDSTPTFLTHEVEANVLTSPRSVMEKNNLFPPRRVESNSSAHPWGLVGKSNPKTPQGTVLLHTPATSEGQVTISTMTGSSPAETKAFTAAWSLRNPSPRTSVSAIKTAPAIVWRLAKKPSTAPSTSTTPTVRAKLTMQVHHCVVVKPTPAMLTTPSPSLTTALLPEELSPSPSVLPPSLPDLHPKGEYPPDLFSVEERRQGWVVLHVFGMMYVFVALAIVCDEYFVPALGVITDKLQISEDVAGATFMAAGGSAPELFTSLIGVFISHSNVGIGTIVGSAVFNILFVIGTCSLFSREILNLTWWPLFRDVSFYILDLIMLILFFLDSLIAWWESLLLLLAYAFYVFTMKWNKHIEVWVKEQLSRRPVAKVMALEDLSKLPSLLTRGSSSTSLHNSTIRSTIYQLMLHSLDPLREVRLAKEKEEESLNQGARAQPQAKAESKPEEEEPAKLPAVTVTPAPVPDIKGDQKENPGGQEDVAEAESTGEMPGEEGETAGEGETEEKSGGETQPEGEGETETQGKGEECEDENEAEGKGDNEGEDEGEIHAEDGEMKGNEGETESQELSAENHGEAKNDEKGVEDGGGSDGGDSEEEEEEEEEQEEEEEEEEQEEEEEEEEEEEEKGNEEPLSLDWPETRQKQAIYLFLLPIVFPLWLTVPDVRRQESRKFFVFTFLGSIMWIAMFSYLMVWWAHQVGETIGISEEIMGLTILAAGTSIPDLITSVIVARKGLGDMAVSSSVGSNIFDITVGLPVPWLLFSLINGLQPVPVSSNGLFCAIVLLFLMLLFVISSIASCKWRMNKILGFTMFLLYFVFLIISVMLEDRIISCPVSV

SEQ ID NO: 19427 - protein, 836 aa, Homo sapiens
MSRPQGLLWLPLLFTPVCVMLNSNVLLWLTALAIKFTLIDSQAQYPVVNTNYGKIRGLRTPLPNEILGPVEQYLGVPYASPPTGERRFQPPEPPSSWTGIRNTTQFAAVCPQHLDERSLLHDMLPIWFTANLDTLMTYVQDQNEDCLYLNIYVPTEDGANTKKNADDITSNDRGEDEDIHDQNSKKPVMVYIHGGSYMEGTGNMIDGSILASYGNVIVITINYRLGILGFLSTGDQAAKGNYGLLDQIQALRWIEENVGAFGGDPKRVTIFGSGAGASCVSLLTLSHYSEGLFQKAIIQSGTALSSWAVNYQPAKYTRILADKVGCNMLDTTDMVECLRNKNYKELIQQTITPATYHIAFGPVIDGDVIPDDPQILMEQGEFLNYDIMLGVNQGEGLKFVDGIVDNEDGVTPNDFDFSVSNFVDNLYGYPEGKDTLRETIKFMYTDWADKENPETRRKTLVALFTDHQWVAPAVATADLHAQYGSPTYFYAFYHHCQSEMKPSWADSAHGDEVPYVFGIPMIGPTELFSCNFSKNDVMLSAVVMTYWTNFAKTGDPNQPVPQDTKFIHTKPNRFEEVAWSKYNPKDQLYLHIGLKPRVRDHYRATKVAFWLELVPHLHNLNEIFQYVSTTTKVPPPDMTSFPYGTRRSPAKIWPTTKRPAITPANNPKHSKDPHKTGPEDTTVLIETKRDYSTELSVTIAVGASLLFLNILAFAALYYKKDKRRHETHRRPSPQRNTTNDIAHIQNEEIMSLQMKQLEHDHECESLQAHDTLRLTCPPDYTLTLRRSPDDIPLMTPNTITMIPNTLTGMQPLHTFNTFSGGQNSTNLPHGHSTTRV

SEQ ID NO: 19428 - protein, 429 aa, Homo sapiens
MSTKVYLDLEWTDYRLSWDPAEHDGIDSLRITAESVWLPDVVLLNNNDGNFDVALDISVVVSSDGSVRWQPPGIYRSSCSIQVTYFPFDWQNCTMVFSSYSYDSSEVSLQTGLGPDGQGHQEIHIHEGTFIENGQWEIIHKPSRLIQPPGDPRGGREGQRQEVIFYLIIRRKPLFYLVNVIAPCILITLLAIFVFYLPPDAGEKMGLSIFALLTLTVFLLLLADKVPETSLSVPIIIKYLMFTMVLVTFSVILSVVVLNLHHRSPHTHQMPLWVRQIFIHKLPLYLRLKRPKPERDLMPEPPHCSSPGSGWGRGTDEYFIRKPPSDFLFPKPNRFQPELSAPDLRRFIDGPNRAVALLPELREVVSSISYIARQLQEQEDHDALKEDWQFVAMVVDRLFLWTFIIFTSVGTLVIFLDATYHLPPPDPFP

SEQ ID NO: 19429 - protein, 205 aa, Homo sapiens
MGKDYYKILGIPSGANEDEIKKAYRKMALKYHPDKNKEPNAEEKFKEIAEAYDVLSDPKKRGLYDQYGEEGLKTGGGTSGGSSGSFHYTFHGDPHATFASFFGGSNPFDIFFASSRSTRPFSGFDPDDMDVDEDEDPFGAFGRFGFNGLSRGPRRAPEPLYPRRKVQDPPVVHELRVSLEEIYHGSTKRMKITRRRLNPDGRTVR

SEQ ID NO: 19430 - protein, 136 aa, Homo sapiens
GPIWLNEVKCKGNESSLWDCPARRWGHSECGHKEDAAVNCTDISVQKTPQKATTGRSSRQSSFIAVGILGVVLLAIFVALFFLTKKRRQRQRLAENSHESADFSAAELISVSKFLPISGMEKEAILSHTEKENGNL

SEQ ID NO: 19431 - protein, 376 aa, Homo sapiens
MWAAGCILAEMLTGRMLFAGAHELEQMQLILETIPVIREEDKDELLRVMPSFVSSTWEVKRPLRKLLPEVNSEAIDFLEKILTFNPMDRLTAEMGLQHPYMSPYSCPEDEPTSQHPFRIEDEIDDIVLMAANQSQLSNWDTCSSRYPVSLSSDLEWRPDRCQDASEVQRDPRAGSAPLAEDVQVDPRKDSHSSSERFLEQSHSSMERAFEADYGRSCDYKVGSPSYLDKLLWRDNKPHHYSEPKLILDLSHWKQAAGAPPTATGLADTGAREDEPASLFLEIAQWVKSTQGGPEHASPPADDPERRLSASPPGRPAPVDGGASPQFDLDVFISRALKLCTKPEDLPDNKLGDLNGACIPEHPGDLVQTEAFSKERW

SEQ ID NO: 19432 - protein, 233 aa, Homo sapiens
MNPYQLNAYGMALKAVGEIVQDYDSDKMFPALGFGAKLPPDGRISHEFALNGNPQNPYCDGIEGVMEAYYRSLKSVQLYGPTNFAPVINHVARYASSVKDGSQYFVLLIVTDGVISDMAQTKESIVNASKLPMSIIIVGVGPAEFDAMVELDGDDVRVSSRGKYAERDIVQFVPFRDYIDRSGNHILSMARLAKDVLAEIPEQFLSYMRARGIKPSPAPPPYTPPTHVLQTQI

SEQ ID NO: 19433 - protein, 1033 aa, Homo sapiens
MAGMIDRFSPANTGIRSWDVDPGVCNLDEQLKVFVSRHSATFSSIVKGQRSLHHRGDNLETLVLLNPSDKSLYDELRNLLLDPASHKLLVLAGPCLEETGELLLQTGGFSPHHFLQVLKDREIRDILATTPPPVQPPILTITCPTFGDWAQLAPAVPGLQGALRLQLRLNPPAQLPNSEGLCEFLEYVAESLEPPSPFELLEPPTSGGFLRLGRPCCYIFPGGLGDAAFFAVNGFTVLVNGGSNPKSSFWKLVRHLDRVDAVLVTHPGADSLPGLNSLLRRKLAERSEVAAGGGSWDDRLRRLISPNLGVVFFNACEAASRLARGEDEAELALSLLAQLGITPLPLSRGPVPAKPTVLFEKMGVGRLDMYVLHPPSAGAERTLASVCALLVWHPAGPGEKVVRVLFPGCTPPACLLDGLVRLQHLRFLREPVVTPQDLEGPGRAESKESVGSRDSSKREGLLATHPRPGQERPGVARKEPARAEAPRKTEKEAKTPRELKKDPKPSVSRTQPREVRRAASSVPNLKKTNAQAAPKPRKAPSTSHSGFPPVANGPRSPPSLRCGEASPPSAACGSPASQLVATPSLELGPIPAGEEKALELPLAASSIPRPRTPSPESHRSPAEGSERLSLSPLRGGEAGPDASPTVTTPTVTTPSLPAEVGSPHSTEVDESLSVSFEQVLPPSAPTSEAGLSLPLRGPRARRSASPHDVDLCLVSPCEFEHRKAVPMAPAPASPGSSNDSSARSQERAGGLGAEETPPTSVSESLPTLSDSDPVPLAPGAADSDEDTEGFGVPRHDPLPDPLKVPPPLPDPSSICMVDPEMLPPKTARQTENVSRTRKPLARPNSRAAAPKATPVAAAKTKGLAGGDRASRPLSARSEPSEKGGRAPLSRKSSTPKTATRGPSGSASSRPGVSATPPKSPVYLDLAYLPSGSSAHLVDEEFFQRVRALCYVISGQDQRKEEGMRAVLDALLASKQHWDRDLQVTLIPTFDSVAMHTWYAETHARHQALGITVLGSNSMVSMQDDAFPACKVEF

SEQ ID NO: 19434 - protein, 954 aa, Homo sapiens
MYIRQLRAPSHRSPARGPRIAGPRRPQGATMFSQQQQQQLQQQQQQLQQLQQQQLQQQQLQQQQLLQLQQLLQQSPPQAPLPMAVSRGLPPQQPQQPLLNLQGTNSASLLNGSMLQRALLLQQLQGLDQFAMPPATYDTAGLTMPTATLGNLRGYGMASPGLAAPSLTPPQLATPNLQQFFPQATRQSLLGPPPVGVPMNPSQFNLSGRNPQKQARTSSSTTPNRKDSSSQTMPVEDKSDPPEGSEEAAEPRMDTPEDQDLPPCPEDIAKEKRTPAPEPEPCEASELPAKRLRSSEEPTEKEPPGQLQVKAQPQARMTVPKQTQTPDLLPEALEAQVLPRFQPRVLQVQAQVQSQTQPRIPSTDTQVQPKLQKQAQTQTSPEHLVLQQKQVQPQLQQEAEPQKQVQPQVQPQAHSQGPRQVQLQQEAEPLKQVQPQVQPQAHSQPPRQVQLQLQKQVQTQTYPQVHTQAQPSVQPQEHPPAQVSVQPPEQTHEQPHTQPQVSLLAPEQTPVVVHVCGLEMPPDAVEAGGGMEKTLPEPVGTQVSMEEIQNESACGLDVGECENRAREMPGVWGAGGSLKVTILQSSDSRAFSTVPLTPVPRPSDSVSSTPAATSTPSKQALQFFCYICKASCSSQQEFQDHMSEPQHQQRLGEIQHMSQACLLSLLPVPRDVLETEDEEPPPRRWCNTCQLYYMGDLIQHRRTQDHKPPTPRRDVFAHVPVQGWSTARLVTDMIAKQSLRPFCTVCNRYFKTPRKFVEHVKSQGHKDKAKELKSLEKEIAGQDEDHFITVDAVGCFEGDEEEEEDDEDEEEIEVEEELCKQVRSRDISREEWKGSETYSPNTAYGVDFLVPVMGYICRICHKFYHSNSGAQLSHCKSLGHFENLQKYKAAKNPSPTTRPVSRRCAINARNALTALFTSSGRPPSQPNTQDKTPSKVTARPSQPPLPRRSTRLKT

SEQ ID NO: 19435 - protein, 1043 aa, Homo sapiens
MAQFGGQKNPPWATQFTATAVSQPAALGVQQPSLLGASPTIYTQQTALAAAGLTTQTPANYQLTQTAALQQQAAAAAAALQQLQQPQQTLLTQPAVALPTSLSLSTPQPTAQITVSYPTPRSSQQQTQPQKQRVFTGVVTKLHDTFGFVDEDVFFQLSAVKGKTPQVGDRVLVEATYNPNMPFKWNAQRIQTLPNQNQSQTQPLLKTPPAVLQPIAPQTTFGVQTQPQPQSLLQAQISAASITPLLQTQPQPLLQQPQQKAGLLQPPVRIVSQPQPARRLDPPSRFSGRNDRGDQVPNRKDDRSRERERERRRSRERSPQRKRSRERSPRRERERSPRRVRRVVPRYTVQFSKFSLDCPSCDMMELRRRYQNLYIPSDFFDAQFTWVDAFPLSRPFQLGNYCNFYVMHREVESLEKNMAILDPPDADHLYSAKVMLMASPSMEDLYHKSCALAEDPQELRDGFQHPARLVKFLVGMKGKDEAMAIGGHWSPSLDGPDPEKDPSVLIKTAIRCCKALTGIDLSVCTQWYRFAEIRYHRPEETHKGRTVPAHVETVVLFFPDVWHCLPTRSEWETLSRGYKQQLVEKLQGERKEADGEQDEEEKDDGEAKEISTPTHWSKLDPKTMKVNDLRKELESRALSSKGLKSQLIARLTKQLKVEEQKEEQKELEKSEKEEDEDDDRKSEDDKEEEERKRQEEIERQRRERRYILPDEPAIIVHPNWAAKSGKFDCSIMSLSVLLDYRLEDNKEHSFEVSLFAELFNEMLQRDFGVRIYKSLLSLPEKEDKKEKDKKSKKDERKDKKEERDDETDEPKPKRRKSGDDKDKKEDRDERKKEDKRKDDSKDDDETEEDNNQDEYDPMEAEEAEDEEDDRDEEEMTKRDDKRDINRYCKERPSKDKEKEKTQMITINRDLLMAFVYFDQSHCGYLLEKDLEEILYTLGLHLSRAQVKKLLNKVVLRESCFYRKLTDTSKDEENHEESESLQEDMLGNRLLLPTPTVKQESKDVEENVGLIVYNGAMVDVGSLLQKLEKSEKVRAEVEQKLQLL

SEQ ID NO: 19436 - protein, 713 aa, Homo sapiens
MFDTTPHSGRSTPSSSPSLRKRLQLLPPSRPPPEPEPGTMVEKGSDSSSEKGGVPGTPSTQSLGSRNFIRNSKMLSPTYKQRNEDFRKLFSKLPEAERLIVDYSCALQREILLQGRLYLSENWICFYSNIFRWETTISIQLKEVTCLKKEKTAKLIPNAIQICTESEKHFFTSFGARDRCFLLIFRLWQNALLEKTLSPRELWHLVHQCYGSELGLTSEDEDYVSPLQLNGLGTPKEVGDVIALSDITSSGAADRSQEPSPVGSRRGHVTPNLSRASSDADHGAEEDKEEQVDSQPDASSSQTVTPVAEPPSTEPTQPDGPTTLGPLDLLPSEELLTDTSNSSSSTGEEADLAALLPDLSGRLLINSVFHVGAERLQQMLFSDSPFLQGFLQQCKFTDVTLSPWSGDSKCHQRRVLTYTIPISNPLGPKSASVVETQTLFRRGPQAGGCVVDSEVLTQGIPYQDYFYTAHRYCILGLARNKARLRVSSEIRYRKQPWSLVKSLIEKNSWSGIEDYFHHLERELAKAEKLSLEEGGKDARGLLSGLRRRKRPLSWRAHGDGPQHPDPDPCARAGIHTSGSLSSRFSEPSVDQGPGAGIPSALVLISIVLIILIALNVLLFYRLWSLERTAHTFESWHSLALAKGKFPQTATEWAEILALQKQFHSVEVHKWRQILRASVELLDEMKFSLEKLHQGITVSDPPFDTQPRPDDSFS

SEQ ID NO: 19437 - protein, 509 aa, Homo sapiens
MEDDTSWRSEATFQFTVERFSRLSESVLSPPCFVRNLPWKIMVMPRFYPDRPHQKSVGFFLQCNAESDSTSWSCHAQAVLKIINYRDDEKSFSRRISHLFFHKENDWGFSNFMAWSEVTDPEKGFIDDDKVTFEVFVQADAPHGVAWDSKKHTGYVGLKNQGATCYMNSLLQTLFFTNQLRKAVYMMPTEGDDSSKSVPLALQRVFYELQHSDKPVGTKKLTKSFGWETLDSFMQHDVQELCRVLLDNVENKMKGTCVEGTIPKLFRGKMVSYIQCKEVDYRSDRREDYYDIQLSIKGKKNIFESFVDYVAVEQLDGDNKYDAGEHGLQEAEKGVKFLTLPPVLHLQLMRFMYDPQTDQNIKINDRFEFPEQLPLDEFLQKTDPKDPANYILHAVLVHSGDNHGGHYVVYLNPKGDGKWCKFDDDVVSRCTKEEAIEHNYGGHDDDLSVRHCTNAYMLVYIRESKLTVGGAITRREKDRGSEAEGAAGSPSLYASADSRRGPVLWPPRE

SEQ ID NO: 19438 - protein, 353 aa, Homo sapiens
MPTVDDILEQVGESGWFQKQAFLILCLLSAAFAPICVGIVFLGFTPDHHCQSPGVAELSQRCGWSPAEELNYTVPGLGPAGEAFLGQCRRYEVDWNQSALSCVDPLASLATNRSHLPLGPCQDGWVYDTPGSSIVTEFNLVCADSWKLDLFQSCLNAGFLFGSLGVGYFADRFGRKLCLLGTVLVNAVSGVLMAFSPNYMSMLLFRLLQGLVSKGNWMAGYTLITEFVGSGSRRTVAIMYQMAFTVGLVALTGLAYALPHWRWLQLAVSLPTFLFLLYYWCVPESPRWLLSQKRNTEAIKIMDHIAQKNGKLPPADLKMLSLEEDVTEKLSPSFADLFRTPRLRKRTFILMYL

SEQ ID NO: 19439 - protein, 308 aa, Homo sapiens
MQIPKHISIEDITATSTSTTGTSHLVKCAEKEKTFCVNGGECFMVKDLSNPSRYLCKCQPGFTGARCTENVPMKVQNQEKAEELYQKRVLTITGICIALLVVGIMCVVAYCKTKKQRKKLHDRLRQSLRSERNNMMNIANGPHHPNPPPENVQLVNQYVSKNVISSEHIVEREAETSFSTSHYTSTAHHSTTVTQTPSHSWSNGHTESILSESHSVIVMSSVENSRHSSPTGGPRGRLNGTGGPRECNSFLRHARETPDSYRDSPHSERHNLIAELRRNKAHRSKCMQIQLSATHLRSSSIPHLGFIL

SEQ ID NO: 19440 - protein, 919 aa, Homo sapiens
MEELTIWEQHTATLSKDPRRGFGIAISGGRDRPGGSMVVSDVVPGGPAEGRLQTGDHIVMVNGVSMENATSAFAIQILKTCTKMANITVKRPRRIHLPATKASPSSPGRQDSDEDDGPQRVEEVDQGRGYDGDSSSGSGRSWDERSRRPRPGRRGRAGSHGRRSPGGGSEANGLALVSGFKRLPRQDVQMKPVKSVLVKRRDSEEFGVKLGSQIFIKHITDSGLAARHRGLQEGDLILQINGVSSQNLSLNDTRRLIEKSEGKLSLLVLRDRGQFLVNIPPAVSDSDSSPLEDISDLASELSQAPPSHIPPPPRHAQRSPEASQTDSPVESPRLRRESSVDSRTISEPDEQRSELPRESSYDIYRVPSSQSMEDRGYSPDTRVVRFLKGKSIGLRLAGGNDVGIFVSGVQAGSPADGQGIQEGDQILQVNDVPFQNLTREEAVQFLLGLPPGEEMELVTQRKQDIFWKMVQSRVGDSFYIRTHFELEPSPPSGLGFTRGDVFHVLDTLHPGPGQSHARGGHWLAVRMGRDLREQERGIIPNQSRAEQLASLEAAQRAVGVGPGSSAGSNARAEFWRLRGLRRGAKKTTQRSREDLSALTRQGRYPPYERVVLREASFKRPVVILGPVADIAMQKLTAEMPDQFEIAETVSRTDSPSKIIKLDTVRVIAEKDKHALLDVTPSAIERLNYVQYYPIVVFFIPESRPALKALRQWLAPASRRSTRRLYAQAQKLRKHSSHLFTATIPLNGTSDTWYQELKAIIREQQTRPIWTAEDQLDGSLEDNLDLPHHGLADSSADLSCDSRVNSDYETDGEGGAYTDGEGYTDGEGGPYTDVDDEPPAPALARSSEPVQADESQSPRDRGRISAHQGAQVDSRHPQGQWRQDSMRTYEREALKKKFMRVHDAESSDEDGYDWGPATDL

SEQ ID NO: 19441 - protein, 286 aa, Homo sapiens
MTEITAEGNASTTTTVIDSKNGSVPKSPGKVLKRTVTEDIVTTFSSPAAWLLVIALIITWSAVAIVMFDLVDYKNFSASSIAKIGSDPLKLVRDAMEETTDWIYGFFSLLSDIISSEDEEDDDGDEDTDKGEIDEPPLRKKEIHKDKTEKQEKPERKIQTKVTHKEKEKGKEKVREKEKPEKKATHKEKIEKKEKPETKTLAKEQKKAKTAEKSEEKTKKEVKGGKQEKVKQTAAKVKEVQKTPSKPKEKEDKEKAAVSKHEQKGKHSEQEAAGGSKRILGKKHMQ

SEQ ID NO: 19442 - protein, 885 aa, Homo sapiens
MASNQNSPIRTFGLNLSSDSSALGAVASDSEQSKTEEERESRSLFPGSLKPKLGKRDYLEKAGELIKLALKKEEEDDYEAASDFYRKGVDLLLEGVQGESSPTRREAVKRRTAEYLMRAESISSLYGKPQLDDVSQPPGSLSSRPLWNLRSPAEELKAFRVLGVIDKVLLVMDTRTEQTFILKGLRKSSEYSRNRKTIIPRCVPNMVCLHKYIISEESVFLVLQHAEGGKLWSYISKFLNRSPEESFDIKEVKKPTLAKVHLQQPTSSPQDSSSFESRGSDGGSMLKALPLKSSLTPSSQDDSNQEDDGQDSSPKWPDSGSSSEEECTTSYLTLCNEYGQEKIEPGSLNEEPFMKTEGNGVDTKAIKSFPAHLAADSDSPSTQLRAHELKFFPNDDPEAVSSPRTSDSLSRSKNSPMEFFRIDSKDSASELLGLDFGEKLYSLKSEPLKPFFTLPDGDSASRSFNTSESKVEFKAQDTISRGSDDSVPVISFKDAAFDDVSGTDEGRPDLLVNLPGELESTREAAAMGPTKFTQTNIGIIENKLLEAPDVLCLRLSTEQCQAHEEKGIEELSDPSGPKSYSITEKHYAQEDPRMLFVAAVDHSSSGDMSLLPSSDPKFQGLGVVESAVTANNTEESLFRICSPLSGANEYIASTDTLKTEEVLLFTDQTDDLAKEEPTSLFQRDSETKGESGLVLEGDKEIHQIFEDLDKKLALASRFYIPEGCIQRWAAEMVVALDALHREGIVCRDLNPNNILLNDRGHIQLTYFSRWSEVEDSCDSDAIERMYCAPEVGAITEETEACDWWSLGAVLFELLTGKTLVECHPAGINTHTTLNMPECVSEEARSLIQQLLQFNPLERLGAGVAGVEDIKSHPFFTPVDWAELMR

SEQ ID NO: 19443 - protein, 300 aa, Homo sapiens
MTTLSPENSLSARQSASFILGLHPFVRTEAWKFLTGYFSWQSSQDERLTVDSMRRKNYKALCQMYEKIQPLLENLHRNFTETRNNIARDIQKIYDKDPLGNVLIDKKRLEKILLLSYVCNTQAEYQQGFHEMMMLFQLMVEHDHETFWLFQFFLQKTEHSCVINIGVAKNLDMLSTLITFLDPVFAEHLKGKGAGAVQSLFPWFCFCFQRAFKSFDDVWRLWEVLLTGKPCRNFQVLVAYSMLQMVREQVLQESMGGDDILLACNNLIDLDADELISAACVVYAELIQKDVPQTLKDFFL

SEQ ID NO: 19444 - protein, 1006 aa, Homo sapiens
MRMVHILTSVVCDLVLDAAHEKSTESSSGPKREEIMESILFKCSDFVVVQFKDMDSSYAKRDAFTDSAISAKVNGEHKEKDLEPWDAGELTANEELEALENDVSNGWDPNDMFRYNEENYGVVSTYDSSLSSYTVPLERDNSEEFLKREARANQLAEEIESSAQYKARVALENDDRSEEEKYTAVQRNSSEREGHSINTRENKYIPPGQRNREVISWGSGRQNSPRMGQPGSGSMPSRSTSHTSDFNPNSGSDQRVVNGGVPWPSPCPSPSSRPPSRYQSGPNSLPPRAATPTRPPSRPPSRPSRPPSHPSAHGSPAPVSTMPKRMSSEGPPRMSPKAQRHPRNHRVSAGRGSISSGLEFVSHNPPSEAATPPVARTSPSGGTWSSVVSGVPRLSPKTHRPRSPRQNSIGNTPSGPVLASPQAGIIPTEAVAMPIPAASPTPASPASNRAVTPSSEAKDSRLQDQRQNSPAGNKENIKPNETSPSFSKAENKGISPVVSEHRKQIDDLKKFKNDFRLQPSSTSESMDQLLNKNREGEKSRDLIKDKIEPSAKDSFIENSSSNCTSGSSKPNSPSISPSILSNTEHKRGPEVTSQGVQTSSPACKQEKDDKEEKKDAAEQVRKSTLNPNAKEFNPRSFSQPKPSTTPTSPRPQAQPSPSMVGHQQPTPVYTQPVCFAPNMMYPVPVSPGVQPLYPIPMTPMPVNQAKTYRAVPNMPQQRQDQHHQSAMMHPASAAGPPIAATPPAYSTQYVAYSPQQFPNQPLVQHVPHYQSQHPHVYSPVIQGNARMMAPPTHAQPGLVSSSATQYGAHEQTHAMYVSTGSLAQQYAHPNATLHPHTPHPQPSATPTGQQQSQHGGSHPAPSPVQHHQHQAAQALHLASPQQQSAIYHAGLAPTPPSMTPASNTQSPQNSFPAAQQTVFTIHPSHVQPAYTNPPHMAHVPQAHVQSGMVPSHPTAHAPMMLMTTQPPGGPQAALAQSALQPIPVSTTAHFPYMTHPSVQAHHQQQL

SEQ ID NO: 19445 - protein, 933 aa, Homo sapiens
MADGGADSAAQRLPEGPGRVAPGRDLGAPAGSMGAASCEDEELEFKLVFGEEKEAPPLGAGGLGEELDSEDAPPCCRLALGEPPPYGAAPIGIPRPPPPRPGMHSPPPRPAPSPGTWESQPARSVRLGGPGGGAGGAGGGRVLECPSIRITSISPTPEPPAALEDNPDAWGDGSPRDYPPPEGFGGYREAGGQGGGAFFSPSPGSSSLSSWSFFSDASDEAALYAACDEVESELNEAASRFGLGSPLPSPRASPRPWTPEDPWSLYGPSPGGRGPEDSWLLLSAPGPTPASPRPASPCGKRRYSSSGTPSSASPALSRRGSLGEEGSEPPPPPPLPLARDPGSPGPFDYVGAPPAESIPQKTRRTSSEQAVALPRSEEPASCNGKLPLGAEESVAPPGGSRKEVAGMDYLAVPSPLAWSKARIGGHSPIFRTSALPPLDWPLPSQYEQLELRIEVQPRAHHRAHYETEGSRGAVKAAPGGHPVVKLLGYSEKPLTLQMFIGTADERNLRPHAFYQVHRITGKMVATASYEAVVSGTKVLEMTLLPENNMAANIDCAGILKLRNSDIELRKGETDIGRKNTRVRLVFRVHVPQGGGKVVSVQAASVPIECSQRSAQELPQVEAYSPSACSVRGGEELVLTGSNFLPDSKVVFIERGPDGKLQWEEEATVNRLQSNEVTLTLTVPEYSNKRVSRPVQVYFYVSNGRRKRSPTQSFRFLPVICKEEPLPDSSLRGFPSASATPFGTDMDFSPPRPPYPSYPHEDPACETPYLSEGFGYGMPPLYPQTGPPPSYRPGLRMFPETRGTTGCAQPPAVSFLPRPFPSDPYGGRGSSFSLGLPFSPPAPFRPPPLPASPPLEGPFPSQSDVHPLPAEGYNKVGPGYGPGEGAPEQEKSRGGYSSGFRDSVPIQGITLEEGGCGTGGCECECVQEIALHVC

SEQ ID NO: 19446 - protein, 748 aa, Homo sapiens
MAASQGGGGNSGGGGCGGGGSSGGCGTAGGGGGGAGGGGGGGGGTLVVPIPVPTLFGQPFPNGPPWNPGSLQPQHTVRSLDRALEEAGSSGILSLSGRKLRDFPGSGYDLTDTTQADLSRNRFTEIPSDVWLFAPLETLNLYHNCIKTIPEAIKNLQMLTYLNISRNLLSTLPKYLFDLPLKVLVVSNNKLVSIPEEIGKLKDLMELDISCNEIQVLPQQMGKLHSLRELNIRRNNLHVLPDELGDLPLVKLDFSCNKVTEIPVCYRKLHHLQVIILDNNPLQVPPAQICLKGKVHIFKYLNIQACCRMDKKPDSLDLPSLSKRMPSQPLTDSMEDFYPNKNHGPDSGIGSDNGEKRLSTTEPSDDDTVSLHSQVSESNREQTSRNDSHIIGSKTDSQKDQEVYDFVDPNTEDVAVPEQGNAHIGSFVSFFKGKEKCSEKSRKNEELGDEKRLEKEQLLAEEEDDDLKEVTDLRKIAAQLLQQEQKNRILNHSTSVMRNKPKQTVECEKSVSADEVNSPLSPLTWQPLENQKDQIDEQPWPESHPIIWQSEERRRSKQIRKEYFKYKSMRKSSSGNENDEEYDRTDGFSHSPFGLKPRSAFSRSSRQEYGAADPGFTMRRKMEHLREEREQIRQLRNNLESRLKVILPDDIGAALMDGVVLCHLANHIRPRSVASIHVPSPAVPKLSMAKCRRNVENFLDACKKLGVSQERLCLPHHILEERGLVKVGVTVQALLELPTTKASQLSVA

SEQ ID NO: 19447 - protein, 983 aa, Homo sapiens
MWDPVTPYRLHVLCQGWHYLAYDWHWTTDRSVGDNSSDLSNVAVIDGNRVLVTVFRQTVVPPPMCTYQLLFPHPVNQVTFLAHPQKSNDLAVLDASNQISVYKCGDCPSADPTVKLGAVGGSGFKVCLRTPHLEKRYKIQFENNEDQDVNPLKLGLLTWIEEDVFLAVSHSEFSPRSVIHHLTAASSEMDEEHGQLNVSSSAAVDGVIISLCCNSKTKSVVLQLADGQIFKYLWESPSLAIKPWKNSGGFPVRFPYPCTQTELAMIGEEECVLGLTDRCRFFINDIEVASNITSFAVYDEFLLLTTHSHTCQCFCLRDASFKTLQAGLSSNHVSHGEVLRKVERGSRIVTVVPQDTKLVLQMPRGNLEVVHHRALVLAQIRKWLDKLMFKEAFECMRKLRINLNLIYDHNPKVFLGNVETFIKQIDSVNHINLFFTELKEEDVTKTMYPAPVTSSVYLSRDPDGNKIDLVCDAMRAVMESINPHKYCLSILTSHVKKTTPELEIVLQKVHELQGNAPSDPDAVSAEEALKYLLHLVDVNELYDHSLGTYDFDLVLMVAEKSQKDPKEYLPFLNTLKKMETNYQRFTIDKYLKRYEKAIGHLSKCGPEYFPECLNLIKDKNLYNEALKLYSPSSQQYQDISIAYGEHLMQEHMYEPAGLMFARCGAHEKALSAFLTCGNWKQALCVAAQLNFTKDQLVGLGRTLAGKLVEQRKHIDAAMVLEECAQDYEEAVLLLLEGAAWEEALRLVYKYNRLDIIETNVKPSILEAQKNYMAFLDSQTATFSRHKKRLLVVRELKEQAQQAGLDDEVPHGQESDLFSETSSVVSGSEMSGKYSHSNSRISARSSKNRRKAERKKHSLKEGSPLEDLALLEALSEVVQNTENLKDEVYHILKVLFLFEFDEQGRELQKAFEDTLQLMERSLPEIWTLTYQQNSATPVLGPNSTANSIMASYQQQKTSVPVLDAELFIPPKINRRTQWKLSLLD

SEQ ID NO: 19448 - protein, 783 aa, Homo sapiens
MDQREILQKFLDEAQSKKITKEEFANEFLKLKRQSTKYKADKTYPTTVAEKPKNIKKNRYKDILPYDYSRVELSLITSDEDSSYINANFIKGVYGPKAYIATQGPLSTTLLDFWRMIWEYSVLIIVMACMEYEMGKEAEKRKSDYIIRTLKVKFNSETRTIYQFHYKNWPDHDVPSSIDPILELIWDVRCYQEDDSVPICIHCSAGCGRTGVICAIDYTWMLLKDGIIPENFSVFSLIREMRTQRPSLVQTQEQYELVYNAVLELFKRQMDVIRDKHSGTESQAKHCIPEKNHTLQADSYSPNLPKSTTKAAKMMNQQRTKMEIKESSSFDFRTSEISAKEELVLHPAKSSTSFDFLELNYSFDKNADTTMKWQTKAFPIVGEPLQKHQSLDLGSLLFEGCSNSKPVNAAGRYFNSKVPITRTKSTPFELIQQRETKEVDSKENFSYLESQPHDSCFVEMQAQKVMHVSSAELNYSLPYDSKHQIRNASNVKHHDSSALGVYSYIPLVENPYFSSWPPSGTSSKMSLDLPEKQDGTVFPSSLLPTSSTSLFSYYNSHDSLSLNSPTNISSLLNQESAVLATAPRIDDEIPPPLPVWTPESFIVVEEAGEFSPNVPKSLSSAVKVKIGTSLEWGGTSEPKKFDDSVILRPSKSVKLRSPKSELHQDRSSPPPPLPERTLESFFLADEDCMQAQSIETYSTSYPDTMENSTSSKQTLKTPGKSFTRSKSLKILRNMKKSICNSCPPNKPAESVQSNNSSSFLNFGFANRFSKPKGPRNPPPTWNI

SEQ ID NO: 19449 - protein, 375 aa, Homo sapiens
MDRDLNEDDSVVDLSFEAESPLAPPTELLERLPSYDWLLQGGRGQIFFPPLEAPGRPQEQRSWPSFLEHRVPAMTEEVAREALLSFVDSKCCYSSTVAGDLVIQELKRQTLCRYRLETFSESRISEWTFQPFTNHSVDGPQRGASPRLWDIKVQGPPMFQEDTRKFQVPHSSLVKECHKCHGRGRYKCSGCHGAGTVRCPSCCGAKRKAKQSRRCQLCAGSGRRRCSTCSGRGNKTCATCKGEKKLLHFIQLVIMWKNSLFEFVSEHRLNCPRELLAKAKGENLFKDENSVVYPIVDFPLRDISLASQRGIAEHSAALASRARVLQQRQTIELIPLTEVHYWYQGKTYVYYIYGTDHQVYAVDYPERYCCGCTIV

SEQ ID NO: 19450 - protein, 1053 aa, Homo sapiens
MPGKLKVKIVAGRHLPVMDRASDLTDAFVEVKFGNTTFKTDVYLKSLNPQWNSEWFKFEVDDEDLQDEPLQITVLDHDTYSANDAIGKVYIDIDPLLYSEAATVISGWFPIYDTIHGIRGEINVVVKVDLFNDLNRFRQSSCGVKFFCTTSIPKCYRAVIIHGFVEELVVNEDPEYQWIDRIRTPRASNEARQRLISLMSGELQRKIGLKVLEMRGNAVVGYLQCFDLEGESGLVVRAIGTACTLDKLSSPAAFLPACNSPSKEMKESPLVHPPSHGCRSTHNSPIHTATGSRLTQNFSVSVPTLIYTGMGSGSAGKEGGPFKALLRQQTQSALEQRGGSPHRFCRRREFPFFTLTAFPPGFLVHVGGVVSARSVKLLDRIHNPDEPETRDAWWAEIRQEIKSHAKALGCHAVVGYSESTSICEEVCILSASGTAAVLNPRFLQDGTVEGCLEQRLEENLPTRCGFCHIPYDELNMPFPAHLTYCYNCRKQKVPDVLFTTIDLPTDATVIGKGCLIQARLCRLKKKAQAEANATAISNLLPFMEYEVHTQLMNKLKLKGMNALFGLRIQITVGENMLMGLASATGVYLAALPTPGGIQIAGKTPNDGSYEQHISHMQKKINDTIAKNKELYEINPPEISEEIIGSPIPEPRQRSRLLRSQSESSDEVTELDLSHGKKDAFVLEIDDTDAMEDVHSLLTDVPPPSGFYSCNTEIMPGINNWTSEIQMFTSVRVIRLSSLNLTNQALNKNFNDLCENLLKSLYFKLRSMIPCCLCHVNFTVSLPEDELIQVTVTAVAITFDKNQALQTTKTPVEKSLQRASTDNEELLQFPLELCSDSLPSHPFPPAKEHLESASSNSGIPAAQRATSVDYSSFADRCSSWIELIKLKAQTIRRGSIKTTMTVEKASPVGDGNFRNRSAPPCANSTVGVVKMTPLSFIPGAKITKYLGIINMFFIRETTSLREEGGVSGFLHAFIAEVFAMVRAHVAALGGNAVVSYIMKQCVFMENPNKNQAQCLINVSGDAVVFVRESDLEVVSSQQPTTNCQSSCTEGEVTT

SEQ ID NO: 19451 - protein, 529 aa, Homo sapiens
MSDSYLPSYYSPSIGFSYSLGEAAWSTGGDTAMPYLTSYGQLSNGEPHFLPDAMFGQPGALGSTPFLGQHGFNFFPSGIDFSAWGNNSSQGQSTQSSGYSSNYAYAPSSLGGAMIDGQSAFANETLNKAPGMNTIDQGMAALKLGSTEVASNVPKVVGSAVGSGSITSNIVASNSLPPATIAPPKPASWADIASKPAKQQPKLKTKNGIAGSSLPPPPIKHNMDIGTWDNKGPVAKAPSQALVQNIGQPTQGSPQPVGQQANNSPPVAQASVGQQTQPLPPPPPQPAQLSVQQQAAQPTRWVAPRNRGSGFGHNGVDGNGVGQSQAGSGSTPSEPHPVLEKLRSINNYNPKDFDWNLKHGRVFIIKSYSEDDIHRSIKYNIWCSTEHGNKRLDAAYRSMNGKGPVYLLFSVNGSGHFCGVAEMKSAVDYNTCAGVWSQDKWKGRFDVRWIFVKDVPNSQLRHIRLENNENKPVTNSRDTQEVPLEKAKQVLKIIASYKHTTSIFDDFSHYEKRQEEEESVKKERQGRGK

SEQ ID NO: 19452 - protein, 217 aa, Homo sapiens
TLVNNVRLPRGHRLELSDGDLLTFGPEGPPGTSPSEFYFMFQQVRVKPQDFAAITIPRSRGEARVGAGFRPMLPSQGAPQRPLSTFSPAPKATLILNSIGSLSKLRPQPLTFSPSWGGPKSLPVPAPPGEMGTTPSAPPQRNRRKSVHRVLAELDDESEPPENPPPVLMEPRKKLRVDKAPLTPTGNWHIQGMQSIVKGQKERPWPREHLSGYEEAS

SEQ ID NO: 19453 - protein, 386 aa, Homo sapiens
MEERPAETNANVDNSASPSVAQLAGRFREQAAAAKEKSPPNASHPPKFKVKSSPLIEKLQANLTFDPAALLPGASPKSPGLKAMVSPFHSPPSTPSSPGVRSRPSEAEEVPVSFDQPPEGSHLPCYNKVRTRGSIKRRPPSRRFRRSQSDCGELGDFRAVESSQQNGAKEEDGDEVLPSKSKAPGSPLSSEGAAGEGVRTLGPAEKPPLRRSPSRTEKQEEDRATEEAKNGEKARRSSEEVDGQHPAQEEVPESPQTSGPEAENRCGSPREEKPAGEEAEMEKATEVKGERVQNEEVGPEHDSQETKKLEEGAAVKETPHSPPGGVKGGDVPKQEKGKEKQQEGAVLEPGCSPQTGPAQLETSSEVQSEPAVPKPEDDTPVQDTKM

SEQ ID NO: 19454 - protein, 590 aa, Homo sapiens
MDILKSESYGTVVRISPQDFPQNPGFGDVSDSEVWLDSHLGSPGLKVTGFTFQNNCLNEETVVPKTFTKDAPQGCKELGSSGLDCQPLESQGESAEGMSQRCEECGKGIRATSDIALHWEINTQKISRCQECQKKLSDCLQGKHTNNCHGEKPYECAECGKVFRLCSQLNQHQRIHTGEKPFKCTECGKAFRLSSKLIQHQRIHTGEKPYRCEECGKAFGQSSSLIHHQRIHTGERPYGCRECGKAFSQQSQLVRHQRTHTGERPYPCKECGKAFSQSSTLAQHQRMHTGEKAQILKASDSPSLVAHQRIHAVEKPFKCDECGKAFRWISRLSQHQLIHTGEKPYKCNKCTKAFGCSSRLIRHQRTHTGEKPFKCDECGKGFVQGSHLIQHQRIHTGEKPYVCNDCGKAFSQSSSLIYHQRIHKGEKPYECLQCGKAFSMSTQLTIHQRVHTGERPYKCNECGKAFSQNSTLFQHQIIHAGVKPYECSECGKAFSRSSYLIEHQRIHTRAQWFYEYGNALEGSTFVSRKKVNTIKKLHQCEDCEKIFRWRSHLIIHQRIHTGEKPYKCNDCGKAFNRSSRLTQHQKIHMG

SEQ ID NO: 19455 - protein, 667 aa, Homo sapiens
MGAAGLQGAPGGAEHPGRCGPGAVPRIRGSVVLAPRWRSSPAGGWSDPLFFGGAGISFSKPELITQLEQGKETWREEKKCSPATCPDPEPELYLDPFCPPGFSSQKFPMQHVLCNHPPWIFTCLCAEGNIQPGDPGPGDQEKQQQASEGRPWSDQAEGPEGEGAMPLFGRTKKRTLGAFSRPPQRQPVSSRNGLRGVELEASPAQSGNPEETDKLLKRIEVLGFGTVNCGECGLSFSKMTNLLSHQRIHSGEKPYVCGVCEKGFSLKKSLARHQKAHSGEKPIVCRECGRGFNRKSTLIIHERTHSGEKPYMCSECGRGFSQKSNLIIHQRTHSGEKPYVCRECGKGFSQKSAVVRHQRTHLEEKTIVCSDCGLGFSDRSNLISHQRTHSGEKPYACKECGRCFRQRTTLVNHQRTHSKEKPYVCGVCGHSFSQNSTLISHRRTHTGEKPYVCGVCGRGFSLKSHLNRHQNIHSGEKPIVCKDCGRGFSQQSNLIRHQRTHSGEKPMVCGECGRGFSQKSNLVAHQRTHSGERPYVCRECGRGFSHQAGLIRHKRKHSREKPYMCRQCGLGFGNKSALITHKRAHSEEKPCVCRECGQGFLQKSHLTLHQMTHTGEKPYVCKTCGRGFSLKSHLSRHRKTTSVHHRLPVQPDPEPCAGQPSDSLYSL

SEQ ID NO: 19456 - protein, 555 aa, Homo sapiens
MDGDGLTFRDVAIEFSQDEWKCLNSTQRTLYRDVMLENYRNLVSLDLSRNCVIKELAPQQEGNPGEVFHTVTLEQHEKHDIEEFCFREIKKKIHDFDCQWRDDERNCNKVTTAPKENLTCRRDQRDRRGIGNKSIKHQLGLSFLPHPHELQQFQAEGKIYECNHVEKSVNHGSSVSPPQIISSTIKTHVSNKYGTDFICSSLLTQEQKSCIREKPYRYIECDKALNHGSHMTVRQVSHSGEKGYKCDLCGKVFSQKSNLARHWRVHTGEKPYKCNECDRSFSRNSCLALHRRVHTGEKPYKCYECDKVFSRNSCLALHQKTHIGEKPYTCKECGKAFSVRSTLTNHQVIHSGKKPYKCNECGKVFSQTSSLATHQRIHTGEKPYKCNECGKVFSQTSSLARHWRIHTGEKPYKCNECGKVFSYNSHLASHRRVHTGEKPYKCNECGKAFSVHSNLTTHQVIHTGEKPYKCNQCGKGFSVHSSLTTHQVIHTGEKPYKCNECGKSFSVRPNLTRHQIIHTGKKPYKCSDCGKSFSVRPNLFRHQIIHTKEKPYKRN

SEQ ID NO: 19457 - protein, 122 aa, Homo sapiens
MTSPHFSSYDEGPLDVSMAATNLENQLHSAQKNLLFLQREHASTLKGLHSEIRRLQQHCTDLTYELTVKSSEQTGDGTSKSSELKKRCEELEAQLKVKENENAELLKELEQKNAMITVLENT

SEQ ID NO: 19458 - protein, 423 aa, Homo sapiens [sequence omitted]

SEQ ID NO: 19459 - protein, 406 aa, Homo sapiens
MLSPAPEEPLLLAELKPGRPHQFDWKSSCETWSVAFSPDGSWFAWSQGHCIVKLIPWPLEEQFIPKGFEAKSRSSKNETKGRGSPKEKTLDCGQIVWGLAFSPWPSPPSRKLWARHHPQVPDVSCLVLATGLNDGQIKIWEVQTGLLLLNLSGHQDVVRDLSFTPSGSLILVSASRDKTLRIWDLNKHGKQIQVLSGHLQWVYCCSISPDCSMLCSAAGEKSVFLWSMRSYTLIRKLEGHQSSVVSCDFSPDSALLVTASYDTNVIMWDPYTGERLRSLHHTQVDPAMDDSDVHISSLRSVCFSPEGLYLATVADDRLLRIWALELKTPIAFAPMTNGLCCTFFPHGGVIATGTRDGHVQFWTAPRVLSSLKHLCRKALRSFLTTYQVLALPIPKKMKEFLTYRTF

SEQ ID NO: 19460 - protein, 759 aa, Homo sapiens
MSEKEAMMMVEPHQKVAWKRAVRGVREMCDVCETTLFNIHWVCRKCGFGVCLDCYRLRKSRPRSETEEMGDEEVFSWLKCAKGQSHEPENLMPTQIIPGTALYNIGDMVHAARGKWGIKANCPCISRQNKSVLRPAVTNGMSQLPSINPSASSGNETTFSGGGGPAPVTTPEPDHVPKADSTDIRSEEPLKTDSSASNSNSELKAIRPPCPDTAPPSSALHWLADLATQKAKEETKEAGSLRSVLNKESHSPFGLDSFNSTAKVSPLTPKLFNSLLLGPTASNNKTEGSSLRDLLHSGPGKLPQTPLDTGIPFPPVFSTSSAGVKSKASLPNFLDHIIASVVENKKTSDASKRACNLTDTQKEVKEMVMGLNVLDPHTSHSWLCDGRLLCLHDPSNKNNWKIFRECWKQGQPVLVSGVHKKLKSELWKPEAFSQEFGDQDVDLVNCRNCAIISDVKVRDFWDGFEIICKRLRSEDGQPMVLKLKDWPPGEDFRDMMPTRFEDLMENLPLPEYTKRDGRLNLASRLPSYFVRPDLGPKMYNAYGLITAEDRRVGTTNLHLDVSDAVNVMVYVGIPIGEGAHDEEVLKTIDEGDADEVTKQRIHDGKEKPGALWHIYAAKDAEKIRELLRKVGEEQGQENPPDHDPIHDQSWYLDQTLRKRLYEEYGVQGWAIVQFLGDAVFIPAGAPHQVHNLYSCIKVAEDFVSPEHVKHCFRLTQEFRHLSNTHTNHEDKLQVKNIIYHAVKDAVGTLKAHESKLARS

SEQ ID NO: 19461 - protein, 481 aa, Homo sapiens
MASNKFKRILNRELTHLSETSRSGNQVSEYISRTFLDQQTEVELPKVTAEEAPQPMSRISGLHGLCHSASLSSATVPRFGVQTDQEEQLAKELEDTNKWGLDVFKVAELSGNRPLTAIIFSIFQERDLLKTFQIPADTLATYLLMLEGHYHANVAYHNSLHAADVAQSTHVLLATPALEAVFTDLEILAALFASAIHDVDHPGVSNQFLINTNSELALMYNDASVLENHHLAVGFKLLQAENCDIFQNLSAKQRLSLRRMVIDMVLATDMSKHMNLLADLKTMVETKKVTSLGVLLLDNYSDRIQVLQNLVHCADLSNPTKPLPLYRQWTDRIMAEFFQQGDRERESGLDISPMCDKHTASVEKSQVGFIDYIAHPLWETWADLVHPDAQDLLDTLEDNREWYQSKIPRSPSDLTNPERDGPDRFQFELTLEEAEEEDEEEEEEGEETALAKEALELPDTELLSPEAGPDPGDLPLDNQRT

SEQ ID NO: 19462 - protein, 3048 aa, Homo sapiens
MNLHQVLTGAVNPGDHCFSVGSIGDQRFTAYASGCDIVILGSDFERLQIIPGAKHGNIQVGCVDCSMQQGKIAASYGNVISIFEPVNLPKQKKNLELYSQWQKSGQFFLESIAHNITWDPTGSRLLTGSSYLQLWSNTNLEKPTEDENLNKTDLNFGDWKCIWHCKTASQVHLMKFSPDGEFFATAGKDDCLLKVWYNVENWRTAVTSPDGSSEKQSQGEIDFSFVYLAHPRAVNGFSWRKTSKYMPRASVCNVLLTCCKDNVCRLWVETFLPNDCLLYGGDCSHWTESINLTNNFKRNASSKERVQNALEVNLRHFRRGRRRSLALVAHTGYLPHQQDPHHVHRNTPLHANALCHFHIAASINPATDIPLLPSITSLSLNENEEKTGPFVVHWLNNKELHFTLSMEVFLQQLRKSFEQPSSEASVEDSNQADVKSDEETDDGVDDLKINPEKKELGCDKMVPNSSFTSLSSAAIDHQIEVLLSEWSKNADMLFSIHPMDGSLLVWHVDWLDEYQPGMFRQVQVSFVSRIPVAFPTGDANSLCKSIMMYACTKNVDLAIQQGKQKPSGLTRSTSMLISSGHNKSSNSLKLSIFTPNVMMISKHADGSLNQWLVSFAEESAFSTVLSISHKSRYCGHRFHLNDLACHSVLPLLLTTSHHNALRTPDVDNPEQPFDALNIEECSLTQQNKSTVDVAFQDPSAVYSELILWRVDPVGPLSFSGGVSELARINSLHVSAFSNVAWLPTLIPSYCLGAYCNSPSACFVASDGQYLRLYEAVIDAKKLLSELSNPEISKYVGEVFNIVSQQSTARPGCIIALDPITKLHGRKTQLLHVFEEDFILNNLEKKSLGKDSILSNAGSSPNGFSEKFYLIVIECTQDNRSLLHMWNLHLKSIPVSLDEKVDTKLSEAVWQPEEHYSSSPEKILSPFSQKYQACRANLQSTSRLTLFSEMVYSQELHLPEGVEIISIKPSAGHLSSSSIYPACSAPYLLATSCSDEKVRFWRCRVTDGESATSKNGKIDLAYIWEEWPLLIEDGLQSNSSITVPGRPVEVSCAHTNRLAVAYKQPASNSRSSQDFVMHVSIFECESTGGSCWVLEQTIHLDELSTVLDSGISVDSNLVAYNKQDMYLSSKENITSNTKHLVHLDWMSREDGSHILTVGIGSKLFMYGPLAGKVQDQTGKETLAFPLWESTKVVPLSKFVLLRSVDLVSSVDGSPPFPVSLSWVRDGILVVGMDCEMHVYCQWQPSSKQEPVITDSYSGSTPSITSLIKQSNSSSGLHPPKKTLTRSMTSLAQKICGKKTAFDPSVDMEDSGLFEAAHVLSPTLPQYHPLQLLELMDLGKVRRAKAILSHLVKCIAGEVVALNEAESNHERRLRSLTISASGSTTRDPQAFNKAENTDYTEIDSVPPLPLYALLAADDDSCYSSLEKSSNESTLSKSNQLSKESYDELFQTQLLMTDTHMLETDEENTKPRVIDLSQYSPTYFGPEHAQVLSGHLLHSSLPGLSRMEQMSLMALADTIATTSTDIGESRDRSQGGETLDECGLKFLLAVRLHTFLTTSLPAYRAQLLHQGLSTSHFAWAFHSVAEEELLNMLPAMQKDDPTWSELRAMGVGWWVRNTRILRKCIEKVAKAAFYRKNDPLDAAIFYLAMKKKAVIWGLYRAEKNTRMTQFFGHNFEDERWRKAALKNAFSLLGKQRFEHSAAFFLLAGCLRDAIEVCLEKLNDIQLALVIARLYESEFDTSAAYKSILRKKVLGIDSPVSELCSLNINMHHDPFLRSMAYWILEDYSGALETLIKQPIRENDDQVLSASNPTVFNFYNYLRTHPLLLRRHFGSSDTFSTHMSLTGKSGLAGTINLSERRLFFTTASAHLKAGCPMLALEVLSKMPKVIKKTRPFYRASSFLDTSKDCSPSSPLKLDAREDKSSAVDWSQSLINGFGSSSEGSSEKQSNSTLSFDWSQPSVVFQDDSLELKWDSDNDEENEDVPISMKELKPLQRKTDKKLDDISSNYTESFSTLDENDLLNPSEDIIAVQLKFRACLKILTVELRTLSTGYEIDGGKLRYQLYHWLEKEVIALQRTCDFCSDAEELQSAFGRNEDEFGLNEDAEDLPHQTKVKQLRENFQEKRQWLLKYQSLLRMFLSYCILHGSHGGGLASVRMELILLLQESQQETSEPLFSSPLSEQTSVPLLFACTANAKTVVANPLLHLSNLTHDILHAIINFDSPPHPDIQSNKVYVMHTLAASLSACIYQCLCGSHNYSSFQTNQFTGMVYQTVLLPHRPSLKTGSLDEALTPNTSPAQWPGITCLIRLLNSSGEEAQSGLTVLLCEILTAVYLSLFIHGLATHSSNELFRIVAHPLNEKMWSAVFGGGAHVPSKEQTHSKTLPVSSLVEEGEKQNKRFRPSKMSCRESAPLTPSSAPVSQESLAVKEKFIPPELSIWDYFIAKPFLPSSQSRAEYDSEESLGSDDDDNDDDDDVLASDFHLQEHSNSNSYSWSLMRLAMVQLVLNNLKTFYPFAGHDLAELPVSSPLCHAVLKTLQCWEQVLLRRLEIHGGPPQNYIASHTAEESLSAGPAILRHKALLEPTNTPFKSKHHLALSVKRLWQYLVKQEEIQETFIKNIFTKKRCLNESLEDNSETIKNSMMEEPNINKIEADLGYPGGKARIIHKESDIITAFAVNKANRNCIAIASSHDVQELDVSGILATQVYTWVDDDIEVETKGSEDFLVIHARDDLTAVQGTTPYTHSNPGTPINMPWLGSTQTGRGASVMIKKAINNVRRMTSHPTLPYYLTGAQDGSVRMFEWGHSQQITCFRSGGNSRVTRMRFNYQGNKFGIVDADGYLSLYQTNWKCCPVTGSMPKPYLTWQCHNKTANDFVFVSSSSLIATAGLSTDNRNVCLWDTLVAPANSLVHAFTCHDSGATVLAYAPKHQLLISGGRKGFTYVFDLCQRQQRQLFQSHDSPVKAVAVDPTEEYFVTGSAEGNIKIWSLSTFGLLHTFVSEHARQSIFRNIGTGVMQIETGPANHIFSCGADGTMKMRILPDQFSPLNEVLKNDVKFML

SEQ ID NO: 19463 - protein, 1314 aa, Homo sapiens
EWRPDSTMIAVSTANGYILFFHITSTRGDKYLYEPVYPKGSPQMKGTPHFKEEQCAPALNLEMRKILDLQAPIMSLQSVLEDLLVATSDGLLHLIHWEGMTNGRKAINLCTVPFSVDLQSSRVGSFLGFTDVHIRDMEYCATLDGFAVVFNDGKVGFITPVSSRFTAEQLHGVWPQDVVDGTCVAVNNKYRLMAFGCVSGSVQVYTIDNSTGAMLLSHKLELTAKQYPDIWNKTGAVKLMRWSPDNSVVIVTWEYGGLSLWSVFGAQLICTLGGDFAYRSDGTKKDPLKINSMSWGAEGYHLWVISGFGSQNTEIESDLRSVVKQPSILLFQFIKSVLTVNPCMSNQEQVLLQGEDRLYLNCGEASQTQNPRSSSTHSEHKPSREKSPFADGGLESQGLSTLLGHRHWHVVQISSTYLESNWPIREQNMIVTGGLAWWNDFMVLACYNINDRQEELRVYLRTSNLDNAFAHVTKAQAETLLLSVFQDMVIVFRADCSICLYSIERKSDGPNTTAGIQVLQEVSMSRYIPHPFLVVSVTLTSVSTENGITLKMPQQARGAESIMLNLAGQLIMMQRDRSGPQIREKDSNPNNQRKLLPFCPPVVLAQSVENVWTTCRANKQKRHLLEALWLSCGGAGMKVWLPLFPRDHRKPHSFLSQRIMLPFHINIYPLAVLFEDALVLGAVNDTLLYDSLYTRNNAREQLEVLFPFCVVERTSQIYLHHILRQLLVRNLGEQALLLAQSCATLPYFPHVLELMLHEVLEEEATSREPIPDPLLPTVAKFITEFPLFLQTVVHCARKTEYALWNYLFAAVGNPKDLFEECLMAQDLDTAASYLIILQNMEVPAVSRQHATLLFNTALEQGKWDLCRHMIRFLKAIGSGESETPPSTPTAQEPSSSGGFEFFRNRSISLSQSAENVPASKFSLQKTLSMPSGPSGKRWSKDSDCAENMYIDMMLWRHARRLLEDVRLKDLGCFAAQLGFELISWLCKERTRAARVDNFVIALKRLHKDFLWPLPIIPASSISSPFKNGKYRTVGEQLLKSQSADPFLNLEMDAGISNIQRSQSWLSNIGPTHHEIDTASSHGPQMQDAFLSPLSNKGDECSIGSATDLTESSSMVDGDWTMVDENFSTLSLTQSELEHISMELASKGPHKSQVQLRYLLHIFMEAGCLDWCIVIGLILRESSIINQILVITQSSEVDGEMLQNIKTGLHAVDRWASTDCPGYKPFLNIIKPQLQKLSEITEEQVQPDAFQPITMGKTPEQTSPRAEESRGSSSHGSIPQGEVGSSNMVSRKEEDTAQAEEEEPFQDGTYDCSVS

SEQ ID NO: 19464 - protein, 692 aa, Homo sapiens
MVDYHAANQSYQYGPSSAGNGAGGGGSMGDYMAQEDDWDRDLLLDPAWEKQQRKAETAANRICKVLAVNQENEHLMEDYEKLASDLLEWIRRTIPWLEDRVPQKTIQEMQQKLEDFRDYRRVHKPPKVQEKCQLEINFNTLQTKLRLSNRPAFMPSEGKMVSDINNGWQHLEQAEKGYEEWLLNEIRRLERLDHLAEKFRQKASIHEAWTDGKEAMLKHRDYETATLSDIKALIRKHEAFESDLAAHQDRVEQIAAIAQELNELDYYDSHNVNTRCQKICDQWDALGSLTHSRREALEKTEKQLEAIDQLHLEYAKRAAPFNNWMESAMEDLQDMFIVHTIEEIEGLISAHDQFKSTLPDADREREAILAIHKEAQRIAESNHIKLSGSNPYTTVTPQIINSKWEKVQQLVPKRDHALLEEQSKQQSNEHLRRQFASQANVVGPWIQTKMEEIGRISIEMNGTLEDQLSHLKQYERSIVDYKPNLDLLEQQHQLIQEALIFDNKHTNYTMEHIRVGWEQLLTTIARTINEVENQILTRDAKGISQEQMQEFRASFNHFDKDHGGALGPEEFKACLISLGYDVENDRQGEAEFNRIMSLVDPNHSGLVTFQAFIDFMSRETTDTDTADQVIASFKVLAGDKNFITAEELRRELPPDQAEYCIARMAPYQGPDAVPGALDYKSFSTALYGESDL

SEQ ID NO: 19465 - protein, 483 aa, Homo sapiens
MQSFLTLLKEHEDTCAPPAELVTLAGRLCRDFQDDLAQLQPLVTAILDSQLRLHLLDNADVALACARVLDQQEQQQAACRLLEGCQVPGGSQELVQLWNDIHYRLVMRRLGVAALTPVQKFRCRKRNPPPPSLCPEGLKSRNFPREVREKLHNFAVGVNTNPSKAERENLALETSLTPEQVYNWFANYRRRQRALPQHMKPAQQATAEDPGARERGPDLLQPSGNPRVDSGFVDRPQWSEEREEKGPPQSPQTTQGPWEPLALAPDFPADETVSKPLDVRSLPGGEMYQEGPGHDPATLPLFCPGPGLCPLAAGNDMLNPSLAAPESWLMSLALASSKEVSFQTGQLVHSHGLDFMMGPADTAVAVSIATLGDPSPTGFSGPPSGHPQSVQLEEGLGTSSGRTELRVGSFLVTQPPLQAPEFILTQSPPELAPAPSAFPGPVSAMELSQALPSSQVQCSDSQASGDAFWGARMLLEFSGSSLG

SEQ ID NO: 19466 - protein, 282 aa, Homo sapiens
MRFARSKRGLRLKTVDSCFQDLKESRLVEDTFTIDEVSEVLNGLQAVVHSEVESELINTAYTNVLLLRQLFAQAEKWYLKLQTDISELENRELLEQVAEFEKAEITSSNKKPILDVTKPKLAPLNEGGTAELLNKEILRLQEENEKLKSRLKTIEIQATNALDEKSKLEKALQDLQLDQGNQKDFIKAQDLSNLENTVAALKSEFQKTLNDKTENQKSLEENLATAKHDLLRVQEQLHMAEKELEKKFQQTAAYRNMKEILTKKNDQIKDLRKRLAQYEPED

SEQ ID NO: 19467 - protein, 314 aa, Homo sapiens
MAATNLENQLHSAQKNLLFLQREHASTLKGLHSEIRRLQQHCTDLTYELTVKSSEQTGDGTSKSSELKKRCEELEAQLKVKENENAELLKELEQKNAMITVLENTIKEREKKYLEELKAKSHKLTLLSSELEQRASTIAYLTSQLHAAKKKLMSSSGTSDASPSGSPVLASYKPAPPKDKLPETPRRRMKKSLSAPLHPEFEEVYRFGAESRKLLLREPVDAMPDPTPFLLARESAEVHLIKERPLVIPPIASDRSGEQHSPAREKPHKAHVGVAHRIHHATPPQAQPEVKTLAVDQVNGGKVVRKHSGTDRTV

SEQ ID NO: 19468 - protein, 212 aa, Homo sapiens
QDLKIKLAVRMDKPQNMKHSGYLWAIGKNVWKRWKKRFFVLVQVSQYTFAMCSYREKKAEPQELLQLDGYTVDYTDPQPGLEGGRAFFNAVKEGDTVIFASDDEQDRILWVQAMYRATGQSHKPVPPTQVQKLNAKGGNVPQLDAPISQFSGLKDADRAQKHGMDEFISSNPCNFDHASLFEMVQRLTLDHRLNDSYSCLGWFSPGQVFVLD

SEQ ID NO: 19469 - protein, 412 aa, Homo sapiens
MGCDRNCGLIAGAVIGAVLAVFGGILMPVGDLLIQKTIKKQVVLEEGTIAFKNWVKTGTEVYRQFWIFDVQNPQEVMMNSSNIQVKQRGPYTYRVRFLAKENVTQDAEDNTVSFLQPNGAIFEPSLSVGTEADNFTVLNLAVAYNNTADGVYKVFNGKDNISKVAIIDTYKGKRNLSYWESHCDMINGTDAASFPPFVEKSQVLQFFSSDICRSIYAVFESDVNLKGIPVYRFVLPSKAFASPVENPDNYCFCTEKIISKNCTSYGVLDISKCKEGRPVYISLPHFLYASPDVSEPIDGLNPNEEEHRTYLDIEPITGFTLQFAKRLQVNLLVKPSEKIQVLKNLKRNYIVPILWLNETGTIGDEKANMFRSQVTGKINLLGLIEMILLSVGVVMFVAFMISYCACRSKTIK

SEQ ID NO: 19470 - protein, 293 aa, Homo sapiens
MTRHLRLTAEGEREEKTEEASDITGRTEKQQWGRTDQTPRLPAPKEQGRAADALLKAVAASSVAEKAVEAARMAKLIAQDLQPMLEAPGRRPRQDSEGSDTEPLDEDSPGVYENGLTPSEGSPELPSSPASSRQPWRPPACRSPLPPGGDQGPFSSPKAWPEEWGGAGAQAEELAGYEAEDEAGMQGPGPRDGSPLLGGCSDSSGSLREEEGEDEEPLPPLRAPAGTEPEPIAMLVLRGSSSRGPDAGCLTEELGEPAATERPAQPGAANPLVVGAVALLDLSLAFLFSQLLT

SEQ ID NO: 19471 - protein, 502 aa, Homo sapiens
QVKMLQGELGGIMGQEPENKGDHSKVRIYTSPCMIQEHQETQKRLSEVWQKVSQQDDLIQELRNKLACSNALVLEREKALIKLQADFASCTATHRYPPSSSEECEDIKKILKHLQEQKDSQCLHVEEYQNLVKDLRVELEAVSEQKRNIMKDMMKLELDLHGLREETSAHIERKDKDITILQCRLQELQLEFTETQKLTLKKDKFLQEKDEMLQELEKKLTQVQNSLLKKEKELEKQQCMATELEMTVKEAKQDKSKEAECKALQAEVQKLKNSLEEAKQQERLAAQQAAQCKEEAALAGCHLEDTQRKLQKGLLLDKQKADTIQELQRELQMLQKESSMAEKEQTSNRKRVEELSLELSEALRKLENSDKEKRQLQKTVAEQDMKMNDMLDRIKHQHREQGSIKCKLEEDLQEATKLLEDKREQLKKSKEHEKLMEGELEALRQEFKKKDKTLKENSRKLEEENENLRAELQCCSTQLESSLNKYNTSQQVIQDLNKEKCS

SEQ ID NO: 19472 - protein, 111 aa, Homo sapiens
MLVHGTFWKHWPSILLKGLSCQGRTHIHLAPGLPGDPGIISGMRSHCEIAVFIDGPLALAGNTDGFLLPKYFKEALQLRPTRKPLSLAGDEETECQSSPKHSSRERRRIQQ

SEQ ID NO: 19473 - protein, 286 aa, Homo sapiens [sequence omitted]

SEQ ID NO: 19474 - protein, 490 aa, Homo sapiens
MNCYLLLRFMLGIPLLWPCLGATENSQTKKVKQPVRSHLRVKRGWVWNQFFVPEEMNTTSHHIGQLRSDLDNGNNSFQYKLLGAGAGSTFIIDERTGDIYAIQKLDREERSLYILRAQVIDIATGRAVEPESEFVIKVSDINDNEPKFLDEPYEAIVPEMSPEGTLVIQVTASDADDPSSGNNARLLYSLLQGQPYFSVEPTTGVIRISSKMDRELQDEYWVIIQAKDMIGQPGALSGTTSVLIKLSDVNDNKPIFKESLYRLTVSESAPTGTSIGTIMAYDNDIGENAEMDYSIEEDDSQTFDIITNHETQEGIVILKKKVDFEHQNHYGIRAKVKNHHVPEQLMKYHTEASTTFIKIQVEDVDEPPLFLLPYYVFEVFEETPQGSFVGVVSATDPDNRKSPIRYSITRSKVFNINDNGTITTSNSLDREISAWYNLSITATEKYNIEQISSIPLYVQVLNINDHAPEFSQYYETYVCENAGSGQGLFF

SEQ ID NO: 19475 - protein, 676 aa, Homo sapiens
MDCQAEVNCGLHLVIQTSSLPEKNKVEFKLNKDTSSFPGRLLQHDLERNYSSRQGDHINLVSSSLSSFPILQRSSEEKILYSDRLSLERQKLTVCPIINGEDHLRLLNFQHNFITRIQNISNLQKLISLDLYDNQIEEISGLSTLRCLRVLLLGKNRIKKISNLENLKSLDVLDLHGNQITKIENINHLCELRVLNLARNFLSHVDNLNGLDSLTELNLRHNQITFVRDVDNLPCLQHLFLSFNNISSFDSVSCLADSSSLSDITFDGNPIAQESWYKHTVLQNMMQLRQLDMKRITEEERRMASVLAKKEEEKKRESHKQSLLKEKKRLTINNVARQWDLQQQRVANIATNEDRKDSDSPQDPCQIDGSTLSAFPEETGPLDSGLNNALQGLSVIDTYLVEVDGDTLSLYGSGALESLDRNWSVQTAGMITTVSFTFIEFDEIVQVLPKLKIKFPNSLHLKFKETNLVMLQQFNALAQLRRIDQLTIDPQGNPVVNFTLWKYYVLFRLSHFSMQKINGTEVTQNDMIMAERLFGILAHVASSELPQYRLISILGDARKKQFRYLLESKGKKPGIINEENNDSKRLVGENTNRATLNYTTRDFYNEKLEEIKEKKKFCKTYIEDLVKEATEINMKNEALQKLWPQMFIELVRDAVIEIRNKNSYMKLCLQQITDQK

SEQ ID NO: 19476 - protein, 1152 aa, Homo sapiens
MSRGQRVLKGLLGWVCTWTWAWRARLGARGCGLHVLCPRDLPLPPEELPRKDGADAVFPGPSLEPPAGSSGVKATGTLKRPTSLSRHASAAGFPLSGAASWTLGRSHRSPLTAASPGELPTEGAGPDVVEDISHLLADVARFAEGLEKLKECVLRDDLLEARRPRAHECLGEALRVMHQIISKYPLLNTVETLTAAGTLIAKVKAFHYESNNDLEKQEFEKALETIAVAFSSTVSEFLMGEVDSSTLLAVPPGDSSQSMESLYGPGSEGTPPSLEDCDAGCLPAEEVDVLLQRCEGGVDAALLYAKNMAKYMKDLISYLEKRTTLEMEFAKGLQKIAHNCRQSVMQEPHMPLLSIYSLALEQDLEFGHSMVQAVGTLQTQTFMQPLTLRRLEHEKRRKEIKEAWHRAQRKLQEAESNLRKAKQGYVQRCEDHDKARFLVAKAEEEQAGSAPGAGSTATKTLDKRRRLEEEAKNKAEEAMATYRTCVADAKTQKQELEDTKVTALRQIQEVIRQSDQTIKSATISYYQMMHMQTAPLPVHFQMLCESSKLYDPGQQYASHVRQLQRDQEPDVHYDFEPHVSANAWSPVMRARKSSFNVSDVARPEAAGSPPEEGGCTEGTPAKDHRAGRGHQVHKSWPLSISDSDSGLDPGPGAGDFKKFERTSSSGTMSSTEELVDPDGGAGASAFEQADLNGMTPELPVAVPSGPFRHEGLSKAARTHRLRKLRTPAKCRECNSYVYFQGAECEECCLACHKKCLETLAIQCGHKKLQGRLQLFGQDFSHAARSAPDGVPFIVKKCVCEIERRALRTKGIYRVNGVKTRVEKLCQAFENGKELVELSQASPHDISNVLKLYLRQLPEPLISFRLYHELVGLAKDSLKAEAEAKAASRGRQDGSESEAVAVALAGRLRELLRDLPPENRASLQYLLRHLRRIVEVEQDNKMTPGNLGIVFGPTLLRPRPTEATVSLSSLVDYPHQARVIETLIVHYGLVFEEEPEETPGGQDESSNQRAEVVVQVPYLEAGEAVVYPLQEAAADGCRESRVVSNDSDSDLEEASELLSSSEASALGHLSFLEQQQSEASLEVASGSHSGSEEQLEATAREDGDGDEDGPAQQLSGFNTNQSNNVLQAPLPPMRLRGGRMTLGSCRERQPEFV

SEQ ID NO: 19477 - protein, 687 aa, Homo sapiens
MSGSGRKDFDVKHILRLRWKLFSHPSPSTGGPAGGGCLQQDGSGSFEHWGPSQSRLLKSQERSGVSTFWKKPSSSSSSSSSPSSSSSSFNPLNGTLLPVATRLQQGAPGQGTQQPARTLFYVESLEEEVVPGMDFPGPHEKGLVLQELKVEPDNSSQATGEGCGHRLVLSSVSDYFAAMFTSDVCEAKQEEIKMEGIDPNALWDLVQFAYTGCLELKEDTIENLLAAACLLQLPQVVEVCCHFLMKLLHPSNCLGIRAFADAQGCIELMKVAHSYTMENIMEVIRNQEFLLLPAEELHKLLASDDVNVPDEETIFHALMMWVKYDMQSRCNDLSMLLAFIRLPLLPPQILADLENHALFKNDLECQKLILEAMKYHLLPERRTLMQSPRTKPRKSTVGTLYAVGGMDNNKGATTIEKYDLRTNLWIQAGMMNGRRLQFGVAVIDDKLFVIGGRDGLKTLNTVECYNPKTKTWTVLPPMSTHRHGLGVTVLEGPIYAVGGHDGWSYLNTVERWDPQSQQWTFVASMSIARSTVGVAALNGKLYSVGGRDGSSCLSSMEYYDPHTNKWNMCAPMCKRRGGVGVATCDGFLYAVGGHDAPASNHCSRLLDYVERYDPKTDTWTMVAPLSMPRDAVGVCLLGDRLYAVGGYDGQTYLNTMESYDPQTNEWTQMASLNIGRAGACVVVIKQP

SEQ ID NO: 19478 - protein, 516 aa, Homo sapiens
MGLEALVPLAMIVAIFLLLVDLMHRHQRWAARYPPGPLPLPGLGNLAACGLPEHTILLRPVAAPLRGRVQPAAGLDAGGRAQWAGGRARGDGDPRRGHGRPPACAHLPGPGLRAAFPRGDPVALWARVARAEALLRVHLAQLGPGQEVAGAVGDRGGRLPLCRLRRPSRTPLSPQRPLGQSREQRDRLPHLRAPLRVRRPSLPQAAGPSSGGTEGGVGLPARGAECCPRPPAHPSAGWQGPTLPKGFPDPAGUAANUAQDDLGPSPATPRPDUGLPGKEGEGQGEPUEQLQUUEPAHSGGUPVPCRDGDHLDHAGLGPPAHDPTPGCAARKESVPWVLTHCGDACLSSPCPTGDRRRDRAGAATRDGUPGSHALHHCRDSRGAALWGHRPPGCDPYDIPUHRSTGLPHPUGNDTHHQPVIGAEGUGRLEEALPLPPRTLPGCPGPLCEAGGLPAFLSRPPCMPRGAPGPHGALPLLHLPAAALQLLRGRRTAPAQPLSCRQLSGDPIPLRALCCAP

SEQ ID NO: 19479 - protein, 846 aa, Homo sapiens
MARSSPYLRQLQGPLLPPRDLVEEDDDYLNDDVEEDEESVFIDAEELCSGGVKAGSLPGCLRVSICDENTQETCKVFGRFPITGAWWRVKVQVKPVVGSRSYQYQVQGFPSYFLQSDMSPPNQKHICALFLKECEVSSDDVNKFLTWVKEVSNYKNLNFENLRETLRTFHKETGRKDQKQPTQNGQEELFLDNEMSLPLENTIPFRNVMTALQFPKIMEFLPVLLPRHFKWIIGSGSKEMLKEIEEILGTHPWKLGFSKITYREWKLLRCEASWIAFCQCESLLQLMTDLEKNALIMYSRLKQICREDGHTYVEVNDLTLTLSNHMSFHAASESLKFLKDIGVVTYEKSCVFPYDLYHAERAIAFSICDLMKKPPWHLCVDVEKVLASIHTTKPENSSDDALNESKPDEVRLENPVDVVDTQDNGDHIWTNGENEINAEISEVQLDQDQVEVPLDRDQVAALEMICSNPVTVISGKGGCGKTTIVSRLFKHIEQLEEREVKKACEDFEQDQNASEEWITFTEQSQLEADKAIEVLLTAPTGKAAGLLRQKTGLHAYTLCQVNYSFYSWTQTMMTTNKPWKFSSVRVLVVDEGSLVSVGIFKSVLNLLCEHSKLSKLIILGDIRQLPSIEPGNLLKDLFETLKSRNCAIELKTNHRAESQLIVDNATRISRRQFPKFDAELNISDNPTLPISIQDKTFIFVRLPEEDASSQSSKTNHHSCLYSAVKTLLQENNLQNAKTSQFIAFRRQDCDLINDCCCKHYTGHLTKDHQSRLVFGIGDKICCTRNAYLSDLLPENISGSQQNNDLDASSEDFSGTLPDFAKNKRDFESNVRLCNGEIFFITNIEYL

SEQ ID NO: 19480 - protein, 1085 aa, Homo sapiens
MSLGERGSPQTFGGSSVSKGSDAGHDQSPAEKKGLRCQNPACMDKGRAAKVCHHADCQQLHRRGPLNLCEACDSKFHSTMHYDGHVRFDLPPQGSVLARNVSTRSCPPRTSPAVDLEEEEEESSVDGKGDRKSTGLKLSKKKARRRHTDDPSKECFTLKFDLNVDIETEIVPAMKKKSLGEVLLPVFERKGIALGKVDIYLDQSNTPLSLTFEAYRFGGHYLRVKAPAKPGDEGKVEQGMKDSKSLSLPILRPAGTGPPALERVDAQSRRESLDILAPGRRRKNMSEFLGEASIPGQEPPTPSSCSLPSGSSGSTNTGDSWKNRAASRFSGFFSSGPSTSAFGREVDKMEQLEGKLHTYSLFGLPRLPRGLRFDHDSWEEEYDEDEDEDNACLRLEDSWRELIDGHEKLTRRQCHQQEAVWELLHTEASYIRKLRVIINLFLCCLLNLQESGLLCEVEAERLFSNIPEIAQLHRRLWASVMAPVLEKARRTRALLQPGDFLKGFKMFGSLFKPYIRYCMEEEGCMEYMRGLLRDNDLFRAYITWAEKHPQCQRLKLSDMLAKPHQRLTKYPLLLKSVLRKTEEPRAKEAVVAMIGSVERFIHHVNACMRQRQERQRLAAVVSRIDAYEVVESSSDEVDKLLKEFLHLDLTAPIPGASPEETRQLLLEGSLRMKEGKDSKMDVYCFLFTDLLLVTKAVKKAERTRVIRPPLLVDKIVCRELRDPGSFLLIYLNEFHSAVGAYTFQASGQALCRGWVDTIYNAQNQLQQLRAQEPPGSQQPLQSLEEEEDEQEEEEEEEEEEEEGEDSGTSAASSPTIMRKSSGSPDSQHCASDGSTETLAMVVVEPGDTLSSPEFDSGPFSSQSDETSLSTTASSATPTSELLPLGPVDGRSCSMDSAYGTLSPTSLQDFVAPGPMAELVPRAPESPRVPSPPPSPRLRRRTPVQLLSCPPHLLKSKSEASLLQLLAGAGTHGTPSAPSRSLSELCLAVPAPGIRTQGSPQEAGPSWDCRGAPSPGSGPGLVGCLAGEPAGSHRKRCGDLPSGASPRVQPEPPPGVSAQHRKLTLAQLYRIRTTLLLNSTLTASEV

SEQ ID NO: 19481 - protein, 1078 aa, Homo sapiens
MKKASRSVGSVPKVSAISKTQTAEKIKPENSSSASTGGKLVKPGTAASLSKTKSSDDLLAGMAGGVTVTNGVKGKKSTCPSAAPSASAPAMTTVENKSKISTGTASSTKRSTSTGNKESSSTRERLRERTRLNQSKKLPSAGQGANDMALAKRSRSRTATECDVRMSKSKSDNQISDRAALEAKVKDLLTLAKTKDVEILHLRNELRDMRAQLGINEDHSEGDEKSEKETIMAHQPTDVESTLLQLQEQNTAIREELNQLKNENRMLKDRLNALGFSLEQRLDNSEKLFGYQSLSPEITPGNQSDGGGTLTSSVEGSAPGSVEDLLSQDENTLMDHQHSNSMDNLDSECSEVYQPLTSSDDALDAPSSSESEGIPSIERSRKGSSGNASEVSVACLTERIHQMEENQHSTSEELQATLQELADLQQITQELNSENERLGEEKVILMESLCQQSDKLEHFSRQIEYFRSLLDEHHISYVIDEDVKSGRYMELEQRYMDLAENARFEREQLLGVQQHLSNTLKMAEQDNKEAQEMIGALKERSHHMERIIESEQKGKAALAATLEEYKATVASDQIEMNRLKAQLENEKQKVAELYSIHNSGDKSDIQDLLESVRLDKEKAETLASSLQEDLAHTRNDANRLQDAIAKVEDEYRAFQEEAKKQIEDLNMTLEKLRSDLDEKETERSDMKETIFELEDEVEQHRAVKLHDNLIISDLENTVKKLQDQKHDMEREIKTLHRRLREESAEWRQFQADLQTAVVIANDIKSEAQEEIGDLKRRLHEAQEKNEKLTKELEEIKSRKQEEERGRVYNYMNAVERDLAALRQGMGLSRRSSTSSEPTPTVKTLIKSFDSASQVPNPAAAAIPRTPLSPSPMKTPPAAAVSPMQRHSISGPISTSKPLTALSDKRPNYGEIPVQEHLLRTSSASRPASLPRVPAMESAKTLSVSRRSSEEVKRDISAQEGASPASLMAMGTTSPQLSLSSSPTASVTPTTRSRIREERKDPLSALAREYGGSKRNALLKWCQKKTEGYQRRNFMLAFQAAESVGIKSTLDINEMVRTERPDWQNVMLYVTAIYKYFET

SEQ ID NO: 19482 - protein, 646 aa, Homo sapiens
MPFKWNAQRIQTLPNQNQSQTQPLLKTPPAVLQPIAPQTTFGVQTQPQPQSLLQAQISAASITPLLQTQPQPLLQQPQQKAGLLQPPVRIVSQPQPARRLDPPSRFSGRNDRGDQVPNRKDDRSRERERERRRSRERSPQRKRSRERSPRRERERSPRRVRRVVPRYTVQFSKFSLDCPSCDMMELRRRYQNLYIPSDFFDAQFTWVDAFPLSRPFQLGNYCNFYVMHREVESLEKNMAILDPPDADHLYSAKVMLMASPSMEDLYHKSCALAEDPQELRDGFQHPARLVKFLVGMKGKDEAMAIGGHWSPSLDGPDPEKDPSVLIKTAIRCCKALTGIDLSVCTQWYRFAEIRYHRPEETHKGRTVPAHVETVVLFFPDVWHCLPTRSEWETLSRGYKQQLVEKLQGERKEADGEQDEEEKDDGEAKEISTPTHWSKLDPKTMKVNDLRKELESRALSSKGLKSQLIARLTKQLKVEEQKEEQKELEKSEKEEDEDDDRKSEDDKEEEERKRQEEIERQRRERRYILPDEPAIIVHPNWAAKSGKFDCSIMSLSVLLDYRLEDNKEHSFEVSLFAELFNEMLQRDFGVRIYKSLLSLPEKEDKKEKDKKSKKDERKDKKEERDDETDEPKPKRRKSGDDKDKKED

SEQ ID NO: 19483 - protein, 282 aa, Homo sapiens
MRVLVDAREKLHIPWGDNSNQQHGDKMMSFDTRAPMAAQGMVETRVFLQYLPAIRALWADSGIQNAYDRRREFQLGESVKYFLDNLDKLGEPDYIPSQQDILLARRPTKGIHEYDFEIKNVPFKMVDVGGQRSERKRWFECFDSVTSILFLVSSSEFDQVLMEDRLTNRLTESLNIFETIVNNRVFSNVSIILFLNKTDLLEEKVQIVSIKDYFLEFEGDPHCLRDVQKFLVECFRNKRRDQQQKPLYHHFTTAINTENIRLVFRDVKDTILHDNLKQLMLQ

SEQ ID NO: 19484 - protein, 625 aa, Homo sapiens
MEEDSRDVEDRSSSGSWGNGGHPSPSRNYGDGTPYDHMTSRDLGSHDNLSPPFVNSRIQSKTERGSYSSYGRESNLQGCHQQSLLGGDMDMGNPGTLSPTKPGSQYYQYSSNNPRRRPLHSSAMEVQTKKVRKVPPGLPSSVYAPSASTADYNRDSPGYPSSKPATSTFPSSFFMQDGHHSSDPWSSSSGMNQPGYAGMLGNSSHIPQSSSYCSLHPHERLSYPSHSSADINSSLPPMSTFHRSGTNHYSTSSCTPPANGTDSIMANRGSGAAGSSQTGDALGKALASIYSPDHTNNSFSSNPSTPVGSPPSLSAGTAVWSRNGGQASSSPNYEGPLHSLQSRIEDRLERLDDAIHVLRNHAVGPSTAMPGGHGDMHGIIGPSHNGAMGGLGSGYGTGLLSANRHSLMVGTHREDGVALRGSHSLLPNQVPVPQLPVQSATSPDLNPPQDPYRGMPPGLQGQSVSSGSSEIKSDDEGDENLQDTKSSEDKKLDDDKKDIKSITSNNDDEDLTPEQKAEREKERRMANNARERLRVRDINEAFKELGRMVQLHLKSDKPQTKLLILHQAVAVILSLEQQVRERNLNPKAACLKRREEEKVSSEPPPLSLAGPHPGMGDASNHMGQM

SEQ ID NO: 19485 - protein, 1174 aa, Homo sapiens
MAADLNLEWISLPRSWTYGITRGGRVFFINEEAKSTTWLHPVTGEAVVTGHRRQSTDLPTGWEEAYTFEGARYYINHNERKVTCKHPVTGQPSQDNCIFVVNEQTVATMTSEEKKERPISMINEASNYNVTSDYAVHPMSPVGRTSRASKKVHNFGKRSNSIKRNPNAPVVRRGWLYKQDSTGMKLWKKRWFVLSDLCLFYYRDEKEEGILGSILLPSFQIALLTSEDHINRKYAFKAAHPNMRTYYFCTDTGKEMELWMKAMLDAALVQTEPVKRVDKITSENAPTKETNNIPNHRVLIKPEIQNNQKNKEMSKIEEKKALEAEKYGFQKDGQDRPLTKINSVKLNSLPSEYESGSACPAQTVHYRPINLSSSENKIVNVSLADLRGGNRPNTGPLYTEADRVIQRTNSMQQLEQWIKIQKGRGHEEETRGVISYQTLPRNMPSHRAQIMARYPEGYRTLPRNSKTRPESICSVTPSTHDKTLGPGAEEKRRSMRDDTMWQLYEWQQRQFYNKQSTLPRHSTLSSPKTMVNISDQTMHSIPTSPSHGSIAAYQGYSPQRTYRSEVSSPIQRGDVTIDRRHRAHHPKHVYVPDRRSVPAGLTLQSVSPQSLQGKTPEELTLLLIKLRRQQAELSSIREHTLAQLMQLKLEAHSPKNEILSHHLQRNTIYLDHQLSQDEGRGTLYKYRPEEVDIDAKLSRLCEQDKVVHALEEKLQQLHKEKYTLEQALLSASQEIEMHADNPAAIQTVVLQRDDLQNGLLSTCRELSRATAELERAWREYDKLEYDVTVTRNQMQEQLDHLGEVQTESAGIQRAQIQKELWRIQDVMEGLSKHKQQRGTTEIGMIGSKPFSTVKYKNEGPDYRLYKSEPELTTVAEVDESNGEEKSEPVSEIETSVVKGSHFPVGVVPPRAKSPTPESSTIASYVTLRKTKKMMDLRTERPRSAVEQLCLAESTRPRMTVEEQMERIRRHQQACLREKKKGLNVIGASDQSPLQSPSNLRDNPFRTTQTRRRDDKELDTAIRENDVKPDHETPATEIVQLKETEPQNVDFSKELKKTENISYEMLFEPEPNGVNSVEMMDKERNKDKMPEDVTFSPQDETQTANHKPEEHPEENTKNSVDEQEETVISYESTPEVSRGNQTMAVKSLSPSPESSASPVPSTQPQLTEGSHFMCV

SEQ ID NO: 19486 - protein, 711 aa, Homo sapiens
MLASLKVKKQELANSSDATLPDRPLSPPLTAPPTMKSSEFFEMLEKMQGIKLEEQKPGPQKNKDDYIPYPSIDEVVEKGGPYPQVILPQFGGYWIEDPENVGTPTSLGSSICEEEEEDNLSPNTFGYKLECKGEARAYRRHFLGKDHLNFYCTGSSLGNLILSVKCEEAEGIEYLRVILRSKLKTVHERIPLAGLSKLPSVPQIAKAFCDDAVGLRFNPVLYPKASQMIVSYDEHEVNNTFKFGVIYQKARQTLEEELFGNNEESPAFKEFLDLLGDTITLQDFKGFRGGLDVTHGQTGVESVYTTFRDREIMFHVSTKLPFTDGDAQQLQRKRHIGNDIVAIIFQEENTPFVPDMIASNFLHAYIVVQVETPGTETPSYKVSVTAREDVPTFGPPLPSPPVFQKGPEFREFLLTKLTNAENACCKSDKFAKLEDRTRAALLDNLHDELHAHTQAMLGLGPEEDKFENGGHGGFLESFKRAIRVRSHSMETMVGGQKKSHSGGIPGSLSGGISHNSMEVTKTTFSPPVVAATVKNQSRSPIKRRSGLFPRLHTGSEGQGDSRARCDSTSSTPKTPDGGHSSQEIKSETSSNPSSPEICPNKEKPFMKLKENGRAISRSSSSTSSVSSTAGEGEAMEEGDSGGSQPSTTSPFKQEVFVYSPSPSSESPSLGAAATPIIMSRSPTDAKSRNSPRSNLKFRFDKLSHASSGAGH

SEQ ID NO: 19487 - protein, 1220 aa, Homo sapiens
MGDQQLYKTNHVAHGSENLFYQQPPLGVHSGLNHNYGNAVTGGGMDAPQASPISPHFPQDTRDGLGLPVGSKNLGQMDTSRQGGWGSHAGPGNHVQLRGNLANSNMMWGAPAQAEPTDGYQYTYSQASEIRTQKLTSGVLHKLDSFTQVFANQNLRIQVNNMAQVLHTQSAVMDGAPDSALRQLLSQKPMEPPAPAIPSRYQQVPQQPHPGFTGGLSKPALQVGQHPTQGHLYYDYQQPLAQVPVQGGQPLQAPQMLSQHMQQMQQHQYYPPQQQQQAGQQRISMQEIQTQPQQIRPSQPQPPPQQQQPQQLQLQQRQGSMQIPQYYQPQPMMQHLQEQQQQQMHLQPPSYHRDPHQYTPEQAHTVQLIPLGSMSQYYYQEPQQPYSHPLYQQSHLSQHQQREDSQLKTYSSDRQAQAMLSSHGDLGPPDTGMGDPASSDLTRVSSTLPHRPLLSPSGIHLNNMGPQHQQLSPSAMWPQMHLPDGRAQPGSPESSGQPKGAFGEQFDAKNKLTCSICLKEFKNLPALNGHMRSHGGMRASPNLKQEEGEKVLPPQPQPPLPPPPPPPPPPQLPPEAESLTPMVMPVSVPVKLLPPKPSSQGFTNSTVAAPSARDKPASSMSDDEMPVLVRMTLSPPHSPQGAAPRTPAEIPRKHQPSVPKAEEPLKTVQEKKKFRHRPEPLFIPPPPSYNPNPAASYSGATLYQSQLRSPRVLGDHLLLDPTHELPPYTPPPMLSPVRQGSGLFSNVLISGHGPGAHPQLPLTPLTPTPRVLLCRSNSIDGSNVTVTPGPGEQTVDVEPRINIGLRFQAEIPELQDISALAQDTHKATLVWKPWPELENHDLQQRVENLLNLCCSSALPGGGTNSEFALHSLFEAKGDVMVALEMLLLRKPVRLKCHPLANYHYAGSDKWTSLERKLFNKALATYSKDFIFVQKMVKSKTVAQCVEYYYTWKKIMRLGRKHRTRLAEIIDDCVTSEEEEELEEEEEEDPEEDRKSTKEEESEVPKSPEPPPVPVLAPTEGPPLQALGQPSGSFICEMPNCGAVFSSRQALNGHARIHGGTNQVTKARGAIPSGKQKPGGTQSGYCSVKSSPSHSTTSGETDPTTIFPCKECGKVFFKIKSRNAHMKTHRQQEEQQRQKAQKAAFAAEMAATIERTTGPVGAPGLLPLDQLSLIKPIKDVDILDDDVVQQLGGVMEEAEVVDTDLLLDDQDSVLLQGDAEL

SEQ ID NO: 19488 - protein, 1012 aa, Homo sapiens
MGKLIRMGPQERWLLRTKRLHWSRLLFLLGMLIIGSTYQHLRRPRGLSSLWAAVSSHQPIKLASRDLSSEEMMMMSSSPSKPSSEMGGKMLVPQASVGSDEATLSMTVENIPSMPKRTAKMIPTTTKNNYSPTAAGTERRKEDTPTSSRTLTYYTSTSSRQIVKKYTPTPRGEMKSYSPTQVREKVKYTPSPRGRRVGTYVPSTFMTMETSHAITPRTTVKDSDITATYKILETNSLKRIMEETTPTTLKGMFDSTPTFLTHEVEANVLTSPRSVMEKNNLFPPRRVESNSSAHPWGLVGKSNPKTPQGTVLLHTPATSEGQVTISTMTGSSPAETKAFTAAWSLRNPSPRTSVSAIKTAPAIVWRLAKKPSTAPSTSTTPTVRAKLTMQVHHCVVVKPTPAMLTTPSPSLTTALLPEELSPSPSVLPPSLPDLHPKGEYPPDLFSVEERRQGWVVLHVFGMMYVFVALAIVCDEYFVPALGVITDKLQISEDVAGATFMAAGGSAPELFTSLIGVFISHSNVGIGTIVGSAVFNILFVIGTCSLFSREILNLTWWPLFRDVSFYILDLIMLILFFLDSLIAWWESLLLLLAYAFYVFTMKWNKHIEVWVKEQLSRRPVAKVMALEDLSKLPSLLTRGSSSTSLHNSTIRSTIYQLMLHSLDPLREVRLAKEKEEESLNQGARAQPQAKAESKPEEEEPAKLPAVTVTPAPVPDIKGDQKENPGGQEDVAEAESTGEMPGEEGETAGEGETEEKSGGETQPEGEGETETQGKGEECEDENEAEGKGDNEGEDEGEIHAEDGEMKGNEGETESQELSAENHGEAKNDEKGVEDGGGSDGGDSEEEEEEEEEQEEEEEEEEQEEEEEEEEEEEEKGNEEPLSLDWPETRQKQAIYLFLLPIVFPLWLTVPDVRRQESRKFFVFTFLGSIMWIAMFSYLMVWWAHQVGETIGISEEIMGLTILAAGTSIPDLITSVIVARKGLGDMAVSSSVGSNIFDITVGVGSCEMFQHGAIH

SEQ ID NO: 19489 - protein, 686 aa, Homo sapiens
MYRDPEAASPGAPSRDVLLVSAIITVSLSVTVVLCGLCHWCQRKLGKRYKNSLETVGTPDSGRGRSEKKAINDLDRDFWNNNESTVQQKWSSYPPKEFILNISPYAPYGDPRLSLNGTLLSGAKVAAAAGLAVEREGRLGEKPAPVPPPGEDALRSGGAAPSEPGSGGKAGRGRWRTVQSHLAAGKLNLSNFEDSTLSTATTLESIPSSTGEPKCQRPRTLMRQQSLQQPLSQHQRGRQPSQPTTSQSLGQLQAHMASAPGPNPRAYGRGQARQGTSAGSKYRAAGGRSRSNPGSWDHVVGQIRNRGLDMKSFLEGRMVVLSLVLGLSEQDDFANIPDLQNPGTQQNQNAQGDKRLPAGGKAVNTAPVPGQTPHDESDRRTEPRSSVSDLVNSLTSEMLMLSPGSEEDEAHEGCSRENLGRIQFSVGYNFQESTLTVKIMKAQELPAKDFSGTSDPFVKIYLLPDKKHKLETKVKRKNLNPHWNETFLFEGFPYEKVVQRILYLQVLDYDRFSRNDPIGEVSIPLNKVDLTQMQTFWKDLKPCSDGSGSRGELLLSLCYNPSANSIIVNIIKARNLKAMDIGGTSDPYVKVWLMYKDKRVEKKKTVTMKRNLNPIFNESFAFDIPTEKLRETTIIITVMDKDKLSRNDVIGKIYLSWKSGPGEVKHWKDMIARPRQPVAQWHQLKA

SEQ ID NO: 19490 - protein, 634 aa, Homo sapiens
MQLLPPPIRTGTKTQMDAKKPRKCDLTPFLVLKARKKQKFTSAKVGSKLSVQIQKPPSNIKNSRMTQVFHKNTSVTSLPFVDTKGKKNTVSFPHISKKVLLKSSLLYQENQAHNQMPASELKASEIPFHPSIKTQDPKAEEKSPKKQKVTLTAAEALKLFKNQLSPYEQSEILGYAELWFLGLEAKKLDTAPEKFSKTSFDDEHGFYLKVLHDHIAYRYEVLETIGKGSFGQVAKCLDHKNNELVALKIIRNKKRFHQQALMELKILEALRKKDKDNTYNVVHMKDFFYFRNHFCITFELLGINLYELMKNNNFQGFSLSIVRRFTLSVLKCLQMLSVEKIIHCDLKPENIVLYQKGQASVKVIDFGSSCYEHQKVYTYIQSRFYRSPEVILGHPYDVAIDMWSLGCITAELYTGYPLFPGENEVEQLACIMEVLGLPPAGFIQTASRRQTFFDSKGFPKNITNNRGKKRYPDSKDLTMVLKTYDTSFLDFLRRCLVWEPSLRMTPDQALKHAWIHQSRNLKPQPRPQTLRKSNSFFPSETRKDKVQGCHHSSRKDEITKETTEKTKDSPTKHVQHSGDQQDCLQHGADTVQLPQLVDAPKKSEAAVGAEVSMTSPGQSKNFSLKNTNVLPPIV

SEQ ID NO: 19491 - protein, 1011 aa, Homo sapiens
MAPPTGVLSSLLLLVTIAGCARKQCSEGRTYSNAVISPNLETTRIMRVSHTFPVVDCTAACCDLSSCDLAWWFEGRCYLVSCPHKENCEPKKMGPIRSYLTFVLRPVQRPAQLLDYGDMMLNRGSPSGIWGDSPEDIRKDLTFLGKDWGLEEMSEYSDDYRELEKDLLQPSGKQEPRGSAEYTDWGLLPGSEGAFNSSVGDSPAVPAETQQDPELHYLNESASTPAPKLPERSVLLPLPTTPSSGEVLEKEKASQLQEQSSNSSGKEVLMPSHSLPPASLELSSVTVEKSPVLTVTPGSTEHSIPTPPTSAAPSESTPSELPISPTTAPRTVKELTVSAGDNLIITLPDNEVELKAFVAPAPPVETTYNYEWNLISHPTDYQGEIKQGHKQTLNLSQLSVGLYVFKVTVSSENAFGEGFVNVTVKPARRVNLPPVAVVSPQLQELTLPLTSALIDGSQSTDDTEIVSYHWEEINGPFIEEKTSVDSPVLRLSNLDPGNYSFRLTVTDSDGATNSTTAALIVNNAVDYPPVANAGPNHTITLPQNSITLNGNQSSDDHQIVLYEWSLGPGSEGKHVVMQGVQTPYLHLSAMQEGDYTFQLKVTDSSRQQSTAVVTVIVQPENNRPPVAVAGPDKELIFPVESATLDGSSSSDDHGIVFYHWEHVRGPSAVEMENIDKAIATVTGLQVGTYHFRLTVKDQQGLSSTSTLTVAVKKENNSPPRARAGGRHVLVLPNNSITLDGSRSTDDQRIVSYLWIRDGQSPAAGDVIDGSDHSVALQLTNLVEGVYTFHLRVTDSQGASDTDTATVEVQPDPRKSGLVELTLQVGVGQLTEQRKDTLVRQLAVLLNVLDSDIKVQKIRAHSDLSTVIVFYVQSRPPFKVLKAAEVARNLHMRLSKEKADFLLFKVLRVDTAGCLLKCSGHGHCDPLTKRCICSHLWMENLIQRYIWDGESNCGIKHRSTEHNSSLMVSESEFDSDQDTIFSREKMERGNPKVSMNGSIRNGASFSYCSKDR

SEQ ID NO: 19492 - protein, 1065 aa, Homo sapiens
MDVVLHHVPEAKLVECIGQELIFLLPNKNFKHRAYASLFRELEETLADLGLSSFGISDTPLEEIFLKVTEDSDSGPLFAGGAQQKRENVNPRHPCLGPREKAGQTPQDSNVCSPGAPAAHPEGQPPPEPECPGPQLNTGTQLVLQHVQALLVKRFQHTIRSHKDFLAQIVLPATFVFLALMLSIVIPPFGEYPALTLHPWIYGQQYTFFSMDEPGSEQFTVLADVLLNKPGFGNRCLKEGWLPEYPCGNSTPWKTPSVSPNITQLFQKQKWTQVNPSPSCRCSTREKLTMLPECPEGAGGLPPPQRTQRSTEILQDLTDRNISDFLVKTYPALIRSSLKSKFWVNEQRYGGISIGGKLPVVPITGEALVGFLSDLGRIMNVSGGPITREASKEIPDFLKHLETEDNIKVWFNNKGWHALVSFLNVAHNAILRASLPKDRSPEEYGITVISQPLNLTKEQLSEITVLTTSVDAVVAICVIFSMSFVPASFVLYLIQERVNKSKHLQFISGVSPTTYWVTNFLWDIMNYSVSAGLVVGIFIGFQKKAYTSPENLPALVALLLLYGWAVIPMMYPASFLFDVPSTAYVALSCANLFIGINSSAITFILELFENNRTLLRFNAVLRKLLIVFPHFCLGRGLIDLALSQAVTDVYARFGEEHSANPFHWDLIGKNLFAMVVEGVVYFLLTLLVQRHFFLSQWIAEPTKEPIVDEDDDVAEERQRIITGGNKTDILRLHELTKIYPGTSSPAVDRLCVGVRPGECFGLLGVNGAGKTTTFKMLTGDTTVTSGDATVAGKSILTNISEVHQNMGYCPQFDAIDELLTGREHLYLYARLRGVPAEEIEKVANWSIKSLGLTVYADCLAGTYSGGNKRKLSTAIALIGCPPLVLLDEPTTGMDPQARRMLWNVIVSIIREGRAVVLTSHSMEECEALCTRLAIMVKGAFRCMGTIQHLKSKFGDGYIVTMKIKSPKDDLLPDLNPVEQFFQGNFPGSVQRERHYNMLQFQVSSSSLARIFQLLLSHKDSLLIEEYSVTQTTLDQVFVNFAKQQTESHDLPLHPRAAGASRQAQD

SEQ ID NO: 19493 - protein, 140 aa, Homo sapiens
MERVGCTLTTTYAHPRPTPTNFLPAISTMASSYRDRFPHSNLTHSLSLPWRPSTYYKVASNSPSVAPYCTRSQRVSENTMLPFVSNRTTFFTRYTPDDWYRSNLTNYQESNTSRHNSEKLRVDTSRLIQDKYQQTRKTQA

SEQ ID NO: 19494 - protein, 222 aa, Homo sapiens
MDMRQHEEYIADMALDPAKKLLLTASGDGCLGIFNIKRRRFELLSEPQSGDLTSVTLMKWGKKVACGSSEGTIYLFNWNGFGATSDRFALRAESIDCMVPVTESLLCTGSTDGVIRAVNILPNRVVGSVGQHTGEPVEELALSHCGRFLASSGHDQRLKFWDMAQLRAVVVDDYRRRKKKGGPLRALSSKTWSTDDFFAGLREEGEDSMAQEEKEETGDDSD

SEQ ID NO: 19495 - protein, 452 aa, Homo sapiens
MVSKLSQLQTELLAALLESGLSKEALIQALGEPGPYLLAGEGPLDKGESCGGGRGELAELPNGLGETRGSEDETDDDGEDFTPPILKELENLSPEEAAHQKAVVETLLQEDPWRVAKMVKSYLQQHNIPQREVVDTTGLNQSHLSQHLNKGTPMKTQKRAALYTWYVRKQREVAQQFTHAGQGGLIEEPTGDELPTKKGRRNRFKWGPASQQTSPGLNQQPQNLIMASLPGVMTIGPGEPASLGPTFTNTGASTLVIGLASTQAQSVPVINSMGSSLTTLQPVQFSQPLHPSYQQPLMPPVQSHVTQSPFMATMAQLQSPHALYSHKPEVAQYTHTGLLPQTMLITDTTNLSALASLTPTKQVFTSDTEASSESGLHTPASQATTLHVPSQDPASIQHLQPAHRLSASPTVSSSSLVLYQSSDSSNGQSHLLPSNHSVIETFISTQMASSSQ

SEQ ID NO: 19496 - protein, 1260 aa, Homo sapiens
MGSVTGAVLKTLLLLSTQNWNRVEAGNSYDCDDPLVSALPQASFSSSSELSSSHGPGFARLNRRDGAGGWSPLVSNKYQWLQIDLGERMEVTAVATQGGYGSSNWVTSYLLMFSDSGWNWKQYRQEDSIWGFSGNANADSVVYYRLQPSIKARFLRFIPLEWNPKGRIGMRIEVFGCAYRSEVVDLDGKSSLLYRFDQKSLSPIKDIISLKFKTMQSDGILLHREGPNGDHITLQLRRARLFLLINSGEAKLPSTSTLVNLTLGSLLDDQHWHSVLIQRLGKQVNFTVDEHRHHFHARGEFNLMNLDYEGNVSFSCSQPQSMPVTFLSSRSYLALPDFSGEEEVSATFQFRTWNKAGLLLFSELQLISGGILLFLSDGKLKSNLYQPGKLPSDITAGVELNDGQWHSVSLSAKKNHLSVAVDGQMASAAPLLGPEQIYSGGTYYFGGCPDKSFGSKCKSPLGGFQGCMRLISISGKVVDLISVQQGSLGNFSDLQIDSCGISDRCLPNYCEHGGECSQSWSTFHCNCTNTGYRGATCHNSIYEQSCEAYKHRGNTSGFYYIDSDGSGPLEPFLLYCNMTETAWTIIQHNGSDLTRVRNTNPENPYAGFFEYVASMEQLQATINRAEHCEQEFTYYCKKSRLVNKQDGTPLSWWVGRTNETQTYWGGSSPDLQKCTCGLEGNCIDSQYYCNCDADRNEWTNDTGLLAYKEHLPVTKIVITDTGRLHSEAAYKLGPLLCQGDRSFWNSASFDTEASYLHFPTFHGELSADVSFFFKTTASSGVFLENLGIADFIRIELRSPTVVTFSFDVGNGPFEISVQSPTHFNDNQWHHVRVERNMKEASLQVDQLTPKTQPAPADGHVLLQLNSQLFVGGTATRQRGFLGCIRSLQLNGMTLDLEERAQVTPEVQPGCRGHCSSYGKLCRNGGKCRERPIGFFCDCTFSAYTGPFCSNEISAYFGSGSSVIYNFQENYLLSKNSSSHAASFHGDMKLSREMIKFSFRTTRTPSLLLFVSSFYKEYLSVIIAKNGDLQIRYKLNKYQEPDVVNFDFKNMADGQLHHIMINREEGVVFIEIDDNRRRQVHLSSGTEFSAVKSLVLGRILEHSDVDQDTALAGAQGFTGCLSAVQLSHVAPLKAALHPSHPDPVTVTGHVTESSCMAQPGTDATSRERTHSFADHSGTIDDREPLANAIKSDSAVIGGLIAVVIFILLCITAIAVRIYQQKRLYKRSEAKRSENVDSAEAVLKSELNIQNAVNENQKEYFF

SEQ ID NO: 19497 - protein, 659 aa, Homo sapiens
MKKDVRILLVGEPRVGKTSLIMSLVSEEFPEEVPPRAEEITIPADVTPERVPTHIVDYSEAEQSDEQLHQEISQANVICIVYAVNNKHSIDKVTSRWIPLINERTDKDSRLPLILVGNKSDLVEYSSMETILPIMNQYTEIETCVECSAKNLKNISELFYYAQKAVLHPTGPLYCPEEKEMKPACIKALTRIFKISDQDNDGTLNDAELNFFQRICFNTPLAPQALEDVKNVVRKHISDGVADSGLTLKGFLFLHTLFIQRGRHETTWTVLRRFGYDDDLDLTPEYLFPLLKIPPDCTTELNHHAYLFLQSTFDKHDLDRDCALSPDELKDLFKVFPYIPWGPDVNNTVCTNERGWITYQGFLSQWTLTTYLDVQRCLEYLGYLGYSILTEQESQASAVTVTRDKKIDLQKKQTQRNVFRCNVIGVKNCGKSGVLQALLGRNLMRQKKIREDHKSYYAINTVYVYGQEKYLLLHDISESEFLTEAEIICDVVCLVYDVSNPKSFEYCARIFKQHFMDSRIPCLIVAAKSDLHEVKQEYSISPTDFCRKHKMPPPQAFTCNTADAPSKDIFVKLTTMAMYPHARLRCMCTCNRCTFCICQNFLNSDLLQSVKNKIFTAVLNRHVTQADLKSSTFWLRASFGATVFAVLGFAMYKALLKQR

SEQ ID NO: 19498 - protein, 692 aa, Homo sapiens
MLGSLVLRRKALAPRLLLRLLRSPTLRGHGGASGRNVTTGSLGEPQWLRVATGGRPGTSPALFSGRGAATGGRQGGRFDTKCLAAATWGRLPGPEETLPGQDSWNGVPSRAGLGMCALAAALVVHCYSKSPSNKDAALLEAARANNMQEVSRLLSEGADVNAKHRLGWTALMVAAINRNNSVVQVLLAAGADPNLGDDFSSVYKTAKEQGIHSLEDGGQDGASRHITNQWTSALEFRRWLGLPAGVLITREDDFNNRLNNRASFKGCTALHYAVLADDYRTVKELLDGGANPLQRNEMGHTPLDYAREGEVMKLLRTSEAKYQEKQRKREAEERRRFPLEQRLKEHIIGQESAIATVGAAIRRKENGWYDEEHPLVFLFLGSSGIGKTELAKQTAKYMHKDAKKVAKFIGSPPGYVGHEEGGQLTKKLKQCPNAVVLFDEVDKAHPDVLTIMLQLFDEGRLTDGKGKTIDCKDAIFIMTSNVASDEIAQHALQLRQEALEMSRNRIAENLGDVQISDKITISKNFKENVIRPILKAHFRRDEFLGRINEIVYFLPFCHSELIQLVNKELNFWAKRAKQRHNITLLWDREVADVLVDGYNVHYGARSIKHEVERRVVNQLAAAYEQDLLPGGCTLRITVEDSDKQLLKSPELPSPQAEKRLPKLRLEIIDKDSKTRRLDIRAPLHPEKVCNTI

SEQ ID NO: 19499 - protein, 1085 aa, Homo sapiens
MKVNRETKRLYVGGLSQDISEADLQNQFSRFGEVSDVEIITRKDDQGNPQKVFAYINISVAEADLKKCMSVLNKTKWKGGTLQIQLAKESFLHRLAQEREAAKAKKEESTTGNANLLEKTGGVDFHMKAVPGTEVPGHKNWVVSKFGRVLPVLHLKNQHKRKIIKYDPSKYCHNLKKIGEDFSNTIPISSLTWELEGGNDPMSKKRRGEFSDFHGPPKKIIKVQKDESSTGSLAMSTRPRRVIERPPLTQQQAAQKRTCDSITPSKSSPVPVSDTQKLKNLPFKTSGLETAKKRNSISDDDTDSEDELRMMIAKEENLQRTTQPSINESESDPFEVVRDDFKSGVHKLHSLIGLGIKNRVSCHDSDDDIMRNDREYDSGDTDEIIAMKKNVAKVKNSTEFSQMEKSTKKTSFKNRENCELSDHCIKLQKRKSNVESALSHGLKSLNRKSPSHSSSSEDADSASELADSEGGEEYNAMMKNCLRVNLTLADLEQLAGSDLKVPNEDTKSDGPETTTQCKFDRGSKSPKTPTGLRRGRQCIRPAEIVASLLEGEENTCGKQKPKENNLKPKFQAFKGVGCLYEKESMKKSLKDSVASNNKDQNSMKHEDPSIISMEDGSPYVNGSLGEVTPCQHAKKANGPNYIQPQKRQTTFESQDRKAVSPSSSEKRSKNPISRPLEGKKSLSLSAKTHNIGFDKDSCHSTTKTEASQEERSDSSGLTSLKKSPKVSSKDTREIKTDFSLSISNSSDVSAKDKHAEDNEKRLAALEARQKAKEVQKKLVHNALANLDGHPEDKPTHIIFGSDSECETEETSTQEQSHPGEEWVKESMGKTSGKLFDSSDDDESDSEDDSNRFKIKPQFEGRAGQKLMDLQSHFGTDDRFRMDSRFLETDSEEEQEEVNEKKTAEEEELAEEKKKALNVVQSVLQINLSNSTNRGSVAAKKFKDIIHYDPTKQDHATYERKRDDKPKESKAKRKKKREEAEKLPEVSKEMYYNIAMDLKEIFQTTKYTSEKEEGTPWNEDCGKEKPEEIQDPAALTSDAEQPSGFTFSFFDSDTKDIKEDRVSVTQAGVQWCNLGSLADNTNSVVL

SEQ ID NO: 19500 - protein, 619 aa, Homo sapiens
MANDIDELIGIPFPNHSSEVLCSLNEQRHDGLLCDVLLVVQEQEYRTHRSVLAACSKYFKKLFTAGTLASQPYVYEIDFVQPEALAAILEFAYTSTLTITAGNVKHILNAARMLEIQCIVNVCLEIMEPGGDGGEEDDKEDDDDDEDDDDEEDEEEEEEEEEDDDDDTEDFADQENLPDPQDISCHQSPSKTDHLTEKAYSDTPRDFPDSFQAGSPGHLGVIRDFSIESLLRENLYPKANIPDRRPSLSPFAPDFFPHLWPGDFGAFAQLPEQPMDSGPLDLVIKNRKIKEEEKEELPPPPPPPFPNDFFKDMFPDLPGGPLGPIKAENDYGAYLNFLSATHLGGLFPPWPLVEERKLKPKASQQCPICHKVIMGAGKLPRHMRTHTGEKPYMCTICEVRFTRQDKLKIHMRKHTGERPYLCIHCNAKFVHNYDLKNHMRIHTGVRPYQCEFCYKSFTRSDHLHRHIKRQSCRMARPRRGRKPAAWRAASLLFGPGGPAPDKAAFVMPPALGEVGGHLGGAAVCLPGPSPAKHFLAAPKGALSLQELERQFEETQMKLFGRAQLEAERNAGGLLAFALAENVAAARPYFPLPDPWAAGLAGLPGLAGLNHVASMSEANN

SEQ ID NO: 19501 - protein, 603 aa, Homo sapiens
MKDYDELLKYYELHETIGTGGFAKVKLACHILTGEMVAIKIMDKNTLGSDLPRIKTEIEALKNLRHQHICQLYHVLETANKIFMVLEENLLFDEYHKLKLIDFGLCAKPKGNKDYHLQTCCGSLAYAAPELIQGKSYLGSEADVWSMGILLYVLMCGFLPFDDDNVMALYKKIMRGKYDVPKWLSPSSILLLQQMLQVDPKKRISMKNLLNHPWIMQDYNYPVEWQSKNPFIHLDDDCVTELSVHHRNNRQTMEDLISLWQYDHLTATYLLLLAKKARGKPVRLRLSSFSCGQASATPFTDIKSNNWSLEDVTASDKNYVAGLIDYDWCEDDLSTGAATPRTSQFTKYWTESNGVESKSLTPALCRTPANKLKNKENVYTPKSAVKNEEYFMFPEPKTPVNKNQHKREILTTPNRYTTPSKARNQCLKETPIKIPVNSTGTDKLMTGVISPERRCRSVELDLNQAHMEETPKRKGAKVFGSLERGLDKVITVLTRSKRKGSARDGPRRLKLHYNVTTTRLVNPDQLLNEIMSILPKKHVDFVQKGYTLKCQTQSDFGKVTMQFELEVCQLQKPDVVGIRRQRLKGDAWVYKRLVEDILSSCKV

SEQ ID NO: 19502 - protein, 1241 aa, Homo sapiens
MVFLEEFEARSCLAEEEIKTEQEVVEGMDISTRSKDPGSAERTAQKRKFPSPPHSSNGHSPQDTSTSPIKKKKKPGLLNSNNKEQSELRHGPFYYMKQPLTTDPVDVVPQDGRNDFYCWVCHREGQVLCCELCPRVYHAKCLRLTSEPEGDWFCPECEKITVAECIETQSKAMTMLTIEQLSYLLKFAIQKMKQPGTDAFQKPVPLEQHPDYAEYIFHPMDLCTLEKNAKKKMYGCTEAFLADAKWILHNCIIYNGGNHKLTQIAKVVIKICEHEMNEIEVCPECYLAACQKRDNWFCEPCSNPHPLVWAKLKGFPFWPAKALRDKDGQVDARFFGQHDRAWVPINNCYLMSKEIPFSVKKTKSIFNSAMQEMEVYVENIRRKFGVFNYSPFRTPYTPNSQYQMLLDPTNPSAGTAKIDKQEKVKLNFDMTASPKILMSKPVLSGGTGRRISLSDMPRSPMSTNSSVHTGSDVEQDAEKKATSSHFSASEESMDFLDKSTASPASTKTGQAGSLSGSPKPFSPQLSAPITTKTDKTSTTGSILNLNLDRSKAEMDLKELSESVQQQSTPVPLISPKRQIRSRFQLNLDKTIESCKAQLGINEISEDVYTAVEHSDSEDSEKSDSSDSEYISDDEQKSKNEPEDTEDKEGCQMDKEPSAVKKKPKPTNPVEIKEELKSTSPASEKADPGAVKDKASPEPEKDFSEKAKPSPHPIKDKLKGKDETDSPTVHLGLDSDSESELVIDLGEDHSGREGRKNKKEPKEPSPKQDVVGKTPPSTTVGSHSPPETPVLTRSSAQTSAAGATATTSTSSTVTVTAPAPAATGSPVKKQRPLLPKETAPAVQRVVWNSSSKFQTSSQKWHMQKMQRQQQQQQQQNQQQQPQSSQGTRYQTRQAVKAVQQKEITQSPSTSTITLVTSTQSSPLVTSSGSMSTLVSSVNADLPIATASADVAADIAKYTSKMMDAIKGTMTEIYNDLSKNTTGSTIAEIRRLRIEIEKLQWLHQQELSEMKHNLELTMAEMRQSLEQERDRLIAEVKKQLELEKQQAVDETKKKQWCANCKKEAIFYCCWNTSYCDYPCQQAHWPEHMKSCTQSATAPQQEADAEVNTETLNKSSQGSSSSTQSAPSETASASKEKETSAEKSKESGSTLDLSGSRETPSSILLGSNQGSVSKRCDKQPAYAPTTTDHQPHPNYPAQKYHSRSNKSSWSSSDEKRGSTRSDHNTSTSTKSLLPKESRLDTFWD

SEQ ID NO: 19503 - protein, 2041 aa, Homo sapiens
MLEAIDKNRALHAAERLQTKLRERGDVANEDKLSLLKSVLQSPLFSQILSLQTSVQQLKDQVNIATSATSNIEYAHVPHLSPAVIPTLQNESFLLSPNNGNLEALTGPGIPHINGKPACDEFDQLIKNMAQGRHVEVFELLKPPSGGLGFSVVGLRSENRGELGIFVQEIQEGSVAHRDGRLKETDQILAINGQALDQTITHQQAISILQKAKDTVQLVIARGSLPQLVSPIVSRSPSAASTISAHSNPVHWQHMETIELVNDGSGLGFGIIGGKATGVIVKTILPGGVADQHGRLCSGDHILKIGDTDLAGMSSEQVAQVLRQCGNRVKLMIARGAIEERTAPTALGITLSSSPTSTPELRVDASTQKGEESETFDVELTKNVQGLGITIAGYIGDKKLEPSGIFVKSITKSSAVEHDGRIQIGDQIIAVDGTNLQGFTNQQAVEVLRHTGQTVLLTLMRRGMKQEAELMSREDVTKDADLSPVNASIIKENYEKDEDFLSSTRNTNILPTEEEGYPLLSAEIEEIEDAQKQEAALLTKWQRIMGINYEIVVAHVSKFSENSGLGISLEATVGHHFIRSVLPEGPVGHSGKLFSGDELLEVNGITLLGENHQDVVNILKELPIEVTMVCCRRTVPPTTQSELDSLDLCDIELTEKPHVDLGEFIGSSETEDPVLAMTDAGQSTEEVQAPLAMWEAGIQHIELEKGSKGLGFSILDYQDPIDPASTVIIIRSLVPGGIAEKDGRLLPGDRLMFVNDVNLENSSLEEAVEALKGAPSGTVRIGVAKPLPLSPEEGYVSAKEDSFLYPPHSCEEAGLADKPLFRADLALVGTNDADLVDESTFESPYSPENDSIYSTQASILSLHGSSCGDGLNYGSSLPSSPPKDVIENSCDPVLDLHMSLEELYTQNLLQRQDENTPSVDISMGPASGFTINDYTPANAIEQQYECENTIVWTESHLPSEVISSAELPSVLPDSAGKGSEYLLEQSSLACNAECVMLQNVSKESFERTINIAKGNSSLGMTVSANKDGLGMIVRSIIHGGAISRDGRIAIGDCILSINEESTISVTNAQARAMLRRHSLIGPDIKITYVPAEHLEEFKISLGQQSGRVMALDIFSSYTGRDIPELPEREEGEGEESELQNTAYSNWNQPRRVELWREPSKSLGISIVGGRGMGSRLSNGEVMRGIFIKHVLEDSPAGKNGTLKPGDRIVEVDGMDLRDASHEQAVEAIRKAGNPVVFMVQSIINRPRKSPLPSLLHNLYPKYNFSSTNPFADSLQINADKAPSQSESEPEKAPLCSVPPPPPSAFAEMGSDHTQSSASKISQDVDKEDEFGYSWKNIRERYGTLTGELHMIELEKGHSGLGLSLAGNKDRSRMSVFIVGIDPNGAAGKDGRLQIADELLEINGQILYGRSHQNASSIIKCAPSKVKIIFIRNKDAVNQMAVCPGNAVEPLPSNSENLQNKETEPTVTTSDAAVDLSSFKNVQHLELPKDQGGLGIAISEEDTLSGVIIKSLTEHGVAATDGRLKVGDQILAVDDEIVVGYPIEKFISLLKTAKMTVKLTIHAENPDSQAVPSAAGAASGEKKNSSQSLMVPQSGSPEPESIRNTSRSSTPAIFASDPATCPIIPGCETTIEISKGRTGLGLSIVGGSDTLLGAIIIHEVYEEGAACKDGRLWAGDQILEVNGIDLRKATHDEAINVLRQTPQRVRLTLYRDEAPYKEEEVCDTLTIELQKKPGKGLGLSIVGKRNDTGVFVSDIVKGGIADADGRLMQGDQILMVNGEDVRNATQEAVAALLKVSEGSLSSFTFPLSGSSTSESLESSSKKNALASEIQGLRTVEMKKGPTDSLGISIAGGVGSPLGDVPIFIAMMHPTGVAAQTQKLRVGDRIVTICGTSTEGMTHTQAVNLLKNASGSIEMQVVAGGDVSVVTGHQQEPASSSLSFTGLTSSSIFQDDLGPPQCKSITLERGPDGLGFSIVGGYGSPHGDLPIYVKTVFAKGAASEDGRLKRGDQIIAVNGQSLEGVTHEEAVAILKRTKGTVTLMVLS

SEQ ID NO: 19504 - protein, 1577 aa, Homo sapiens
MMEGNGTENSCSRTRGWLQQDNDAKPWLWKFSNCFSRPEQTLPHSPQTKEYMENKKVAVELKDVPSPLHAGSKLFPAVPLPDIRSLQQPKIQLSSVPKVSCCAHCPNEPSTSPMRFGGGGGGSGGTSSLIHPGALLDSQSTRTITCQVGSGFAFQSASSLQNASARNNLAGIASDFPSMCLESNLSSCKHLPCCGKLHFQSCHGNVHKLHQFPSLQGCTSAGYFPCSDFTSGAPGHLEEHISQSELTPHLCTNSLHLNVVPPVCLKGSLYCEDCLNKPARNSIIDAAKVWPNIPPPNTQPAPLAVPLCNGCGTKGTGKETTLLLATSLGKAASKFGSPEVAVAGQVLENLPPIGVFWDIENCSVPSGRSATAVVQRIREKFFKGHREAEFICVCDISKENKEVIQELNNCQVTVAHINATAKNAADDKLRQSLRRFANTHTAPATVVLVSTDVNFALELSDLRHRHGFHIILVHKNQASEALLHHANELIRFEEFISDLPPRLPLKMPELCRMESKTGHRNSEHQQGHLRLVVPTHGNSSAAVSTPKNSGVAEPVYKTSQKKENLSARSVTSSPVEKKDKEETVFQVSYPSAFSKLVASRQVSPLLASQSWSSSEADCPDPFANGADVQVSNIDYRLSRKELQQLLQEAFARHGKVKSVELSPHTDYQLKAVVQMENLQDAIGAVNSLHRYKIGSKKILVSLATGAASKSLSLLSAETMSVLQDAPACCLPLFKFTDIYEKKFGHKLNVSDLYKLTDTVAIREQGNGRLVCLLPSSQARQSPLGSSQSHDGSSTNCSPIIFEELEYHEPVCRQHCSNKDFSEHEFDPDSYKIPFVILSLKTFAPQVHSLLQTHEGTVPLLSFPDCYIAEFGDLEVVQENQGGVPLEHFITCVPGVNIATAQNGIKVVKWIHNKPPPPNTDPWLLRSKSPVGNPQLIQFSREVIDLLKSQPSCVIPISHFIPSYHHHFAKQCRVSDYGYSKLIELLEAVPHVLQILGMGSKRLLTLTHRAQVKRFTQDLLKLLKSQASKQVIVREFSQAYHWCFSKDWDVTEYGVCELIDIVSEIPDTTICLSQQDNEMVICIPKRERTQDEIERTKQFSKDVVDLLRHQPHFRMPFNKFIPSYHHHFGRQCKLAYYGFTKLLELFEAIPDTLQVLECGEEKILTLTEVERFKALAAQFVKLLRSQKDNCLMMTDLLTEYAKTFGYTFRLQDYDVSSISALTQKLCHVVKVADIESGRQIQLINRKSLRSLTAQLLVLLMSWEGTTHLSVEELKRHYESTHNTPLNPCEYGFMTLTELLKSLPYLVEVFTNDKMEECVKLTSLYLFAKNVRSLLHTYHYQQIFLHEFSMAYTKYVGETLQPKTYGHSSVEELLGAIPQVVWIKGHGHKRIVVLKNDMKSRLSSLSLSPANHENQPSEGERILEVPESHTASELKLGADGSGPSHTEQELLRLTDDSPVDLLCAPVPSCLPSPQLRPDPVILQSADLIQFEERPQEPSEIMILNQEEKMEIPIPGKSKTLTSDSSSSCISAAVPVPPCPSSETSESLLSKDPVESPAKKQPKNRVKLAANFSLAPITKL

SEQ ID NO: 19505 - protein, 537 aa, Homo sapiens
MDMGNPGTLSPTKPGSQYYQYSSNNPRRRPLHSSAMEVQTKKVRKVPPGLPSSVYAPSASTADYNRDSPGYPSSKPATSTFPSSFFMQDGHHSSDPWSSSSGMNQPGYAGMLGNSSHIPQSSSYCSLHPHERLSYPSHSSADINSSLPPMSTFHRSGTNHYSTSSCTPPANGTDSIMANRGSGAAGSSQTGDALGKALASIYSPDHTNNSFSSNPSTPVGSPPSLSAGTAVWSRNGGQASSSPNYEGPLHSLQSRIEDRLERLDDAIHVLRNHAVGPSTAMPGGHGDMHGIIGPSHNGAMGGLGSGYGTGLLSANRHSLMVGTHREDGVALRGSHSLLPNQVPVPQLPVQSATSPDLNPPQDPYRGMPPGLQGQSVSSGSSEIKSDDEGDENLQDTKSSEDKKLDDDKKDIKSITSNNDDEDLTPEQKAEREKERRMANNARERLRVRDINEAFKELGRMVQLHLKSDKPQTKLLILHQAVAVILSLEQQVRERNLNPKAACLKRREEEKVSSEPPPLSLAGPHPGMGDASNHMGQM

SEQ ID NO: 19506 - protein, 930 aa, Homo sapiens
MDHYDSQQTNDYMQPEEDWDRDLLLDPAWEKQQRKTFTAWCNSHLRKAGTQIENIEEDFRDGLKLMLLLEVISGERLAKPERGKMRVHKISNVNKALDFIASKGVKLVSIGAEEIVDGNVKMTLGMIWTIILRFAIQDISVEETSAKEGLLLWCQRKTAPYKNVNIQNFHISWKDGLGFCALIHRHRPELIDYGKLRKDDPLTNLNTAFDVAEKYLDIPKMLDAEDIVGTARPDEKAIMTYVSSFYHAFSGAQKAETAANRICKVLAVNQENEQLMEDYEKLASDLLEWIRRTIPWLENRVPENTMHAMQQKLEDFRDYRRLHKPPKVQEKCQLEINFNTLQTKLRLSNRPAFMPSEGRMVSDINNAWGCLEQVEKGYEEWLLNEIRRLERLDHLAEKFRQKASIHEAWTDGKEAMLRQKDYETATLSEIKALLKKHEAFESDLAAHQDRVEQIAAIAQELNELDYYDSPSVNARCQKICDQWDNLGALTQKRREALERTEKLLETIDQLYLEYAKRAAPFNNWMEGAMEDLQDTFIVHTIEEIQGLTTAHEQFKATLPDADKERLAILGIHNEVSKIVQTYHVNMAGTNPYTTITPQEINGKWDHVRQLVPRRDQALTEEHARQQHNERLRKQFGAQANVIGPWIQTKMEEIGRISIEMHGTLEDQLSHLRQYEKSIVNYKPKIDQLEGDHQLIQEALIFDNKHTNYTMEHIRVGWEQLLTTIARTINEVENQILTRDAKGISQEQMNEFRASFNHFDRKKTGMMDTDDFRACLISMGYNMGEAEFARIMSIVDPNRLGVVTFQAFIDFMSRETADTDTADQVMASFKILAGDKLQEGGKMQTAHAAFTPPGFAAVSGRAALRLLDFAAFLTTLSSQNYITMDELRRELPPDQAEYCIARMAPYTGPDSVPGALDYMSFSTALYGESDL

SEQ ID NO: 19507 - protein, 728 aa, Homo sapiens
MLTDPDLPQEFERMSSKRPASPYGEADGEVAMVTSRQKVEEEESDGLPAFHLPLHEVDGNKVMSSFAPHNSSTSPQKAEEGGRQSGESLSSTALGTPERRKGSLADVVDTLKQRKMEELIKNEPEETPSIEKLLSKDWKDKLLAMGSGNFGEIKGTPESLAEKERQLMGMINQLTSLREQLLAAHDEQKKLAASQIEKQRQQMELAKQQQEQIARQQQQLLQQQHKINLLQQQIQVQGQLPPLMIPVFPPDQRTLAAAAQQGFLLPPGFSYKAGCSDPYPVQLIPTTMAAAAAATPGLGPLQLQQLYAAQLAAMQVSPGGKLPGIPQGNLGAAVSPTSIHTDKSTNSPPPKSKDEVAQPLNLSAKPKTSDGKSPTSPTSPHMPALRINSGAGPLKASVPAALASPSARVSTIGYLNDHDAVTKAIQEARQMKEQLRREQQVLDGKVAVVNSLGLNNCRTEKEKTTLESLTQQLAVKQNEEGKFSHAMMDFNLSGDSDGSAGVSESRIYRESRGRGSNEPHIKRPMNAFMVWAKDERRKILQAFPDMHNSNISKILGSRWKAMTNLEKQPYYEEQARLSKQHLEKYPDYKYKPRPKRTCLVDGKKLRIGEYKAIMRNRRQEMRQYFNVGQQAQIPIATAGVVYPGAIAMAGMPSPHLPSEHSSVSSSPEPGMPVIQSTYGVKGEEPHIKEEIQAEDINGEIYDEYDEEEDDPDVDYGSDSENHIAGQAN

SEQ ID NO: 19508 - protein, 287 aa, Homo sapiens
MLKKISVGVAGDLNTVTMKLGCVLMAWALYLSLGVLWVAQMLLAASFETLQCEGPVCTEESSCHTEDDLTDAREAGFQVKAYTFSEPFHLIVSYELFPAPILRAVPSAEPQAGSPMTLSCQTKLPLQRSAARLLFSFYKDGRIVQSRGLSSEFQIPTASEDHSGSYWCEAATEDNQVWKQSPQLEIRVQGASSSAAPPTLNPAPQKSAAPGTAPEEAPGPLPPPPTPSSEDPGFSSPLGMPDPHLYHQMGLLLKHMQDVRVLLGHLLMELRELSGHRKPGTTKATAE

SEQ ID NO: 19509 - protein, 916 aa, Homo sapiens
MEMPLPPDDQELRNVIDKLAQFVARNGPEFEKMTMEKQKDNPKFSFLFGGEFYSYYKCKLALEQQQLICKQQTPELEPAATMPPLPQPPLAPAAPIPPAQGAPSMDELIQQSQWNLQQQEQHLLALRQEQVTAAVAHAVEQQMQKLLEETQLDMNEFDNLLQPIIDTCTKDAISAGKNWMFSNAKSPPHCELMAGHLRNRITADGAHFELRLHLIYLINDVLHHCQRKQARELLAALQKVVVPIYCTSFLAVEEDKQQKIARLLQLWEKNGYFDDSIIQQLQSPALGLGQYQATLINEYSSVVQPVQLAFQQQIQTLKTQHEEFVTSLAQQQQQQQQQQQQLQMPQMEAEVKATPPPPAPPPAPAPAPAIPPTTQPDDSKPPIQMPGSSEYEAPGGVQDPAAAGPRGPGPHDQIPPNKPPWFDQPHPVAPWGQQQPPEQPPYPHHQGGPPHCPPWNNSHEGMWGEQRGDPGWNGQRDAPWNNQPDAAWNSQFEGPWNSQHEQPPWGGGQREPPFRMQRPPHFRGPFPPHQQHPQFNQPPHPHNFNRFPPRFMQDDFPPRHPFERPPYPHRFDYPQGDFPAEMGPPHHHPGHRMPHPGINEHPPWAGPQHPDFGPPPHGFNGQPPHMRRQGPPHINHDDPSLVPNVPYFDLPAGLMAPLVKLEDHEYKPLDPKDIRLPPPMPPSERLLAAVEAFYSPPSHDRPRNSEGWEQNGLYEFFRAKMRARRRKGQEKRNSGPSRSRSRSKSRGRSSSRSNSRSSKSSGSYSRSRSRSCSRSYSRSRSRSRSRSRSSRSRSRSQSRSRSKSYSPGRRRRSRSRSPTPPSSAGLGSNSAPPIPDSRLGEENKGHQMLVKMGWSGSGGLGAKEQGIQDPIKGGDVRDKWDQYKGVGVALDDPYENYRRNKSYSFIARMKARDECK

SEQ ID NO: 19510 - protein, 606 aa, Homo sapiens
MFGNECCFSTGEVIKITGLKVKKIIAEICEQIEGCESLQPFELPMNFPGLFKIVADKTPYLTMEEITRTIHIGPSRLGHPCFYHQKDIKLENLIIKQGEQIMLNSVEEIDGEIMVSCAVARNHQTHSFNLPLSQEGEFYECEDERIYTLKEIVEWKIPKNRTRTVNLTDFSNKWDSTNPFPKDFYGTLILKPVYEIQGVMKFRKDIIRILPSLDVEVKDITDSYDANWFLQLLSTEDLFEMTSKEFPIVTEVIEAPEGNHLPQSILQPGKTIVIHKKYQASRILASEIRSNFPKRHFLIPTSYKGKFKRRPREFPTAYDLEIAKSEKEPLHVVATKAFHSPHDKLSSVSVGDQFLVHQSETTEVLCEGIKKVVNVLACEKILKKSYEAALLPLYMEGGFVEVIHDKKQYPISELCKQFRLPFNVKVSVRDLSIEEDVLAATPGLQLEEDITDSYLLISDFANPTECWEIPVGRLNMTVQLVSNFSRDAEPFLVRTLVEEITEEQYYMMRRYESSASHPPPRPPKHPSVEETKLTLLTLAEERTVDLPKSPKRHHVDITKKLHPNQAGLDSKVLIGSQNDLVDEEKERSNRGATAIAETFKNEKHQK

SEQ ID NO: 19511 - protein, 445 aa, Homo sapiens
MSKLPRELTRDLERSLPAVASLGSSLSHSQSLSSHLLPPPEKRRAISDVRRTFCLFVTFDLLFISLLWIIELNTNTGIRKNLEQEIIQYNFKTSFFDIFVLAFFRFSGLLLGYAVLRLRHWSRRWCPVHSSLSRSSSLSCSAKGHLATCSPSSLLSSPGWRPGSLTSKSYPRKLKRSDSAPPGYLAAQVAVARGPLLFSGALSEGQFYSPPESFAGSDNESDEEVAGKKSFSAQEREYIRQGKEATAVVDQILAQEENWKFEKNNEYGDTVYTIEVPFHGKTFILKTFLPCPAELVYQEVILQPERMVLWNKTVTACQILQRVEDNTLISYDVSAGAAGGVVSPRDFVNVRRIERRRDRYLSSGIATSHSAKPPTHKYVRGENGPGGFIVLKSASNPRVCTFVWILNTDLKGRLPRYLIHQSLAATMFEFAFHLRQRISELGARA

SEQ ID NO: 19512 - protein, 742 aa, Homo sapiens
MASVHESLYFNPMMTNGVVHANVFGIKDWVTPYKIAVLVLLNEMSRTGEGAVSLMERRRLNQLLLPLLQGPDITLSKLYKLIEESCPQLANSVQIRIKLMAEGELKDMEQFFDDLSDSFSGTEPEVHKTSVVGLFLRHMILAYSKLSFSQVFKLYTALQQYFQNGEKKTVEDADMELTSRDEGERKMEKEELDVSVREEEVSCSGPLSQKQAEFFLSQQASLLKNDETKALTPASLQKELNNLLKFNPDFAEAHYLSYLNNLRVQDVFSSTHSLLHYFDRLILTGAESKSNGEEGYGRSLRYAALNLAALHCRFGHYQQAELALQEAIRIAQESNDHVCLQHCLSWLYVLGQKRSDSYVLLEHSVKKAVHFGLPRAFAGKTANKLMDALKDSDLLHWKHSLSELIDISIAQKTAIWRLYGRSTMALQQAQMLLSMNSLEAVNAGVQQNNTESFAVALCHLAELHAEQGCFAAASEVLKHLKERFPPNSQHAQLWMLCDQKIQFDRAMNDGKYHLADSLVTGITALNSIEGVYRKAVVLQAQNQMSEAHKLLQKLLVHCQKLKNTEMVISVLLSVAELYWRSSSPTIALPMLLQALALSKEYRLQYLASETVLNLAFAQLILGIPEQALSLLHMAIEPILADGAILDKGRAMFLVAKCQVASAASYDQPKKAEALEAAIENLNEAKNYFAKVDCKERIRDVVYFQARLYHTLGKTQERNRCAMLFRQLHQELPSHGVPLINHL

SEQ ID NO: 19513 - protein, 1024 aa, Homo sapiens
MELPFVTHLFLPLVFLTGCPTYMDVVIVLDGSNSIYPWSEVQTFLRRLVGKLFIDPEQIQVGLVQYGESPVHEWSLGDFRTKEEVVRAAKNLSRREGRETKTAQAIMVACTEGFSQSHGGRPEAARLLVVVTDGESHDGEELPAALKACEAGRVTRYGIAVLGHYLRRQRDPSSFLREIRTIASDPDERFFFNVTDEAALTDIVDALGDRIFGLEGSHAENESSFGLEMSQIGFSTHRLKDGILFGMVGAYDWGGSVLWLEGGHRLFPPRMALEDEFPPALQNHAAYLGYSVSSMLLRGGRRLFLSGAPRFRHRGKVIAFQLKKDGAVRVAQSLQGEQIGSYFGSELCPLDTDRDGTTDVLLVAAPMFLGPQNKETGRVYVYLVGQQSLLTLQGTLQPEPPQDARFGFAMGALPDLNQDGFADVAVGAPLEDGHQGALYLYHGTQSGVRPHPAQRIAAASMPHALSYFGRSVDGRLDLDGDDLVDVAVGAQGAAILLSSRPIVHLTPSLEVTPQAISVVQRDCRRRGQEAVCLTAALCFQVTSRTPGRWDHQFYMRFTASLDEWTAGARAAFDGSGQRLSPRRLRLSVGNVTCEQLHFHVLDTSDYLRPVALTVTFALDNTTKPGPVLNEGSPTSIQKLVPFSKDCGPDNECVTDLVLQVNMDIRGSRKAPFVVRGGRRKVLVSTTLENRKENAYNTSLSLIFSRNLHLASLTPQRESPIKVECAAPSAHARLCSVGHPVFQTGAKVTFLLEFEFSCSSLLSQVFVKLTASSDSLERNGTLQDNTAQTSAYIQYEPHLLFSSESTLHRYEVHPYGTLPVGPGPEFKTTLRVQNLGCYVVSGLIISALLPAVAHGGNYFLSLSQVITNNASCIVQNLTEPPGPPVHPEELQHTNRLNGSNTQCQVVRCHLGQLAKGTEVSVGLLRLVHNEFFRRAKFKSLTVVSTFELGTEEGSVLQLTEASRWSESLLEVVQTRPILISLWILIGSVLGGLLLLALLVFCLWKLGFFAHKKIPEEEKREEKLEQ

SEQ ID NO: 19514 - protein, 766 aa, Homo sapiens
MAAEALAAEAVASRLERQEEDIRWLWSEVERLRDEQLNAPYSCQAEGPCLTREVAQLRAENCDLRHRLCSLRLCLAEERSRQATLESAELEAAQEAGAQPPPSQSQDKDMKKKKMKESEADSEVKHQPIFIKERLKLFEILKKDHQLLLAIYGKKGDTSNIITVRVADGQTVQGEVWKTTPYQVAAEISQELAESTVIAKVNGELWDLDRPLEGDSSLELLTFDNEEAQAVYWHSSAHILGEAMELYYGGHLCYGPPIENGFYYDMFIEDRAVSSTELSALENICKAIIKEKQPFERLEVSKEILLEMFKYNKFKCRILNEKVNTATTTVYRCGPLIDLCKGPHVRHTGKIKTIKIFKNSSTYWEGNPEMETLQRIYGISFPDNKMMRDWEKFQEEAKNRDHRKIGKEQELFFFHDLSPGSCFFLPRGAFIYNTLTDFIREEYHKRDFTEVLSPNMYNSKLWEASGHWQHYSENMFTFEIEKDTFALKPMNCPGHCLMFAHRPRSWREMPIRFADFGVLHRNELSGTLSGLTRVRRFQQDDAHIFCTVEQIEEEIKGCLQFLQSVYSTFGFSFQLNLSTRPENFLGEIEMWNEAEKQLQNSLMDFGEPWKMNPGDGAFYGPKIDIKIKDAIGRYHQCATIQLDFQLPIRFNLTYVSKDGDDKKRPVIIHRAILGSVERMIAILSENYGGKWPFWLSPRQVMVIPVGPTCEKYALQVSSEFFEEGFMADVDLDHSCTLNKKIRNAQLAQYNFILDRFLPSVWQEAWL

SEQ ID NO: 19515 - protein, 507 aa, Homo sapiens
MGPSRLVRGPRPQGMRSPYRRPGMGWPRPRFPRMFKCSRRRYQQGLRGRTASSAAINPATRAMGINNTHTDTTIVWIFPPQALPPKPPKPMTSAVPNGMKDSSVSLQDAEWYWGDISREEVNDKLRDMPDGTFLVRDASTKMQGDYTLTLRKGGNNKLIKIYHRDGKYGFSDPLTFNSVVELINHYHHESLAQYNPKLDVKLMYPVSRYQQDQLVKEDNIDAVGKKLQEYHSQYQEKSKEYDRLYEEYTRTSQEIQMKRTAIEAFNETIKIFEEQCHTQEQHSKEYIERFRREGNEKEIERIMMNYDKLKSRLGEIHDSKMRLEQDLKNQALDNREIDKKMNSIKPDLIQLRKIRDQHLVWLNHKGVRQKRLNVWLGIKNEDADENYFINEEDENLPHYDEKTWFVEDINRVQAEDLLYGKPDGAFLIRESSKKGCYACSVVADGEVKHCVIYSTARGYGFAEPYNLYSSLKELVLHYQQTSLVQHNDSLNVRLAYPVHAQMPSLCR

SEQ ID NO: 19516 - protein, 189 aa, Homo sapiens
TFLCDFILDGADLELRLADGSNNCSGRVEVRIHEQWWTICDQNWKNEQALVVCKQLGCPFSVFGSRRAKPSNEARDIWINSISCTGNESALWDCTYDGKAKRTCFRRSDAGVICSGDATWGLRLVGGSNRCSGRLEVYFQGRWGTVCDDGWNSKAAAVVCSQLDCPSSIIGMGLGNASTGYGKIWLDDV

SEQ ID NO: 19517 - protein, 1849 aa, Homo sapiens [sequence omitted]

SEQ ID NO: 19518 - protein, 106 aa, Homo sapiens
MAESLRSPRRSLYKLVGSPPWKEAFRQRCLERMRNSRDRLLNRYRQAGSSGPGNSQNSFLVQEVMEEEWNALQSVENCPEDLAQLEELIDMAVLEEIQQELINQGL

SEQ ID NO: 19519 - protein, 342 aa, Homo sapiens
VLSIRGAQEEEPTDPQLMRLDNMLLAEGVAGPEKGGGSAAAAAAAAASGGAGSDNSVEHSDYRAKLSQIRQIYHTELEKYEQACNEFTTHVMNLLREQSRTRPISPKEIERMVSIIHRKFSSIQMQLKQSTCEAVMILRSRFLDARRKRRNFNKQATEILNEYFYSHLSNPYPSEEAKEELAKKCGITVSQVSNWFGNKRIRYKKNIGKFQEEANIYAAKTAVTATNVSAHGSQANSPSTPNSAGSSSSFNMSNSGDLFMSVQSLNGDSYQGAQVGANVQSQVDTLRHVISQTGGYSDGLAASQMYSPQGISANGGWQDATTPSSVTSPTEGPGSVHSDTSN

SEQ ID NO: 19520 - protein, 261 aa, Homo sapiens
MNRFDRPDRNVRQPQEGFWKRPPQRWSGQEHYHLSHPDHYHHHGKSDLSRGSPYRESPLGHFESYGGMPFFQAQKMFVDVPENTVILDEMTLRHMVQDCTAVKTQLLKLKRLLHQHDGSGSLHDIQLSLPSSPEPEDGDKVYKNEDLLNEIKQLKDEIKKKDEKIQLLELQLATQHICHQKCKEEKCTYADKYTQTPWRRIPGGYSAPSFSPWQGSFQGIPRTVPPHRRQTSSTTAFQQPSQTHRSHPGKTNKATTYRGPQ

SEQ ID NO: 19521 - protein, 344 aa, Homo sapiens
MNRPIQVKPAASEGRGEDRKLFVGMLGKQQGEEDVRRLFQPFGHIEECTVLRSPDGTSKGCAFVKFGSQGEAQAAIRGLHGSRTMAGASSSLVVKLADTDRERALRRMQQMAGHLGAFHPAPLPLGACGAYTTAILQHQAALLAAAQGPGLGPVAAVAAQMQHVAAFSLVAAPLLPAAANSPPGSGPGTLPGLPAPIGVNGFGPLTPQTNGQPGSDTLYNNGLSPYPAAYPSAYAPVSTAFPQQPSALPQQQREGPEGCNLFIYHLPQEFGDAELIQTFLPFGAVVSAKVFVDRATNQSKCFGFVSFDNPTSAQTAIQAMNGFQIGMKRLKVQLKRPKDANRPY

SEQ ID NO: 19522 - protein, 342 aa, Homo sapiens
MSNWKLSKALSLEMIQLKEKVARFSSSSPFQNLEIIATLGVGGFGRVELVKVKNENVAFAMKCIRKKHIVDTKQQEHVYSEKRILEELCSPFIVKLYRTFKDNKYVYMLLEACLGGELWSILRDRGSFDEPTSKFCVACVTEAFDYLHRLGIIYRDLKPENLILDAEGYLKLVDFGFAKKIGSGQKTWTFCGTPEYVAPEVILNKGHDFSVDFWSLGILVYELLTGNPPFSGVDQMMTYNLILKGIEKMDFPRKITRRPEDLIRRLCRQNPTERLGNLKNGINDIKKHRWLNGFNWEGLKARSLPSPLQRELKGPIDHSYFDKYPPEKGMPPDELSGWDKDF

SEQ ID NO: 19523 - protein, 344 aa, Homo sapiens
MGRWALDVAFLWKAVLTLGLVLLYYCFSIGITFYNKWLTKSFHFPLFMTMLHLAVIFLFSALSRALVQCSSHRARVVLSWADYLRRVAPTALATALDVGLSNWSFLYVTVSLYTMTKSSAVLFILIFSLIFKLEELSTQFNVEGFALVLGASFIGGIRWTLTQMLLQKAELGLQNPIDTMFHLQPLMFLGLFPLFAVFEGLHLSTSEKIFRFQDTGLLLRVLGSLFLGGILAFGLGFSEFLLVSRTSSLTLSIAGIFKEVCTLLLAAHLLGDQISLLNWLGFALCLSGISLHVALKALHSRGDGGPKALKGLGSSPDLELLLRSSQREEGDNEEEEYFVAQGQQ

SEQ ID NO: 19524 - protein, 1095 aa, Homo sapiens
MDAEPAGDTRAPRPPPAAPAPPTPAYGAPSTNVTLEALLSTKVAVAQFSQGARAAGGSGAGGGVAAAAVPLILEQLMALQQQQIHQLQLIEQIRSQVALMQRPPPRPSLSPAAAPSAPGPAPSQLPGLAALPLSAGAPAAAIAGSGPAAPAAFEGAQPLSRPESGASTPGGPAEPSAPAAPSAAPAPAAPAPAPAPQSAASSQPQSASTPPALAPGSLLGAAPGLPSPLLPQTSASGVIFPNPLVSIAATANALDPLSALMKHRKGKPPNVSVFEPKASAEDPFFKHKCRFCAKVFGSDSALQIHLRSHTGERPFKCNICGNRFSTKGNLKVHFQRHKEKYPHIQMNPYPVPEYLDNVPTCSGIPYGMSLPPEKPVTTWLDSKPVLPTVPTSVGLQLPPTVPGAHGYADSPSATPASRSPQRPSPASSECASLSPGLNHVESGVSATAESPQSLLGGPPLTKAEPVSLPCTNARAGDAPVGAQASAAPTSVDGAPTSLGSPGLPAVSEQFKAQFPFGGLLDSMQTSETSKLQQLVENIDKKMTDPNQCVICHRVLSCQSALKMHYRTHTGERPFKCKICGRAFTTKGNLKTHFGVHRAKPPLRVQHSCPICQKKFTNAVVLQQHIRMHMGGQIPNTPLPEGFQDAMDSELAYDDKNAETLSSYDDDMDENSMEDDAELKDAATDPAKPLLSYAGSCPPSPPSVISSIAALENQMKMIDSVMSCQQLTGLKSVENGSGESDRLSNDSSSAVGDLESRSAGSPALSESSSSQALSPAPSNGESFRSKSPGLGAPEEPQEIPLKTERPDSPAAAPGSGGAPGRAGIKEEAPFSLLFLSRERGPSQSTPSLISSAAPTMIKMEVNGHGKAMALGEGPPLPAGVQVPAGPQTVMGPGLAPMLAPPPRRTPKQHNCQSCGKTFSSASALQIHERTHTGEKPFGCTICGRAFTTKGNLKVHMGTHMWNNAPARRGRRLSVENPMALLGGDALKFSEMFQKDLAARAMNVDPSFWNQYAAAITNGLAMKNNEISVIQNGGIPQLPVSLGGSALPPLGSMASGMDKARTGSSPPIVSLDKASSETAASRPFTRFIEDNKEIGIN

SEQ ID NO: 19525 - protein, 1598 aa, Homo sapiens
GEKAQLAAVKDICQAIWKLKKVMDAVMSDGNLETRLGSTDVAASQHMLVCALQELGNLIHNLGTTAAPLLQDSSTGLLDSILSVILHPSISVRLAAAWCLHCIAVALPSYLTPLLDRCLERLTGHKSSPEAVTGFSFAVAALLGAVKHCPLGIPHGKGKIIMTLAEDLLCSAAQNSRLSAQRTQAGWLLISALMTLGPAVVSHHLARVLLLWKCVFPASPKDLETEKSRGDSFTWQVTLEGRAGALCAIKSFVSHCGDLLTEEVTQRLLPPLPCAVDLLTQLSSILKMYGSPLKTPSVVYRQRLYELLILLPPETYEGNLCAILRELAADLTAPDIQVAASTFLLPPLCHQDDLLILSPFLQETDHRFIEEQLLLGNGVACGSLEYDPYSIYEKDVEGDSVPKPLPPALSVISSASKLFGVVCAHVGETQRLLILEQLLDSIKHTKGARQQVVQLHVVSSVSSFLKYVAGSKGCLGPEEMKRFALTLVMGALESPNPLLRCAAAESWARLAQVVDDGAFTAGLAQVSFDKLKSARDVVTRTGHSLALGSLHRYLGGISSSQHLNSCIGILYTLAQDSTSPDVQTWALHSLSLIIDSAGPLYYVHVEPTLSLIIMLLLNVPPTHAEVHQSLGRCLNALITTLGPELQGNSTSISTLRTSCLLGCAVMQDNPDCLVQAQAISCLQQLHMFAPRHVNLSSLVSCLCVNLCSPYLLLRRAVLACLRQLVQREAAEVSEHAVMLAKDSREELTPDANIREVGLEGALLILLDKETDERLCHDIKETLNYMLTSMAVEKLSLWLKLCKDVLAASADFTAVTCVDTMQEEEGDKGDDASVLTTRRDEKSHPFTNPRWATRVFAAECVCRIINQCENANSAHFDIALAQEMKKRDSRNDFLVLHLADLIRMAFMAATDHSDQLRLSGLEMLLVVIRRFATVPEPEFPGHVILEQYQANVGAALRPAFTSETPPDVTAKACQVCSAWIASGVVSDLNDLRRVHQLLVSSLTKIQAGKEALSHLYNESASTMEILAVLKAWAEVYIIAVQRHKNHRQPLKTTTCLEDGIRNGSCSSDGLLDLVYADLGTLSRLWLAALQDFALLTLPSEFASQLPAEGGAFYTAETSENAKLHYYNSWALILHATALWLTSTGFVVADPDEGASNLSRPVTPTSMCQGSSSGATIKSPEDVYTDRFHLILGISVEFLCSLRSDATMESITACLHALQALLDVPWPRSKIGSDQDLGIELLNVLHRVILTRESPSIQLASLEVVRQIICAAQEHVKEKRRSAEVDDGAAEKETLPEFGEGKDTGGLVPGKSLVFATLELCVCILVRQLPELNPKLTGSPGVKATKPQILLEDGSRLVSAALVILSELPAVCSPEVDETHQELDEVSLLTAITVFILSTSPEVTTIPCLQKRCIDKFKATLEIKDPVVQIKTYQLLHSIFQYPNPAVSYPYIYSLASCIMEKLQEIDKRKPENTAELEIFQEGIKVLETLVTVAEEHHRAQLVACLLPILISFLLDENSLGSATSIMRNLHDFALQNLMQIGPQYSSVFKSLVASSPALKARLEAAIKGNQESVKVKIPTSKYTKSPGKNSSIQLKTSFL

SEQ ID NO: 19526 - protein, 405 aa, Homo sapiens
MCNEKFSYFPEMEVTQPTSNPVTPKPPYYNILLYSLVPLMLIAGIVICAFWVYRHHKMAYPPVLVPTQDPGPPPPSPLLGLKPLQLLEVKARGRFGCVWKAQLLNEYVAVKIFPIQDKQSWQNEYEVYSLPGMKHENILQFIGAEKRGTSVDVDLWLITAFHEKGSLSDFLKANVVSWNELCHIAETMARGLAYLHEDIPGLKDGHKPAISHRDIKSKNVLLKNNLTACIADFGLALKFEAGKSAGDTHGQVGTRRYMAPEVLEGAINFQRDAFLRIDMYAMGLVLWELASRCTAADGPVDEYMLPFEEEIGQHPSLEDMQEVVVHKKKRPVLRDYWQKHAGMAMLCETIEECWDHDAEARLSAGCVGERITQMQRLTNIITTEDIVTVVTMVTNVDFPPKESSL

SEQ ID NO: 19527 - protein, 778 aa, Homo sapiens
MGCNLCTFQKREEHYKLLYEVSQVNGKDLSKATHEEAVEAFRNAKEPIVVQVLRRTPLSRPAYGMASEVQLMNASTQTDITFEHIMALAKLRPPTPPVPDICPFLLSDSCHSLHPMEHEFYEDNEYISSLPADADRTEDFEYEEVELCRVSSQEKLGLTVCYRTDDEEDTGIYVSEVDPNSIAAKDGRIREGDRILQINGEDVQNREEAVALLSNDECKRIVLLVARPEIQLDEGWLEDERNEFLEELNLEMLEEEHNEAMQPTANEVEQPKKQEEEEGTTDTATSSSNNHEKDSGVGRTDESLRNDESSEQENAAEDPNSTSLKSKRDLGQSQDTLGSVELQYNESLVSGEYIDSDCIGNPDEDCERFRQLLELKCKIRNHGEYDLYYSSSTIECNQGEQEGVEHELQLLNEELRNIELECQNIMQAHRLQKVTDQYGDIWTLHDGGFRNYNTSIDMQRGKLDDIMEHPEKSDKDSSSAYNTAESCRSTPLTVDRSPDSSLPRVINLTNKKNLRSTMAATQSSSGQSSKESTSTKAKTTEQGCSAESKEKVLEGSKLPDQEKAVSEHIPYLSPYHSSSYRYANIPAHARHYQSYMQLIQQKSAVEYAQSQLSLVSMCKESQKCSEPKMEWKVKIRSDGTRYITKRPVRDRILKERALKIKEERSGMTTDDDTMSEMKMGRYWSKEERKQHLVRAKEQRRRREFMMRSRLECLKESPQSGSEGKKEINIIELSHKKMMKKRNKKILDNWMTIQELMTHGAKSPDGTRVHNAFLSVTTV

SEQ ID NO: 19528 - protein, 883 aa, Homo sapiens
MVVSDVVPGGPAEGRLQTGDHIVMVNGVSMENATSAFAIQILKTCTKMANITVKRPRRIHLPATKASPSSPGRQDSDEDDGPQRVEEVDQGRGYDGDSSSGSGRSWDERSRRPRPGRRGRAGSHGRRSPGGGSEANGLALVSGFKRLPRQDVQMKPVKSVLVKRRDSEEFGVKLGSQIFIKHITDSGLAARHRGLQEGDLILQINGVSSQNLSLNDTRRLIEKSEGKLSLLVLRDRGQFLVNIPPAVSDSDSSPLEDISDLASELSQAPPSHIPPPPRHAQRSPEASQTDSPVESPRLRRESSVDSRTISEPDEQRSELPRESSYDIYRVPSSQSMEDRGYSPDTRVVRFLKGKSIGLRLAGGNDVGIFVSGVQAGSPADGQGIQEGDQILQVNDVPFQNLTREEAVQFLLGLPPGEEMELVTQRKQDIFWKMVQSRVGDSFYIRTHFELEPSPPSGLGFTRGDVFHVLDTLHPGPGQSHARGGHWLAVRMGRDLREQERGIIPNQSRAEQLASLEAAQRAVGVGPGSSAGSNARAEFWRLRGLRRGAKKTTQRSREDLSALTRQGRYPPYERVVLREASFKRPVVILGPVADIAMQKLTAEMPDQFEIAETVSRTDSPSKIIKLDTVRVIAEKDKHALLDVTPSAIERLNYVQYYPIVVFFIPESRPALKALRQWLAPASRRSTRRLYAQAQKLRKHSSHLFTATIPLNGTSDTWYQELKAIIREQQTRPIWTAEDQLDGSLEDNLDLPHHGLADSSADLSCDSRVNSDYETDGEGGAYTDGEGYTDGEGGPYTDVDDEPPAPALARSSEPVQADESQSPRDRGRISAHQGAQVDSRHPQGQWRQDSMRTYEREALKKKFMRVHDAESSDEDGYDWGPATDL

SEQ ID NO: 19529 - protein, 422 aa, Homo sapiens
MSGDERSDEIVLTVSNSNVEEQEDQPTAGQADAEKAKSTKNQRKTKGAKGTFHCDVCMFTSSRMSSFNRHMKTHTSEKPHLCHLCLKTFRTVTLLRNHVNTHTGTRPYKCNDCNMAFVTSGELVRHRRYKHTHEKPFKCSMCKYASVEASKLKRHVRSHTGERPFQCCQCSYASRDTYKLKRHMRTHSGEKPYECHICHTRFTQSGTMKIHILQKHGENVPKYQCPHCATIIARKSDLRVHMRNLHAYSAAELKCRYCSAVFHERYALIQHQKTHKNEKRFKCKHCSYACKQERHMTAHIRTHTGEKPFTCLSCNKCFRQKQLLNAHFRKYHDANFIPTVYKCSKCGKGFSRWILWVGNSEVAELGGPGSGPLLRLQSGCPPGLHHPKAGLGPEDPLPGQLRHTTAGTGLSSLLQGPLCRAA

SEQ ID NO: 19530 - protein, 114 aa, Homo sapiens
MLARKSIIPEEYVLARIAAENLRKPRIRDRLPKARFIAKSGACNLAHKNIREQGRFLQDIFTTLVDLKWRHTLVIFTMSFLCSWLLFAIMWWLVAFAHGDIYAYMEKSGMEKSG

SEQ ID NO: 19531 - protein, 245 aa, Homo sapiens
MEKLAASTEPQGPRPVLGRESVQCRMECCDVPAETLYDVLHDIEYRKKWDSNVIETFDIARLTVNADVGYYSWRCPKPLKNRDVITLRSWLPMGADYIIMNYSVKHPKYPPRKDLVRAVSIQTGYLIQSTGPKSCVITYLAQVDPKGSLPKWVVNKSSQFLAPKAMKKMYKACLKYPEWKQKHLPHFKPWLHPEQSPLPSLALSELSVQHADSLENIDESAVAESREERMGGAGGEGSDDDTSLT

SEQ ID NO: 19532 - protein, 536 aa, Homo sapiens
MYCAYPVPGMGSNSLMYYYNGKTVYAPSPNSDDFNRESPSYPSPKPPTSMFASTFFMQDGTHNSSDLWSSSNGMSQPGFGGILGTSTSHMSQSSSYGNLHSHDRLSYPPHSVSPTDINTSLPPMSSFHRGSTSSSPYVAASHTPPINGSDSILGTRGNAAGSSQTGDALGKALASIYSPDHTSSSFPSNPSTPVGSPSPLTGTSQWPRPGGQAPSSPSYENSLHSLKNRVEQQLHEHLQDAMSFLKDVCEQSRMEDRLDRLDDAIHVLRNHAVGPSTSLPAGHSDIHSLLGPSHNAPIGSLNSNYGGSSLVASSRSASMVGTHREDSVSLNGNHSVLSSTVTTSSTDLNHKTQENYRGGLQSQSGTVVTTEIKTENKEKDENLHEPPSSDDMKSDDESSQKDIKVSSRGRTSSTNEDEDLNPEQKIEREKERRMANNARERLRVRDINEAFKELGRMCQLHLKSEKPQTKLLILHQAVAVILSLEQQVRERNLNPKAACLKRREEEKVSAVSAEPPTTLPGTHPGLSETTNPMGHM

SEQ ID NO: 19533 - protein, 1146 aa, Homo sapiens
MPEPTKKEENEVPAPAPPPEEPSKEKEAGTTPAKDWTLVETPPGEEQAKQNANSQLSILFIEKPQGGTVKVGEDITFIAKVKAEDLLRKPTIKWFKGKWMDLASKAGKHLQLKETFERHSRVYTFEMQIIKAKDNFAGNYRCEVTYKDKFDSCSFDLEVHESTGTTPNIDIRSAFKRSGEGQEDAGELDFSGLLKRREVKQQEEEPQVDVWELLKNAKPSEYEKIAFQYGITDLRGMLKRLKRMRREEKKSAAFAKILDPAYQVDKGGRVRFVVELADPKLEVKWYKNGQEIRPSTKYIFEHKGCQRILFINNCQMTDDSEYYVTAGDEKCSTELFVREPPIMVTKQLEDTTAYCGERVELECEVSEDDANVKWFKNGEEIIPGPKSRYRIRVEGKKHILIIEGATKADAAEYSVMTTGGQSSAKLSVDLKPLKILTPLTDQTVNLGKEICLKCEISENIPGKWTKNGLPVQESDRLKVVHKGRIHKLVIANALTEDEGDYVFAPDAYNVTLPAKVHVIDPPKIILDGLDADNTVTVIAGNKLRLEIPISGEPPPKAMWSRGDKAIMEGSGRIRTESYPDSSTLVIDIAERDDSGVYHINLKNEAGEAHASIKVKVVDFPDPPVAPTVTEVGDDWCIMNWEPPAYDGGSPILGYFIERKKKQSSRWMRLNFDLCKETTFEPKKMIEGVAYEVRIFAVNAIGISKPSMPSRPFVPLAVTSPPTLLTVDSVTDTTVTMRWRPPDHIGAAGLDGYVLEYCFEGTEDWIVANKDLIDKTKFTITGLPTDAKIFVRVKAVNAAGASEPKYYSQPILVKEIIEPPKIRIPRHLKQTYIRRVGEAVNLVIPFQGKPRPELTWKKDGAEIDKNQINIRNSETDTIIFIRKAERSHSGKYDLQVKVDKFVETASIDIQIIDRPGPPQIVKIEDVWGENVALTWTPPKDDGNAAITGYTIQKADKKSMEWFTVIEHYHRTSATITELVIGNEYYFRVFSENMCGLSEDATMTKESAVIARDGKIYKNPVYEDFDFSEAPMFTQPLVNTYAIAGYNATLNCSVRGNPKPKITWMKNKVAIVDDPRYRMFSNQGVCTLEIRKPSPYDGGTYCCKAVNDLGTVEIECKLEVKVIYQGVNTPGQPVFLEGQQQSLHNKDF

SEQ ID NO: 19534 - protein, 381 aa, Homo sapiens
MISAHRKLCLPGSSNSPASAFRVAGTTAVKMSDKNQIAARASLIEQLMSKRNFEDLGNHLTELETIYVTKEHLQETDVVRAVYRVLKNCPSVALKKKAKCLLSKWKAVYKQTHSKARNSPKLFPVRGNKEENSGPSHDPSQNETLGICSSNSLSSQDVAKLSEMIVPENRAIQLKPKEEHFGDGDPESTGKRSSELLDPTTPMRTKCIELLYAALTSSSTDQPKADLWQNFAREIEEHVFTLYSKNIKKYKTCIRSKVANLKNPRNSHLQQNLLSGTTSPREFAEMTVMEMANKELKQLRASYTESCIQEHYLPQVIDGTQTNKIKCRRCEKYNCKVTVIDRGTLFLPSWVRNSNPDEQMMTYVICNECGEQWYHSKWVCW

SEQ ID NO: 19535 - protein, 1042 aa, Homo sapiens
MENAHTKTVEEVLGHFGVNESTGLSLEQVKKLKERWGSNELPAEEGKTLLELVIEQFEDLLVRILLLAACISFVLAWFEEGEETITAFVEPFVILLILVANAIVGVWQERNAENAIEALKEYEPEMGKVYRQDRKSVQRIKAKDIVPGDIVEIAVGDKVPADIRLTSIKSTTLRVDQSILTGESVSVIKHTDPVPDPRAVNQDKKNMLFSGTNIAAGKAMGVVVATGVNTEIGKIRDEMVATEQERTPLQQKLDEFGEQLSKVISLICIAVWIINIGHFNDPVHGGSWIRGAIYYFKIAVALAVAAIPEGLPAVITTCLALGTRRMAKKNAIVRSLPSVETLGCTSVICSDKTGTLTTNQMSVCRMFILDRVEGDTCSLNEFTITGSTYAPIGEVHKDDKPVNCHQYDGLVELATICALCNDSALDYNEAKGVYEKVGEATETALTCLVEKMNVFDTELKGLSKIERANACNSVIKQLMKKEFTLEFSRDRKSMSVYCTPNKPSRTSMSKMFVKGAPEGVIDRCTHIRVGSTKVPMTSGVKQKIMSVIREWGSGSDTLRCLALATHDNPLRREEMHLEDSANFIKYETNLTFVGCVGMLDPPRIEVASSVKLCRQAGIRVIMITGDNKGTAVAICRRIGIFGQDEDVTSKAFTGREFDELNPSAQRDACLNARCFARVEPSHKSKIVEFLQSFDEITAMTGDGVNDAPALKKAEIGIAMGSGTAVAKTASEMVLADDNFSTIVAAVEEGRAIYNNMKQFIRYLISSNVGEVVCIFLTAALGFPEALIPVQLLWVNLVTDGLPATALGFNPPDLDIMNKPPRNPKEPLISGWLFFRYLAIGCYVGAATVGAAAWWFIAADGGPRVSFYQLSHFLQCKEDNPDFEGVDCAIFESPYPMTMALSVLVTIEMCNALNSLSENQSLLRMPPWENIWLVGSICLSMSLHFLILYVEPLPLIFQITPLNVTQWLMVLKISLPVILMDETLKFVARNYLEPGKECVQPATKSCSFSACTDGISWPFVLLIMPLVIWVYSTDTNFSDMFWS

SEQ ID NO: 19536 - protein, 643 aa, Homo sapiens
MLPVSGGHGATGVPEPAPGALRPLAAAGSAHQETDPGAAGAGAVPECAASAPPGPPAGAAAQGWGGGGAAARGHPPGAQPRGAAGPQGPSPWPEESSRDQELAAVLECLTFEDVPENKAWPAHPLGFGSRTPDKEEFKQEEPKGAAWPTPILAESQADSPGVPGEPCAQSLGRGAAASGPGEDGSLLGSSEILEVKVAEGVPEPNPELQFICADCGVSFPQLSRLKAHQLRSHPAGRSFLCLCCGKSFGRSSILKLHMRTHTDERPHACHLCGHRFRQSSHLSKHLLTHSSEPAFLCAECGRGFQRRASLVQHLLAHAQDQKPPCAPESKAEAPPLTDVLCSHCGQSFQRRSSLKRHLRIHARDKDRRSSEGSGSRRRDSDRRPFVCSDCGKAFRRSEHLVAHRRVHTGERPFSCQACGRSFTQSSQLVSHQRVHTGEKPYACPQCGKRFVRRASLARHLLTHGGPRPHHCTQCGKSFGQTQDLARHQRSHTGEKPCRCSECGEGFSQSAHLARHQRIHTGEKPHACDTCGHRFRNSSNLARHRRSHTGERPYSCQTCGRSFRRNAHLRRHLATHAEPGQEQAEPPQECVECGKSFSRSCNLLRHLLVHTGARPYSCTQCGRSFSRNSHLLRHLRTHARETLY

SEQ ID NO: 19537 - protein, 901 aa, Homo sapiens
KPQQLISDCEGPSASENGDASEEDHPQVCAKCCAQFTDPTEFLAHQNACSTDPPVMVIIGGQENPNNSSASSEPRPEGHNNPQVMDTEHSNPPDSGSSVPTDPTWGPERRGEESSGHFLVAATGAETPKQAFFHLYHPLGSQHPFSAGGVGRSHKPTPAPSPALPGSTDQLIASPHLAFPSTTGLLAAQCLGAARGLEATASPGLLKPKNGSGELSYGEVMGPLEKPGGRHKCRFCAKVFGSDSALQIHLRSHTGERPYKCNVCGNRFTTRGNLKVHFHRHREKYPHVQMNPHPVPEHLDYVITSSGLPYGMSVPPEKAEEEAATPGGGVERKPLVASTTALSATESLTLLSTSAGTATAPGLPAFNKFVLMKAVEPKNKADENTPPGSEGSAISGVAESSTATRMQLSKLVTSLPSWALLTNHFKSTGSFPFPYVLEPLGASPSETSKLQQLVEKIDRQGAVAVTSAASGAPTTSAPAPSSSASSGPNQCVICLRVLSCPRALRLHYGQHGGERPFKCKVCGRAFSTRGNLRAHFVGHKASPAARAQNSCPICQKKFTNAVTLQQHVRMHLGGQIPNGGTALPEGGGAAQENGSEQSTVSGARSFPQQQSQQPSPEEELSEEEEEEDEEEEEDVTDEDSLAGRGSESGGEKAISVRGDSEEASGAEEEVGTVAAAATAGKEMDSNEKTTQQSSLPPPPPPDSLDQPQPMEQGSSGVLGGKEEGGKPERSSSPASALTPEGEATSVTLVEELSLQEAMRKEPGESSSRKACEVCGQAFPSQAALEEHQKTHPKEGPLFTCVFCRQGFLERATLKKHMLLAHHQNQYVAFLSNGLPMKPWNSSSTSTTTPSLAPPVLFGLGTVAGKVPPTMGSREAKEKTAPLLFQPPAPKAVPEKPIIDKK

SEQ ID NO: 19538 - protein, 278 aa, Homo sapiens
MWLFFGITGLLTAALSGHPSPAPPDQLNTSSAESELWEPGERLPVRLTNGSSSCSGTVEVRLEASWEPACGALWDSRAAEAVCRALGCGGAEAASQLAPPTPELPPPPAAGNTSVAANATLAGAPALLCSGAEWRLCEVVEHACRSDGRRARVTCAENRALRLVDGGGACAGRVEMLEHGEWGSVCDDTWDLEDAHVVCRQLGCGWAVQALPGLHFTPGRGPIHRDQVNCSGAEAYLWDCPGLPGQHYCGHKEDAGAVCSESSVTVKIENKESRELML

SEQ ID NO: 19539 - protein, 796 aa, Homo sapiens
MSADNQLQVIFITNDRRNKEKAIEEGIPAFTCEEYVKSLTANPELIDRLACLSEEGNEIESGKIIFSEHLPLSKLQQGIKSGTYLQGTFRASRENYLEATVWIHGDNEENKEIILQGLKHLNRAVHEDIVAVELLPKSQWVAPSSVVLHDEGQNEEDVEKEEETERMLKTAVSEKMLKPTGRVVGIIKRNWRPYCGMLSKSDIKESRRHLFTPADKRIPRIRIETRQASTLEGRRIIVAIDGWPRNSRYPNGHFVRNLGDVGEKETETEVLLLEHDVPHQPFSQAVLSFLPKMPWSITEKDMKNREDLRHLCICSVDPPGCTDIDDALHCRELENGNLEVGVHIADVSHFIRPGNALDQESARRGTTVYLCEKRIDMVPELLSSNLCSLKCDVDRLAFSCIWEMNHNAEILKTKFTKSVINSKASLTYAEAQLRIDSANMNDDITTSLRGLNKLAKILKKRRIEKGALTLSSPEVRFHMDSETHDPIDLQTKELRETNSMVEEFMLLANISVAKKIHEEFSEHALLRKHPAPPPSNYEILVKAARSRNLEIKTDTAKSLAESLDQAESPTFPYLNTLLRILATRCMMQAVYFCSGMDNDFHHYGLASPIYTHFTSPIRRYADVIVHRLLAVAIGADCTYPELTDKHKLADICKNLNFRHKMAQYAQRASVAFHTQLFFKSKGIVSEEAYILFVRKNAIVVLIPKYGLEGTVFFEEKDKPNPQLIYDDEIPSLKIEDTVFHVFDKVKVKIMLDSSNLQHQKIRMSLVEPQIPGISIPTDTSNMDLNGPKKKKMKLGK

SEQ ID NO: 19540 - protein, 834 aa, Homo sapiens
MDSSNLAVIFAPNLLQTSEGHEKMSSNTEKKLRLQAAVVQTLIDYASDIGRVPDFILEKIPAMLGIDGLCATPSLEGFEEGEYETPGEYKRKRRQSVGDFVSGALNKFKPNRTPSITPQEERIAQLSESPVILTPNAKRTLPVDSSHGFSSKKRKSIKHNFNFELLPSNLFNSSSTPVSVHIDTSSEGSSQSSLSPVLIGGNHLITAGVPRRSKRIAGKKVCRVESGKAGCFSPKISHKEKVRRSLRLKFNLGKNGREVNGCSGVNRYESVGWRLANQQSLKNRIESVKTGLLFSPDVDEKLPKKGSEKISKSEETLLTPERLVGTNYRMSWTGPNNSSFQEVDANEASSMVENLEVENSLEPDIMVEKSPATSCELTPSNLNNKHNSNITSSPLSGDENNMTKETLVKVQKAFSESGSNLHALMNQRQSSVTNVGKVKLTEPSYLEDSPEENLFETNDLTIVESKEKYEHHTGKGEKCFSERDFSPLQTQTFNRETTIKCYSTQMKMEHEKDIHSNMPKDYLSKQEFSSDEEIKKQQSPKDKLNNKLKENENMMEGNLPKCAAHSKDEARSSFSQQSTCVVTNLSKPRPMRIAKQQSLETCEKTVSESSQMTEHRKVSDHIQWFNKLSLNEPNRIKVKSPLKFQRTPVRQSVRRINSLLEYSRQPTGHKLASLGDTASPLVKSVSCDGALSSCIESASKDSSVSCIKSGPKEQKSMSCEESNIGAISKSSMELPSKSFLKMRKHPDSVNASLRSTTVYKQKILSDGQVKVPLDDLTNHDIVKPVVNNNMGISSGINNRVLRRPSERGRAWYKGSPKHPIGKTQLLPTSKPVDL

SEQ ID NO: 19541 - protein, 612 aa, Homo sapiens
MAFKEHGKITSCCIPGPINSSRAGAGAGASGWSSKGVRARAREPERGAPDREPSDMSDPEMGWVPEPPTMTLGASRVELRVSCHGLLDRDTLTKPHPCVLLKLYSDEQWVEVERTEVLRSCSSPVFSRVLALEYFFEEKQPLQFHVFDAEDGATSPRNDTFLGSTECTLGQIVSQTKVTKPLLLKNGKTAGKSTITIVAEEVSGTNDYVQLTFRAYKLDNKDLFSKSDPFMEIYKTNEDQSDQLVWRTEVVKNNLNPSWEPFRLSLHSLCSCDVHRPLKFLVYDYDSSGKHDFIGEFTSTFQEMQEGTANPGQEMQWDCINPKYRDKKKNYKSSGTVVLAQCTVEKVHTFLDYIMGGCQISFTVAIDFTASNGDPRSSQSLHCLSPRQPNHYLQALRAVGGICQDYDSDKRFPAFGFGARIPPNFEVSHDFAINFDPENPECEEISGVIASYRRCLPQIQLYGPTNVAPIINRVAEPAQREQSTGQATKYSVLLVLTDGVVSDMAETRTAIVRASRLPMSIIIVGVGNADFSDMRLLDGDDGPLRCPRGVPAARDIVQFVPFRDFKDAAPSALAKCVLAEVPRQVVEYYASQGISPGAPRPCTLATTPSPSP

SEQ ID NO: 19542 - protein, 421 aa, Homo sapiens
MGRPTQWPSLLLLLLLPGPPPVAGLEDAAFPHLGESLQPLPRACPLRCSCPRVDTVDCDGLDLRVFPDNITRAAQHLSLQNNQLQELPYNELSRLSGLRTLNLHNNLISSEGLPDEAFESLTQLQHLCVAHNKNNLISKVPRGALSRQTQLRELYLQHNQLTDSGLDATTFSKLHSLEYLDLSHNQLTTVPAGLPRTLAILHLGRNRIRQVEAARLHGARGLRYLLLQHNQLGSSGLPAGALRPLRGLHTLHLYGNGLDRVPPALPRRLRALVLPHNHVAALGARDLVATPGLTELNLAYNRLASARVHHRAFRRLRALRSLDLAGNQLTRLPMGLPTGLRTLQLQRNQLRMLEPEPLAGLDQLRELSLAHNRLRVGDIGPGTWHELQALQVRHRLVSHTVPRAPPSPCLPCHVPNILVSW

SEQ ID NO: 19543 - protein, 1008 aa, Homo sapiens
MKVVNLKQAILQAWKERWSDYQWAINMKKFFPKGATWDILNLADALLEQAMIGPSPNPLILSYLKYAISSQMVSYSSVLTAISKFDDFSRDLCVQALLDIMDMFCDRLSCHGKAEECIGLCRALLSALHWLLRCTAASAERLREGLEAGTPAAGEKQLAMCLQRLEKTLSSTKNRALLHIAKLEEASLHTSQGLGQGGTRANQPTASWTAIEHSLLKLGEILANLSNPQLRSQAEQCGTLIRSIPTMLSVHAEQMHKTGFPTVHAVILLEGTMNLTGETQSLVEQLTMVKRMQHIPTPLFVLEIWKACFVGLIESPEGTEELKWTAFTFLKIPQVLVKLKKYSHGDKDFTEDVNCAFEFLLKLTPLLDKADQRCNCDCTNFLLQECGKQGLLSEASVNNLMAKRKADREHAPQQKSGENANIQPNIQLILRAEPTVTNILKTMDADHSKSPEGLLGVLGHMLSGKSLDLLLAAAAATGKLKSFARKFINLNEFTTYGSEESTKPASVRALLFDISFLMLCHVAQTYGSEVILSESRTGAEVPFFETWMQTCMPEEGKILNPDHPCFRPDSTKVESLVALLNNSSEMKLVQMKWHEACLSISAAILEILNAWENGVLAFESIQKITDNIKGKVCSLAVCAVAWLVAHVRMLGLDEREKSLQMIRQLAGPLFSENTLQFYNERVVIMNSILERMCADVLQQTATQIKFPSTGVDTMPYWNLLPPKRPIKEVLTDIFAKVLEKGWVDSRSIHIFDTLLHMGGVYWFCNNLIKELLKETRKEHTLRAVELLYSIFCLDMQQVTLVLLGHILPGLLTDSSKWHSLMDPPGTALAKLAVWCALSSYSSHKGQASTRQKKRHREDIEDYISLFPLDDVQPSKLMRLLSSNEDDANILSSPTDRSMSSSLSASQLHTVNMRDPLNRVLANLFLLISSILGSRTAGPHTQFVQWFMEECVDCLEQGGRGSVLQFMPFTTVSELVKVSAMSSPKVVLAITDLSLPLGRQVAAKAIAAL

SEQ ID NO: 19544 - protein, 254 aa, Homo sapiens
MAPGSFAEYTVVPASIATPVPSVKPEYLTLLVSGTTAYISLKELGGLSEGKKVLVTAAAGGTGQFAMQLSKKAKCHVIGTCSSDEKSAFLKSLGCDRPINYKTEPVGTVLKQEYPEGVDVVYESVGGAMFDLAVDALATKGRLIVIGFISGYQTPTGLSPVKAGTLPAKLLKKSASVQGFFLNHYLSKYQAAMSHLLEMCVSGDLVCEVDLGDLSPEGRFTGLESIFRAVNYMYMGKNTGKIVVELPHSVNSKL

SEQ ID NO: 19545 - protein, 529 aa, Homo sapiens
MDTCMTLAFTLSGRFFMLLSQYRYAYLLQPSQFHGEPCNFSDKEVEDCVTNRPCGSQVRCEGFVCAQTGRCVNRRLLCNGDNDCGDQSDEANCRRIYKKCQHEMDQYWGIGSLASGINLFTNSFEGPVLDHRYYAGGCSPHYILNTRFRKPYNVESYTPQTQGKYEFILKEYESYSDFERNVTEKMASKSGFSFGFKIPGIFELGISSQSDRGKHYIRRTKRFSHTKSVFLHARSDLEVAHYKLKPRSLMLHYEFLQRVKRLPLEYSYGEYRDLFRDFGTHYITEAVLGGIYEYTLVMNKEAMERGDYTLNNVHACAKNDFKIGGAIEEVYVSLGVSVGKCRGILNEIKDRNKRDTMVEDLVVLVRGGASEHITTLAYQELPTADLMQEWGDAVQYNPAIIKVKVEPLYELVTATDFAYSSTVRQNMKQALEEFQKEVSSCHCAPCQGNGVPVLKGSRCDCICPVGSQGLACEVSYRKNTPIDGKWNCWSNWSSCSGRRKTRQRQCNNPPPQNGGSPCSGPASETLDCS

SEQ ID NO: 19546 - protein, 933 aa, Homo sapiens
MFGPRGSTSAGAGRKEILSRSSVMGVRGLQGFVGSTCPHICTVVNFKELAEHHRSKYPGCTPTIVVDAMCCLRYWYTPESWICGGQWREYFSALRDFVKTFTAAGIKLIFFFDGMVEQDKRDEWVKRRLKNNREISRIFHYIKSHKEQPGRNMFFIPSGLAVFTRFALKTLGQETLCSLQEADYEVASYGLQHNCLGILGEDTDYLIYDTCPYFSISELCLESLDTVMLCREKLCESLGLCVADLPLLACLLGNDIIPEGMFESFRYKCLSSYTSVKENFDKKGNIILAVSDHISKVLYLYQGEKKLEEILPLGPNKALFYKGMASYLLPGQKSPWFFQKPKGVITLDKQVISTSSDAESREEVPMCSDAESRQEVPMCTGPESRREVPVYTDSEPRQEVPMCSDPEPRQEVPTCTGPESRREVPMCSDPEPRQEVPMCTGPEARQEVPMYTDSEPRQEVPMYTDSEPRQEVPMYTGSEPRQEVPMYTGPESRQEVPMYTGPESRQEVLIRTDPESRQEIMCTGHESKQEVPICTDPISKQEDSMCTHAEINQKLPVATDFEFKLEALMCTNPEIKQEDPTNVGPEVKQQVTMVSDTEILKVARTHHVQAESYLVYNIMSSGEIECSNTLEDELDQALPSQAFIYRPIRQRVYSLLLEDCQDVTSTCLAVKEWFVYPGNPLRHPDLVRPLQMTIPGGTPSLKILWLNQEPEIQVRRLDTLLACFNLSSSREELQAVESPFQALCCLLIYLFVQVDTLCLEDLHAFIAQALCLQGKSTSQLVNLQPDYINPRAVQLGSLLVRGLTTLVLVNSACGFPWKTSDFMPWNVFDGKLFHQKYLQSEKGYAVEVLLEQNRSRLTKFHNLKAVVCKACMKENRRITGRAHWGSHHAGRWGRQGSSYHRTGSGYSRSSQGQPWRDQGPGSRQYEHDQWRRY

SEQ ID NO: 19547 - protein, 840 aa, Homo sapiens
MAGLLAPPYGVMETGSNNDRIPDKENVPSEKILRAGKILRNAILSRAPHMIRDRKYHLKTYRQCCVGTELVDWMMQQTPCVHSRTQAVGMWQVLLEDGVLNHVDQEHHFQDKYLFYRFLDDEHEDAPLPTEEEKKECDEELQDTMLLLSQMGPDAHMRMILRKPPGQRTVDDLEIIYEELLHIKALSHLSTTVKRELAGVLIFESHAKGGTVLFNQGEEGTSWYIILKGSVNVVIYGKGVVCTLHEGDDFGKLALVNDAPRAASIVLREDNCHFLRVDKEDFNRILRDVEANTVRLKEHDQDVLVLEKVPAGNRASNQGNSQPQQKYTVMSGTPEKILEHFLETIRLEATLNEATDSVLNDFIMMHCVFMPNTQLCPALVAHYHAQPSQGTEQEKMDYALNNKRRVIRLVLQWAAMYGDLLQEDDVSMAFLEEFYVSVSDDARMIAALKEQLPELEKIVKQISEDAKAPQKKHKVLLQQFNTGDERAQKRQPIRGSDEVLFKVYCMDHTYTTIRVPVATSVKEVISAVADKLGSGEGLIIVKMSSGGEKVVLKPNDVSVFTTLTINGRLFACPREQFDSLTPLPEQEGPTVGTVGTFELMSSKDLAYQMTIYDWELFNCVHELELIYHTFGRHNFKKTTANLDLFLRRFNEIQFWVVTEICLCSQLSKRVQLLKKFIKIAAHCKEYKNLNSFFAIVMGLSNVAVSRLALTWEKLPSKFKKFYAEFESLMDPSRNHRAYRLTVAKLEPPLIPFMPLLIKDMTFTHEGNKTFIDNLVNFEKMRMIANTARTVRYYRSQPFNPDAAQANKNHQDVRSYVRQLNVIDNQRTLSQMSHRLEPRRP

SEQ ID NO: 19548 - protein, 631 aa, Homo sapiens
LTCTDLATLTNILEHREAPIHLDFDGCPLEPHCPEALVGCGQIENLSFKSRKCGDAFAEALSRSLPTMGRLQMLGLSSNSICVSTLLCLARVAVTCPTVRMLQAREADLIFLLSPPTETTAELQRAPDLQESDGQRKGAQSRSLTLRLQKCQLQVHDAEALIALLQEGPHLEEVDLSGNQLEDEGCRLMAEAASQLHIARKLDLSNNGLSVAGVHCVLRAVSACWTLAELHISLQHKTVIFMFAQEPEEQKGPQERAAFLDSLMLQMPSELPLSSRRMRLTHCGLQEKHLEQLCKALGGSCHLGHLHLDFSGNALGDEGAARLAQLLPGLGALQSLNLSENGLSLDAVLGLVRCFSTLQWLFRLDISFESQHILLRGDKTSSLSECPLEPPSLTRLCATLKDCPGPLELQLSCEFLSDQSLETLLDCLPQLPQLSLLQLSQTGLSPKSPFLLANTLSLCPRVKKVDLRSLHHATLHFRSNEEEEGVCCGRFTGCSLSQEHVESLCWLLSKCKDLSQVDLGSEQSFRIHFSREDQAGKTLRLSECSFRPEHVSRLATGLSKSLQLTELTLTQCCLGQKQLAILLSLVGRPAGLFSLRDSTRHTEKLSFPTLEACALGFKKKRKKERKKVSED

SEQ ID NO: 19549 - protein, 459 aa, Homo sapiens
MEEKGEGMLPAPSPDITLPSCSLAQSLWALFTSSLAISLVFAVIPFCRDVKVLASVMALAGLAMGCIDTVANMQLVRMYQKDSAVFLQVLHFFVGFGALLSPLIADPFLSEANCLPANSTANTTSRGHLFHVSRVLGQHHVDAKPWSNQTFPGLTPKDGAGTRVSYAFWIMALINLPVPMAVLMLLSKERLLTCCPQRRPLLLSADELALETQPPEKEDASSLPPKFQSHLGHEDLFSCCQRKNLRGAPYSFFAIHITGALVLFMTDGLTGAYSAFVYSYAVEKPLSVGHKVAGYLPSLFWGFITLGRLLSIPISSRMKPATMVFINVVGVVVTFLVLLIFSYNVVFLFVGTASLGLFLSSTFPSMLAYTEDSLQYKGCATTVLVTGAGVGEMVLQMLVGSIFQAQGSYSFLVCGVIFGCLAFTFYILLLFFHRMHPGLPSVPTQDRSIGMENSECYQR

SEQ ID NO: 19550 - protein, 744 aa, Homo sapiens
MAQVAGAALSQAGWYLSDEGIEACTSSPDKVNVNDIILIALNTDLRTIGKKFLPSDINSGKVEKLEGPCVLQIQKIRNVAAPKDNEESQAAPRMLRLQMTDGHISCTAVEFSYMSKISLNTPPGTKVKLSGIVDIKNGFLLLNDSNTTVLGGEVEHLIEKWELQRSLSKHNRSNIGTEGGPPPFVPFGQKCVSHVQVDSRELDRRKTLQVTMPVKPTNDNDEFEKQRTAAIAEVAKSKETKTFGGGGGGARSNLNMNAAGNRNREVLQKEKSTKSEGKHEGVYRELVDEKALKHITEMGFSKEASRQALMDNGNNLEAALNVLLTSNKQKPVMGPPLRGRGKGRGRIRSEDEEDLGNARPSAPSTLFDFLESKMGTLNVEEPKSQPQQLHQGQYRSSNTEQNGVKDNNHLRHPPRNDTRQPRNEKPPRFQRDSQNSKSVLEGSGLPRNRGSERPSTSSVSEVWAEDRIKCDRPYSRYDRTKDTSYPLGSQHSDGAFKKRDNSMQSRSGKGPSFAEAKENPLPQGSVDYNNQKRGKRESQTSIPDYFYDRKSQTINNEAFSGIKIEKHFNVNTDYQNPVRSNSFIGVPNGEVEMPLKGRRIGPIKPAGPVTAVPCDDKIFYNSGPKRRSGPIKPEKILESSIPMEYAKMWKPGDECFALYWEDNKFYRAEVEALHSSGMTAVVKFIDYGNYEEVLLSNIKPIQTEAWEEEGTYDQTLEFRRGGDGQPRRSTRPTQQFYQPPRARN

SEQ ID NO: 19551 - protein, 85 aa, Homo sapiens
MDDDDFGGFEAAETFDGGSGETQTTSPAIPWAAFPAVSGVHLSPSSPEIVLDRDHSSSIGCLSSDAIISSPENTHAANSIVSQTI

SEQ ID NO: 19552 - protein, 238 aa, Homo sapiens
MAFQDLLGHAGDLWRFQILQTVFLSIFAVATYLHFMLENFTAFIPGHRCWVHILDNDTVSDNDTGALSQDALLRISIPLDSNMRPEKCRRFVHPQWQLLHLNGTFPNTSDADMEPCVDGWVYDRISFSSTIVTEWDLVCDSQSLTSVAKFVFMAGMMVGGILGGHLSDSSRVGNTQIPGHGNYIGNVPFWYCIYDPGRPGFCHSRLAYPPAGGVCTILCDLSDLKLAARVCSVAHYQQ

SEQ ID NO: 19553 - protein, 761 aa, Homo sapiens
MRQDKLTGSLRRGGRCLKRQGGGVGTILSNVLKKRSCISRTAPRLLCTLEPGVDTKLKFTLEPSLGQNGFQQWYDALKAVARLSTGIPKEWRRKVWLTLADHYLHSIAIDWDKTMRFTFNERSNPDDDSMGIQIVKDLHRTGCSSYCGQEAEQDRVVLKRVLLAYARWNKTVGYCQGFNILAALILEVMEGNEGDALKIMIYLIDKVLPESYFVNNLRALSVDMAVFRDLLRMKLPELSQHLDTLQRTANKESGGGYEPPLTNVFTMQWFLTLFATCLPNQTVLKIWDSVFFEGSEIILRVSLAIWAKLGEQIECCETADEFYSTMGRLTQEMLENDLLQSHELMQTVYSMAPFPFPQLAELREKYTYNITPFPATVKPTSVSGRHSKARDSDEENDPDDEDAVVNAVGCLGPFSGFLAPELQKYQKQIKEPNEEQSLRSNNIAELSPGAINSCRSEYHAAFNSMMMERMTTDINALKRQYSRIKKKQQQQVHQVYIRADKGPVTSILPSQVNSSPVINHLLLGKKMKMTNRAAKNAVIHIPGHTGGKISPVPYEDLKTKLNSPWRTHIRVHKKNMPRTKSHPGCGDTVGLIDEQNEASKTNGLGAAEAFPSGCTATAGREGSSPEGSTRRTIEGQSPEPVFGDADVDVSAVQAKLGALELNQRDAAAETELRVHPPCQRHCPEPPSAPEENKATSKAPQGSNSKTPIFSPFPSVKPLRKSATARNLGLYGPTERTPTVHFPQMSRSFSKPGGGNSGTKKR

SEQ ID NO: 19554 - protein, 1503 aa, Homo sapiens
MRTTKVYKLVIHKKGFGGSDDELVVNPKVFPHIKLGDIVEIAHPNDEYSPLLLQVKSLKEDLQKETISVDQTVTQVFRLRPYQDVYVNVVDPKDVTLDLVELTFKDQYIGRGDMWRLKKSLVSTCAYITQKVEFAGIRAQAGELWVKNEKVMCGYISEDTRVVFRSTSAMVYIFIQMSCEMWDFDIYGDLYFEKAVNGFLADLFTKWKEKNCSHEVTVVLFSRTFYDAKSVDEFPEINRASIRQDHKGRFYEDFYKVVVQNERREEWTSLLVTIKKLFIQYPVLVRLEQAEGFPQGDNSTSAQGNYLEAINLSFNVFDKHYINRNFDRTGQMSVVITPGVGVFEVDRLLMILTKQRMIDNGIGVDLVCMGEQPLHAVPLFKLHNRSAPRDSRLGDDYNIPHWINHSFYTSKSQLFCNSFTPRIKLAGKKPASEKAKNGRDTSLGSPKESENALPIQVDYDAYDAQVFRLPGPSRAQCLTTCRSVRERESHSRKSASSCDVSSSPSLPSRTLPTEEVRSQASDDSSLGKSANILMIPHPHLHQYEVSSSLGYTSTRDVLENMMEPPQRDSSAPGRFHVGSAESMLHVRPGGYTPQRALINPFAPSRMPMKLTSNRRRWMHTFPVGMNPRTQNKDSLEDSVSTSPDPILTLSAPPVVPGFCCTVGVDWKSLTTPACLPLTTDYFPDRQGLQNDYTEGCYDLLPEADIDRRDEDGVQMTAQQVFEEFICQRLMQGYQIIVQPKTQKPNPAVPPPLSSSPLYSRGLVSRNRPEEEDQYWLSMGRTFHKVTLKDKMITVTRYLPKYPYESAQIHYTYSLCPSHSDSEFVSCWVEFSHERLEEYKWNYLDQYICSAGSEDFSLIESLKFWRTRFLLLPACVTATKRITEGEAHCDIYGDRPRADEDEWQLLDGFVRFVEGLNRIRRRHRSDRMMRKGTAMKGLQMTGPISTHSLESTAPPVGKKGTSALSALLEMEASQKCLGEQQAAVHGGKSSAQSAESSSVAMTPTYMDSPRKVSVDQTATPMLDGTSLGICTGQSMDRGNSQTFGNSQNIGEQGYSSTNSSDSSSQQLVASSLTSSSTLTEILEAMKHPSTGVQLLSEQKGLSPYCFISAEVVHWLVNHVEGIQTQAMAIDIMQKMLEEQLITHASGEAWRTFIYGFYFYKIVTDKEPDRVAMQQPATTWHTAGVDDFASFQRKWFEVAFVAEELVHSEIPAFLLPWLPSRPASYASRHSSFSRSFGGRSQAAALLAATVPEQRTVTLDVDVNNRTDRLEWCSCYYHGNFSLNAAFEIKLHWMAVTAAVLFEMVQGWHRKATSCGFLLVPVLEGPFALPSYLYGDPLRAQLFIPLNISCLLKEGSEHLFDSFEPETYWDRMHLFQEAIAHRFGFVQDKYSASAFNFPAENKPQYIHVTGTVFLQLPYSKRKFSGQQRRRRNSTSSTNQNMFCEERVGYNWAYNTMLTKTWRSSATGDEKFADRLLKDFTDFCINRDNRLVTFWTSCLEKMHASAP

SEQ ID NO: 19555 - protein, 154 aa, Homo sapiens
MLALSRHSLLSPLLSVTSFRRFYRGDSPTDSQKDMIEIPLPPWQERTDESIETKRARLLYESRKRGMLENCILLSLFAKEHLQHMTEKQLNLYDRLINEPSNDWDIYYWATEAKPAPEIFENEVMALLRDFAKNKNKEQRLRAPDLEYLFEKPR

SEQ ID NO: 19556 - protein, 204 aa, Homo sapiens
MAAAAAAAGDSDSWDADAFSVEDPVRKVGGGGTAGGDRWEGEDEDEDVKDNWDDDDDEKKEEAEVKPEVKISEKKKIAEKIKEKERQQKKRQEEIKKRLEEPEEPKVLTPEEQLADKLRLKKLQEESDLELAKETFVEIDDLKKITNSLTVLCSEKQKQEKQSKAKKKKKGVVPGGGLKATMKDDLADYGGYDGGYVQDYEDFM

SEQ ID NO: 19557 - protein, 739 aa, Homo sapiens
MFSEIRAVFSRRYLLQNTALEVFMANRTSVMFNFPDQATVKKVVYSLPRVGVGTSYGLPQARRISLATPRQLYKSSNMTQRWQRREISNFEYLMFLNTIAGRTYNDLNQYPVFPWVLTNYESEELDLTLPGNFRDLSKPIGALNPKRAVFYAERYETWEDDQSPPYHYNTHYSTATSTLSWLVRIEPFTTFFLNANDGKFDHPDRTFSSVARSWRTSQRDTSDVKELIPEFYYLPEMFVNSNGYNLGVREDEVVVNDVDLPPWAKKPEDFVRINRMALESEFVSCQLHQWIDLIFGYKQRGPEAVRALNVFHYLTYEGSVNLDSITDPVLREAMEAQIQNFGQTPSQLLIEPHPPRSSAMHLCFLPQSPLMFKDQMQQDVIMVLKFPSNSPVTHVAANTLPHLTIPAVVTVTCSRLFAVNRWHNTVGLRGAPGYSLDQAHHLPIEMDPLIANNSGVNKRQITDLVDQSIQINAHCFVVTADNRYILICGFWDKSFRVYSTETGKLTQIVFGHWDVVTCLARSESYIGGDCYIVSGSRDATLLLWYWSGRHHIIGDNPNSSDYPAPRAVLTGHDHEVVCVSVCAELGLVISGAKEGPCLVHTITGDLLRALEGPENCLFPRLISVSSEGHCIIYYERGRFSNFSINGKLLAQMEINDSTRAILLSSDGQNLVTGGDNGVVEVWQACDFKQLYIYPGCDAGIRAMDLSHDQRTLITGMASGSIVAFNIDFNRWHYEHQNRY

SEQ ID NO: 19558 - protein, 696 aa, Homo sapiens
MAEEYHRESMLVEWEQVKQRILHTLLASGEDALDFTQESEPSYISDVGPPGRSSLDNIEMAYARQIYIYNEKIVNGHLQPNLVDLCASVAELDDKSISDMWTMVKQMTDVLLTPATDALKNRSSVEVRMEFVRQALAYLEQSYKNYTLVTVFGNLHQAQLGGVPGTYQLVRSFLNIKLPAPLPGLQDGEVEGHPVWALIYYCMRCGDLLAASQVVNRAQHQLGEFKTWFQEYMNSKDRRLSPATENKLRLHYRRALRNNTDPYKRAVYCIIGRCDVTDNQSEVADKTEDYLWLKLNQVCFDDDGTSSPQDRLTLSQFQKQLLEDYGESHFTVNQQPFLYFQVLFLTAQFEAAVAFLFRMERLRCHAVHVALVLFELKLLLKSSGQSAQLLSHEPGDPPCLRRLNFVRLLMLYTRKFESTDPREALQYFYFLRDEKDSQGENMFLRCVSELVIESREFDMILGKLENDGSRKPGVIDKFTSDTKPIINKVASVAENKGLFEEAAKLYDLAKNADKVLELMNKLLSPVVPQISAPQSNKERLKNMALSIAERYRAQGISANKFVDSTFYLLLDLITFFDEYHSGHIDRAFDIIERLKLVPLNQESVEERVAAFRNFSDEIRHNLSEVLLATMNILFTQFKRLKGTSPSSSSRPQRVIEDRDSQLRSQARTLITFAGMIPYRTSGDTNARLVQMEVLMN

SEQ ID NO: 19559 - protein, 704 aa, Homo sapiens
MQIRLLRAELVVPLWQFIRQWPPGSDGWGQMEEKGQRMSSQPAGNQTSPGATEDYSYGSWYIDEPQGGEELQPEGEVPSCHTSIPPGLYHACLASLSILVLLLLAMLVRRRQLWPDCVRGRPGLPSPVDFLAGDRPRAVPAAVFMVLLSSLCLLLPDEDALPFLTLASAPSQDGKTEAPRGAWKILGLFYYAALYYPLAACATAGHTAAHLLGSTLSWAHLGVQVWQRAECPQVPKIYKYYSLLASLPLLLGLGFLSLWYPVQLVRSFSRRTGAGSKGLQSSYSEEYLRNLLCRKKLGSSYHTSKHGFLSWARVCLRHCIYTPQPGFHLPLKLVLSATLTGTAIYQVALLLLVGVVPTIQKVRAGVTTDVSYLLAGFGIVLSEDKQEVVELVKHHLWALEVCYISALVLSCLLTFLVLMRSLVTHRTNLRALHRGAALDLSPLHRSPHPSRQAIFCWMSFSAYQTAFICLGLLVQQIIFFLGTTALAFLVLMPVLHGRNLLLFRSLESSWPFWLTLALAVILQNMAAHWVFLETHDGHPQLTNRRVLYAATFLLFPLNVLVGAMVATWRVLLSALYNAIHLGQMDLSLLPPRAATLDPGYYTYRNFLKIEVSQSHPAMTAFCSLLLQAQSLLPRTMAAPQDSLRPGEEDEGMQLLQTKDSMAKGARPGASRGRARWGLAYTLLHNPTLQVFRKTALLGANGAQP

SEQ ID NO: 19560 - protein, 260 aa, Homo sapiens
MKTVRSFANEEEEAEVYLRKLQQVYKLNRKEAAAYMYYVWGSGLTLLVVQVSILYYGGHLVISGQMTSGNLIAFIIYEFVLGDCMESVGSVYSGLMQGVGAAEKVFEFIDRQPTMVHDGSLAPDHLEGRVDFENVTFTYRTRPHTQVLQNVSFSLSPGKVTALVGPSGSGKSSCVNILENFYPLEGGRVLLDGKPISAYDHKYLHRVISLVSQEPVLFARSITDNISYGLPTVPFEMVVEAAQKANAHGFIMELQDGYST

SEQ ID NO: 19561 - protein, 858 aa, Homo sapiens
MAGLLAPPYGVMETGSNNDRIPDKENTPLIEPHVPLRPANTITKVPSEKILRAGKILRNAILSRAPHMIRDRKYHLKTYRQCCVGTELVDWMMQQTPCVHSRTQAVGMWQVLLEDGVLNHVDQEHHFQDKYLFYRFLDDEHEDAPLPTEEEKKECDEELQDTMLLLSQMGPDAHMRMILRKPPGQRTVDDLEIIYEELLHIKALSHLSTTVKRELAGVLIFESHAKGGTVLFNQGEEGTSWYIILKGSVNVVIYGKGVVCTLHEGDDFGKLALVNDAPRAASIVLREDNCHFLRVDKEDFNRILRDVEANTVRLKEHDQDVLVLEKVPAGNRASNQGNSQPQQKYTVMSGTPEKILEHFLETIRLEATLNEATDSVLNDFIMMHCVFMPNTQLCPALVAHYHAQPSQGTEQEKMDYALNNKRRVIRLVLQWAAMYGDLLQEDDVSMAFLEEFYVSVSDDARMIAALKEQLPELEKIVKQISEDAKAPQKKHKVLLQQFNTGDERAQKRQPIRGSDEVLFKVYCMDHTYTTIRVPVATSVKEVISAVADKLGSGEGLIIVKMSSGGEKVVLKPNDVSVFTTLTINGRLFACPREQFDSLTPLPEQEGPTVGTVGTFELMSSKDLAYQMTIYDWELFNCVHELELIYHTFGRHNFKKTTANLDLFLRRFNEIQFWVVTEICLCSQLSKRVQLLKKFIKIAAHCKEYKNLNSFFAIVMGLSNVAVSRLALTWEKLPSKFKKFYAEFESLMDPSRNHRAYRLTVAKLEPPLIPFMPLLIKDMTFTHEGNKTFIDNLVNFEKMRMIANTARTVRYYRSQPFNPDAAQANKNHQDVRSYVRQLNVIDNQRTLSQMSHRLEPRRP

SEQ ID NO: 19562 - protein, 629 aa, Homo sapiens
MMEPEEYRERGREMVDYICQYLSTVRERRVTPDVQPGYLRAQLPESAPEDPDSWDSIFGDIERIIMPGVVHWQSPHMHAYYPALTSWPSLLGDMLADAINCLGFTWASSPACTELEMNVMDWLAKMLGLPEHFLHHHPSSQGGGVLQSTVSESTLIALLAARKNKILEMKTSEPDADESCLNARLVAYASDQAHSSVEKAGLISLVKMKFLPVDDNFSLRGEALQKAIEEDKQRGLVPVFVCATLGTTGVCAFDCLSELGPICAREGLWLHIDAAYAGTAFLCPEFRGFLKGIEYADSFTFNPSKWMMVHFDCTGFWVKDKYKLQQTFSVNPIYLRHANSGVATDFMGTEMAKYFESLVRNDPSFEIPAKRHLGLVVFRLKGPNCLTENVLKEIAKAGRLFLIPATIQDKLIIRFTVTSQFTTRDDILRDWNLIRDAATLILSQHCTSQPSPRVGNLISQIRGARAWACGTSLQSVSGAGDDPVQARKIIKQPQRVGAGPMKRENGLHLETLLDPVDDCFSEEAPDATKHKLSSFLFSYLSVQTKKKTVRSLSCNSVPVSAQKPLPTEASVKNGGSSRVRIFSRFPEDMMMLKKSAFKKLIKFYSVPSFPECSSQCGLQLPCCPLQAMV

SEQ ID NO: 19563 - protein, 329 aa, Homo sapiens
MSTDSCCHHPGVPIFHDALKGWSCCRKRTVDFSEFLNIKGCTMGPHCAEKLPEAPQPEGPATSSSLQEQKPLNVIPKSAETLRRERPKSELPLKLLPLNISQALEMALEQKELDQEPGAGLDSLIRTGSSCQNPGCDAVYQGPESDATPCTYHPGAPRFHEGMKSWSCCGIQTLDFGAFLAQPGCRVGRHDWGKQLPASCRHDWHQTDSLVVVTVYGQIPLPAFNWVKASQTELHVHIVFDGNRVFQAQMKLWGVINVEQSSVFLMPSRVEISLVKADPGSWAQLEHPDALAKKARAGVVLEMDEEESDDSDDDLSWTEEEEEEEAMGE

SEQ ID NO: 19564 - protein, 302 aa, Homo sapiens
MRRGRLLEIALGFTVLLASYTSHGADANLEAGNVKETRASRAKRRGGGGHDALKGPNVCGSRYNAYCCPGWKTLPGGNQCIVPICRHSCGDGFCSRPNMCTCPSGQIAPSCGSRSIQHCNIRCMNGGSCSDDHCLCQKGYIGTHCGQPVCESGCLNGGRCVAPNRCACTYGFTGPQCERDYRTGPCFTVISNQMCQGQLSGIVCTKTLCCATTSMNVKLEHTTVANMLYVPIQQEASNVAAVPGGLEMALSALIWTNVPMEPICAASMQTARIPWDLTAVCARKDTQVMASLVQTLMSALRT

SEQ ID NO: 19565 - protein, 57 aa, Homo sapiens
MRKGVLKDPEIADLFYKDDPEELFIGLHEIGHGSFGAVYFATNAHTSEVVAIKKMSY

SEQ ID NO: 19566 - protein, 581 aa, Homo sapiens; identical to SEQ ID NO: 9415

SEQ ID NO: 19567 - protein, 1122 aa, Homo sapiens
MPAGGRAGSLKDPDVAELFFKDDPEKLFSDLREIGHGSFGAVYFARDVRNSEVVAIKKMSYSGKQSNEKWQDIIKEVRFLQKLRHPNTIQYRGCYLREHTAWLVMEYCLGSASDLLEVHKKPLQEVEIAAVTHGALQGLAYLHSHNMIHRDVKAGNILLSEPGLVKLGDFGSASIMAPANSFVGTPYWMAPEVILAMDEGQYDGKVDVWSLGITCIELAERKPPLFNMNAMSALYHIAQNESPVLQSGHWSEYFRNFVDSCLQKIPQDRPTSEVLLKHRFVLRERPPTVIMDLIQRTKDAVRELDNLQYRKMKKILFQEAPNGPGAEAPEEEEEAEPYMHRAGTLTSLESSHSVPSMSISASSQSSSVNSLADASDNEEEEEEEEEEEEEEEGPEAREMAMMQEGEHTVTSHSSIIHRLPGSDNLYDDPYQPEITPSPLQPPAAPAPTSTTSSARRRAYCRNRDHFATIRTASLVSRQIQEHEQDSALREQLSGYKRMRRQHQKQLLALESRLRGEREEHSARLQRELEAQRAGFGAEAEKLARRHQAIGEKEARAAQAEERKFQQHILGQQKKELAALLEAQKRTYKLRKEQLKEELQENPSTPKREKAEWLLRQKEQLQQCQAEEEAGLLRRQRQYFELQCRQYKRKMLLARHSLDQDLLREDLNKKQTQKDLECALLLRQHEATRELELRQLQAVQRTRAELTRLQHQTELGNQLEYNKRREQELRQKHAAQVRQQPKSLKERSIVGQEEAGTWSLWGKEDESLLDEEFELGWVQGPALTPVPEEEEEEEEGAPIGTPRDPGDGCPSPDIPPEPPPTHLRPCPASQLPGLLSHGLLAGLSFAVGSSSGLLPLLLLLLLPLLAAQGGGGLQAALLALEVGLVGLGASYLLLCTALHLPSSLFLLLAQGTALGAVLGLSWRRGLMGVPLGLGAAWLLAWPGLALPLVAMAAGGRWVRQQGPRVRRGISRLWLRVLLRLSPMAFRALQGCGAVGDRGLFALYPKTNKDGFRSRLPVPGPRRRNPRTTQHPLALLARVWVLCKGWNWRLARASQGLASHLPPWAIHTLASWGLLRGERPTRIPRLLPRSQRQLGPPASRQPLPGTLAGRRSRTRQSRALPPWR

SEQ ID NO: 19568 - protein, 679 aa, Homo sapiens
MVELINKDYADFVNLSTNLVGMDKALNQLSVPLGQLREEVLSLRSSVSEGIRAVDERMSKQEDIRKKKMCVLRLIQVIRSVEKIEKILNSQSSKETSALEASSPLLTGQILERIATEFNQLQFHAVQSKGMPLLDKVRPRIAGITAMLQQSLEGLLLEGLQTSDVDIIRHCLRTYATIDKTRDAEALVGQVLVKPYIDEVIIEQFVESHPNGLQVMYNKLLEFVPHHCRLLREVTGGAISSEKGNTVPGYDFLVNSVWPQIVQGLEEKLPSLFNPGNPDAFHEKYTISMDFVRRLERQCGSQASVKRLRAHPAYHSFNKKWNLPVYFQIRFREIAGSLEAALTDVLEDAPAESPYCLLASHRTWSSLRRCWSDEMFLPLLVHRLWRLTLQILARYSVFVNELSLRPISNESPKEIKKPLVTGSKEPSITQGNTEDQGSGPSETKPVVSISRTQLVYVVADLDKLQEQLPELLEIIKPKLEMIGFKNFSSISAALEDSQSSFSACVPSLSSKIIQDLSDSCFGFLKSALEVPRLYRRTNKEVPTTASSYVDSALKPLFQLQSGHKDKLKQAIIQQWLEGTLSESTHKYYETVSDVLNSVKKMEESLKRLKQARKTTPANPVGPSGGMSDDDKIRLQLALDVEYLGEQIQKLGLQASDIKSFSALAELVAAAKDQATAEQP

SEQ ID NO: 19569 - protein, 373 aa, Homo sapiens
MAEASRPRLSIPCSSITDVRTTTALEMPDRENTFVVKVEGPSEYIMETVDAQHVKAWVSDIQECLSPGPCPATSPRPMTLPLAPGTSFLTRENTDSLELSCLNHSESLPSQDLLLGPSESNDRLSQGAYGGLSDRPSASISPSSASIAASHFDSMELLPPELPPRIPIEEGPPTGTVHPLSAPYPPLDTPETATGSFLFQGEPEGGEGDQPLSGYPWFHGMLSRLKAAQLVLTGGTGSHGVFLVRQSETRRGEYVLTFNFQGKAKHLRLSLNEEGQCRVQHLWFQSIFDMLEHFRVHPIPLESGGSSDVVLVSYVPSSQRQQGEQSRSAGEEVPVHPRSEAGSRLGAMRGCAREMDATPMPPAPSCPSERVTV

SEQ ID NO: 19570 - protein, 247 aa, Homo sapiens
MVSKLSQLQTELLAALLESGLSKEALIQALGEPGPYLLAGEGPLDKGESCGGGRGELAELPNGLGETRGSEDETDDDGEDFTPPILKELENLSPEEAAHQKAVVETLLQEDPWRVAKMVKSYLQQHNIPQREVVDTTGLNQSHLSQHLNKGTPMKTQKRAALYTWYVRKQREVAQQFTHAGQGGLIEEPTGDELPTKKGRRNRFKWGPASQQILFQAYERQKNPSKEERETLVEECNRCALWTACDQ

SEQ ID NO: 19571 - protein, 351 aa, Homo sapiens
MSGHPGSWEMNSVAFEDVAVNFTQEEWALLDPSQKNLYRDVMQETFRNLASIGNKGEDQSIEDQYKNSSRNLRHIISHSGNNPYGCEECGKKPCTCKQCQKTSLSVTRVHRDTVMHTGNGHYGCTICEKVFNIPSSFQIHQRNHTGEKPYECMECGKALGFSRSLNRHKRIHTGEKRYECKQCGKAFSRSSHLRDHERTHTGEKPYECKHCGKAFRYSNCLHYHERTHTGEKPYVCMECGKAFSCLSSLQGHIKAHAGEEPYPCKQCGKAFRYASSLQKHEKTHIAQKPYVCNNCGKGFRCSSSLRDHERTHTGEKPYECQKCGKAFSRASTLWKHKKTHTGEKPYKCKKM

SEQ ID NO: 19572 - protein, 977 aa, Homo sapiens
MTSEEKKERPISMINEASNYNVTSDYAVHPMSPVGRTSRASKKVHNFGKRSNSIKRNPNAPVVRRGWLYKQDSTGMKLWKKRWFVLSDLCLFYYRDEKEEGILGSILLPSFQIALLTSEDHINRKYAFKAAHPNMRTYYFCTDTGKEMELWMKAMLDAALVQTEPVKRVDKITSENAPTKETNNIPNHRVLIKPEIQNNQKNKEMSKIEEKKALEAEKYGFQKDGQDRPLTKINSVKLNSLPSEYESGSACPAQTVHYRPINLSSSENKIVNVSLADLRGGNRPNTGPLYTEADRVIQRTNSMQQLEQWIKIQKGRGHEEETRGVISYQTLPRNMPSHRAQIMARYPEGYRTLPRNSKTRPESICSVTPSTHDKTLGPGAEEKRRSMRDDTMWQLYEWQQRQFYNKQSTLPRHSTLSSPKTMVNISDQTMHSIPTSPSHGSIAAYQGYSPQRTYRSEVSSPIQRGDVTIDRRHRAHHPKHVYVPDRRSVPAGLTLQSVSPQSLQGKTLSQDEGRGTLYKYRPEEVDIDAKLSRLCEQDKVVHALEEKLQQLHKEKYTLEQALLSASQEIEMHADNPAAIQTVVLQRDDLQNGLLSTCRELSRATAELERAWREYDKLEYDVTVTRNQMQEQLDHLGEVQTESAGIQRAQIQKELWRIQDVMEGLSKHKQQRGTTEIGMIGSKPFSTVKYKNEEEEVVPPRPPLPRSYDFTEQPPIIPPLPSDSSSLLCYSRGPVHLPEEKKMYQVQGYPRNGSHCGPDYRLYKSEPELTTVAEVDESNGEEKSEPVSEIETSVVKGSHFPVGVVPPRAKSPTPESSTIASYVTLRKTKKMMDLRTERPRSAVEQLCLAESTRPRMTVEEQMERIRRHQQACLREKKKGLNVIGASDQSPLQSPSNLRDNPFRTTQTRRRDDKELDTAIRENDVKPDHETPATEIVQLKETEPQNVDFSKELKKTENISYEMLFEPEPNGVNSVEMMD

SEQ ID NO: 19573 - protein, 1125 aa, Homo sapiens
MRFWLRTEEMALEEMVQRLNAVSKHTDEIMHQDIVPLCAADIQDQLKKRFAYLSGGRGQDGSPVITFPDYPAFSEIPDKEFQNVMTYLTSIPSLQDAGIGFILVIDRRRDKWTSVKASVLRIAASFPANLQLVLVLRPTGFFQRTLSDIAFKFNRDDFKMKVPVIMLSSVPDLHGYIDKSQLTEDLGGTLDYCHSRWLCQRTAIESFALMVKQTAQMLQSFGTELAETELPNDVQSTSSVLCAHTEKKDKAKEDLRLALKEGHSVLESLRELQAEGSEPSVNQDQLDNQATVQRLLAQLNETEAAFDEFWAKHQQKLEQCLQLRHFEQGFREVKAILDAASQKIATFTDIGNSLAHVEHLLRDLASFEEKSGVAVERARALSLDGEQLIGNKHYAVDSIRPKCQELRHLCDQFSAEIARRRGLLSKSLELHRRLETSMKWCDEGIYLLASQPVDKCQSQDGAEAALQEIEKFLETGAENKIQELNAIYKEYESILNQDLMEHVRKVFQKQASMEEVFHRRQASLKKLAARQTRPVQPVAPRPEALAKSPCPSPGIRRGSENSSSEGGALRRGPYRRAKSEMSESRQGRGSAGEEEESLAILRRHVMSELLDTERAYVEELLCVLEGYAAEMDNPLMAHLLSTGLHNKKDVLFGNMEEIYHFHNRIFLRELENYTDCPELVGRCFLERMEDFQIYEKYCQNKPRSESLWRQCSDCPFFQECQRKLDHKLSLDSYLLKPVQRITKYQLLLKEMLKYSRNCEGAEDLQEALSSILGILKAVNDSMHLIAITGYDGNLGDLGKLLMQGSFSVWTDHKRGHTKVKELARFKPMQRHLFLHEKAVLFCKKREENGEGYEKAPSYSYKQSLNMAAVGITENVKGDAKKFEIWYNAREEVYIVQAPTPEIKAAWVNEIRKVLTSQLQACREASQHRALEQSQSLPLPAPTSTSPSRGNSRNIKKLEERKTDPLSLEGYVSSAPLTKPPEKGKGWSKTSHSLEAPEDDGGWSSAEEQINSSDAEEDGGLGPKKLVPGKYTVVADHEKGGPDALRVRSGDVVELVQEGDEGLWYVRDPTTGKEGWVPASSLSVRLGPSGSAQCLSSSESSPGSAVLSNSSSCSEGGQAPFSDLQG

SEQ ID NO: 19574 - protein, 346 aa, Homo sapiens
MESEEVYQRQVLSISCIIFGIVIVGMFCAAFYFKSKKQAKQIQEQLKVPQNGKSYSLKASSTMAKSENLVKSHVQLQNYSKVERHPVTALEKMMESSFVGPQSFPEVPSPDRGSQSVKHHRSLSSCCSPGQRSGMLHRNAFRRTPPSPRSRLGGIVGPAYQQLEESRIPDQDTIPCQGYSSSGLKTQRNTSINMQLPSRETNPYFNSLEQKDLVGYSSTRASSVPIIPSVGLEETCLQMPGISEVKSIKWCKNSYSADVVNVSIPVSDCLIAEQQEVKILLETVQEQIRILTDARRSEDYELASVETEDSASENTAFLPLSPTAKSEREAQFVLRNEIQRDSALTK

SEQ ID NO: 19575 - protein, 170 aa, Homo sapiens
MLSEVLLVSAPGKVILHGEHAVVHGKVALAVSLNLRTFLRLQPHSNGKVDLSLPNIGIKRAWDVARLQSLDTSFLEQGDVTTPTSEQVEKLKEVAGLPDDCAVTERLAVLAFLYLYLSICRKQRALPSLDIVVWSELPPGAGLGSSAAYSVCLAAALLTVCEEIPNPLKD

SEQ ID NO: 19576 - protein, 451 aa, Homo sapiens
MCWVRSDNKRPCLEFSQLSVKDSFRDLFIPRIETILMMYTRNNLNCAEPLFEQNNSLNVNFNTQKKTVWLIHGYRPVGSIPLWLQNFVRILLNEEDMNVIVVDWSRGATTFIYNRAVKNTRKVAVSLSVHIKNLLKHGASLDNFHFIGVSLGAHISGFVGKIFHGQLGRITGLDPAGPRFSRKPPYSRLDYTDAKFVDVIHSDSNGLGIQEPLGHIDFYPNGGNKQPGCPKSIFSGIQFIKCNHQRAVHLFMASLETNCNFISFPCRSYKDYKTSLCVDCDCFKEKSCPRLGYQAKLFKGVLKERMEGRPLRTTVFLDTSGTYPFCTYYFVLSIIVPDKTMMDGSFSFKLLNQLGMIEEPRLYEKNKPFYKLQEVKILAQFYNDFVNISSIGLTYFQSSNLQCSTCTYKIQSLMLKSLTYPERPPLCRYNIVLKDREEVFLNPNTCTPKNT

SEQ ID NO: 19577 - protein, 584 aa, Homo sapiens
MPSERCLSIQEMLTGQRLCHSESHNDSVLAALNQQRSDGILCDITLIAEEQKFHAHKAVLAACSDYFRILLEPGVIQDVLAAGSHLQLLELLNLCSHYLIQELNSFNYLDLYRLADLFNLTLLEKAVIDFLVKHLSELLKSRPEEVLTLPYCLLQEVLKSDRLTSLSEEQIWQLAVRWLEHNCHYQYMDELLQYIRFGLMDVDTLHTVALSHPLVQASETATALVNEALEYHQSIYAQPVWQTRRTKPRFQSDTLYIIGGKKREVCKVKELRYFNPVDQENALIAAIANWSELAPMPVGRSHHCVAVMGDFLFVAGGEVEHASGRTCAVRTACRYDPRSNSWAEIAPMKNCREHFVLGAMEEYLYAVGGRNELRQVLPTVERYCPKKNKWTFVQSFDRSLSCHAGYVADGLLWISGGVTNTAQYQNRLMVYEPNQNKWISRSPMLQRRVYHSMAAVQRKLYVLGGNDLDYNNDRILVRHIDSYNIDTDQWTRCNFNLLTGQNESGVAVHNGRIYLVGGYSIWTNEPLACIQVLDVSREGKEEVFYGPTLPFASNGIAACFLPAPYFTCPNLQTLQVPHHRIGTI

SEQ ID NO: 19578 - protein, 245 aa, Homo sapiens
MLSPAPEEPLLLAELKPGRPHQFDWKSSCETWSVAFSPDGSWFAWSQGHCIVKLIPWPLEEQFIPKGFEAKSRSSKNETKGRGSPKEKTLDCGQIVWGLAFSPWPSPPSRKLWARHHPQVPDVSCLVLATGLNDGQIKIWEVQTGLLLLNLSGHQDVVRDLSFTPSGSLILVSASRDKTLRIWDLNKHGKQIQVLSGHLQWVYCCSISPDCSMLCSAAGEKSVFLWSMRSYTLIRKLEGHQSSVV

SEQ ID NO: 19579 - protein, 1937 aa, Homo sapiens
MASGLGSPSPCSAGSEEEDMDALLNNSLPPPHPEDPEEDLSETETPKLKKKKKPKKPRDPKIPKSKRQKKERMLLCRQLGDSSGEGPEFVEEEEEVALRSDSEGSDYTPGKKKKKKLGPKKEKKSKSKRKEEEEEEDDDDDSKEPKSSAQLLEDWGMEDIDHVFSEEDYRTLTNYKAFSQFVRPLIAAKNPKIAVSKMMMVLGAKWREFSTNNPFKGSSGASVAAAAAAAVAVVESMVTATEVAPPPPPVEVPIRKAKTKEGKGPNARRKPKGSPRVPDAKKPKPKKVAPLKIKLGGFGSKRKRSSSEDDDLDVESDFDDASINSYSVSDGSTSRSSRSRKKLRTTKKKKKGEEEVTAVDGYETDHQDYCEVCQQGGEIILCDTCPRAYHMVCLDPDMEKAPEGKWSCPHCEKEGIQWEAKEDNSEGEEILEEVGGDLEEEDDHHMEFCRVCKDGGELLCCDTCPSSYHIHCLNPPLPEIPNGEWLCPRCTCPALKGKVQKILIWKWGQPPSPTPVPRPPDADPNTPSPKPLEGRPERQFFVKWQGMSYWHCSWVSELQLELHCQVMFRNYQRKNDMDEPPSGDFGGDEEKSRKRKNKDPKFAEMEERFYRYGIKPEWMMIHRILNHSVDKKGHVHYLIKWRDLPYDQASWESEDVEIQDYDLFKQSYWNHRELMRGEEGRPGKKLKKVKLRKLERPPETPTVDPTVKYERQPEYLDATGGTLHPYQMEGLNWLRFSWAQGTDTILADEMGLGKTVQTAVFLYSLYKEGHSKGPFLVSAPLSTIINWEREFEMWAPDMYVVTYVGDKDSRAIIRENEFSFEDNAIRGGKKASRMKKEASVKFHVLLTSYELITIDMAILGSIDWACLIVDEAHRLKNNQSKFFRVLNGYSLQHKLLLTGTPLQNNLEELFHLLNFLTPERFHNLEGFLEEFADIAKEDQIKKLHDMLGPHMLRRLKADVFKNMPSKTELIVRVELSPMQKKYYKYILTRNFEALNARGGGNQVSLLNVVMDLKKCCNHPYLFPVAAMEAPKMPNGMYDGSALIRASGKLLLLQKMLKNLKEGGHRVLIFSQMTKMLDLLEDFLEHEGYKYERIDGGITGNMRQEAIDRFNAPGAQQFCFLLSTRAGGLGINLATADTVIIYDSDWNPHNDIQAFSRAHRIGQNKKVMIYRFVTRASVEERITQVAKKKMMLTHLVVRPGLGSKTGSMSKQELDDILKFGTEELFKDEATDGGGDNKEGEDSSVIHYDDKAIERLLDRNQDETEDTELQGMNEYLSSFKVAQYVVREEEMGEEEEVEREIIKQEESVDPDYWEKLLRHHYEQQQEDLARNLGKGKRIRKQVNYNDGSQEDRGVCGRPRPPPMGRSTRAVGPAHLPSLPPDWQDDQSDNQSDYSVASEEGDEDFDERSEAPRRPSRKGLRNDKDKPLPPLLARVGGNIEVLGFNARQRKAFLNAIMRYGMPPQDAFTTQWLVRDLRGKSEKEFKAYVSLFMRHLCEPGADGAETFADGVPREGLSRQHVLTRIGVMSLIRKKVQEFEHVNGRWSMPELAEVEENKKMSQPGSPSPKTPTPSTPGDTQPNTPAPVPPAEDGIKIEENSLKEEESIEGEKEVKSTAPETAIECTQAPAPASEDEKVVVEPPEGEEKVEKAEVKERTEEPMETEPKGAADVEKVEEKSAIDLTPIVVEDKEEKKEEEEKKEVMLQNGETPKDLNDEKQKKNIKQRFMFNIADGGFTELHSLWQNEERAATVTKKTYEIWHRRHDYWLLAGIINHGYARWQDIQNDPRYAILNEPFKGEMNRGNFLEIKNKFLARRFKLLEQALVIEEQLRRAAYLNMSEDPSHPSMALNTRFAEVECLAESHQHLSKESMAGNKPANAVLHKVLKQLEELLSDMKADVTRLPATIARIPPVAVRLQMSERNILSRLANRAPEPTPQQVAQQQ

SEQ ID NO: 19580 - protein, 868 aa, Homo sapiens
MENVLAKALYDNVAESPDELSFRKGDIMTVLEQDTQGLDGWWLCSLHGRQGIVPGNRLKILVGMYDKKPAGPGPGPPATPAQPQPGLHAPAPPASQYTPMLPNTYQPQPDSVYLVPTPSKAQQGLYQVPGPSPQFQSPPAKQTSTFSKQTPHHPFPSPATDLYQVPPGPGGPAQDIYQVPPSAGMGHDIYQVPPSMDTRSWEGTKPPAKVVVPTRVGQGYVYEAAQPEQDEYDIPRHLLAPGPQDIYDVPPVRGLLPSQYGQEVYDTPPMAVKGPNGRDPLLEVYDVPPSVEKGLPPSNHHAVYDVPPSVSKDVPDGPLLREETYDVPPAFAKAKPFDPARTPLVLAAPPPDSPPAEDVYDVPPPAPDLYDVPPGLRRPGPGTLYDVPRERVLPPEVADGGVVDSGVYAVPPPAEREAPAEGKRLSASSTGSTRSSQSASSLEVAGPGREPLELEVAVEALARLQQGVSATVAHLLDLAGSAGATGSWRSPSEPQEPLVQDLQAAVAAVQSAVHELLEFARSAVGNAAHTSDRALHAKLSRQLQKMEDVHQTLVAHGQALDAGRGGSGATLEDLDRLVACSRAVPEDAKQLASFLHGNASLLFRRTKATAPGPEGGGTLHPNPTDKTSSIQSRPLPSPPKFTSQDSPDGQYENSEGGWMEDYDYVHLQGKEEFEKTQKELLEKGSITRQGKSQLELQQLKQFERLEQEVSRPIDHDLANWTPAQPLAPGRTGGLGPSDRQLLLFYLEQCEANLTTLTNAVDAFFTAVATNQPPKIFVAHSKFVILSAHKLVFIGDTLSRQAKAADVRSQVTHYSNLLCDLLRGIVATTKAAALQYPSPSAAQDMVERVKELGHSTQQFRRVLGQLAAA

SEQ ID NO: 19581 - protein, 1278 aa, Homo sapiens
MHQDQRFRMDSLEEPQKKVFKARKTMRVSDRQQLEAVYKVKEELLKTDVKLLNGNHENGDLDPTSPLENMDYIKDKEEVNGIEEICFDPEGSKAEWKETPCILSVNVKNKQDDDLNCEPLSPHNITPEPVSKLPAEPVSGDPAPGDLDAGDPASGVLASGDSTSGDPTSSEPSSSDAASGDATSGDAPSGDVSPGDATSGDATADDLSSGDPTSSDPIPGEPVPVEPISGDCAADDIASSEITSVDLASGAPASTDPASDDLASGDLSSSELASDDLATGELASDELTSESTFDRTFEPKSVPVCEPVPEIDNIEPSSNKDDDFLEKNGADEKLEQIQSKDSLDEKNKADNNIDANEETLETDDTTICSDRPPENEKKVEEDIITELALGEDAISSSMEIDQGEKNEDETSADLVETINENVIEDNKSENILENTDSMETDEIIPILEKLAPSEDELTCFSKTSLLPIDETNPDLEEKMESSFGSPSKQESSESLPKEAFLVLSDEEDISGEKDESEVISQNETCSPAEVESNEKDNKPEEEEQVIHEDDERPSEKNEFSRRKRSKSEDMDNVQSKRRRYMEEEYEAEFQVKITAKGDINQKLQKVIQWLLEEKLCALQCAVFDKTLAELKTRVEKIECNKRHKTVLTELQAKIARLTKRFEAAKEDLKKRHEHPPNPPVSPGKTVNDVNSNNNMSYRNAGTVRQMLESKRNVSESAPPSFQTPVNTVSSTNLVTPPAVVSSQPKLQTPVTSGSLTATSVLPAPNTATVVATTQVPSGNPQPTISLQPLPVILHVPVAVSSQPQLLQSHPGTLVTNQPSGNVEFISVQSPPTVSGLTKNPVSLPSLPNPTKPNNVPSVPSPSIQRNPTASAAPLGTTLAVQAVPTAHSIVQATRTSLPTVGPSGLYSPSTNRGPIQMKIPISAFSTSSAAEQNSNTTPRIENQTNKTIDASVSKKAADSTSQCGKATGSDSSGVIDLTMDDEESGASQDPKKLNHTPVSTMSSSQPVSRPLQPIQPAPPLQPSGVPTSGPSQTTIHLLPTAPTTVNVTHRPVTQVTTRLPVPRAPANHQVVYTTLPAPPAQAPLRGTVMQAPAVRQVNPQNSVTVRVPQTTTYVVNNGLTLGSTGPQLTVHHRPPQVHTEPPRPVHPAPLPEAPQPQRLPPEAASTSLPQKPHLKLARVQSQNGIVLSWSVLEVDRSCATVDSYHLYAYHEEPSATVPSQWKKIGEVKALPLPMACTLTQFVSGSKYYFAVRAKDIYGRFGPFCDPQSTDVISSTQSS

SEQ ID NO: 19582 - protein, 557 aa, Homo sapiens
MSNKEYKFYLHSLLSLRQDEDSSFLSQNETEDILAFTRQYFDTSQSQCMETKTLQKKSGIVSSEGANESTLPQLAAMIITLSLQGVCLGQGNLPSPDYFTEYIFSSLNRTNTLRLSELDQLLNTLWTRSTCIKNEKIHQFQRKQNNIITHDQDYSNFSSSMEKESEDGPVSWDQTCFSARQLVEIFLQKGLSLISKEDFKQMSPGIIQQLLSCSCHLPKDQQAKLPPTTLEKYGYSTVAVTLLTLGSMLGTALVLFHSCEENYRLILQLFVGLAVGTLSGDALLHLIPQVLGLHKQEAPEFGHFHESKGHIWKLMGLIGGIHGFFLIEKCFILLVSPNDKQGLSLVNGHVGHSHHLALNSELSDQAGRGKSASTIQLKSPEDSQAAEMPIGSMTASNRKCKAISLLAIMILVGDSLHNFADGLAIGAAFSSSSESGVTTTIAILCHEIPHEMGDFAVLLSSGLSMKTAILMNFISSLTAFMGLYIGLSVSADPCVQDWIFTVTAGMFLYLSLVEMLPEMTHVQTQRPWMMFLLQNFGLILGWLSLLLLAIYEQNIKI

SEQ ID NO: 19583 - protein, 907 aa, Homo sapiens
MNRFRVSKFRHTEARPPRRESWISDIRAGTAPSCRNHIKSSCSLIAFNSDRPGVLGIVPLQGQGEDKRRVAHLGCHSGSADRTVKLWRLPGPGQALPSAPGVVLGPEDLPVEVLQFHPTSDGILVSAAGTTVKVWDAAKQQPLTELAAHGDLVQSAVWSRDGALVGTACKDKQLRIFDPRTKPRASQSTQAHENSRDSRLAWMGTWEHLVSTGFNQMREREVKLWDTRFFSSALASLTLDTSLGCLVPLLDPDSGLLVLAGKGERQLYCYEVVPQQPALSPVTQCVLESVLRGAALVPRQALAVMSCEVLRVLQLSDTAIVPIGYHVPRKAVEFHEDLFPDTAGCVPATDPHSWWAGDNQQVQKVSLNPACRPHPSFTSCLVPPAEPLPDTAQPAVMETPVGDADASEGFSSPPSSLTSPSTPSSLGPSLSSTSGIGTSPSLRSLQSLLGPSSKFRHAQGTVLHRDSHITNLKGLNLTTPGESDGFCANKLRVAVPLLSSGGQVAVLELRKPGRLPDTALPTLQNGAAVTDLAWDPFDPHRLAVAGEDARIRLWRVPAEGLEEVLTTPETVLTGHTEKICSLRFHPLAANVLASSSYDLTVRIWDLQAGADRLKLQGHQDQIFSLAWSPDGQQLATVCKDGRVRVYRPRSGPEPLQEGPGPKGGRGARIVWVCDGRCLLVSGFDSQSERQLLLYEAEALAGGPLAVLGLDVAPSTLLPSYDPDTGLVLLTGKGDTRVFLYELLPESPFFLECNSFTSPDPHKGLVLLPKTECDVREVELMRCLRLRQSSLEPVAFRLPRVRKEFFQDDVFPDTAVIWEPVLSAEAWLQGANGQPWLLSLQPPDMSPVSQAPREAPARRAPSSAQYLEEKSDQQKKEELLNAMVAKLGNREDPLPQDSFEGVDEDEWD

SEQ ID NO: 19584 - protein, 665 aa, Homo sapiens
MFPVLEPHQVGLIRSYNSKTMTCFQELVTFRDVAIDFSRQEWEYLDPNQRDLYRDVMLENYRNLVSLGGHSISKPVVVDLLERGKEPWMILREETQFTDLDLQCEIISYIEVPTYETDISSTQLQSIYKREKLYECKKCQKKFSSGYQLILHHRFHVIERPYECKECGKNFRSGYQLTLHQRFHTGEKPYECTECGKNFRSGYQLTVHQRFHTGEKTYECRQCGKAFIYASHIVQHERIHTGGKPYECQECGRAFSQGGHLRIHQRVHTGEKPYKCKECGKTFSRRSNLVEHGQFHTDEKPYICEKCGKAFRRGHQLTVHQRVHTGKKPYECKECGKGYTTASYFLLHQRIHKGGKPYECKECKKTFTLYRNLTRHQNIHTGEKLFECKQCGKTYTTGSKLFQHQKTHTGEKPYECKECGKAFSLYGYLKQHQKIHTGMKHFECKECKKTFTLYRNLTRHQNIHTGKKLFECQECGKAYSTGSNLIQHRKTHTGEKPYKCKECGKTFSLHGYLNQHQKIHTGMKPYECKVCRKTFTFYRNLTLHQSIHTDEKPFECKECGKTFRRSSHLTAHQSIHADKKPYECKECGKAFKMYGYLTQHQKIHTGGKPYECKECGKAFSRASNLVQHERIHTGEKPYVCKQCGKTFRYGSALKAHQRIHRSIKV

SEQ ID NO: 19585 - protein, 972 aa, Homo sapiens
MLAMKHQQELLEHQRKLERHRQEQELEKQHREQKLQQLKNKEKGKESAVASTEVKMKLQEFVLNKKKALAHRNLNHCISSDPRYWYGKTQHSSLDQSSPPQSGVSTSYNHPVLGMYDAKDDFPLRKTASEPNLKLRSRLKQKVAERRSSPLLRRKDGPVVTALKKRPLDVTDSACSSAPGSGPSSPNNSSGSVSAENGIAPAVPSIPAETSLAHRLVAREGSAAPLPLYTSPSLPNITLGLPATGPSAGTAGQQDAERLTLPALQQRLSLFPGTHLTPYLSTSPLERDGGAAHSPLLQHMVLLEQPPAQAPLVTDWYLSGLGALPLHAQSLVGADRVSPSIHKLRQHRPLGRTQSAPLPQNAQALQHLVIQQQHQQFLEKHKQQFQQQQLQMNKIIPKPSEPARQPESHPEETEEELREHQALLDEPYLDRLPGQKEAHAQAGVQVKQEPIESDEEEAEPPREVEPGQRQPSEQELLFRQQALLLEQQRIHQLRNYQASMEAAGIPVSFGGHRPLSRAQSSPASATFPVSVQEPPTKPRFTTGLVYDTLMLKHQCTCGSSSSHPEHAGRIQSIWSRLQETGLRGKCECIRGRKATLEELQTVHSEAHTLLYGTNPLNRQKLDSKKLLGSLASVFVRLPCGGVGVDSDTIWNEVHSAGAARLAVGCVVELVFKVATGELKNGFAVVRPPGHHAEESTPMGFCYFNSVAVAAKLLQQRLSVSKILIVDWDVHHGNGTQQAFYSDPSVLYMSLHRYDDGNFFPGSGAPDEVGTGPGVGFNVNMAFTGGLDPPMGDAEYLAAFRTVVMPIASEFAPDVVLVSSGFDAVEGHPTPLGGYNLSARCFGYLTKQLMGLAGGRIVLALEGGHDLTAICDASEACVSALLGNELDPLPEKVLQQRPNANAVRSMEKVMEIHSKYWRCLQRTTSTAGRSLIEAQTCENEEAETVTAMASLSVGVKPAEKRPDEEPMEEEPPL

SEQ ID NO: 19586 - protein, 191 aa, Homo sapiens
MFPFYSCWRTGLLLLLLAVAVRESWQTEEKTCDLVGEKGKESEKELALVKRLKPLFNKSFESTVGQGSDTYIYIFRVCREAGNHTSGAGLVQINKSNGKETVVGRLNETHIFNGSNWIMLIYKGGDEYDNHCGKEQRRAVVMISCNRHTLADGCDFVCRSKPRNVPAAYRGVGDDQLGEESEERDDHLLPM

SEQ ID NO: 19587 - protein, 1130 aa, Homo sapiens
MGSEDHGAQNPSCKIMTFRPTMEEFKDFNKYVAYIESQGAHRAGLAKIIPPKEWKPRQTYDDIDDVVIPAPIQQVVTGQSGLFTQYNIQKKAMTVGEYRRLANSEKYCTPRHQDFDDLERKYWKNLTFVSPIYGADISGSLYDDDVAQWNIGSLRTILDMVERECGTIIEGVNTPYLYFGMWKTTFAWHTEDMDLYSINYLHFGEPKSWYAIPPEHGKRLERLAIGFFPGSSQGCDAFLRHKMTLISPIILKKYGIPFSRITQEAGEFMITFPYGYHAGFNHGFNCAESTNFATLRWIDYGKVATQCTCRKDMVKISMDVFVRILQPERYELWKQGKDLTVLDHTRPTALTSPELSSWSASRASLKAKLLRRQISLKENRHWRKTEEERKPSLERKKEQTKRPGLSSHRKRSQPKKPKPEDPKFPGEGTAGAALLEEAGGSVKEEAGPEVDPEEEEEEPQPLPHGREAEGAEEDGRGKLRPTKAKSERKKKSFGLLPPQLPPPPAHFPSEEALWLPSPLEPPVLGPGPAAMEESPLPAPLNVVPPEVPSEELEAKPRPIIPMLYVVPRPGKAAFNQEHVSCQQAFEHFAQKGPTWKEPVSPMELTGPEDGAASSGAGRMETKARAGEGQAPSTFSKLKMEIKKSRRHPLGRPPTRSPLSVVKQEASSDEEASPFSGEEDVSDPDALRPLLSLQWKNRAASFQAERKFNAAAARTEPYCAICTLFYPYCQALQTEKEAPIASLGEGCPATLPSKSRQKTRPLIPEMCFTSGGENTEPLPANSYIGDDGTSPLIACGKCCLQVHASCYGIRPELVNEGWTCSRCAAHAWTAECCLCNLRGGALQMTTDRRWIHVICAIAVPEARFLNVIERHPVDISAIPEQRWKLKCVYCRKRMKKVSGACIQCSYEHCSTSFHVTCAHAAGVLMEPDDWPYVVSITCLKHKSGGHAVQLLRAVSLGQVVITKNRNGLYYRCRVIGAASQTCYEVNFDDGSYSDNLYPESITSRDCVQLGPPSEGELVELRWTDGNLYKAKFISSVTSHIYQVEFEDGSQLTVKRGDIFTLEEELPKRVRSRLSLSTGAPQEPAFSGEEAKAAKRPRVGTPLATEDSGRSQDYVAFVESLLQVQGRPGAPF

SEQ ID NO: 19588 - protein, 744 aa, Homo sapiens
MEDCLHTSSENLSKLVSWAHSHGTICSLIPNLKHLLSEGSHGNLTAMWGCSAGHAYHWPLTATCRAGSQERVCFQDNRSFNSDSPSIIGVPSETQTSPVERYPGRPVKAKLDCNRTRDSCDFSYCSEPSELDETVEEYEDENTLFDMVCESSVTDEDSDFEPQTQRPQSIARKRPGVVPSSLHSSSQTQMVDECSNDVIIKKIKQEIPEDYYIVANAELTGGVDGPALSLTQMAKPKPQTHAGPSCVGSAKLIPHVTSAISTELDPHGMSASPSVISRPIVQKTARVSLASPNRGPPGTHGTNQQVAMQMPVSTSHPNKQISIPLSALQLPGQDEQVASEEFLSHLPSQVSSCEVALSPSVNTEPEVSSSQQQPPVAPAITTEATAQCIPDQDERAAELSREQNEKTIRSTQTALRNFPYSTKLNKFPVFNINDDLNDLCTSAVSPNTTKATRYALNVWRYWCMTNGLKDHTDITKIPAVKLNELLENFYVTVKKSDGSDFLATSLHAIRRGLDRILKNAGVGFSITSSTFSSSTKKLKEKLWVLSKAGMSGARSRNIVYFSLSDEEEMWQAGCLGDDSPITLLSTVVKYNSQYLNMRTLQEHADLMYGDIELLKDPQNQPYFARTDSVKRESRSGSTRVCHGKIYHEHSRGHKQCPYCLLYKYMYIHRPPTQMEAKSPFYLTARKEATDMGSVWYEEQRMGLRSLRGIVPNLAKKVKLENCENFTFVSFTQVSRRLGSHSCCQ

SEQ ID NO: 19589 - protein, 405 aa, Homo sapiens
MDDDDFGGFEAAETFDGGSGETQTTSPAIPWAAFPAVSGVHLSPSSPEIVLDRDHSSSIGCLSSDAIISSPENTHAANSIVSQTIPKAQIQQSTHTHLDISLFPLGLTDEKSNGTIALVDDSEDPGANVSNIQLQQKISSLEIKLKVSEEEKQRIKQDVESLMEKHNVLEKGFLKEKEQEAISFQDRYKELQEKHKQELEDMRKAGHEALSIIVDEYKHQRLLEMLDTEKELLKEKIKEALIQQSQEQKEILEKCLEEERQRNKEALVSAAKLEKEAVKDAVLKVVEEERKNLEKAHAEERELWKTEHAKDQEKVSQEIQKAIQEQRKISQETVKAAIIEEQKRSEKAVEEAVKRTRDELIEYIKEQKRLDQVIRQRSLSSLELFLSCAQKQLSALIATEPVDIE

SEQ ID NO: 19590 - protein, 1496 aa, Homo sapiens
MVHVARLLLLLLTFFLRTDAETPPRFTRTPVDQTGVSGGVASFICQATGDPRPKIVWNKKGKKVSNQRFEVIEFDDGSGSVLRIQPLRTPRDEAIYECVASNNVGEISVSTRLTVLREDQIPRGFPTIDMGPQLKVVERTRTATMLCAASGNPDPEITWFKDFLPVDTSNNNGRIKQLRSESIGALQIEQSEESDQGKYECVATNSAGTRYSAPANLYVRELREVRRVPPRFSIPPTNHEIMPGGSVNITCVAVGSPMPYVKWMLGAEDLTPEDDMPIGRNVLELNDVRQSANYTCVAMSTLGVIEAIAQITVKALPKPPGTPVVTESTATSITLTWDSGNPEPVSYYIIQHKPKNSEELYKEIDGVATTRYSVAGLSPYSDYEFRVVAVNNIGRGPPSEPVLTQTSEQAPSSAPRDVQARMLSSTTILVQWKEPEEPNGQIQGYRVYYTMDPTQHVNNWMKHNVADSQITTIGNLVPQKTYSVKVLAFTSIGDGPLSSDIQVITQTGVPGQPLNFKAEPESETSILLSWTPPRSDTIANYELVYKDGEHGEEQRITIEPGTSYRLQGLKPNSLYYFRLAARSPQGLGASTAEISARTMQSTVFAKNFHVKAVMKTSVLLSWEIPENYNSAMPFKILYDDGKMVEEVDGRATQKLIVNLKPEKSYSFVLTNRGNSAGGLQHRVTAKTAPDVLRTKPAFIGKTNLDGMITVQLPEVPANENIKGYYIIIVPLKKSRGKFIKPWESPDEMELDELLKEISRKRRSIRYGREVELKPYIAAHFDVLPTEFTLGDDKHYGGFTNKQLQSGQEYVFFVLAVMEHAESKMYATSPYSDPVVSMDLDPQPITDEEEGLIWVVGPVLAVVFIICIVIAILLYKRKRAESDSRKSSIPNNKEIPSHHPTDPVELRRLNFQTPGMASHPPIPILELADHIERLKANDNLKFSQEYESIDPGQQFTWEHSNLEVNKPKNRYANVIAYDHSRVLLSAIEGIPGSDYVNANYIDGYRKQNAYIATQGSLPETFGDFWRMIWEQRSATVVMMTKLEERSRVKCDQYWPSRGTETHGLVQVTLLDTVELATYCVRTFALYKNGSSEKREVRQFQFTAWPDHGVPEHPTPFLAFLRRVKTCNPPDAGPMVVHCSAGVGRTGCFIVIDAMLERIKHEKTVDIYGHVTLMRAQRNYMVQTEDQYIFIHDALLEAVTCGNTEVPARNLYAYIQKLTQIETGENVTGMELEFKRLASSKAHTSRFISANLPCNKFKNRLVNIMPYESTRVCLQPIRGVEGSDYINASFIDGYRQQKAYIATQGPLAETTEDFWRMLWEHNSTIVVMLTKLREMGREKCHQYWPAERSARYQYFVVDPMAEYNMPQYILREFKVTDARDGQSRTVRQFQFTDWPEQGVPKSGEGFIDFIGQVHKTKEQFGQDGPISVHCSAGVGRTGVFITLSIVLERMRYEGVVDIFQTVKMLRTQRPAMVQTEDQYQFSYRAALEYLGSFDHYAT

SEQ ID NO: 19591 - protein, 819 aa, Homo sapiens
MGPWGWKLRWTVALLLAAAGTAVGDRCERNEFQCQDGKCISYKWVCDGSAECQDGSDESQETCSPKTCSQDEFRCHDGKCISRQFVCDSDRDCLDGSDEASCPVLTCGPASFQCNSSTCIPQLWACDNDPDCEDGSDEWPQRCRGLYVFQGDSSPCSAFEFHCLSGECIHSSWRCDGGPDCKDKSDEENCAVATCRPDEFQCSDGNCIHGSRQCDREYDCKDMSDEVGCVNVTLCEGPNKFKCHSGECITLDKVCNMARDCRDWSDEPIKECGTNECLDNNGGCSHVCNDLKIGYECLCPDGFQLVAQRRCEDIDECQDPDTCSQLCVNLEGGYKCQCEEGFQLDPHTKACKAVGSIAYLFFTNRHEVRKMTLDRSEYTSLIPNLRNVVALDTEVASNRIYWSDLSQRMICSTQLDRAHGVSSYDTVISRDIQAPDGLAVDWIHSNIYWTDSVLGTVSVADTKGVKRKTLFRENGSKPRAIVVDPVHGFMYWTDWGTPAKIKKGGLNGVDIYSLVTENIQWPNGITLDLLSGRLYWVDSKLHSISSIDVNGGNRKTILEDEKRLAHPFSLAVFEDKVFWTDIINEAIFSANRLTGSDVNLLAENLLSPEDMVLFHNLTQPRGVNWCERTTLSNGGCQYLCLPAPQINPHSPKFTCACPDGMLLARDMRSCLTEAEAAVATQETSTVRLKVSSTAVRTQHTTTRPVPDTSRLPGATPGLTTVEIVTMSHQALGDVAGRGNEKKPSSVRALSIVLPIVLLVFLCLGVFLLWKNWRLKNINSINFDNPVYQKTTEDEVHICHNQDGYSYPSRQMVSLEDDVA

SEQ ID NO: 19592 - protein, 1176 aa, Homo sapiens
ISETLSSKEFLENAYVLAVLLFLALILQRTFLQASYYVTIETGINLRGALLAMIYNKILRLSTSNLSMGEMTLGQINNLVAIETNQLMWFLFLCPNLWAMPVQIIMGVILLYNLLGSSALVGAAVIVLLAPIQYFIATKLAEAQKSTLDYSTERLKKTNEILKGIKLLKLYAWEHIFCKSVEETRMKELSSLKTFALYTSLSIFMNAAIPIAAVLATFVTHAYASGNNLKPAEAFASLSLFHILVTPLFLLSTVVRFAVKAIISVQKLNEFLLSDEIGDDSWRTGESSLPFESCKKHTGVVTNGYFSWGSGLATLSNIDIRIPTGQLTMIVGQVGCGKSSLLLAILGEMQTLEGKVHWSNVNESEPSFEATRSRNRYSVAYAAQKPWLLNATVEENITFGSPFNKQRYKAVTDACSLQPDIDLLPFGDQTEIGERGINLSGGQRQRICVARALYQNTNIVFLDDPFSALDIHLSDHLMQEGILKFLQDDKRTLVLVTHKLQYLTHADWIIAMKDGSVLREGTLKDIQTKDVELYEHWKTLMNRQDQELEKDMEADQTTLERKTLRRAMYSREAKAQMEDEDEEEEEEEDEDDNMSTVMRLRTKMPWKTCWRYLTSGGFFLLILMIFSKLLKHSVIVAIDYWLATWTSEYSINNTGKADQTYYVAGFSILCGAGIFLCLVTSLTVEWMGLTAAKNLHHNLLNKIILGPIRFFDTTPLGLILNRFSADTNIIDQHIPPTLESLTRSTLLCLSAIGMISYATPVFLVALLPLGVAFYFIQKYFRVASKDLQELDDSTQLPLLCHFSETAEGLTTIRAFRHETRFKQRMLELTDTNNIAYLFLSAANRWLEVRTDYLGACIVLTASIASISGSSNSGLVGLGLLYALTITNYLNWVVRNLADLEVQMGAVKKVNSFLTMESENYEGTMDPSQVPEHWPQEGEIKIHDLCVRYENNLKPVLKHVKAYIKPGQKVGICGRTGSGKSSLSLAFFRMVDIFDGKIVIDGIDISKLPLHTLRSRLSIILQDPILFSGSIRFNLDPECKCTDDRLWEALEIAQLKNMVKSLPGGLDAVVTEGGENFSVGQRQLFCLARAFVRKSSILIMDEATASIDMATENILQKVVMTAFADRTVVTIAHRVSSIMDAGLVLVFSEGILVECDTVPNLLAHKNGLFSTLVMTNK

SEQ ID NO: 19593 - protein, 120 aa, Homo sapiens
MYKDCIESTGDYFLLCDAEGPWGIILESLAILGIVVTILLLLAFLFLMRKIQDCSQWNVLPTQLLFLLSVLGLFGLAFAFIIELNQQTAPVRYFLFGVLFALCFSCLLAHASNLVKLVRG

SEQ ID NO: 19594 - protein, 372 aa, Homo sapiens
MYDGTKEVPMNPVKIYQVCDIPQPQGSIINPGSTGSAPWDEKDNDVDEEDEEDELDQSQHHVPIQDTFPFLNINGSPMAPASVGNCSVGNCSPEAVWPKTEPLEMEVPQAPIQPFYSSPELWISSLPMTDLDIKFQYRGKEYGQTMTVSNPQGCRLFYGDLGPMPDQEELFGPVSLEQVKFPGPEHITNEKQKLFTSKLLDVMDRGLILEVSGHAIYAIRLCQCKVYWSGPCAPSLVAPNLIERQKKVKLFCLETFLSDLIAHQKGQIEKQPPFEIYLCFGEEWPDGKPLERKLILVQVIPVVARMIYEMFSGDFTRSFDSGSVRLQISTPDIKDNIVAQLKQLYRILQTQESWQPMQPTPSMQLPPALPPQ

SEQ ID NO: 19595 - protein, 389 aa, Homo sapiens
MSLRIDVDTNFPECVVDAGKVTLGTQQRQEMDPRLREKQNEIILRAVCALLNSGGGIIKAEIENKGYNYERHGVGLDVPPIFRSHLDKMQKENHFLIFVKSWNTEAGVPLATLCSNLYHRERTSTDVMDSQEALAFLKCRTQTPTNINVSNSLGPQAAQGSVQYEGNINVSAAALFDRKRLQYLEKLNLPESTHVEFVMFSTDVSHCVKDRLPKCVSAFANTEGGYVFFGVHDETCQVIGCEKEKIDLTSLRASIDGCIKKLPVHHFCTQRPEIKYVLNFLEVHDKGALRGYVCAIKVEKFCCAVFAKVPSSWQVKDNRVRQLPTREWTAWMMEADPDLSRCPEMVLQLSLSSATPRSKPVCIHKNSECLKEQQKRYFPVSARKTSASQ

SEQ ID NO: 19596 - protein, 1912 aa, Homo sapiens
MASGLGSPSPCSAGSEEEDMDALLNNSLPPPHPENEEDPEEDLSETETPKLKKKKKPKKPRDPKIPKSKRQKKERMLLCRQLGDSSGEGPEFVEEEEEVALRSDSEGSDYTPGKKKKKKLGPKKEKKSKSKRKEEEEEEDDDDDSKEPKSSAQLLEDWGMEDIDHVFSEEDYRTLTNYKAFSQFVRPLIAAKNPKIAVSKMMMVLGAKWREFSTNNPFKGSSGASVAAAAAAAVAVVESMVTATEVAPPPPPVEVPIRKAKTKEGKGPNARRKPKGSPRVPDAKKPKPKKVAPLKIKLGGFGSKRKRSSSEDDDLDVESDFDDASINSYSVSDGSTSRSSRSRKKLRTTKKKKKGEEEVTAVDGYETDHQDYCEVCQQGGEIILCDTCPRAYHMVCLDPDMEKAPEGKWSCPHCEKEGIQWEAKEDNSEGEEILEEVGGDLEEEDDHHMEFCRVCKDGGELLCCDTCPSSYHIHCLNPPLPEIPNGEWLCPRCTCPALKGKVQKILIWKWGQPPSPTPVPRPPDADPNTPSPKPLEGRPERQFFVKWQGMSYWHCSWVSELQLELHCQVMFRNYQRKNDMDEPPSGDFGGDEEKSRKRKNKDPKFAEMEERFYRYGIKPEWMMIHRILNHSVDKKGHVHYLIKWRDLPYDQASWESEDVEIQDYDLFKQSYWNHRELMRGEEGRPGKKLKKVKLRKLERPPETPTVDPTVKYERQPEYLDATGGTLHPYQMEGLNWLRFSWAQGTDTILADEMGLGKTVQTAVFLYSLYKEGHSKGPFLVSAPLSTIINWEREFEMWAPDMYVVTYVGDKDSRAIIRENEFSFEDNAIRGGKKASRMKKEASVKFHVLLTSYELITIDMAILGSIDWACLIVDEAHRLKNNQSKFFRVLNGYSLQHKLLLTGTPLQNNLEELFHLLNFLTPERFHNLEGFLEEFADIAKEDQIKKLHDMLGPHMLRRLKADVFKNMPSKTELIVRVELSPMQKKYYKYILTRNFEALNARGGGNQVSLLNVVMDLKKCCNHPYLFPVAAMEAPKMPNGMYDGSALIRASGKLLLLQKMLKNLKEGGHRVLIFSQMTKMLDLLEDFLEHEGYKYERIDGGITGNMRQEAIDRFNAPGAQQFCFLLSTRAGGLGINLATADTVIIYDSDWNPHNDIQAFSRAHRIGQNKKVMIYRFVTRASVEERITQVAKKKMMLTHLVVRPGLGSKTGSMSKQELDDILKFGTEELFKDEATDGGGDNKEGEDSSVIHYDDKAIERLLDRNQDETEDTELQGMNEYLSSFKVAQYVVREEEMGEEEEVEREIIKQEESVDPDYWEKLLRHHYEQQQEDLARNLGKGKRIRKQVNYNDGSQEDRDWQDDQSDNQSDYSVASEEGDEDFDERSEAPRRPSRKGLRNDKDKPLPPLLARVGGNIEVLGFNARQRKAFLNAIMRYGMPPQDAFTTQWLVRDLRGKSEKEFKAYVSLFMRHLCEPGADGAETFADGVPREGLSRQHVLTRIGVMSLIRKKVQEFEHVNGRWSMPELAEVEENKKMSQPGSPSPKTPTPSTPGDTQPNTPAPVPPAEDGIKIEENSLKEEESIEGEKEVKSTAPETAIECTQAPAPASEDEKVVVEPPEGEEKVEKAEVKERTEEPMETEPKGAADVEKVEEKSAIDLTPIVVEDKEEKKEEEEKKEVMLQNGETPKDLNDEKQKKNIKQRFMFNIADGGFTELHSLWQNEERAATVTKKTYEIWHRRHDYWLLAGIINHGYARWQDIQNDPRYAILNEPFKGEMNRGNFLEIKNKFLARRFKLLEQALVIEEQLRRAAYLNMSEDPSHPSMALNTRFAEVECLAESHQHLSKESMAGNKPANAVLHKVLKQLEELLSDMKADVTRLPATIARIPPVAVRLQMSERNILSRLANRAPEPTPQQVAQQQ

SEQ ID NO: 19597 - protein, 476 aa, Homo sapiens
MPQLNGGGGDDLGANDELISFKDEGEQEEKSSENSSAERDLADVKSSLVNESETNQNSSSDSEAERRPPPRSESFRDKSRESLEEAAKRQDGGLFKGPPYPGYPFIMIPDLTSPYLPNGSLSPTARTYLQMKWPLLDVQAGSLQSRQALKDARSPSPAHIVSNKVPVVQHPHHVHPLTPLITYSNEHFTPGNPPPHLPADVDPKTGIPRPPHPPDISPYYPLSPGTVGQIPHPLGWLVPQQGQPVYPITTGGFRHPYPTALTVNASMSSFLSSRFPPHMVPPHHTLHTTGIPHPAIVTPTVKQESSQSDVGSLHSSKHQDSKKEEEKKKPHIKKPLNAFMLYMKEMRAKVVAECTLKESAAINQILGRRWHALSREEQAKYYELARKERQLHMQLYPGWSARDNYGKKKKRKRDKQPGETNEHSECFLNPCLSLPPITDLSAPKKCRARFGLDQQNNWCGPCRCKYSKEVSGTVRA

SEQ ID NO: 19598 - protein, 248 aa, Homo sapiens
MAQAPADPGREGHLEQRILQVLTEAGSPVKLAQLVKECQAPKRELNQVLYRMKKELKVSLTSPATWCLGGTDPEGEGPAELALSSPAERPQQHAATIPETPGPQFSQQREEDIYRFLKDNGPQRALVIAQALGMRTAKDVNRDLYRMKSRHLLDMDEQSKAWTIYRPEDSGRRAKSASIIYQHNPINMICQNGPNSWISIANSEAIQIGHGNIITRQTVSREDGKSPKRAQGGDLGGEPPDPLGGGKG

SEQ ID NO: 19599 - protein, 912 aa, Homo sapiens
MPGKRGLGWWWARLPLCLLLSLYGPWMPSSLGKPKGHPHMNSIRIDGDITLGGLFPVHGRGSEGKPCGELKKEKGIHRLEAMLFALDRINNDPDLLPNITLGARILDTCSRDTHALEQSLTFVQALIEKDGTEVRCGSGGPPIITKPERVVGVIGASGSSVSIMVANILRLFKIPQISYASTAPDLSDNSRYDFFSRVVPSDTYQAQAMVDIVRALKWNYVSTVASEGSYGESGVEAFIQKSREDGGVCIAQSVKIPREPKAGEFDKIIRRLLETSNARAVIIFANEDDIRRVLEAARRANQTGHFFWMGSDSWGSKIAPVLHLEEVAEGAVTILPKRMSVRGFDRYFSSRTLDNNRRNIWFAEFWEDNFHCKLSRHALKKGSHVKKCTNRERIGQDSAYEQEGKVQFVIDAVYAMGHALHAMHRDLCPGRVGLCPRMDPVDGTQLLKYIRNVNFSGIAGNPVTFNENGDAPGRYDIYQYQLRNDSAEYKVIGSWTDHLHLRIERMHWPGSGQQLPRSICSLPCQPGERKKTVKGMPCCWHCEPCTGYQYQVDRYTCKTCPYDMRPTENRTGCRPIPIIKLEWGSPWAVLPLFLAVVGIAATLFVVITFVRYNDTPIVKASGRELSYVLLAGIFLCYATTFLMIAEPDLGTCSLRRIFLGLGMSISYAALLTKTNRIYRIFEQGKRSVSAPRFISPASQLAITFSLISLQLLGICVWFVVDPSHSVVDFQDQRTLDPRFARGVLKCDISDLSLICLLGYSMLLMVTCTVYAIKTRGVPETFNEAKPIGFTMYTTCIVWLAFIPIFFGTSQSADKLYIQTTTLTVSVSLSASVSLGMLYMPKVYIILFHPEQNVPKRKRSLKAVVTAATMSNKFTQKGNFRPNGEAKSELCENLEAPALATKQTYVTYTNHAI

SEQ ID NO: 19600 - protein, 721 aa, Homo sapiens
MSDKMSSFLHIGDICSLYAEGSTNGFISTLGLVDDRCVVQPETGDLNNPPKKFRDCLFKLCPMNRYSAQKQFWKAAKPGANSTTDAVLLNKLHHAADLEKKQNETENRKLLGTVIQYGNVIQLLHLKSNKYLTVNKRLPALLEKNAMRVTLDEAGNEGSWFYIQPFYKLRSIGDSVVIGDKVVLNPVNAGQPLHASSHQLVDNPGCNEVNSVNCNTSWKIVLFMKWSDNKDDILKGGDVVRLFHAEQEKFLTCDEHRKKQHVFLRTTGRQSATSATSSKALWEVEVVQHDPCRGGAGYWNSLFRFKHLATGHYLAAEVDPDFEEECLEFQPSVCNKIIFLMSFVGNCGTFTRGYRAMVLDVEFLYHLLYLVICAMGLFVHEFFYSLLLFDLVYREETLLNVIKSVTRNGRSIILTAVLALILVYLFSIVGYLFFKDDFILEVDRLPNETAVPETGESLASEFLFSDVCRVESGENCSSPAPREELVPAEETEQDKEHTCETLLMCIVTVLSHGLRSGGGVGDVLRKPSKEEPLFAARVIYDLLFFFMVIIIVLNLIFGVIIDTFADLRSEKQKKEEILKTTCFICGLERDKFDNKTVTFEEHIKEEHNMWHYLCFIVLVKVKDSTEYTGPESYVAEMIKERNLDWFPRMRAMSLVSSDSEGEQNELRNLQEKLESTMKLVTNLSGQLSELKDQMTEQRKQKQRIGLLGHPPHMNVNPQQPA

SEQ ID NO: 19601 - protein, 325 aa, Homo sapiens
MAQGLRLQGSRRKGRHPLFPLLALIFEKCELATCTPREPGVAGGDVCSSESFNEDIAVFAKQIRAEKPLFSSNPELDNLMIQAIQVLRFHLLELEKVHELCDNFCHRYISCLKGKMPIDLVIDDREGGSKSDSEDITRSANLTDQPSWNRDHDDTASTRSGGTPGPSSGGHTSHSGDNSSEQGDGLDNSVASPSTGDDDDPDKDKKRHKKRGIFPKVATNIMRAWLFQHLTHPYPSEEQKKQLAQDTGLTILQVNNWFINARRRIVQPMIDQSNRAVSQGTPYNPDGQPMGGFVMDGQQHMGIRAPGPMSGMGMNMGMEGQWHYM

SEQ ID NO: 19602 - protein, 172 aa, Homo sapiens
MKETCQLEIQVDNEQLNLEDEDIESIDATKLSRFIEINSLHMVTEYNPVTVIGLFNSVIQIHLLLIMNKASPEYEENMHRYQKAAKLFQGKILFILVDSGMKENGKVISFFKLKESQLPALAIYQTLDDEWDTLPTAEVSVEHVQNFCDGFLSGKLLKENRESEGKTPKVEL

SEQ ID NO: 19603 - protein, 157 aa, Homo sapiens
MFQIPEFEPSEQEDSSSAERGLGPSPAGDGPSGSGKHHRQAPGLLWDASHQQEQPTSSSHHGEGTSSPEERGHSNADAAKLQLDASLPVLVGSELGQGKLRPLPVTFAPHPETPPVPTALGSHLEYGRKYFPQAYAKRGSVLSPLEGGLTQIPFRCV

SEQ ID NO: 19604 - protein, 373 aa, Homo sapiens
MGFPVLCRGWRRTWPGCASWLGAPPPQKPLLSPLLLNHRSSKSSRPKLQAACSSIQEVRWCTRLEMPDNLYTFVLKVKDRTDIIFEVGDEQQLNSWMAELSECTGRGLESTEAEMHIPSALEPSTSSSPRGSTDSLNQGASPGGLLDPACQKTDHFLSCYPWFHGPISRVKAAQLVQLQGPDAHGVFLVRQSETRRGEYVLTFNFQGIAKHLRLSLTERGQCRVQHLHFPSVVDMLHHFQRSPIPLECGAACDVRLSSYVVVVSQPPGSCNTVLFPFSLPHWDSESLPHWGSELGLPHLSSSGCPRGLSPEGLPGRSSPPEQIFHLVPSPEELANSLQHLEHEPVNRARDSDYEMDSSSRSHLRAIDNQYTPL

SEQ ID NO: 19605 - protein, 170 aa, Homo sapiens
MYNDTLNGSTEKRSAELPDAVGPIVQLQEKLYVPVKEYPDFNFVGRILGPRGLTAKQLEAETGCKIMVRGKGSMRDKKKEEQNRGKPNWEHLNEDLHVLITVEDAQNRAEIKLKRAVEEVKKLLVPAAEGEDSLKKMQLMELAILNGTYRDANIKSPALAFSLAATAQAA

SEQ ID NO: 19606 - protein, 874 aa, Homo sapiens
MRTYYFCTDTGKEMELWMKAMLDAALVQTEPVKRVDKITSENAPTKETNNIPNHRVLIKPEIQNNQKNKEMSKIEEKKALEAEKYGFQKDGQDRPLTKINSVKLNSLPSEYESGSACPAQTVHYRPINLSSSENKIVNVSLADLRGGNRPNTGPLYTEADRVIQRTNSMQQLEQWIKIQKGRGHEEETRGVISYQTLPRNMPSHRAQIMARYPEGYRTLPRNSKTRPESICSVTPSTHDKTLGPGAEEKRRSMRDDTMWQLYEWQQRQFYNKQSTLPRHSTLSSPKTMVNISDQTMHSIPTSPSHGSIAAYQGYSPQRTYRSEVSSPIQRGDVTIDRRHRAHHPKHVYVPDRRSVPAGLTLQSVSPQSLQGKTLSQDEGRGTLYKYRPEEVDIDAKLSRLCEQDKVVHALEEKLQQLHKEKYTLEQALLSASQEIEMHADNPAAIQTVVLQRDDLQNGLLSTCRELSRATAELERAWREYDKLEYDVTVTRNQMQEQLDHLGEVQTESAGIQRAQIQKELWRIQDVMEGLSKHKQQRGTTEIGMIGSKPFSTVKYKNEGPDYRLYKSEPELTTVAEVDESNGEEKSEPVSEIETSVVKGSHFPVGVVPPRAKSPTPESSTIASYVTLRKTKKMMDLRTERPRSAVEQLCLAESTRPRMTVEEQMERIRRHQQACLREKKKGLNVIGASDQSPLQSPSNLRDNPFRTTQTRRRDDKELDTAIRENDVKPDHETPATEIVQLKETEPQNVDFSKELKKTENISYEMLFEPEPNGVNSVEMMDKERNKDKMPEDVTFSPQDETQTANHKPEEHPEENTKNSVDEQEETVISYESTPEVSRGNQTMAVKSLSPSPESSASPVPSTQPQLTEGSHFMCV

SEQ ID NO: 19607 - protein, 856 aa, Homo sapiens
MDEIKSQELNLEGQRKISPGSIKDSKTEASGNIAIRKSAKVIFALDETELKSKPEHTWKKNLFERMEARAQAMQQKIIDKENLKKELEKKAEKKLPRDNLAKEWFNTDSMTLNNTAYLLDKLLPTLVPGVENMLTQVEKKKVLTEADTPSKFDPINYLGEYLIRNNPNYIKDPGMSGYQRLMKEVTEDLKIYVPDTICNRVSKMKENVKQNRKQRESIDKIIVKVANTRKQALQEQFDEWILDPKGMIPKSVIQNVLQEFFQNPDFKLGSHCKQLDITDSTEPRLNKMEFTEYISSHIKDLKSEMFEELLKHLCHSADEFREVIKADMRRQMFAELFLHCDHGKVGFLDRQRTLALLELFYDHSSQMLRSLLRNPRQWPFIEFEEINLTELWGDMDNQKHIYEGFDKVLLEMNTLLSANHASKTQSKLLESPDQPKLNEQRTSTPSPNPPEQQRGVTAEQGPQRISIEEQQQGKKPTAEQELYIESVIEPGTHTESTLEQGSSRRLLTEQETHRESTTEQGQHKGSIEGQGPRRVSVSEQGSSRESVAEQGSRRESIAEQDRHKGSVAEQGSRRMSAAEQGSLRESVIEEPYQKSEQGPYGEIISEEQEDIGSTSQSRKDSILKSTKYGEPITSEYIEVPLQEKRSWEQTYEEEIFLSSELQEEVPTLSRKDHFPETTKKEVQKDKPCEPKSQKIEGKSWSGEFFTCNWKMKYVTFEDEEQANLIYGNSRFTDLHSIIRNIQSCKEVKGRTAFNGVSFNLLQFVQLLETFVGEDAPLSVSETLTSFFKEGYVETEQEKMNALEQVSLCRQAGVQWRNCSSLQPPTPGLKRSSHHRLLSNWDYRERRKFFPLETKFP

SEQ ID NO: 19608 - protein, 715 aa, Homo sapiens
MAGVGPGGYAAEFVPPPECPVFEPSWEEFTDPLSFIGRIRPLAEKTGICKIRPPKEYALSGWNLNNMPVLEQSVLAHINVDISGMKVPWLYVGMCFSSFCWHIEDHWSYSINYLHWGEPKTWYGVPSHAAEQLEEVMRELAPELFESQPDLLHQLVTIMNPNVLMEHGVPVYRTNQCAGEFVVTFPRAYHSGFNQGYNFAEAVNFCTADWLPIGRQCVNHYRRLRRHCVFSHEELIFKMAADPECLDVGLAAMVCKELTLMTEEETRLRESVVQMGVLMSEEEVFELVPDDERQCSACRTTCFLSALTCSCNPERLVCLYHPTDLCPCPMQKKCLRYRYPLEDLPSLLYGVKVRAQSYDTWVSRVTEALSANFNHKKDLIELRVMLEDAEDRKYPENDLFRKLRDAVKEAETCASVAQLLLSKKQKHRQSPDSGRTRTKLTVEELKAFVQQLFSLPCVISQARQVKNLLDDVEEFHERAQEAMMDETPDSSKLQMLIDMGSSLYVELPELPRLKQELQQARWLDEVRLTLSDPQQVTLDVMKKLIDSGVGLAPHHAVEKAMAELQELLTVSERWEEKAKVCLQARPRHSVASLESIVNEAKNIPAFLPNVLSLKEALQKAREWTAKVEAIQSGSNYAYLEQLESLSAKGRPIPVRLEALPQVESQVAAARAWRERTGRTFLKKNSSHTLLQVLSPRTDIGVYGSGKNRRKKVKEL

SEQ ID NO: 19609 - protein, 609 aa, Homo sapiens
MIHAVLQWQKRNAAPPPSNTEAPPGETRTEAGAETRSPGKAEAESDALPDDTVIESEALPSDIAAEARAKTGGTVSDQALLFGDDDAGEGPSSLIREKPVPKQNENEEENLDKEQTGNLKQELDDKSATCKAYPKRPLLGLVLTPTRELAVQVKQHIDAVARFTGIKTAILVGGMSTQKQQRMLNRRPEIVVATPGRLWELIKEKHYHLRNLRQLRCLVVDEADRMVEKGHFAELSQLLEMLNDSQYNPKRQTLVFSATLTLVHQAPARILHKKHTKKMDKTAKLDLLMQKIGMRGKPKVIDLTRNEATVETLTETKIHCETDEKDFYLYYFLMQYPGRSLVFANSISCIKRLSGLLKVLDIMPLTLHACMHQKQRLRNLEQFARLEDCVLLATDVAARGLDIPKVQHVIHYQVPRTSEIYVHRSGRTARATNEGLSLMLIGPEDVINFKKIYKTLKKDEDIPLFPVQTKYMDVVKERIRLARQIEKSEYRNFQACLHNSWIEQAAAALEIELEEDMYKGGKADQQEERRRQKQMKVLKKELRHLLSQPLFTESQKTKYPTQSGKPPLLVSAPSKSESALSCLSKQKKKKTKKPKEPQPEQPQPSTSAN

SEQ ID NO: 19610 - protein, 250 aa, Homo sapiens
MAFCALTIVALYILSLKDQDRRVPNLPPSNITSSQEPALLPTASSSAPNTSLVTTPASLQVPEITFCEILPCQETYCCPIRGMKEVSSSPVQRQSEEKEFHQRRWSEDKSKSVLARNALSGPDWESDWIDTTISSIQIMEIQQIIDHQYCIQSLQCGTTEPLIVFQCKFTLGNICFHSKRGTKGLESHREISQEMTQGYQHIWSLPVAPFSDSMFHFRVAAPDLADCSTDPYFAGIFFTDYFFYFYRRCA

SEQ ID NO: 19611 - protein, 581 aa, Homo sapiens
MQYSHHCEHLLERLNKQREAGFLCDCTIVIGEFQFKAHRNVLASFSEYFGAIYRSTSENNVFLDQSQVKADGFQKLLEFIYTGTLNLDSWNVKEIHQAADYLKVEEVVTKCKIKMEDFAFIANPSSTEISSITGNIELNQQTCLLTLRDYNNREKSEVSTDLIQANPKQGALAKKSSQTKKKKKAFNSPKTGQNKTVQYPSDILENASVELFLDANKLPTPVVEQVAQINDNSELELTSVVENTFPAQDIVHTVTVKRKRGKSQPNCALKEHSMSNIASVKSPYEAENSGEELDQRYSKAKPMCNTCGKVFSEASSLRRHMRIHKGVKPYVCHLCGKAFTQCNQLKTHVRTHTGEKPYKCELCDKGFAQKCQLVFHSRMHHGEEKPYKCDVCNLQFATSSNLKIHARKHSGEKPYVCDRCGQRFAQASTLTYHVRRHTGEKPYVCDTCGKAFAVSSSLITHSRKHTGEKPYICGICGKSFISSGELNKHFRSHTGADKTLDSSAEDHTLSEQDSIQKSPLSETMDVKPSDMTLPLALPLGTEDHHMLLPVTDTQSPTSDTLLRSTVNGYSEPQLIFLQQLY

SEQ ID NO: 19612 - protein, 924 aa, Homo sapiens
MDVLPTGGGRPGLRTELEFRGGGGEARLESQEEETIPAAPPAPRLRGAAERPRRSRDTWDGDEDTEPGEACGGRTSRTASLVSGLLNELYSCTEEEEAAGGGRGAEGRRRRRDSLDSSTEASGSDVVLGGRSGAGDSRVLQELQERPSQRHQMLYLRQKDANELKTILRELKYRIGIQSAKLLRHLKQKDRLLHKVQRNCDIVTACLQAVSQKRRVDTKLKFTLEPSLGQNGFQQWYDALKAVARLSTGIPKEWRRKVWLTLADHYLHSIAIDWDKTMRFTFNERSNPDDDSMGIQIVKDLHRTGCSSYCGQEAEQDRVVLKRVLLAYARWNKTVGYCQGFNILAALILEVMEGNEGDALKIMIYLIDKVLPESYFVNNLRALSVDMAVFRDLLRMKLPELSQHLDTLQRTANKESGGGYEPPLTNVFTMQWFLTLFATCLPNQTVLKIWDSVFFEGSEIILRVSLAIWAKLGEQIECCETADEFYSTMGRLTQEMLENDLLQSHELMQTVYSMAPFPFPQLAELREKYTYNITPFPATVKPTSVSGRHSKARDSDEENDPDDEDAVVNAVGCLGPFSGFLAPELQKYQKQIKEPNEEQSLRSNNIAELSPGAINSCRSEYHAAFNSMMMERMTTDINALKRQYSRIKKKQQQQVHQVYIRADKGPVTSILPSQVNSSPVINHLLLGKKMKMTNRAAKNAVIHIPGHTGGKISPVPYEDLKTKLNSPWRTHIRVHKKNMPRTKSHPGCGDTVGLIDEQNEASKTNGLGAAEAFPSGCTATAGREGSSPEGSTRRTIEGQSPEPVFGDADVDVSAVQAKLGALELNQRDAAAETELRVHPPCQRHCPEPPSAPEENKATSKAPQGSNSKTPIFSPFPSVKPLRKSATARNLGLYGPTERTPTVHFPQMSRSFSKPGGGNSGTKKR

SEQ ID NO: 19613 - protein, 858 aa, Homo sapiens
MGDHLDLLLGVVLMAGPVFGIPSCSFDGRIAFYRFCNLTQVPQVLNTTERLLLSFNYIRTVTASSFPFLEQLQLLELGSQYTPLTIDKEAFRNLPNLRILDLGSSKIYFLHPDAFQGLFHLFELRLYFCGLSDAVLKDGYFRNLKALTRLDLSKNQIRSLYLHPSFGKLNSLKSIDFSSNQIFLVCEHELEPLQGKTLSFFSLAANSLYSRVSVDWGKCMNPFRNMVLEILDVSGNGWTVDITGNFSNAISKSQAFSLILAHHIMGAGFGFHNIKDPDQNTFAGLARSSVRHLDLSHGFVFSLNSRVFETLKDLKVLNLAYNKINKIADEAFYGLDNLQVLNLSYNLLGELYSSNFYGLPKVAYIDLQKNHIAIIQDQTFKFLEKLQTLDLRDNALTTIHFIPSIPDIFLSGNKLVTLPKINLTANLIHLSENRLENLDILYFLLRVPHLQILILNQNRFSSCSGDQTPSENPSLEQLFLGENMLQLAWETELCWDVFEGLSHLQVLYLNHNYLNSLPPGVFSHLTALRGLSLNSNRLTVLSHNDLPANLEILDISRNQLLAPNPDVFVSLSVLDITHNKFICECELSTFINWLNHTNVTIAGPPADIYCVYPDSFSGVSLFSLSTEGCDEEEVLKSLKFSLFIVCTVTLTLFLMTILTVTKFRGFCFICYKTAQRLVFKDHPQGTEPDMYKYDAYLCFSSKDFTWVQNALLKHLDTQYSDQNRFNLCFEERDFVPGENRIANIQDAIWNSRKIVCLVSRHFLRDGWCLEAFSYAQGRCLSDLNSALIMVVVGSLSQYQLMKHQSIRGFVQKQQYLRWPEDLQDVGWFLHKLSQQILKKEKEKKKDNNIPLQTVATIS

SEQ ID NO: 19614 - protein, 1230 aa, Homo sapiens
MALSDEPAAGGPEEEAEDETLAFGAALEAFGESAETRALLGRLREVHGGGAEREVALERFRVIMDKYQEQPHLLDPHLEWMMNLLLDIVQDQTSPASLVHLAFKFLYIITKVRGYKTFLRLFPHEVADVEPVLDLVTIQNPKDHEAWETRYMLLLWLSVTCLIPFDFSRLDGNLLTQPGQARMSIMDRILQIAESYLIVSDKARDAAAVLVSRFITRPDVKQSKMAEFLDWSLCNLARSSFQTMQGVITMDGTLQALAQIFKHGKREDCLPYAATVLRCLDGCRLPESNQTLLRKLGVKLVQRLGLTFLKPKVAAWRYQRGCRSLAANLQLLTQGQSEQKPLILTEDDDEDDDVPEGVERVIEQLLVGLKDKDTVVRWSAAKGIGRMAGRLPRALADDVVGSVLDCFSFQETDKAWHGGCLALAELGRRGLLLPSRLVDVVAVILKALTYDEKRGACSVGTNVRDAACYVCWAFARAYEPQELKPFVTAISSALVIAAVFDRDINCRRAASAAFQENVGRQGTFPHGIDILTTADYFAVGNRSNCFLVISVFIAGFPEYTQPMIDHLVTMKISHWDGVIRELAARALHNLAQQAPEFSATQVFPRLLSMTLSPDLHMRHGSILACAEVAYALYKLAAQENRPVTDHLDEQAVQGLKQIHQQLYDRQLYRGLGGQLMRQAVCVLIEKLSLSKMPFRGDTVIDGWQWLINDTLRHLHLISSHSRQQMKDAAVSALAALCSEYYMKEPGEADPAIQEELITQYLAELRNPEEMTRCGFSLALGALPGFLLKGRLQQVLTGLRAVTHTSPEDVSFAESRRDGLKAIARICQTVGVKAGAPDEAVCGENVSQIYCALLGCMDDYTTDSRGDVGTWVRKAAMTSLMDLTLLLARSQPELIEAHTCERIMCCVAQQASEKIDRFRAHAASVFLTLLHFDSPPIPHVPHRGELEKLFPRSDVASVNWSAPSQAFPRITQLLGLPTYRYHVLLGLVVSLGGLTESTIRHSTQSLFEYMKGIQSDPQALGSFSGTLLQIFEDNLLNERVSVPLLKTLDHVLTHGCFDIFTTEEDHPFAVKLLALCKKEIKNSKDIQKLLSGIAVDFPSATLVCVGTVQMYAHTHLRLGAPGPHCAHGSALPRFCEMVQFPGDVRRQALLQLCLLLCHRFPLIRKTTASQVYETLLTYSDVVGADVLDEVVTVLSDTAWDAELAVVREQRNRLCDLLGVPRPQLVPQPGAC

SEQ ID NO: 19615 - protein, 811 aa, Homo sapiens
TQKNKDALQPIKEDRTGKAQDDAFWLQSLITDAFHDKGFQKIKEYFQQKESHFPQKYNRLLLYRLDRSINKELDKNEFQSVSLLLKCIQRFLVDGLKEDEPLLIRQGLIPKLVSWFERTTGILTSEGLASDTSLICVIEDFFDTALIISRSSSEGKIQMLDSFLLSLGFLVTEKTVNHLLQQEGLKTFNCILHAVPREERKKFPLSEGMCHLMKDLARTLLTVGDYDQQVAISEALCRLTIKKSRDELVHKWFDDEVIAEAFKEIKDREFETDSRRFLNHLNNRLGDQRRVYSFPCIAAFADEHEMRKPADEKLEKFWIDFNLGSQSVTFYIDNAENTLWDSVTLPKEAVMNFSITETEKIKIFIIYLKKPMIISYKEVMKIEIHFDLQFNISQVSIQALGEDKQMLPDQTKISSELFSKSDKEDRESPSGLERETEQAEESTNMVEFMSAEDDRCLITLHLNDQSEPPVIGEPASDSHLQPVPPFGVPDFPQQPKSHYRKHLFSESNQDSSTSELSWTSNQKKKSLKSYSSRKKTRTRSNLRILPVFPPSSGSGHEKDQAKLLSPSEKEIPEQNNTTSPKTSEQKFQDSFAFLTAEDSAQKTELQDPHSLSELSSLKHSEDEEKPKIVNQESLTESTSLKHKLRNLEDKDIPEGSFAKSQQSRLEEEVAPGSPFSITEERELPEGISTSSLEVVPENLNGSAILPTFENFTKKRKRKYELRYRKRPFNSENAKKAPDCLIKLLNQMQLFRLNKLERFQNLVLQELSSLKQDIQALEHLEKEVLEFWGKQSADLQSFCDLQVLRFNSTQTS

SEQ ID NO: 19616 - protein, 1257 aa, Homo sapiens
MKENGSPYNYRIIFRTSELMTLRGSVLEDAIPSTAKHSTARGLPLKEVLEHVVPELNVQCLRLAFNTPKVTEQLMKLDEQGLNYQQKVGIMYCKAGQSTEEEMYNNESAGPAFEEFLQLLGERVRLKGFEKYRAQLDTKTDSTGTHSLYTTYKDYEIMFHVSTMLPYTPNNKQQLLRKRHIGNDIVTIVFQEPGAQPFSPKNIRSHFQHVFVIVRVHNPCSDSVCYSVAVTRSRDVPSFGPPIPKGVTFPKSNVFRDFLLAKVINAENAAHKSEKFRAMATRTRQEYLKDLAEKNVTNTPIDPSGKFPFISLASKKKEKSKPYPGAELSSMGAIVWAVRAEDYNKAMELDCLLGISNEFIVLIEQETKSVVFNCSCRDVIGWTSTDTSLKIFYERGECVSVGSFINIEEIKEIVKRLQFVSKGCESVEMTLRRNGLGQLGFHVNYEGIVADVEPYGYAWQAGLRQGSRLVEICKVAVATLSHEQMIDLLRTSVTVKVVIIPPHDDCTPRRSCSETYRMPVMEYKMNEGVSYEFKFPFRNNNKWQRNASKGPHSPQVPSQVQSPMTSRLNAGKGDGKMPPPERAANIPRSISSDGRPLERRLSPGSDIYVTVSSMALARSQCRNSPSNLSSSSDTGSVGGTYRQKSMPEGFGVSRRSPASIDRQNTQSDIGGSGKSTPSWQRSEDSIADQMEPTCHLPAVSKVLPAFRESPSGRLMRQDPVVHLSPNKQGHSDSHYSSHSSSNTLSSNASSAHSDEKWYDGDRTESELNSYNYLQGTSADSGIDTTSYGPSHGSTASLGAATSSPRSGPGKEKVAPLWHSSSEVISMADRTLETESHGLDRKTESSLSLDIHSKSQAGSTPLTRENSTFSINDAASHTSTMSSRHSASPVVFTSARSSPKEELHPAAPSQLAPSFSSSSSSSSGPRSFYPRQGATSKYLIGWKKPEGTINSVGFMDTRKRHQSDGNEIAHTRLRASTRDLRASPKPTSKSTIEEDLKKLIDLESPTPESQKSFKFHALSSPQSPFPSTPTSRRALHRTLSDESIYNSQREHFFTSRASLLDQALPNDVLFSSTYPSLPKSLPLRRPSYTLGMKSLHGEFSASDSSLTDIQETRRQPMPDPGLMPLPDTAADLDWSNLVDAAKAYEVQRASFFAASDENHRPLSAASNSDQLEDQALAQMKPYSSKDSSPTLASKVDQLEGMLKMLREDLKKEKEDKAHLQAEVQHLREDNLRLQEESQNASDKLKKFTEWVFNTIDMS

SEQ ID NO: 19617 - protein, 601 aa, Homo sapiens
MPSSISAFEGTCVSIPCRFDFPDELRPAVVHGVWYFNSPYPKNYPPVVFKSRTQVVHESFQGRSRLLGDLGLRNCTLLLSNVSPELGGKYYFRGDLGGYNQYTFSEHSVLDIVNTPNIVVPPEVVAGTEVEVSCMVPDNCPELRPELSWLGHEGLGEPAVLGRLREDEGTWVQVSLLHFVPTREANGHRLGCQASFPNTTLQFEGYASMDVKYPPVIVEMNSSVEAIEGSHVSLLCGADSNPPPLLTWMRDGTVLREAVAESLLLELEEVTPAEDGVYACLAENAYGQDNRTVGLSVMYAPWKPTVNGTMVAVEGETVSILCSTQSNPDPILTIFKEKQILSTVIYESELQLELPAVSPEDDGEYWCVAENQYGQRATAFNLSVEFAPVLLLESHCAAARDTVQCLCVVKSNPEPSVAFELPSRNVTVNESEREFVYSERSGLVLTSILTLRGQAQAPPRVICTARNLYGAKSLELPFQGAHRLMWAKIGPVGAVVAFAILIAIVCYITQTRRKKNVTESPSFSAGDNPPVLFSSDFRISGAPEKYESERRLGSERRLLGLRGEPPELDLSYSHSDLGKRPTKDSYTLTEELAEYAEIRVK

SEQ ID NO: 19618 - protein, 613 aa, Homo sapiens
MKLSLGGSEMGLSSHLQSSKAGPTRIFTSNTHSSVVLQGFDQLRLEGLLCDVTLMPGDTDDAFPVHRVMMASASDYFKAMFTGGMKEQDLMCIKLHGVSKVGLRKIIDFIYTAKLSLNMDNLQDTLEAASFLQILPVLDFCKVFLISGVTLDNCVEVGRIANTYNLTEVDKYVNSFVLKNFPALLSTGEFLKLPFERLAFVLSSNSLKHCTELELFKATCRWLRLEEPRMDFAAKLMKNIRFPLMTPQELINYVQTVDFMRTDNTCVNLLLEASNYQMMPYMQPVMQSDRTAIRSDTTHLVTLGGVLRQQLVVSKELRMYDEKAHEWKSLAPMDAPRYQHGIAVIGNFLYVVGGQSNYDTKGKTAVDTVFRFDPRYNKWMQVASLNEKRTFFHLSALKGYLYAVGGRNAAGELPTVECYNPRTNEWTYVAKMSEPHYGHAGTVYGGVMYISGGITHDTFQKELMCFDPDTDKWIQKAPMTTVRGLHCMCTVGERLYVIGGNHFRGTSDYDDVLSCEYYSPILDQWTPIAAMLRGQSDVGVAVFENKIYVVGGYSWNNRCMVEIVQKYDPDKDEWHKVFDLPESLGGIRACTLTVFPPEETTPSPSRESPLSAP

SEQ ID NO: 19619 - protein, 647 aa, Homo sapiens
MFSPPVSSGKNGPTSLASGHFTGSNVEDRSSSGSWGNGGHPSPSRNYGDGTPYDHMTSRDLGSHDNLSPPFVNSRIQSKTERGSYSSYGRESNLQGCHQQSLLGGDMDMGNPGTLSPTKPGSQYYQYSSNNPRRRPLHSSAMEVQTKKVRKVPPGLPSSVYAPSASTADYNRDSPGYPSSKPATSTFPSSFFMQDGHHSSDPWSSSSGMNQPGYAGMLGNSSHIPQSSSYCSLHPHERLSYPSHSSADINSSLPPMSTFHRSGTNHYSTSSCTPPANGTDSIMANRGSGAAGSSQTGDALGKALASIYSPDHTNNSFSSNPSTPVGSPPSLSAGTAVWSRNGGQASSSPNYEGPLHSLQSRIEDRLERLDDAIHVLRNHAVGPSTAMPGGHGDMHGIIGPSHNGAMGGLGSGYGTGLLSANRHSLMVGTHREDGVALRGSHSLLPNQVPVPQLPVQSATSPDLNPPQDPYRGMPPGLQGQSVSSGSSEIKSDDEGDENLQDTKSSEDKKLDDDKKDIKSITRSRSSNNDDEDLTPEQKAEREKERRMANNARERLRVRDINEAFKELGRMVQLHLKSDKPQTKLLILHQAVAVILSLEQQVRERNLNPKAACLKRREEEKVSSEPPPLSLAGPHPGMGDASNHMGQM

SEQ ID NO: 19620 - protein, 687 aa, Homo sapiens
MAASTAAGKQRIPKVAKVKNKAPAEVQITAEQLLREAKERELELLPPPPQQKITDEEELNDYKLRKRKTFEDNIRKNRTVISNWIKYAQWEESLKEIQRARSIYERALDVDYRNITLWLKYAEMEMKNRQVNHARNIWDRAITTLPRVNQFWYKYTYMEEMLGNVAGARQVFERWMEWQPEEQAWHSYINFELRYKEVDRARTIYERFVLVHPDVKNWIKYARFEEKHAYFAHARKVYERAVEFFGDEHMDEHLYVAFAKFEENQKEFERVRVIYKYALDRISKQDAQELFKNYTIFEKKFGDRRGIEDIIVSKRRFQYEEEVKANPHNYDAWFDYLRLVESDAEAEAVREVYERAIANVPPIQEKRHWKRYIYLWINYALYEELEAKDPERTRQVYQASLELIPHKKFTFAKMWILYAQFEIRQKNLSLARRALGTSIGKCPKNKLFKVYIELELQLREFDRCRKLYEKFLEFGPENCTSWIKFAELETILGDIDRARAIYELAISQPRLDMPEVLWKSYIDFEIEQEETERTRNLYRRLLQRTQHVKVWISFAQFELSSGKEGSLTKCRQIYEEANKTMRNCEEKEERLMLLESWRSFEEEFGTASDKERVDKLMPEKVKKRRKVQTDDGSDAGWEEYFDYIFPEDAANQPNLKLLAMAKLWKKQQQEKEDAEHHPDEDVDESES

SEQ ID NO: 19621 - protein, 206 aa, Homo sapiens
MILVCDRVSEDGINRQKAQEWCIKHGFELVELSPEELPEEDDDFPESTGVKRIVQALNANVWSNVVMKNDRNQGFSLLNSLTGTNHSIGSADPCHPEQPHLPAADSTESLSDHRGGASNTTDAQVDSIVDPMLDLDIQELASLTTGGGDVENFERLFSKLKEMKDKAATLPHEQRKVHAEKVAKAFWMAIGGDRDEIEGLSSDEEH

SEQ ID NO: 19622 - protein, 152 aa, Homo sapiens
ETTIKFAPANLGYARGVDPPPCDAGTDQDSRWRLQYDVYQYFLPENDLTEEMLLKHLQRMVSVPQVKASALKVVTLTANDKTSVSFSSLPGQGVIYNVIVWDPFLNTSAAYIPAHTYACSFEAGEGSCASLAVLYLLLCLSTSSPSFITGLF

SEQ ID NO: 19623 - protein, 444 aa, Homo sapiens
MGSPAHRPALLLLLPPLLLLLLLRVPPSRSFPDTPWCSPIKVKYGDVYCRAPQGGYYKTALGTRCDIRCQKGYELHGSSLLICQSNKRWSDKVICKQKRCPTLAMPANGGFKCVDGAYFNSRCEYYCSPGYTLKGERTVTCMDNKAWSGRPASCVDMEPPRIKCPSVKERIAEPNKLTVRVSWETPEGRDTADGILTDVILKGLPPGSNFPEGDHKIQYTVYDRAENKGTCKFRVKVRVKRCGKLNAPENGYMKCSSDGDNYGATCEFSCIGGYELQGSPARVCQSNLAWSGTEPTCAAMNVNVGVRTAAALLDQFYEKRRLLIVSTPTARNLLYRLQLGMLQQAQCGLDLRHITVVELVGVFPTLIGRIGAKIMPPALALQLRLLLRIPLYSFSMVLVDKHGMDKERYVSLVMPVALFNLIDTFPLRKEEMVLQAEMSQTCNT

SEQ ID NO: 19624 - protein, 453 aa, Homo sapiens
GEIASTTPPSRAWTPTQEGPGDMGRPWVAEVVSQGAGIGIQGTITSSTASGDDEETTTTTTIITTTITTVQTPGPCSWNFSGPEGSLDSPTDLSSPTDVGLDCFFYISVYPGYGVEIKVQNISLREGETVTVEGLGGPDPLPLANQSFLLRGQVIRSPTHQAALRFQSLPPPAGPGTFHFHYQAYLLSCHFPRRPAYGDVTVTSLHPGGSARFHCATGYQLKGARHLTCLNATQPFWDSKEPVCIAACGGVIRNATTGRIVSPGFPGNYSNNLTCHWLLEAPEGQRLHLHFEKVSLAEDDDRLIIRNGDNVEAPPVYDSYEVEYLPIEGLLSSGKHFFVELSTDSSGAAAGMALRYEAAHPPTLWVPLWSSAATLATPWSRAPSSSSVLTPTTPSGMRQSQPAEPCAAGRSQTRLAWYSLPTGQSPTVVGRIVSGVCMWKRTSASCWTSECCA

SEQ ID NO: 19625 - protein, 913 aa, Homo sapiens
MEVGSEEEKWEKLDAEFDHFVVDMKPFVLKLPHRTERQRCALWIRKLCEPSGTGAGIMGRKNRNLYAKLLLHMLKRGALEGPFTHRPEPGTLKILPSYMSIYFDEPNPARAKGSSPEGLPAWVLGELETSEHKLNESWKLSSGEDNTLVQSPTDVYSREQYTGKLRVRSHSLSPTHREDGQNITPKICEVYSKKSPVSLDDSDIEARLNSWNLGLDMKTKMMEAKFHEEKLKLQQKHDADVQKILERKNNEIEELKTLYRSKQHETEETIRKLEKKVQTLIRDCQVIRETKEDQIAELKKICEQSTESLNNDWEKKLHNAVAEMEQEKFDLQKQHTENIQELLEDTNVRLNKMESEYMAQTQSTNHMIKELEARVQQLTGEAENSNLQRQKLIQEKAELERCYQITCSELQEVKARRNTLHKEKDHLVNDYEQNMKLLQTKYDADINLLKQEHALSASKASSMIEELEQNVCQLKQQLQESELQRKQQLRDQENKFQMEKSHLKHIYEKKAHDLQSELDKGKEDTQKKIHKFEEALKEKEEQLTRVTEVQRLQAQQADAALEEFKRQVELNSEKVYAEMKEQMEKVEADLTRSKSLREKQSKEFLWQLEDIRQRYEQQIVELKLEHEQEKTHLLQQHNAEKDSLVRDHEREIENLEKQLRAANMEHENQIQEFKKRDAQVIADMEAQVHKLREELINVNSQRKQQLVELGLLREEEKQRATREHEIVVNKLKAESEKMKIELKKTHAAETEMTLEKANSKLKQIEKEYTQKLAKSSQIIAELQTTISSLKEENSQQQLAAERRLQDVRQKFEDEKKQLIRDNDQAIKVLQDELENRSNQVRCAEKKLQHKELESQEQITYIRQEYETKLKGLMPASLRQELEDTISSLKSQVNFLQKRASILQEELTTYQGRR

SEQ ID NO: 19626 - protein, 68 aa, Homo sapiens
MLKLEAEKKKLRTILQVQYVLQNLTQEHVQKDFKGGLNGAVYLPSKELDYLIKFSKLTCPERNESLSV

SEQ ID NO: 19627 - protein, 425 aa, Homo sapiens
MASPDRSKRKILKAKKTMPLSCRKQVEMLNKSRNVEALKTAIGSNVPSGNQSFSPSVITRTTEITKCSPSENGASSLDSNKNSISEKSKVFSQNCIKPVEEIVHSETKLEQVVCSYQKPSRTTESPSRVFTEEAKDSLNTSENDSEHQTNVTRSLFEHEGACSLKSSCCPPSVLSGVVQMPESTVTSTVGDKKTDQMVFHLETNSNSESHDKRQSDNILCSEDSGFVPVEKTPNLVNSVTSNNCADDILKTDECSRTSISNCESADSTWQSSLDTNNNSHYQKKRMFSENEENVKRMKTSEQINENICVSLERQTAFLEQVRHLIQQEIYSINYELFDKKLKELNQRIGKTECRNKHEGIADKLLAKIAKLQRRIKTVLLFQRNCLKPNMLSSNGASKIPEKLHQEILAILPMLKLWLYRRNLIL

SEQ ID NO: 19628 - protein, 385 aa, Homo sapiens
MDCSNGCSAECTGEGGSKEVVGTFKAKDLIVTPATILKEKPDPNNLVFGTVFTDHMLTVEWSSEFGWEKPHIKPLQNLSLHPGSSALHYAVELFEGLKAFRGVDNKIRLFQPNLNMDRMYRSAVRATLPVFDKEELLECIQQLVKLDQEWVPYSTSASLYIRPTFIGTEPSLGVKKPTKALLFVLLSPVGPYFSSGTFNPVSLWANPKYVRAWKGGTGDCKMGGNYGSSLFAQCEAVDNGCQQVLWLYGEDHQITEVGTMNLFLYWINEDGEEELATPPLDGIILPGVTRRCILDLAHQWGEFKVSERYLTMDDLTTALEGNRVREMFGSGTACVVCPVSDILYKGETIHIPTMENGPKLASRILSKLTDIQYGREESDWTIVLS

SEQ ID NO: 19629 - protein, 821 aa, Homo sapiens
MVTNKMTAAFRNPSGKQVATDKVAEKLSSTLSWVKNTVSHTVSQMASQVASPSTSLHTTSSSTTLSTPALSPSSPSQLSPDDLELLAKLEEQNRLLETDSKSLRSVNGSRRNSGSSLVSSSSASSNLSHLEEDSWILWGRIVNEWEDVRKKKEKQVKELVHKGIPHHFRAIVWQLLCSAQSMPIKDQYSELLKMTSPCEKLIRRDIARTYPEHNFFKEKDSLGQEVLFNVMKAYSLVDREVGYCQGSAFIVGLLLMQMPEEEAFCVFVKLMQDYRLRELFKPSMAELGLCMYQFECMIQEHLPELFVHFQSQSFHTSMYASSWFLTIFLTTFPLPIATRIFDIFMSEGLEIVFRVGLALLQMNQAELMQLDMEGMLQHFQKVIPHQFDGVPDKLIQAAYQVKYNSKKMKKLEKEYTTIKTKEMEEQVEIKRLRTENRLLKQRIETLEKESASLADRLIQHKCSSNYNEDFVLQLEKELVQARLSEAESQCALKEMQDKVLDIEKRNNSLPDENNIARLQEELIAVKLREAEAIMGLKELRQQVKDLEEHWQRHLARTTGRWKDPPKKNAMNELQDELMTIRLREAETQAEIREIKQRMMEMETQNQINSNHLRRAEQEVISLQEKVQYLSAQNKGLLTQLSEAKRKQAEIECKNKEEVMAVRLREADSIAAVAELRQHIAELEIQKEEGKLQGQLNKSDSNQYIGELKDQIAELNHELRCLKGQRGFSGQPPFDGIHIVNHLIGDDESFHSSDEDFIDNSLQETGVGFPLHGKSGSMSLDPAVADGSESETEDSVLETRESNQVVQKERPPRRRESYSTTV

SEQ ID NO: 19630 - protein, 349 aa, Homo sapiens
MKDCSNGCSAECTGEGGSKEVVGTFKAKDLIVTPATILKEKPDPNNLVFGTVFTDHMLTVEWSSEFGWEKPHIKPLQNLSLHPGSSALHYAVEVFDKEELLECIQQLVKLDQEWVPYSTSASLYIRPTFIGTEPSLGVKKPTKALLFVLLSPVGPYFSSGTFNPVSLWANPKYVRAWKGGTGDCKMGGNYGSSLFAQCEAVDNGCQQVLWLYGEDHQITEVGTMNLFLYWINEDGEEELATPPLDGIILPGVTRRCILDLAHQWGEFKVSERYLTMDDLTTALEGNRVREMFGSGTACVVCPVSDILYKGETIHIPTMENGPKLASRILSKLTDIQYGREESDWTIVLS

SEQ ID NO: 19631 - protein, 233 aa, Homo sapiens
MSSSGGAPGASASSAPPAQEEGMTWWYRWLCRLSGVLGAVSCAISGLFNCITIHPLNIAAGVWMIMNAFILLLCEAPFCCQFIEFANTVAEKVDRLRSWQKAVFYCGMAVVPIVISLTLTTLLGNAIAFATGVLYGLSALGKKAQTEAGSFAAQHPREPGPFSEGTRQAFATPAVVSGEIRMPAGAMRSPMPGSSSRGSRRMRRSSRRPWRGSCEGLGAPPSLSPLLALCGSK

SEQ ID NO: 19632 - protein, 1205 aa, Homo sapiens
MAAQSSLYNDDRNLLRIREKERRNQEAHQEKEAFPEKIPLFGEPYKTAKGDELSSRIQNMLGNYEEVKEFLSTKSHTHRLDASENRLGKPKYPLIPDKGSSIPSSSFHTSVHHQSIHTPASGPLSVGNISHNPKMAQPRTEPMPSLHAKSCGPPDSQHLTQDRLGQEGFGSSHHKKGDRRADGDHCASVTDSAPERELSPLISLPSPVPPLSPIHSNQQTLPRTQGSSKVHGSSNNSKGYCPAKSPKDLAVKVHDKETPQDSLVAPAQPPSQTFPPPSLPSKSVAMQQKPTAYVRPMDGQDQAPSESPELKPLPEDYRQQTFEKTDLKVPAKAKLTKLKMPSQSVEQTYSNEVHCVEEILKEMTHSWPPPLTAIHTPSTAEPSKFPFPTKDSQHVSSVTQNQKQYDTSSKTHSNSQQGTSSMLEDDLQLSDSEDSDSEQTPEKPPSSSAPPSAPQSLPEPVASAHSSSAESESTSDSDSSSDSESESSSSDSEENEPLETPAPEPEPPTTNKWQLDNWLTKVSQPAAPPEGPRSTEPPRRHPESKGSSDSATSQEHSESKDPPPKSSSKAPRAPPEAPHPGKRSCQKSPAQQEPPQRQTVGTKQPKKPVKASARAGSRTSLQGEREPGLLPYGSRDQTSKDKPKVKTKGRPRAAASNEPKPAVPPSSEKKKHKSSLPAPSKALSGPEPAKDNVEDRTPEHFALVPLTESQGPPHSGSGSRTSGCRQAVVVQEDSRKDRLPLPLRDTKLLSPLRDTPPPQSLMVKITLDLLSRIPQPPGKGSRQRKAEDKQPPAGKKHSSEKRSSDSSSKLAKKRKGEAERDCDNKKIRLEKEIKSQSSSSSSSHKESSKTKPSRPSSQSSKKEMLPPPPVSSSSQKPAKPALKRSRREADTCGQDPPKVPAVPRATTDSSIPKQRRVEGKGSRSSSEHKGSSGDTANPFPVPSLPNGNSKPGKPQVKFDKQQADLHMREAKKMKQKAELMTDRVGKAFKYLEAVLSFIECGIATESESQSSKSAYSVYSETVDLIKFIMSLKSFSDATAPTQEKIFAVLCMRCQSILNMAMFRCKKDIAIKYSRTLNKHFESSSKVAQAPSPCIARSTGTPSPLSPMPSPASSVGSQSSAGSVGSSGVAATISTPVTIQNMTSSYVTITSHVLTAFDLWEQAEALTRKNKEFFARLSQMCAPWPSTAVWWTWCTIHDRVFSSYKN

SEQ ID NO: 19633 - protein, 656 aa, Homo sapiens
MAVFNQKSVSDMIKEFRKNWRALCNSERTTLCGADSMLLALQLSMAENNKQHSGEFTVSLSDVLLTWKYLLHEKLNLPVENMDVTDHYEDVRKIYDDFLKNSNMLDLIDVYQKCRALTSNCENYNTVSPGSTIQPPSERGSLLLSRPDLLAPGEDPPVSASLTLERQKGESLLAWSWSLNFRLPGIPITVQKKRRDLKKLAAVMRQSQLLDFLSGKQYAVGDETDLSIPTSPTSKYNRDNEKVQLLARKIIFSYLNLLVNSKNDLAVAYILNIPDRGLGREAFTDLKHAAREKQMSIFLVATSFIRTIELGGKGYAPPPSDPLRTHVKGLSNFINFIDKLDEILGEIPNPSIAGGQILSVIKMQLIKGQNSRDPFCKAIEEVAQDLDLRIKNIINSQEGVVALSTTDISPARPKSHAINHGTAYCGRDTVKALLVLLDEEAANAPTKNKAELLYDEENTIHHHGTSILTLFRSPTQVNNSIKPLRERICVSMQEKKIKMKQTLIRSQFACTYKDDYMISKDNWNNVNLASKPLCVLYMENDLSEGVNPSVGRSTIGTSFGNVHLDRSKNEKVSRKSTSQTGNKSSKRKQVDLDGENILCDNRNEPPQHKNAKIPKKSNDSQNRLYGKLAKVAKSNKCTAKDKLISGQAKLTQFFRL

SEQ ID NO: 19634 - protein, 2457 aa, Homo sapiens
MRGRRGRPPKQPAAPAAERCAPAPPPPPPPPTSGPIGGLRSRHRGSSRGRWAAAQAEVAPKTRLSSPRGGSSSRRKPPPPPPAPPSTSAPGRGGRGGGGGRTGGGGGGGHLARTTAARRAVNKVVYDDHESEEEEEEEDMVSEEEEEEDGDAEETQDSEDDEEDEMEEDDDDSDYPEEMEDDDDDASYCTESSFRSHSTYSSTPGRRKPRVHRPRSPILEEKDIPPLEFPKSSEDLMVPNEHIMNVIAIYEVLRNFGTVLRLSPFRFEDFCAALVSQEQCTLMAEMHVVLLKAVLREEDTSNTTFGPADLKDSVNSTLYFIDGMTWPEVLRVYCESDKEYHHVLPYQEAEDYPYGPVENKIKVLQFLVDQFLTTNIAREELMSEGVIQYDDHCRVCHKLGDLLCCETCSAVYHLECVKPPLEEVPEDEWQCEVCVAHKVPGVTDCVAEIQKNKPYIRHEPIGYDRSRRKYWFLNRRLIIEEDTENENEKKIWYYSTKVQLAELIDCLDKDYWEAELCKILEEMREEIHRHMDITEDLTNKARGSNKSFLAAANEEILESIRAKKGDIDNVKSPEETEKDKNETENDSKDAEKNREEFEDQSLEKDSDDKTPDDDPEQGKSEEPTEVGDKGNSVSANLGDNTTNATSEETSPSEGRSPVGCLSETPDSSNMAEKKVASELPQDVPVGDFKSEKSNGELSESPGAGKGASGSTRIITRLRNPDSKLSQLKSQQVAAAAHEANKLFKEGKEVLVVNSQGEISRLSTKKEVIMKGNINNYFKLGQEGKYRVYHNQYSTNSFALNKHQHREDHDKRRHLAHKFCLTPAGEFKWNGSVHGSKVLTISTLRLTITQLENNIPSSFLHPNWASHRANWIKAVQMCSKPREFALALAILECAVKPVVMLPIWRESLGHTRLHRMTSIEREEKEKVKKKEKKQEEEETMQQATWVKYTFPVKHQVWKQKGEEYRVTGYGGWSWISKTHVYRFVPKLPGNTNVNYRKSLEGTKNNMDENMDESDKRKCSRSPKKIKIEPDSEKDEVKGSDAAKGADQNEMDISKITEKKDQDVKELLDSDSDKPCKEEPMEVDDDMKTESHVNCQESSQVDVVNVSEGFHLRTSYKKKTKSSKLDGLLERRIKQFTLEEKQRLEKIKLEGGIKGIGKTSTNSSKNLSESPVITKAKEGCQSDSMRQEQSPNANNDQPEDLIQGCSESDSSVLRMSDPSHTTNKLYPKDRVLDDVSIRSPETKCPKQNSIENDIEEKVSDLASRGQEPSKSKTKGNDFFIDDSKLASADDIGTLICKNKKPLIQEESDTIVSSSKSALHSSVPKSTNDRDATPLSRAMDFEGKLGCDSESNSTLENSSDTVSIQDSSEEDMIVQNSNESISEQFRTREQDVEVLEPLKCELVSGESTGNCEDRLPVKGTEANGKKPSQQKKLEERPVNKCSDQIKLKNTTDKKNNENRESEKKGQRTSTFQINGKDNKPKIYLKGECLKEISESRVVSGNVEPKVNNINKIIPENDIKSLTVKESAIRPFINGDVIMEDFNERNSSETKSHLLSSSDAEGNYRDSLETLPSTKESDSTQTTTPSASCPESNSVNQVEDMEIETSEVKKVTSSPITSEEESNLSNDFIDENGLPINKNENVNGESKRKTVITEVTTMTSTVATESKTVIKVEKGDKQTVVSSTENCAKSTVTTTTTTVTKLSTPSTGGSVDIISVKEQSKTVVTTTVTDSLTTTGGTLVTSMTVSKEYSTRDKVKLMKFSRPKKTRSGTALPSYRKFVTKSSKKSIFVLPNDDLKKLARKGGIREVPYFNYNAKPALDIWPYPSPRPTFGITWRYRLQTVKSLAGVSLMLRLLWASLRWDDMAAKAPPGGGTTRTETSETEITTTEIIKRRDVGPYGIRSEYCIRKIICPIGVPETPKETPTPQRKGLRSSALRPKRPETPKQTGPVIIETWVAEEELELWEIRAFAERVEKEKAQAVEQQAKKRLEQQKPTVIATSTTSPTSSTTSTISPAQKVMVAPISGSVTTGTKMVLTTKVGSPATVTFQQNKNFHQTFATWVKQGQSNSGVVQVQQKVLGIIPSSTGTSQQTFTSFQPRTATVTIRPNTSGSGGTTSNSQVITGPQIRPGMTVIRTPLQQSTLGKAIIRTPVMVQPGAPQQVMTQIIRGQPVSTAVSAPNTVSSTPGQKSLTSATSTSNIQSSASQPPRPQQGQVKLTMAQLTQLTQGHGGNQGLTVVIQGQGQTTGQLQLIPQGVTVLPGPGQQLMQAAMPNGTVQRFLFTPLATTATTASTTTTTVSTTAAGTGEQRQSKLSPQMQVHQDKTLPPAQSSSVGPAEAQPQTAQPSAQPQPQTQPQSPAQPEVQTQPEVQTQTTVSSHVPSEAQPTHAQSSKPQVAAQSQPQSNVQGQSPVRVQSPSQTRIRPSTPSQLSPGQQSQVQTTTSQPIPIQPHTSLQIPSQGQPQSQ

SEQ ID NO: 19635 - protein, 1266 aa, Homo sapiens
MKVTVCFGRTRVVVPCGDGHMKVFSLIQQAVTRYRKAIAKDPNYWIQVHRLEHGDGGILDLDDILCDVADDKDRLVAVFDEQDPHHGGDGTSASSTGTQSPEIFGSELGTNNVSAFQPYQATSEIEVTPSVLRANMPLHVRRSSDPALIGLSTSVSDSNFSSEEPSRKNPTRWSTTAGFLKQNTAGSPKTCDRKDEDGTEEDNSRVEPVGHADTGLEHIPNFSLDDMVKLVEVPNDGGPLGIHVVPFSARGGRTLGLLVKRLEKGGKAEHENLFRENDCIVRINDGDLRNRRFEQAQHMFRQAMRTPIIWFHVVPAANKEQYEQLSQSEKNNYYSSRFSPDSQYIDNRSVNSAGLHTVQRAPRLNHPPEQIDSHSRLPHSAHPSGKPPSAPASAPQNVFSTTVSSGYNTKKIGKRLNIQLKKGTEGLGFSITSRDVTIGGSAPIYVKNILPRGAAIQDGRLKAGDRLIEVNGVDLVGKSQEEVVSLLRSTKMEGTVSLLVFRQEDAFHPRELKAEDEDIVLTPDGTREFLTFEVPLNDSGSAGLGVSVKGNRSKENHADLGIFVKSIINGGAASKDGRLRVNDQLIAVNGESLLGKTNQDAMETLRRSMSTEGNKRGMIQLIVARRISKCNELKSPGSPPGPELPIETALDDRERRISHSLYSGIEGLDESPSRNAALSRIMGKYQLSPTVNMPQDDTVIIEDDRLPVLPPHLSDQSSSSSHDDVGFVTADAGTWAKAAISDSADCSLSPDVDPVLAFQREGFGRQIADETKLNTVDDQKAGSPSRDVGPSLGLKKSSSLESLQTAVAEVTLNGDIPFHRPRPRIIRGRGCNESFRAAIDKSYDKPAVDDDDEGMETLEEDTEESSRSGRESVSTASDQPSHSLERQMNGNQEKGDKTDRKKDKTGKEKKKDRDKEKDKMKAKKGMLKGLGDMFRFGKHRKDDKIEKTGKIKIQESFTSEEERIRMKQEQERIQAKTREFRERQARERDYAEIQDFHRTFGCDDELMYGGVSSYEGSMALNARPQSPREGHMMDALYAQVKKPRNSKPSPVDSNRSTPSNHDRIQRLRQEFQQAKQDEDVEDRRRTYSFEQPWPNARPATQSGRHSVSVEVQMQRQRQEERESSQQAQRQYSSLPRQSRKNASSVSQDSWEQNYSPGEGFQSAKENPRYSSYQGSRNGYLGGHGFNARVMLETQELLRQEQRRKEQQMKKQPPSEGPSNYDSYKKVQDPSYAPPKGPFRQDVPPSPSQVARLNRLQTPEKGRPFYS

SEQ ID NO: 19636 - protein, 591 aa, Homo sapiens
MPRYTVHVRGEWLAVPCQDAQLTVGWLGREAVRRYIKNKPDNGGFTSVDDAHFLVRRCKGLGLLDNEDRLEVALENNEFVEVVIEGDAMSPDFIPSQPEGVYLYSKYREPEKYIELDGDRLTTEDLVNLGKGRYKIKLTPTAEKRVQKSREVIDSIIKEKTVVYGITTGFGKFARTVIPINKLQELQVNLVRSHSSGVGKPLSPERCRMLLALRINVLAKGYSGISLETLKQVIEMFNASCLPYVPEKGTVGASGDLAPLSHLALGLVGEGKMWSPKSGWADAKYVLEAHGLKPVILKPKEGLALINGTQMITSLGCEAVERASAIARQADIVAALTLEVLKGTTKAFDTDIHALRPHRGQIEVAFRFRSLLDSDHHPSEIAESHRFCDRVQDAYTLRCCPQVHGVVNDTIAFVKNIITTELNSATDNPMVFANRGETVSGGNFHGEYPAKALDYLAIGIHELAAISERRIERLCNPSLSELPAFLVAEGGLNSGFMIAHCTAAALVSENKALCHPSSVDSLSTSAATEDHVSMGGWAARKALRVIEHVEQVLAIELLAACQGIEFLRPLKTTTPLEKVYDLVRSVVRFGK

SEQ ID NO: 19637 - protein, 652 aa, Homo sapiens
MTSAQYKIKILIEGLHHGQRPGPAPPRQPGSFCWALKADGIMWLAKACWSIQSEMPCIQAQYGTPAPSPGPRDHLASDPLTPEFIKPTMDLASPEAAPAAPTALPSFSTFMDGYTGEFDTFLYQLPGTVQPCSSASSSASSTSSSSATSPASASFKFEDFQVYGCYPGPLSGPVDEALSSSGSDYYGSPCSAPSPSTPSFQPPQLSPWDGSFGHFSPSQTYEGLRAWTEQLPKASGPPQPPAFFSFSPPTGPSPSLAQSPLKLFPSQATHQLGEGESYSMPTAFPGLAPTSPHLEGSGILDTPVTSTKARSGAPGGSEGRCAVCGDNASCQHYGVRTCEGCKGFFKRTVQKNAKYICLANKDCPVDKRRRNRCQFCRFQKCLAVGMVKEVVRTDSLKGRRGRLPSKPKQPPDASPANLLTSLVRAHLDSGPSTAKLDYSKFQELVLPHFGKEDAGDVQQFYDLLSGSLEVIRKWAEKIPGFAELSPADQDLLLESAFLELFILRLAYRSKPGEGKLIFCSGLVLHRLQCARGFGDWIDSILAFSRSLHSLLVDVPAFACLSALVLITDRHGLQEPRRVEELQNRIASCLKEHVAAVAGEPQPASCLSRLLGKLPELRTLCTQGLQRIFYLKLEDLVPPPPIIDKIFMDTLPF

SEQ ID NO: 19638 - protein, 236 aa, Homo sapiens
MAEPSAATQSHSISSSSFGAEPSAPGGGGSPGACPALGTKSCSSSCAVHDLIFWRDVKKTGFVFGTTLIMLLSLAAFSVISVVSYLILALLSVTISFRIYKSVIQAVQKSEEGHPFKAYLDVDITLSSEAFHNYMNAAMVHINRALKLIIRLFLVEDLVDSLKLAVFMWLMTYVGAVFNGITLLILAELLIFSVPIVYEKYKTQIDHYVGIARDQTKSIVEKIQAKLPGIAKKKAE

SEQ ID NO: 19639 - protein, 672 aa, Homo sapiens
MASFVTEVLAHSGRLEKEDLGTRISRLTRRVEEIKGEVCNMISKKYSEFLPSMQSAQGLITQVDKLSEDIDLLKSRIESEVRRDLHVSTGEFTDLKQQLERDSVVLSLLKQLQEFSTAIEEYNCALTEKKYVTGAQRLEEAQKCLKLLKSRKCFDLKILKSLSMELTIQKQNILYHLGEEWQKLIVWKFPPSKDTSSLESYLQTELHLYTEQSHKEEKTPMPPISSVLLAFSVLGELHSKLKSFGQMLLKYILRPLASCPSLHAVIESQPNIVIIRFESIMTNLEYPSPSEVFTKIRLVLEVLQKQLLDLPLDTDLENEKTSTVPLAEMLGDMIWEDLSECLIKNCLVYSIPTNSSKLQQYEEIIQSTEEFENALKEMRFLKGDTTDLLKYARNINSHFANKKCQDVIVAARNLMTSEIHNTVKIIPDSKINVPELPTPDEDNKLEVQKVSNTQYHEVMNLEPENTLDQHSFSLPTCRISESVKKLMELAYQTLLEATTSSDQCAVQLFYSVRNIFHLFHDVVPTYHKENLQKLPQLAAIHHNNCMYIAHHLLTLGHQFRLRLAPILCDGTATFVDLVPGFRRLGTECFLAQMRAQKGELLERLSSARNFSNMDDEENYSAASKAVRQVLHQLKRLGIVWQDVLPVNIYCKAMGTLLNTAISEVIGKITALE

SEQ ID NO: 19640 - protein, 622 aa, Homo sapiens
MPGGGPQGAPAAAGGGGVSHRAGSRDCLPPAACFRRRRLARRPGYMRSSTGPGIGFLSPAVGTLFRFPGGVSGEESHHSESRARQCGLDSRGLLVRSPVSKSAAAPTVTSVRGTSAHFGIQLRGGTRLPDRLSWPCGPGSAGWQQEFAAMDSSETLDASWEAACSDGARRVRAAGSLPSAELSSNSCSPGCGPEVPPTPPGSHSAFTSSFSFIRLSLGSAGERGEAEGCPPSREAESHCQSPQEMGAKAASLDGPHEDPRCLSRPFSLLATRVSADLAQAARNSSRPERDMHSLPDMDPGSSSSLDPSLAGCGGDGSSGSGDAHSWDTLLRKWEPVLRDCLLRNRRQMEVISLRLKLQKLQEDAVENDDYDKAETLQQRLEDLEQEKISLHFQLPSRQPALSSFLGHLAAQVQAALRRGATQQASGDDTHTPLRMEPRLLEPTAQDSLHVSITRRDWLLQEKQQLQKEIEALQARMFVLEAKDQQLRREIEEQEQQLQWQGCDLTPLVGQLSLGQLQEVSKALQDTLASAGQIPFHAEPPETIRSLQERIKSLNLSLKEITTKVCMSEKFCSTLRKKVNDIETQLPALLEAKMHAISGGHGTLWHILPDVSGGIVGAHPTFY

SEQ ID NO: 19641 - protein, 302 aa, Homo sapiens
MVHQRIASWQNLGAVYCSTVVPSDDVTVVYQNGLPVISVRLPSRRERCQFTLKPISDSVGVFLRQLQEEDRGIDRVAIYSPDGVRVAASTGIDLLLLDDFKLVINDLTYHVRPPKRDLLSHENAATLNDVKTLVQQLYTTLCIEQHQLNKERELIERLEDLKEQLAPLEKVRIEISRKAEKRTTLVLWGGLAYMATQFGILARLTWWEYSWDIMEPVTYFITYGSAMAMYAYFVMTRQEYVYPEARDRQYLLFFHKGAKKSRFDLEKYNQLKDAIAQAEMDLKRLRDPLQVHLPLRQIGEKD

SEQ ID NO: 19642 - protein, 133 aa, Homo sapiens
MAVSTVFSTSSLMLALSRHSLLSPLLSVTSFRRFYRGDSPTDSQKDMIEIPLPPWQERTDESIETKRARLLYESRKRGMLENCILLSLFAKEHLQHMTEKQLNLYDRLINEPSNDWDIYYWATGPLGPCPTAS

SEQ ID NO: 19643 - protein, 1094 aa, Homo sapiens [sequence omitted]

SEQ ID NO: 19644 - protein, 109 aa, Homo sapiens
MFPFYSCWRTGLLLLLLAVAVRESWQTEEKTCDLVGEKGKESEKELALVKRLKPLFNKSFESTVGQGSDTYIYIFRVCREAGNHTSGAGLVQINKSNGKETVVGRLNET

SEQ ID NO: 19645 - protein, 1003 aa, Homo sapiens
MATPGPRDIPLLPGSPRRLSPQAGSRGGQGPKHGQQCLKMPGPRAPGLQGGSNRDPGQPCGGESTRSSSVINNYLDANEPVSLEARLSRMHFHDSQRKVDYVLAYHYRKRGVHLAQGFPGHSLAIVSNGETGKEPHAGGPGDIELGPLDALEEERKEQREEFEHNLMEAGLELEKDLENKSQGSIFVRIHAPWQVLAREAEFLKIKVPTKKEMYEIKAGGSIAKKFSAALQKLSSHLQPRVPEHSNNKMKNLSYPFSREKMYLYNIQEKDTFFDNATRSRIVHEILKRTACSRANNTMGINSLIANNIYEAAYPLHDGEYDSPEDDMNDRKLLYQEWARYGVFYKFQPIDLIRKYFGEKIGLYFAWLGLYTSFLIPSSVIGVIVFLYGCATIEEDIPSREMCDQQNAFTMCPLCDKSCDYWNLSSACGTAQASHLFDNPATVFFSIFMALWATMFLENWKRLQMRLGYFWDLTGIEEEEVSSQEHSRPEYETKVREKMLKESNQSAVQKLETNTTECGDEDDEDKLTWKDRFPGYLMNFASILFMIALTFSIVFGVIVYRITTAAALSLNKATRSNVRVTVTATAVIINLVVILILDEIYGAVAKWLTKIEVPKTEQTFEERLILKAFLLKFVNAYSPIFYVAFFKGRFVGRPGSYVYVFDGYRMEECAPGGCLMELCIQLSIIMLGKQLIQNNIFEIGVPKLKKLFRKLKDETEAGETDSAHSKHPEQWDLDYSLEPYTGLTPEYMEMIIQFGFVTLFVASFPLAPVFALLNNVIEVRLDAKKFVTELRRPDAVRTKDIGIWFDILSGIGKFSVISNAFVIAITSDFIPRLVYQYSYSHNGTLHGFVNHTLSFFNVSQLKEGTQPENSQFDQEVQFCRFKDYREPPWAPNPYEFSKQYWFILSARLAFVIIFQNLVMFLSVLVDWMIPDIPTDISDQIKKEKSLLVDFFLKEEHEKLKLMDEPALRSPGGGDRSRSRAASSAPSGQSQLGSMMSSGSQHTNV

SEQ ID NO: 19646 - protein, 1101 aa, Homo sapiens
MSAAPAYSEDKGGSAGPGEPEYGHDPASGGIFSSDYKRHDDLKEMLDTNKDSLKLEAMKRIVAMIARGKNASDLFPAVVKNVACKNIEVKKLVYVYLVRYAEEQQDLALLSISTFQRGLKDPNQLIRASALRVLSSIRVPIIVPIMMLAIKEAASDMSPYVRKTAAHAIPKLYSLDSDQKDQLIEVIEKLLADKTTLVAGSVVMAFEEVCPERIDLIHKNYRKLCNLLIDVEEWGQVVIISMLTRYARTQFLSPTQNESLLEENAEKAFYGSEEDEAKGAGSEETAAAAAPSRKPYVMDPDHRLLLRNTKPLLQSRSAAVVMAVAQLYFHLAPKAEVGVIAKALVRLLRSHSEVQYVVLQNVATMSIKRRGMFEPYLKSFYIRSTDPTQIKILKLEVLTNLANETNIPTVLREFQTYIRSMDKDFVAATIQAIGRCATNIGRVRDTCLNGLVQLLSNRDELVVAESVVVIKKLLQMQPAQHGEIIKHLAKLTDNIQVPMARASILWLIGEYCEHVPRIAPDVLRKMAKSFTAEEDIVKLQVINLAAKLYLTNSKQTKLLTQYVLSLAKYDQNYDIRDRARFTRQLIVPSEQGGALSRHAKKLFLAPKPAPVLESSFKDRDHFQLGSLSHLLNAKATGYQELPDWPEEAPDPSVRNVEEEDLSLIETHVGLLGEYTEVPEWTKCSNREKRKEKEKPFYSDSEGESGPTESADSDPESESESDSKSSSESGSGESSSESDNEDQDEDEEKGRGSESEQSEEDGKRKTKKKVPERKGEASSSDEGSDSSSSSSESEMTSESEEEQLEPASWSRKTPPSSKSAPATKEISLLDLEDFTPPSVQPVSPPAIVSTSLAADLEGLTLTDSTLVPSLLSPVSGVGRQELLHRVAGEGLAVDYTFSRQPFSGDPHMVSVHIHFSNSSDTPIKGLHVGTPKLPAGISIQEFPEIESLAPGESATAVMGINFCDSTQAANFQLCTQTRQFYVSIQPPVGELMAPVFMSENEFKKEQGKLMGMNEITEKLMLPDTCRSDHIVVQKVTATANLGRVPCGTSDEYRFAGRTLTGGSLVLLTLDARPAGAAQLTVNSEKMVIGTMLVKDVIQALTQ

SEQ ID NO: 19647 - protein, 160 aa, Homo sapiens
MYNDTLNGSTEKRSAELPDAVGPIVQLQEKLYVPVKEYPDFNFVGRILGPRGLTAKQLEAETGCKIMVRGKGSMRDKKKEEQNRGKPNWEHLNEDLHVLITVEDAQNRAEIKLKRAVEEVKKLLVPAAEGEDSLKKMQLMELAILNGTYRDANIKSPTAQ

SEQ ID NO: 19648 - protein, 1093 aa, Homo sapiens
MGGKAWPRRAVGTAGGPCAEQISAPFQTLLMPHLPLASFRPPFWGLRHSRGLPRFHSVSTQSEPHGSPISRRNREAKQKRLREKQATLEAEIAGESKSPAESIKAWRPKELVLYEIPTKPGEKKDVSGPLPPAYSPRYVEAAWYPWWVREGFFKPEYQARLPQATGETFSMCIPPPNVTGSLHIGHALTVAIQDALVRWHRMRGDQVLWVPGSDHAGIATQAVVEKQLWKERGVRRHELSREAFLREVWQWKEAKGGEICEQLRALGASLDWDRECFTMDVGSSVAVTEAFVRLYKAGLLYRNHQLVNWSCALRSAISDIEVENRPLPGHTQLRLPGCPTPVSFGLLFSVAFPVDGEPDAEVVVGTTRPETLPGDVAVAVHPDDSRYTHLHGRQLRHPLMGQPLPLITDYAVQPHVGTGAVKVTPAHSPADAEMGARHGLSPLNVIAEDGTMTSLCGDWLQGLHRFVAREKIMSVLSEWGLFRGLQNHPMVLPICSRSGDVIEYLLKNQWFVRCQEMGARAAKAVESGALELSPSFHQKNWQHWFSHIGDWCVSRQLWWGHQIPAYLVVEDHAQGEEDCWVVGRSEAEAREVAAELTGRPGAELTLERDPDVLDTWFSSALFPFSALGWPQETPDLARFYPLSLLETGSDLLLFWVGRMVMLGTQLTGQLPFSKVLLHPMVRDRQGRKMSKSLGNVLDPRDIISGVEMQVLQEKLRSGNLDPAELAIVAAAQKKDFPHGIPECGTDALRFTLCSHGVQAGDLHLSVSEVQSCRHFCNKIWNALRFILNALGEKFVPQPAEELSPSSPMDAWILSRLALAAQECERGFLTRELSLVTHALHHFWLHNLCDVYLEAVKPVLWHSPRPLGPPQVLFSCADLGLRLLAPLMPFLAEELWQRLPPRPGCPPAPSISVAPYPSACSLEHWRQPELERRFSRVQEVVQVLRALRATYQLTKARPRVLLQSSEPGDQGLFEAFLEPLGTLGYCGAVGLLPPGAAAPSGWAQAPLSDTAQVYMELQGLVDPQIQLPLLAARRYKLQKQLDSLTARTPSEGEAGTQRQQKLSSLQLELSKLDKAASHLRQLMDEPPAPGSPEL

SEQ ID NO: 19649 - protein, 280 aa, Homo sapiens
MSAVCGGAARMLRTPGRHGYAAEFSPYLPGRLACATAQHYGIAGCGTLLILDPDEAGLRLFRSFDWNDGLFDVTWSENNEHVLITCSGDGSLQLWDTAKAAGPLQVYKEHAQEVYSVDWSQTRGEQLVVSGSWDQTVKLWDPTVGKSLCTFRGHESIIYSTIWSPHIPGCFASASGDQTLRIWDVKAAGVRIVIPAHQAEILSCDWCKYNENLLVTGAVDCSLRGWDLRNVRQPVFELLGHTYAIRRVKMESCPVTQTRSQLTATSAFWVQAVLLPQPTE

SEQ ID NO: 19650 - protein, 1065 aa, Homo sapiens
MDTPENVLQYIQWVEENFPENKEYLITLLEHLMKEFLDKKKYHNDPRFISYCLKFAEYNSDLHQFFEFLYNHGIGTLSSPLYIAWAGHLEAQGELQHASAVLQRGIQNQAEPREFLQQQYRLFQTRLTETHLPAQARTSEPLHNVQVLNQMITSKSNPGNNMACISKNQGSELSGVISSACDKESNMERRVITISKSEYSVHSSLASKVDVEQVVMYCKEKLIRGESEFSFEELRAQKYNQRRKHEQWVNEDRHYMKRKEANAFEEQLLKQKMDELHKKLHQVVETSHEDLPASQERSEVNPARMGPSVGSQQELRAPCLPVTYQQTPVNMEKNPREAPPVVPPLANAISAALVSPATSQSIAPPVPLKAQTVTDSMFAVASKDAGCVNKSTHEFKPQSGAEIKEGCETHKVANTSSFHTTPNTSLGMVQATPSKVQPSPTVHTKEALGFIMNMFQAPTLPDISDDKDEWQSLDQNEDAFEAQFQKNVRSSGAWGVNKIISSLSSAFHVFEDGNKENYGLPQPKNKPTGARTFGERSVSRLPSKPKEEVPHAEEFLDDSTVWGIRCNKTLAPSPKSPGDFTSAAQLASTPFHKLPVESVHILEDKENVVAKQCTQATLDSCEENMVVPSRDGKFSPIQEKSPKQALSSHMYSASLLRLSQPAAGGVLTCEAELGVEACRLTDTDAAIAEDPPDAIAGLQAEWMQMSSLGTVDAPNFIVGNPWDDKLIFKLLSGLSKPVSSYPNTFEWQCKLPAIKPKTEFQLGSKLVYVHHLLGEGAFAQVYEATQGDLNDAKNKQKFVLKVQKPANPWEFYIGTQLMERLKPSMQHMFMKFYSAHLFQNGSVLVGELYSYGTLLNAINLYKNTPEKVMPQGLVISFAMRMLYMIEQVHDCEIIHGDIKPDNFILGNGFLEQDDEDDLSAGLALIDLGQSIDMKLFPKGTIFTAKCETSGFQCVEMLSNKPWNYQIDYFGVAATVYCMLFGTYMKVKNEGGECKPEGLFRRLPHLDMWNEFFHVMLNIPDCHHLPSLDLLRQKLKKVFQQHYTNKIRALRNRLIVLLLECKRSRK

SEQ ID NO: 19651 - protein, 86 aa, Homo sapiens
MAILLSYSERDPVPGGCNLEFDLDIDPNIYLEYNFFETTIKFAPANLGYARGVDPPPCDAGTDQDSRWRLQYDVYQYFLPENDLTE

SEQ ID NO: 19652 - protein, 639 aa, Homo sapiens
MDHLHRGELVAAILRNRSLVEEEDQHMKLSLGGSEMGLSSHLQSSKAGPTRIFTSNTHSSVVLQGFDQLRLEGLLCDVTLMPGDTDDAFPVHRVMMASASDYFKAMFTGGMKEQDLMCIKLHGVSKVGLRKIIDFIYTAKLSLNMDNLQDTLEAASFLQILPVLDFCKVFLISGVTLDNCVEVGRIANTYNLTEVDKYVNSFVLKNFPALLSTGEFLKLPFERLAFVLSSNSLKHCTELELFKATCRWLRLEEPRMDFAAKLMKNIRFPLMTPQELINYVQTVDFMRTDNTCVNLLLEASNYQMMPYMQPVMQSDRTAIRSDTTHLVTLGGVLRQQLVVSKELRMYDEKAHEWKSLAPMDAPRYQHGIAVIGNFLYVVGGQSNYDTKGKTAVDTVFRFDPRYNKWMQVASLNEKRTFFHLSALKGYLYAVGGRNAAGELPTVECYNPRTNEWTYVAKMSEPHYGHAGTVYGGVMYISGGITHDTFQKELMCFDPDTDKWIQKAPMTTVRGLHCMCTVGERLYVIGGNHFRGTSDYDDVLSCEYYSPILDQWTPIAAMLRGQSDVGVAVFENKIYVVGGYSWNNRCMVEIVQKYDPDKDEWHKVFDLPESLGGIRACTLTVFPPEETTPSPSRESPLSAP

SEQ ID NO: 19653 - protein, 92 aa, Homo sapiens
MFPFYSCWRTGLLLLLLAVAVRESWQTEEKTCDLVGEKGKESEKELALVKRLKPLFNKSFESTVGQGSDTYIYIFRVCREAGNHTSGAGLVQ

SEQ ID NO: 19654 - protein, 724 aa, Homo sapiens
MFDTTPHSGRSTPSSSPSLRKRLQLLPPSRPPPEPEPGTMVEKGSDSSSEKGGVPGTPSTQSLGSRNFIRNSKKMQSWYSMLSPTYKQRNEDFRKLFSKLPEAERLIVDYSCALQREILLQGRLYLSENWICFYSNIFRWETTISIQLKEVTCLKKEKTAKLIPNAIQICTESEKHFFTSFGARDRCFLLIFRLWQNALLEKTLSPRELWHLVHQCYGSELGLTSEDEDYVSPLQLNGLGTPKEVGDVIALSDITSSGAADRSQEPSPVGSRRGHVTPNLSRASSDADHGAEEDKEEQVDSQPDASSSQTVTPVAEPPSTEPTQPDGPTTLGPLDLLPSEELLTDTSNSSSSTGEEADLAALLPDLSGRLLINSVFHVGAERLQQMLFSDSPFLQGFLQQCKFTDVTLSPWSGDSKCHQRRVLTYTIPISNPLGPKSASVVETQTLFRRGPQAGGCVVDSEVLTQGIPYQDYFYTAHRYCILGLARNKARLRVSSEIRYRKQPWSLVKSLIEKNSWSGIEDYFHHLERELAKAEKLSLEEGGKDARGLLSGLRRRKRPLSWRAHGDGPQHPDPDPCARAGIHTSGSLSSRFSEPSVDQGPGAGIPSALVLISIVICVSLIILIALNVLLFYRLWSLERTAHTFESWHSLALAKGKFPQTATEWAEILALQKQFHSVEVHKWRQILRASVELLDEMKFSLEKLHQGITVSDPPFDTQPRPDDSFS

SEQ ID NO: 19655 - protein, 883 aa, Homo sapiens
MDTSRLGVLLSLPVLLQLATGGSSPRSGVLLRGCPTHCHCEPDGRMLLRVDCSDLGLSELPSNLSVFTSYLDLSMNNISQLLPNPLPSLRFLEELRLAGNALTYIPKGAFTGLYSLKVLMLQNNQLRHVPTEALQNLRSLQSLRLDANHISYVPPSCFSGLHSLRHLWLDDNALTEIPVQAFRSLSALQAMTLALNKIHHIPDYAFGNLSSLVVLHLHNNRIHSLGKKCFDGLHSLETLDLNYNNLDEFPTAIRTLSNLKELHFYDNPIQFVGRSAFQHLPELRTLTLNGASQITEFPDLTGTANLESLTLTGAQISSLPQTVCNQLPNLQVLDLSYNLLEDLPSFSVCQKLQKIDLRHNEIYEIKVDTFQQLLSLRSLNLAWNKIAIIHPNAFSTLPSLIKLDLSSNLLSSFPITGLHGLTHLKLTGNHALQSLISSENFPELKVIEMPYAYQCCAFGVCENAYKISNQWNKGDNSSMDDLHKKDAGMFQAQDERDLEDFLLDFEEDLKALHSVQCSPSPGPFKPCEHLLDGWLIRIGVWTIAVLALTCNALVTSTVFRSPLYISPIKLLIGVIAAVNMLTGVSSAVLAGVDAFTFGSFARHGAWWENGVGCHVIGFLSIFASESSVFLLTLAALERGFSVKYSAKFETKAPFSSLKVIILLCALLALTMAAVPLLGGSKYGASPLCLPLPFGEPSTMGYMVALILLNSLCFLMMTIAYTKLYCNLDKGDLENIWDCSMVKHIALLLFTNCILNCPVAFLSFSSLINLTFISPEVIKFILLVVVPLPACLNPLLYILFNPHFKEDLVSLRKQTYVWTRSKHPSLMSINSDDVEKQSCDSTQALVTFTSSSITYDLPPSSVPSPAYPVTESCHLSSVAFVPCL

SEQ ID NO: 19656 - protein, 549 aa, Homo sapiens
MSARGVVQHALPTPRRGALTMSLNSSLSCRKELSNLTEEEGGEGGVIITQFIAIIVITIFVCLGNLVIVVTLYKKSYLLTLSNKFVFSLTLSNFLLSVLVLPFVVTSSIRREWIFGVVWCNFSALLYLLISSASMLTLGVIAIDRYYAVLYPMVYPMKITGNRAVMALVYIWLHSLIGCLPPLFGWSSVEFDEFKWMCVAAWHREPGYTAFWQIWCALFPFLVMLVCYGFIFRVARVKARKVHCGTVVIVEEDAQRTGRKNSSTSTSSSGSRRNAFQGVVYSANQCKALITILVVLGAFMVTWGPYMVVIASEALWGKSSVSPSLETWATWLSFASAVCHPLIYGLWNKTVRKELLGMCFGDRYYREPFVQRQRTSRLFSISNRITDLGLSPHLTALMAGGQPLGHSSSTGDTGFSCSQDSGTDMMLLEDYTSDDNPPSHCTCPPKRRSSVTFEDEVEQIKEAAKNSILHVKAEVHKSLDSYAASLAKAIEAEAKINLFGEEALPGVLVTARTVPGGGFGGRRGSRTLVSQRLQLQSIEEGDVLAAEQR

SEQ ID NO: 19657 - protein, 350 aa, Homo sapiens
MERPEAGINSNECENVSRKKKMSEEFEANTMDSLVDMPFATVDIQDDCGITDEPQINLKRSQENEWVKSDQVKKRKKKRKDYQPNYFLSIPITNKEIIKGIKILQNAIIQQDERLAKAMVSDGSFHITLLVMQLLNEDEVNIGIDALLELKPFIEELLQGKHLTLPFQGIGTFGNQVGFVKLAEGDHVNSLLEIAETANRTFQEKGILVGESRSFKPHLTFMKLSKSPWLRKNGVKKIDPDLYEKFISHRFGEEILYRIDLCSMLKKKQSNGYYHCESSIVIGKKPIGIRDLINEALHRETMGLKSKVKQIKELLLKPETQARIRRELFEGRLINNSNSANDVDFSTTLT

SEQ ID NO: 19658 - protein, 952 aa, Homo sapiens
MVVAEDLSALRMAEDSCVDADLPDCNCDVTRVKKLKETLVAVQQLDKNMSSLRTWLAHIESELAKPIVYDSCNSEEIQRKLNEQQELQRDIEKHSTGVASVLNLCEVLLHDCDACATDAECDSIQQATRNLDRRWRNICAMSMERRLKIEETWRLWQKFLDDYSRFEDWLKSSERTAAFPSSSGVIYTVAKEELKKFEAFQRQVHECLTQLELINKQYRRLARENRTDSACSLKQMVHEGNQRWDNLQKRVTSILRRLKHFIGQREEFETARDSILVWLTEMDLQLTNIEHFSECDVQAKIKQLKAFQQEISLNHNKIEQIIAQGEQLIEKSEPLDAAIIEEELDELRRYCQEVFGRVERYHKKLIRLPLPDDEHDLSDRELELEDSAALSDLHWHDRSADSLLSPQPSSNLSLSLAQPLRSERSGRDTPASVDSIPLEWDHDYDLSRDLESAMSRALPSEDEEGQDDKDFYLRGAVGLSGDHSALESQIRQLGKALDDSRFQIQQTENIIRSKTPTGPELDTSYKGYMKLLGECSSSIDSVKRLEHKLKEEEESLPGFVNLHSTETQTAGVIDRWELLQAQALSKELRMKQNLQKWQQFNSDLNSIWAWLGDTEEELEQLQRLELSTDIQTIELQIKKLKELQKAVDHRKAIILSINLCSPEFTQADSKESRDLQDRLSQMNGRWDRVCSLLEEWRGLLQDALMQCQGFHEMSHGLLLMLENIDRRKNEIVPIDSNLDAEILQDHHKQLMQIKHELLESQLRVASLQDMSCQLLVNAEGTDCLEAKEKVHVIGNRLKLLLKEVSRHIKELEKLLDVSSSQQDLSSWSSADELDTSGSVSPTSGRSTPNRQKTPRGKCSLSQPGPSVSSPHSRSTKGGSDSSLSEPGPGRSGRGFLFRVLRAALPLQLLLLLLIGLACLVPMSEEDYSCALSNNFARSFHPMLRYTNGPPPL

SEQ ID NO: 19659 - protein, 464 aa, Homo sapiens
MDVLLTYLPKNYAKSELGAVIFWGQNQTLDPNNMTILNRTFQDEPLIMDFNGDLIPDIFGITNESNQPQILLGGNLSWHPALTTTSKMRIPHSHAFIDLTEDFTADLFLTTLNATTSTFQFEIWENLDGNFSVSTILEKPQNMMVVGQSAFADFDGDGHMDHLLPGCEDKNCQKSTIYLVRSGMKQWVPVLQDFSNKGTLWGFVPFVDEQQPTEIPIPITLHIGDYNMDGYPDALVILKNTSGSNQQAFLLENVPCNNASCEEARRMFKVYWELTDLNQIKDAMVATFFDIYEDGILDIVVLSKGYTKNDFAIHTLKNNFEADAYFVKVIVLSGLCSNDCPRKITPFGVNQPGPYIMYTTVDANGYLKNGSAGQLSQSAHLALQLPYNVLGLGRSANFLDHLYVGIPRPSGEKSIRKQEWTAIIPNSQLIVIPYPHNVPRSSHRCLCFHLGNNWHFTLAGKESR

SEQ ID NO: 19660 - protein, 442 aa, Homo sapiens
MDPLNLSWYDDDLERQNWSRPFNGSDGKADRPHYNYYATLLTLLIAVIVFGNVLVCMAVSREKALQTTTNYLIVSLAVADLLVATLVMPWVVYLEVGEWKFSRIHCDIFVTLDVMMCTASILNLCAISIDRYTAVAMPMLYNTRYSSKRRVTVMISIVWVLSFTISCPLLFGLNNADQNECIIANPAFVVYSSIVSFYVPFIVTLLVYIKIYIVLRRRRKRVNTKRSSRAFRAHLRAPLKGNCTHPEDMKLCTVIMKSNGSFPVNRRRVEAARRAQELEMEMLSSTSPPERTRYSPIPPSHHQLTLPDPSHHGLHSTPDSPAKPEKNGHAKDHPKIAKIFEIQTMPNGKTRTSLKTMSRRKLSQQKEKKATQMLAIVLGVFIICWLPFFITHILNIHCDCNIPPVLYSAFTWLGYVNSAVNPIIYTTFNIEFRKAFLKILHC

SEQ ID NO: 19661 - protein, 149 aa, Homo sapiens
MLRLRSGLRHLRATPNTRGSARLLCAEMPKKAGATTKGKSQSKEPERPLPPLGPVAVDPKGCVTIAIHAKPGSKQNAVTDLTAEAVNVAIAAPPSEGEANAELCRYLSKVLELRKSDVVLDKLCYSIPQQLEETQEGVSGIPDTPCHFL

SEQ ID NO: 19662 - protein, 1136 aa, Homo sapiens
MFLMPTSSELNSGQNFLTQWMTNPSRAGVILNRGFPILEADKEKRAAVDISTSFPIKGTHFSDSFSFINEEDSLLEEQKLESNNPYKPQSDKSETHTAFPCIKKGPQVAACHSAPGHQEENKNDFIPDLASEFKEGAYKDPLFKKLEQLKEVQQKKQEQLKRQQLEQLQRLMEEQEKLLTMVSGQCTLPGLSLLPDDQSQKHRSPGNTTTGERATCCFPSYVYPDPTQEETYPSNILSHEQSNFCRTAHGDFVLTSKRASPNLFSEAQYQEAPVEKNNLKEENRNHPTGESILCWEKVTEQIQEANDKNLQKHDDSSEVANIEERPIKAAIGERKQTFEDYLEEQIQLEEQELKQKQLKEAEGPLPIKAKPKQPFLKRGEGLARFTNAKSKFQKGKESKLVTNQSTSEDQPLFKMDRQQLQRKTALKNKELCADNPILKKDSKARTKSGSVTLSQKPKMLKCSNRKSLSPSGLKIQTGKKCDGQFRDQIKFENKVTSNNKENVTECPKPCDTGCTGWNKTQGKDRLPLSTGPASRLAAKSPIRETMKESESSLDVSLQKKLETWEREKEKENLELDEFLFLEQAADEISFSSNSSFVLKILERDQQICKGHRMSSTPVKAVPQKTNPADPISHCNRSEDLDHTAREKESECEVAPKQLHSLSSADELREQPCKIRKAVQKSTSENQTEWNARDDEGVPNSDSSTDSEEQLDVTIKPSTEDRERGISSREDSPQVCDDKGPFKDTRTQEDKRRDVDLDLSDKDYSSDESIMESIKHKVSEPSRSSSLSLSKMDFDDERTWTDLEENLCNHDVVLGNESTYGTPQTCYPNNEIGILDKTIKRKIAPVKRGEDLSKSRRSRSPPTSELMMKFFPSLKPKPKSDSHLGNELKLNISQDQPPGDNARSQVLREKIIELETEIEKFKAENASLAKLRIERESALEKLRKEIADFEQQKAKELARIEEFKKEEMRKLQKERKVFEKYTTAARTFPDKKEREEIQTLKQQIADLREDLKRKETKWSSTHSRLRSQIQMLVRENTDLREEIKVMERFRLDAWKRAEAIESSLEVEKKDKLANTSVRFQNSQISSGTQVEKYKKNYLPMQGTAQPPHTPSSLLADHLPPLSSFRPFSRNIQLCYTF

SEQ ID NO: 19663 - protein, 197 aa, Homo sapiens
VLEGVPHQLLPPEPPSPARAPVPSATKNKVAITVPAPQLGHHRHPRVGEGSSSDEESGGTLPPPDFPPPPLPDSAIFLPPSLDPLPGPVVRGRGGAEARGPPPPKAHPRPPLPPGPSPASTFLGEVASGDDRSCSVLQMAKTLSEVDYAPAGPARSALLPGPLELQPPRGLPSDYGRPLSFPPPRIRESIQEDLAEE

SEQ ID NO: 19664 - protein, 454 aa, Homo sapiens
GKQMHVGKTPIQVFLGVPFSRPPLGILRFAPPEPPEPWKGIRDATTYPPGCLQESWGQLASMYVSTRERYKWLRFSEDCLYLNVYAPARAPGDPQLPVMVWFPGGAFIVGAASSYEGSDLAAREKVVLVFLQHRLGIFGFLSTDDSHARGNWGLLDQMAALRWVQENIAAFGGDPGNVTLFGQSAGAMSISGLMMSPLASGLFHRAISQSGTALFRLFITSNPLKVAKKVAHLAGCNHNSTQILVNCLRALSGTKVMRVSNKMRFLQLNFQRDPEEIIWSMSPVVDGVVIPDDPLVLLTQGKVSSVPYLLGVNNLEFNWLLPYNITKEQVPLVVEEYLDNVNEHDWKMLRNRMMDIVQDATFVYATLQTAHYHRGLSMGKEKALSLQMMKYWANFARTGNPNDGNLPCWPRYNKDEKYLQLDFTTRVGMKLKEKKMAFWMSLYQSQRPEKQRQF

SEQ ID NO: 19665 - protein, 448 aa, Homo sapiens
MTGWGQWRAIILHSPDPPWGQPHMIDVSQAVCWRSMRRGCAVLGALGLLAGAGVGSWLLVLYLCPAASQPISGTLQDEEITLSCSEASAEEALLPALPKTVSFRINSEDFLLEAQVRDQPRWLLVCHEGWSPALGLQICWSLGHLRLTHHKGVNLTDIKLNSSQEFAQLSPRLGGFLEEAWQPRNNCTSGQVVSLRCSECGARPLASRIVGGQSVAPGRWPWQASVALGFRHTCGGSVLAPRWVVTAAHCMHSFRLARLSSWRVHAGLVSHSAVRPHQGALVERIIPHPLYSAQNHDYDVALLRLQTALNFSDTVGAVCLPAKEQHFPKGSRCWVSGWGHTHPSHTYSSDMLQDTVVPLFSTQLCNSSCVYSGALTPRMLCAGYLDGRADACQGDSGGPLVCPDGDTWRLVGVVSWGRGCAEPNHPGVYAKVAEFLDWIHDTAQDSLL

SEQ ID NO: 19666 - protein, 519 aa, Homo sapiens
MQQFGGLEATGILDEATLALMKTPRCSLPDLPVLTQARRRRQAPAPTKWNKRNLSWRVRTFPRDSPLGHDTVRALMYYALKVWSDIAPLNFHEVAGSAADIQIDFSKADHNDGYPFDGPGGTVAHAFFPGHHHTAGDTHFDDDEAWTFRSSDAHGMDLFAVAVHEFGHAIGLSHVAAAHSIMRPYYQGPVGDPLRYGLPYEDKVRVWQLYGVRESVSPTAQPEEPPLLPEPPDNRSSAPPRKDVPHRCSTHFDAVAQIRGEAFFFKGKYFWRLTRDRHLVSLQPAQMHRFWRGLPLHLDSVDAVYERTSDHKIVFFKGDRYWVFKDNNVEEGYPRPVSDFSLPPGGIDAAFSWAHNDRTYFFKDQLYWRYDDHTRHMDPGYPAQSPLWRGVPSTLDDAMRWSDGASYFFRGQEYWKVLDGELEVAPGYPQSTARDWLVCGDSQADGSVAAGVDAAEGPRAPPGQHDQSRSEDGYEVCSCTSGASSPPGAPGPLVAATMLLLLPPLSPGALWTAAQALTL

SEQ ID NO: 19667 - protein, 2601 aa, Homo sapiens
MVPPVWTLLLLVGAALFRKEKPPDQKLVVRSSRDNYVLTQCDFEDDAKPLCDWSQVSADDEDWVRASGPSPTGSTGAPGGYPNGEGSYLHMESNSFHRGGVARLLSPDLWEQGPLCVHFAHHMFGLSWGAQLRLLLLSGEEGRRPDVLWKHWNTQRPSWMLTTVTVPAGFTLPTRLMFEGTRGSTAYLDIALDALSIRRGSCNRVCMMQTCSFDIPNDLCDWTWIPTASGAKWTQKKGSSGKPGVGPDGDFSSPGSGCYMLLDPKNARPGQKAVLLSPVSLSSGCLSFSFHYILRGQSPGAALHIYASVLGSIRKHTLFSGQPGPNWQAVSVNYTAVGRIQFAVVGVFGKTPEPAVAVDATSIAPCGEGFPQCDFEDNAHPFCDWVQTSGDGGHWALGHKNGPVHGMGPAGGFPNAGGHYIYLEADEFSQAGQSVRLVSRPFCAPGDICVEFAYHMYGLGEGTMLELLLGSPAGSPPIPLWKRVGSQRPYWQNTSVTVPSGHQQPMQLIFKGIQGSNTASVVAMGFILINPGTCPVKVLPELPPVSPVSSTGPSETTGLTENPTISTKKPTVSIEKPSVTTEKPTVPKEKPTIPTEKPTISTEKPTIPSEKPNMPSEKPTIPSEKPTILTEKPTIPSEKPTIPSEKPTISTEKPTVPTEEPTTPTEETTTSMEEPVIPTEKPSIPTEKPSIPTEKPTISMEETIISTEKPTISPEKPTIPTEKPTIPTEKSTISPEKPTTPTEKPTIPTEKPTISPEKPTTPTEKPTISPEKLTIPTEKPTIPTEKPTIPTEKPTISTEEPTTPTEETTISTEKPSIPMEKPTLPTEETTTSVEETTISTEKLTIPMEKPTISTEKPTIPTEKPTISPEKLTIPTEKLTIPTEKPTIPIEETTISTEKLTIPTEKPTISPEKPTISTEKPTIPTEKPTIPTEETTISTEKLTIPTEKPTISPEKLTIPTEKPTISTEKPTIPTEKLTIPTEKPTIPTEKPTIPTEKLTALRPPHPSPTATGLAALVMSPHAPSTPMTSVILGTTTTSRSSTERCPPNARYESCACPASCKSPRPSCGPLCREGCVCNPGFLFSDNHCIQASSCNCFYNNDYYEPGAEWFSPNCTEHCRCWPGSRVECQISQCGTHTVCQLKNGQYGCHPYAGTATCLVYGDPHYVTFDGRHFGFMGKCTYILAQPCGNSTDPFFRVTAKNEEQGQEGVSCLSKVYVTLPESTVTLLKGRRTLVGGQQVTLPAIPSKGVFLGASGRFVELQTEFGLRVRWDGDQQLYVTVSSTYSGKLCGLCGNYDGNSDNDHLKLDGSPAGDKEELGNSWQTDQDEDQECQKYQVVNSPSCDSSLQSSMSGPGFCGRLVDTHGPFETCLLHVKAASFFDSCMLDMCGFQGLQHLLCTHMSTMTTTCQDAGHAVKPWREPHFCPMACPPNSKYSLCAKPCPDTCHSGFSGMFCSDRCVEACECNPGFVLSGLECIPRSQCGCLHPAGSYFKVGERWYKPGCKELCVCESNNRIRCQPWRCRAQEFCGQQDGIYGCHAQGAATCTASGDPHYLTFDGALHHFMGTCTYVLTRPCWSRSQDSYFVVSATNENRGGILEVSYIKAVHVTVFDLSISLLRGCKVMLNGHRVALPVWLAQGRVTIRLSSNLVLLYTNFGLQVRYDGSHLVEVTVPSSYGGQLCGLCGNYNNNSLDDNLRPDRKLAGDSMQLGAAWKLPESSEPGCFLVGGKPSSCQENSMADAWNKNCAILINPQGPFSQCHQVVPPQSSFASCVHGQCGTKGDTTALCRSLQAYASLCAQAGQAPAWRNRTFCPMRCPPGSSYSPCSSPCPDTCSSINNPRDCPKALPCAESCECQKGHILSGTSCVPLGQCGCTDPAGSYHPVGERWYTENTCTRLCTCSVHNNITCFQSTCKPNQICWALDGLLHCRASGVGVCQLPGESHYVSFDGSNHSIPDACTLVLVKVCHPAMALPFFKISAKHEKEEGGTEAFRLHEVYIDIYDAQVTLQKGHRVLINSKQVTLPAISQIPGVSVKSSSIYSIVNIKIGVQVKFDGNHLLEIEIPTTYYGKVCGMCGNFNDEEEDELMMPSDEVANSDSEFVNSWKDKDIDPSCQSLLVDEQQIPAEQQENPSGNCRAADLRRAREKCEAALRAPVWAQCASRIDLTPFLVDCANTLCEFGGLYQALCQALQAFGATCQSQGLKPPLWRNSSFCPLECPAYSSYTNCLPSCSPSCWDLDGRCEGAKVPSACAEGCICQPGYVLSEDKCVPRSQCGCKDAHGGSIPLGKSWVSSGCTEKCVCTGGAIQCGDFRCPSGSHCQLTSDNSNSNCVSDKSEQCSVYGDPRYLTFDGFSYRLQGRMTYVLIKTVDVLPEGVEPLLVEGRNKMDPPRSSIFLQEVITTVYGYKVQLQAGLELVVNNQKMAVPYRPNEHLRVTLWGQRLYLVTDFELVVSFGGRKNAVISLPSMYEGLVSGLCGNYDKNRKNDMMLPSGALTQNLNTFGNSWEVKTEDALLRFPRAIPAEEEGQGAELGLRTGLQVSECSPEQLASNSTQACRVLADPQGPFAACHQTVAPEPFQEHCVLDLCSAQDPREQEELRCQVLSGWAAAF

SEQ ID NO: 19668 - protein, 97 aa, Homo sapiens
QARVSQELKKAAKRTVSISEGPDTLGDGMRERRETLALAPEPEPLEKEACEKWKRPFRGPHCTQVIPVQGRVTSLSLSHDQLHLLSCSRDNTLKVID

SEQ ID NO: 19669 - protein, 1018 aa, Homo sapiens
MLVGSQSFSPGGPNGIIRSQSFAGFSGLQERRSRCNSFIENSSALKKPQAKLKKMHNLGHKNNNPPKEPQPKRVEEVYRALKNGLDEYLEVHQTELDKLTAQLKDMKRNSRLGVLYDLDKQIKTIERYMRRLEFHISKVDELYEAYCIQRRLQDGASKMKQAFATSPASKAARESLTEINRSFKEYTENMCTIEVELENLLGEFSIKMKGLAGFARLCPGDQYEIFMKYGRQRWKLKGKIEVNGKQSWDGEETVFLPLIVGFISIKVTELKGLATHILVGSVTCETKELFAARPQVVAVDINDLGTIKLNLEITWYPFDVEDMTASSGAGNKAAALQRRMSMYSQGTPETPTFKDHSFFSNLPDDIFENGKAAEEKMPLSLSFSDLPNGDCALTSHSTGSPSNSTNPEITITPAEFNLSSLASQNEGMDDTSSASSRNSLGEGQEPKSHLKEEDPEEPRKPASAPSEACRRQSSGAGAEHLFLENDVAEALLQESEEASELKPVELDTSEGNITKQLVKRLTSAEVPMATDRLLSEGSVGGESEGCRSFLDGSLEDAFNGLLLALEPHKEQYKEFQDLNQEVMNLDDILKCKPAVSRSRSSSLSLTVESALESFDFLNTSDFDEEEDGDEVCNVGGGADSVFSDTETEKHSYRSVHPEARGHLSEALTEDTGVGTSVAGSPLPLTTGNESLDITIVRHLQYCTQLVQQIVFSSKTPFVARSLLEKLSRQIQVMEKLAAVSDENIGNISSVVEAIPEFHKKLSLLSFWTKCCSPVGVYHSPADRVMKQLEASFARTVNKEYPGLADPVFRTLVSQILDRAEPLLSSSLSSEVVTVFQYYSYFTSHGVSDLESYLSQLARQVSMVQTLQSLRDEKLLQTMSDLAPSNLLAQQEVLRTLALLLTREDNEVSEAVTLYLAAASKNQHFREKALLYYCEALTKTNLQLQKAACLALKILEATESIKMLVTLCQSDTEEIRNVASETLLSLGEDGRLAYEQLDKFPRDCVKVGGRHGTEVATAF

SEQ ID NO: 19670 - protein, 1640 aa, Homo sapiens
MAQILPVRFQEHFQLQNLGINPANIGFSTLTMESDKFICIREKVGEQAQVTIIDMSDPMAPIRRPISAESAIMNPASKVIALKAGKTLQIFNIEMKSKMKAHTMAEEVIFWKWVSVNTVALVTETAVYHWSMEGDSQPMKMFDRHTSLVGCQVIHYRTDEYQKWLLLVGISAQQNRVVGAMQLYSVDRKVSQPIEGHAAAFAEFKMEGNAKPATLFCFAVRNPTGGKLHIIEVGQPAAGNQPFVKKAVDVFFPPEAQNDFPVAMQIGAKHGVIYLITKYGYLHLYDLESGVCICMNRISADTIFVTAPHKPTSGIIGVNKKGQVLSVCVEEDNIVNYATNVLQNPDLGLRLAVRSNLAGAEKLFVRKFNTLFAQGSYAEAAKVAASAPKGILRTRETVQKFQSIPAQSGQASPLLQYFGILLDQGQLNKLESLELCHLVLQQGRKQLLEKWLKEDKLECSEELGDLVKTTDPMLALSVYLRANVPSKVIQCFAETGQFQKIVLYAKKVGYTPDWIFLLRGVMKISPEQGLQFSRMLVQDEEPLANISQIVDIFMENSLIQQCTSFLLDALKNNRPAEGLLQTWLLEMNLVHAPQVADAILGNKMFTHYDRAHIAQLCEKAGLLQQALEHYTDLYDIKRAVVHTHLLNPEWLVNFFGSLSVEDSVECLHAMLSANIRQNLQLCVQVASKYHEQLGTQALVELFESFKSYKGLFYFLGSIVNFSQDPDVHLKYIQAACKTGQIKEVERICRESSCYNPERVKNFLKEAKLTDQLPLIIVCDRFGFVHDLVLYLYRNNLQRYIEIYVQKVNPSRTPAVIGGLLDVDCSEEVIKHLIMAVRGQFSTDELVAEVEKRNRLKLLLPWLESQIQEGCEEPATHNALAKIYIDSNNSPECFLRENAYYDSSVVGRYCEKRDPHLACVAYERGQCDLELIKVCNENSLFKSEARYLVCRKDPELWAHVLEETNPSRRQLIDQVVQTALSETRDPEEISVTVKAFMTADLPNELIELLEKIVLDNSVFSEHRNLQNLLILTAIKADRTRVMEYISRLDNYDALDIASIAVSSALYEEAFTVFHKFDMNASAIQVLIEHIGNLDRAYEFAERCNEPAVWSQLAQAQLQKDLVKEAINSYIRGDDPSSYLEVVQSASRSNNWEDLVKFLQMARKKGRESYIETELIFALAKTSRVSELEDFINGPNNAHIQQVGDRCYEEGMYEAAKLLYSNVSNFARLASTLVHLGEYQAAVDNSRKASSTRTWKEVCFACMDGQEFRFAQLCGLHIVIHADELEELMCYYQDRGYFEELILLLEAALGLERAHMGMFTELAILYSKFKPQKMLEHLELFWSRVNIPKVLRAAEQAHLWAELVFLYDKYEEYDNAVLTMMSHPTEAWKEGQFKDIITKVANVELCYRALQFYLDYKPLLINDLLLVLSPRLDHTWTVSFFSKAGQLPLVKPYLRSVQSHNNKSVNEALNHLLTEEEDYQGLRASIDAYDNFDNISLAQQLEKHQLMEFRCIAAYLYKGNNWWAQSVELCKKDHLYKDAMQHAAESRDAELAQKLLQWFLEEGKRECFAACLFTCYDLLRPDMVLELAWRHNLVDLAMPYFIQVMREYLSKVDKLDALESLRKQEEHVTEPAPLVFDFDGHE

SEQ ID NO: 19671 - protein, 883 aa, Homo sapiens
MTTESGSDSESKPDQEAEPQEAAGAQGRAGAPVPEPPKEEQQQALEQFAAAAAHSTPVRREVTDKEQEFAARAAKQLEYQQLEDDKLSQKSSSSKLSRSPLKIVKKPKSMQCKVILLDGSEYTCDVEKRSRGQVLFDKVCEHLNLLEKDYFGLTYRDAENQKNWLDPAKEIKKQVRSGAWHFSFNVKFYPPDPAQLSEDITRYYLCLQLRDDIVSGRLPCSFVTLALLGSYTVQSELGDYDPDECGSDYISEFRFAPNHTKELEDKVIELHKSHRGMTPAEAEMHFLENAKKLSMYGVDLHHAKDSEGVEIMLGVCASGLLIYRDRLRINRFAWPKVLKISYKRNNFYIKIRPGEFEQFESTIGFKLPNHRAAKRLWKVCVEHHTFFRLLLPEAPPKKFLTLGSKFRYSGRTQAQTRRASALIDRPAPYFERSSSKRYTMSRSLDGASVNENHEIYMKDSMSAAEVGTGQYATTKGISQTNLITTVTPEKKAEEERDEEEDKRRKGEEVTPISAIRHEGKTDSERTDTAADGETTATESDQEEDAELKAQELEKTQDDLMKHQTNISELKRTFLETSTDTAVTNEWEKRLSTSPVRLAARQEDAPMIEPLVPEETKQSSGEKLMDGSEIFSLLESARKPTEFIGGVTSTSQSWVQKMETKTESSGIETEPTVHHLPLSTEKVVQETVLVEERRVVHASGDASYSAGDSGDAAAQPAFTGIKGKEGSALTEGAKEEGGEEVAKAVLEQEETAAASRERQEEQSAAIHISETLEQKPHFESSTVKTETISFGSVSPGGVKLEISTKEVPVVHTETKTITYESSQVDPGTDLEPGVLMSAQTITSETTSTTTTTHITKTVKGGISETRIEKRIVITGDADIDHDQE

SEQ ID NO: 19672 - protein, 1498 aa, Homo sapiens
MASTNAESQLQRIIRDLQDAVTELSKEFQEAGEPITDDSTSLHKFSYKLEYLLQFDQKEKATLLGNKKDYWDYFCACLAKVKGANDGIRFVKSISELRTSLGKGRAFIRYSLVHQRLADTLQQCFMNTKVTSDWYYARSPFLQPKLSSDIVGQLYELTEVQFDLASRGFDLDAAWPTFARRTLTTGSSAYLWKPPSRSSSMSSLVSSYLQTQEMVSNFDLNSPLNNEALEGFDEMRLELDQLEVREKQLRERMQQLDRENQELRAAVSQQGEQLQTERERGRTAAEDNVRLTCLVAELQKQWEVTQATQNTVKELQTCLQGLELGAAEKEEDYHTALRRLESMLQPLAQELEATRDSLDKKNQHLASFPGWLAMAQQKADTASDTKGRQEPIPSDAAQEMQELGEKLQALERERTKVEEVNRQQSAQLEQLVKELQLKEDARASLERLVKEMAPLQEELSGKGQEADQLWRRLQELLAHTSSWEEELAELRREKKQQQEEKELLEQEVRSLTRQLQFLETQLAQVSQHVSDLEEQKKQLIQDKDHLSQQVGMLERLAGPPGPELPVAGEKNEALVPVNSSLQEAWGKPEEEQRGLQEAQLDDTKVQEGSQEEELRQANRELEKELQNVVGRNQLLEGKLQALQADYQALQQRESAIQGSLASLEAEQASIRHLGDQMEASLLAVRKAKEAMKAQMAEKEAILQSKEGECQQLREEVEQCQQLAEARHRELRALESQCQQQTQLIEVLTAEKGQQGVGPPTDNEARELAAQLALSQAQLEVHQGEVQRLQAQVVDLQAKMRAALDDQDKVQSQLSMAEAVLREHKTLVQQLKEQNEALNRAHVQELLQCSEREGALQEERADEAQQREEELRALQEELSQAKCSSEEAQLEHAELQEQLHRANTDTAELGIQVCALTVEKERVEEALACAVQELQDAKEAASREREGLERQVAGLQQEKESLQEKLKAAKAAAGSLPGLQAQLAQAEQRAQSLQEAAHQELNTLKFQLSAEIMDYQSRLKNAGEECKSLRGQLEEQGRQLQAAEEAVEKLKATQADMGEKLSCTSNHLAECQAAMLRKDKEGAALREDLERTQKELEKATTKIQEYYNKLCQEVTNRERNDQKMLADLDDLNRTKKYLEERLIELLRDKDALWQKSDALEFQQKLSAEERWLGDTEANHCLDCKREFSWMVRRHHCRICGRIFCYYCCNNYVLSKHGGKKERCCRACFQKLSEGPGSPDSSGSGTSQGEPSPALSPASPGPQATGGQGANTDYRPPDDAVFDIITDEELCQIQESGSSLPETPTETDSLDPNAAEQASVGASKGLGNLLCESSACRDTTSTSLTPEDTEDMPVGQDSEICLLKSGELMIKVPLTVDEIASFGEGSRELFVRSSTYSLIPITVAEAGLTISWVFSSDPKSISFSVVFQEAEDTPLDQCKVLIPTTRCNSHKENIQGQLKVRTPGIYMLIFDNTFSRFVSKKVFYHLTVDRPVIYDGSDFL

SEQ ID NO: 19673 - protein, 1668 aa, Homo sapiens
MSARAAAAKSTAMEETAIWEQHTVTLHRAPGFGFGIAISGGRDNPHFQSGETSIVISDVLKGGPAEGQLQENDRVAMVNGVSMDNVEHAFAVQQLRKSGKNAKITIRRKKKVQIPVSRPDPEPVSDNEEDSYDEEIHDPRSGRSGVVNRRSEKIWPRDRSASRERSLSPRSDRRSVASSQPAKPTKVTLVKSRKNEEYGLRLASHIFVKEISQDSLAARDGNIQEGDVVLKINGTVTENMSLTDAKTLIERSKGKLKMVVQRDERATLLNVPDLSDSIHSANASERDDISEIQSLASDHSGRSHDRPPRRSRSRSPDQRSEPSDHSRHSPQQPSNGSLRSRDEERISKPGAVSTPVKHADDHTPKTVEEVTVERNEKQTPSLPEPKPVYAQVGQPDVDLPVSPSDGVLPNSTHEDGILRPSMKLVKFRKGDSVGLRLAGGNDVGIFVAGVLEDSPAAKEGLEEGDQILRVNNVDFTNIIREEAVLFLLDLPKGEEVTILAQKKKDVYRRIVESDVGDSFYIRTHFEYEKESPYGLSFNKGEVFRVVDTLYNGKLGSWLAIRIGKNHKEVERGIIPNKNRAEQLASVQYTLPKTAGGDRADFWRFRGLRSSKRNLRKSREDLSAQPVQTKFPAYERVVLREAGFLRPVTIFGPIADVAREKLAREEPDIYQIAKSEPRDAGTDQRSSGIIRLHTIKQIIDQDKHALLDVTPNAVDRLNYAQWYPIVVFLNPDSKQGVKTMRMRLCPESRKSARKLYERSHKLRKNNHHLFTTTINLNSMNDGWYGALKEAIQQQQNQLVWVSEGKADGATSDDLDLHDDRLSYLSAPGSEYSMYSTDSRHTSDYEDTDTEGGAYTDQELDETLNDEVGTPPESAITRSSEPVREDSSGMHHENQTYPPYSPQAQPQPIHRIDSPGFKPASQQVYRKDPYPEEMMRQNHVLKQPAVSHPGHRPDKEPNLTYEPQLPYVEKQASRDLEQPTYRYESSSYTDQFSRNYEHRLRYEDRVPMYEEQWSYYDDKQPYPSRPPFDNQHSQDLDSRQHPEESSERGYFPRFEEPAPLSYDSRPRYEQAPRASALRHEEQPAPGYDTHGRLRPEAQPHPSAGPKPAESKQYFEQYSRSYEQVPPQGFTSRAGHFEPLHGAAAVPPLIPSSQHKPEALPSNTKPLPPPPTQTEEEEDPAMKPQSVLTRVKMFENKRSASLETKKDVNDTGSFKPPEVASKPSGAPIIGPKPTSQNQFSEHDKTLYRIPEPQKPQLKPPEDIVRSNHYDPEEDEEYYRKQLSYFDRRSFENKPPAHIAASHLSEPAKPAHSQNQSNFSSYSSKGKPPEADGVDRSFGEKRYEPIQATPPPPPLPSQYAQPSQPVTSASLHIHSKGAHGEGNSVSLDFQNSLVSKPDPPPSQNKPATFRPPNREDTAQAAFYPQKSFPDKAPVNGTEQTQKTVTPAYNRFTPKPYTSSARPFERKFESPKFNHNLLPSETAHKPDLSSKTPTSPKTLVKSHSLAQPPEFDSGVETFSIHAEKPKYQINNISTVPKAIPVSPSAVEEDEDEDGHTVVATARGIFNSNGGVLSSIETGVSIIIPQGAIPEGVEQEIYFKVCRDNSILPPLDKEKGETLLSPLVMCGPHGLKFLKPVELRLPHCDPKTWQNKCLPGDPNYLVGANCVSVLIDHF

SEQ ID NO: 19674 - protein, 345 aa, Homo sapiens
MFLTRPKVCVDLNRRVTLYGVFTIHFSPNVPSRCLLLELLDVSVSELLLYSSHQGCSMWMIQHCARDVLEALAFLHHEGYVHADLKPRNILWSAENECFKLIDFGLSFKEGNQDVKYIQTDGYRAPEAELQNCLAQAGLQSDTECTSAVDLWSLGIILLEMFSGMKLKHTVRSQEWKANSSAIIDHIFASKAVVNAAIPAYHLRDLIKSMLHDDPSRRIPAEMALCSPFFSIPFAPHIEDLVMLPTPVLRLLNVLDDDYLENEEEYEDVVEDVKEECQKYGPVVSLLVPKENPGRGQVFVEYANAGDSKAAQKLLTGRMFDGKFVVATFYPLSAYKRGYLYQTLL

SEQ ID NO: 19675 - protein, 954 aa, Homo sapiens
MSAYYRNNWSEEDPDYPDYSGSQNRTQGYLKTQGYPDVPGPLNNPDYPGTRSNPYSVASRTRPDYPGSLAEPNYPRSLSNPDYSGTRSNAYSAASRTSPDHPTSLPEPDYSEFQSHPYHRASSRQPDYPGSQRNPDFAGSSSSGNYAGSRTHPDHFGSLEPDYPGAQSNSDHPGPRANLNHPGSRKNLEHTSFRINPYADSLGKPDYPGADIQPNSPPFFGEPDYPSAEDNQNLPSTWREPDYSDAENGHDYGSSETPKMTRGVLSRTSSIQPSFRHRSDDPVGSLWGENDYPEGIEMASMEMANSYGHSLPGAPGSGYVNPAYVGESGPVHAYGNPPLSECDWHKSPQGQKLIASLIPMTSRDRIKAIRNQPRTMEEKRNLRKIVDKEKSKQTHRILQLNCCIQCLNSISRAYRRSKNSLSEILNSISLWQKTLKIIGGKFGTSVLSYFNFLRWLLKFNIFSFILNFSFIIIPQFTVAKKNTLQFTGLEFFTGVGYFRDTVMYYGFYTNSTIQHGNSGASYNMQLAYIFTIGACLTTCFFSLLFSMAKYFRNNFINPHIYSGGITKLIFCWDFTVTHEKAVKLKQKNLSTEIRFLKTHSNPGAVLLLPFVVSCINLAVPCIYSMFRLVERYEMPRHEVYVLLIRNIFLKISIIGILCYYWLNTVALSGEECWETLIGQDIYRLLLMDFVFSLVNSFLGEFLRRIIGMQLITSLGLQEFDIARNVLELIYAQTLVWIGIFFCPLLPFIQMIMLFIMFYSKNISLMMNFQPPSKAWRASQMMTFFIFLLFFPSFTGVLCTLAITIWRLKPSADCGPFRGLPLFIHSIYSWIDTLSTRPGYLWVVWIYRNLIGSVHFFFILTLIVLIITYLYWQITEGRKIMIRLLHEQIINEGKDKMFLIEKLIKLQDMEKKANPSSLVLERREVEQQGFLHLGEHDGSLDLRSRRSVQEGNPRA

SEQ ID NO: 19676 - protein, 751 aa, Homo sapiens
MHLLGPWLLLLVLEYLAFSDSSKWVFEHPETLYAWEGACVWIPCTYRALDGDLESFILFHNPEYNKNTSKFDGTRLYESTKDGKVPSEQKRVQFLGDKNKNCTLSIHPVHLNDSGQLGLRMESKTEKWMERIHLNVSERPFPPHIQLPPEIQESQEVTLTCLLNFSCYGYPIQLQWLLEGVPMRQAAVTSTSLTIKSVFTRSELKFSPQWSHHGKIVTCQLQDADGKFLSNDTVQLNVKHTPKLEIKVTPSDAIVREGDSVTMTCEVSSSNPEYTTVSWLKDGTSLKKQNTFTLNLREVTKDQSGKYCCQVSNDVGPGRSEEVFLQVQYAPEPSTVQILHSPAVEGSQVEFLCMSLANPLPTNYTWYHNGKEMQGRTEEKVHIPKILPWHAGTYSCVAENILGTGQRGPGAELDVQYPPKKVTTVIQNPMPIREGDTVTLSCNYNSSNPSVTRYEWKPHGAWEEPSLGVLKIQNVGWDNTTIACAACNSWCSWASPVALNVQYAPRDVRVRKIKPLSEIHSGNSVSLQCDFSSSHPKEVQFFWEKNGRLLGKESQLNFDSISPEDAGSYSCWVNNSIGQTASKAWTLEVLYAPRRLRVSMSPGDQVMEGKSATLTCESDANPPVSHYTWFDWNNQSLPYHSQKLRLEPVKVQHSGAYWCQGTNSVGKGRSPLSTLTVYYSPETIGRRVAVGLGSCLAILILAICGLKLQRRWKRTQSQQGLQENSSGQSFFVRNKKRCRVLRDAETSPGLR

SEQ ID NO: 19677 - protein, 1151 aa, Homo sapiens
MRSRSNSGVRLDGYARLVQQTILCHQNPVTGLLPASYDQKDAWVRDNVYSILAVWGLGLAYRKNADRDEDKAKAYELEQSVVKLMRGLLHCMIRQVDKVESFKYSQSTKDSLHAKYNTKTCATVVGDDQWGHLQLDATSVYLLFLAQMTASGLHIIHSLDEVNFIQNLVFYIEAAYKTADFGIWERGDKTNQGISELNASSVGMAKAALEALDELDLFGVKGGPQSVIHVLADEVQHCQSILNSLLPRASTSKEVDASLLSVVSFPAFAVEDSQLVELTKQEIITKLQGRYGCCRFLRDGYKTPKEDPNRLYYEPAELKLFENIECEWPLFWTYFILDGVFSGNAEQVQEYKEALEAVLIKGKNGVPLLPELYSVPPDRVDEEYQNPHTVDRVPMGKLPHMWGQSLYILGSLMAEGFLAPGEIDPLNRRFSTVPKPDVVVQVSILAETEEIKTILKDKGIYVETIAEVYPIRVQPARILSHIYSSLGCNNRMKLSGRPYRHMGVLGTSKLYDIRKTIFTFTPQFIDQQQFYLALDNKMIVEMLRTDLSYLCSRWRMTGQPTITFPISHSMLDEDGTSLNSSILAALRKMQDGYFGGARVQTGKLSEFLTTSCCTHLSFMDPGPEGKLYSEDYDDNYDYLESGNWMNDYDSTSHDVHMYLPTKLFQASRPSFNLLDSPHPRQENQVPSVRVEIHLPRDQSGEVDFKALVLQLKETSSLQEQADILYMLYTMKGPDWNTELYNERSATVRELLTELYGKVGEIRHWGLIRYISGILRKKVEALDEACTDLLSHQKHLTVGLPPEPREKTISAPLPYEALTQLIDEASEGDMSISILTQEIMVYLAMYMRTQPGLFAEMFRLRIGLIIQVMATELAHSLRCSAEEATEGLMNLSPSAMKNLLHHILSGKEFGVERSVRPTDSNVSPAISIHEIGAVGATKTERTGIMQLKSEIKQSPGTSMTPSSGSFPSAYDQQSSKDSRQGQWQRRRRLDGALNRVPVGFYQKVWKVLQKCHGLSVEGFVLPSSTTREMTPGEIKFSVHVESVLNRVPQPEYRQLLVEAILVLTMLADIEIHSIGSIIAVEKIVHIANDLFLQEQKTLGADDTMLAKDPASGICTLLYDSAPSGRFGTMTYLSKAAATYVQEFLPHSICAMQ

SEQ ID NO: 19678 - protein, 646 aa, Homo sapiens [sequence omitted]

SEQ ID NO: 19679 - protein, 615 aa, Homo sapiens
MATSRGASRCPRDIANVMQRLQDEQEIVQKRTFTKWINSHLAKRKPPMVVDDLFEDMKDGVKLLALLEVLSGQKLPCEQGRRMKRIHAVANIGTALKFLEGRKIKLVNINSTDIADGRPSIVLGLMWTIILYFQIEELTSNLPQLQSLSSSASSVDSIVSSETPSPPSKRKVTTKIQGNAKKALLKWVQYTAGKQTGIEVKDFGKSWRSGVAFHSVIHAIRPELVDLETVKGRSNRENLEDAFTIAETELGIPRLLDPEDVDVDKPDEKSIMTYVAQFLKHYPDIHNASTDGQEDDREDRVIFKEMKVWIEQFERDLTRAQMVESNLQDKYQSFKHFRVQYEMKRKQIEHLIQPLHRDGKLSLDQALVKQSWDRVTSRLFDWHIQLDKSLPAPLGTIGAWLYRAEVALREEITVQQVHEETANTIQRKLEQHKDLLQNTDAHKRAFHEIYRTRSVNGIPVPPDQLEDMAERFHFVSSTSELHLMKMEFLELKYRLLSLLVLAESKLKSWIIKYGRRESVEQLLQNYVSFIENSKFFEQYEVTYQILKQTAEMYVKADGSVEEAENVMKFMNETTAQWRNLSVEVRSVRSMLEEVISNWDRYGNTVASLQAWLEDA

SEQ ID NO: 19680 - protein, 748 aa, Homo sapiens
MDQHQHLNKTAESASSEKKKTRRCNGFKMFLAALSFSYIAKALGGIIMKISITQIERRFDISSSLAGLIDGSFEIGNLLVIVFVSYFGSKLHRPKLIGIGCLLMGTGSILTSLPHFFMGYYRYSKETHINPSENSTSSLSTCLINQTLSFNGTSPEIVEKDCVKESGSHMWIYVFMGNMLRGIGETPIVPLGISYIDDFAKEGHSSLYLGSLNAIGMIGPVIGFALGSLFAKMYVDIGYVDLSTIRITPKDSRWVGAWWLGFLVSGLFSIISSIPFFFLPKNPNKPQKERKISLSLHVLKTNDDRNQTANLTNQGKNVTKNVTGFFQSLKSILTNPLYVIFLLLTLLQVSSFIGSFTYVFKYMEQQYGQSASHANFLLGIITIPTVATGMFLGGFIIKKFKLSLVGIAKFSFLTSMISFLFQLLYFPLICESKSVAGLTLTYDGNNSVASHVDVPLSYCNSECNCDESQWEPVCGNNGITYLSPCLAGCKSSSGIKKHTVFYNCSCVEVTGLQNRNYSAHLGECPRDNTCTRKFFIYVAIQVINSLFSATGGTTFILLTVKIVQPELKALAMGFQSMVIRTLGGILAPIYFGALIDKTCMKWSTNSCGAQGACRIYNSVFFGIVQPELKALAIGFHSMIMRSLGGILVPIYFGALIDTTCMKWSTNSCGARGACRIYNSTYLGRAFFGLKVALIFPVLVLLTVFIFVVRKKSHGKDTKVLENERQVMDEANLEFLNDSEHFVPSAEEQ

SEQ ID NO: 19681 - protein, 392 aa, Homo sapiens
MSFFPELYFNVDNGYLEGLVRGLKAGVLSQADYLNLVQCETLEDLKLHLQSTDYGNFLANEASPLTVSVIDDRLKEKMVVEFRHMRNHAYEPLASFLDFITQESEAGTPEGPGNMPKLGSRPSPGHRPPFLRVSLLPWPPSSYSYMIDNVILLITGTLHQRSIAELVPKCHPLGSFEQMEAVNIAQTPAELYNAILVDTPLAAFFQDCISEQDLDEMNIEIIRNTLYKAYLESFYKFCTLLGGTTADAMCPILEFEADRRAFIITINSFGTELSKEDRAKLFPHCGRLYPEGLAQLARADDYEQVKNVADYYPEYKLLFEGAGSNPGDKTLEDRFFEHEVKLNKLAFLNQFHFGVFYAFVKLKEQECRNIVWIAECIAQRHRAKIDNYIPIF

SEQ ID NO: 19682 - protein, 743 aa, Homo sapiens
MNNPSETSKPSMESGDGNTGTQTNGLDFQKQPVPVGGAISTAQAQAFLGHLHQVQLAGTSLQAAAQSLNVQSKSNEESGDSQQPSQPSQQPSVQAAIPQTQLMLAGGQITGLTLTPAQQQLLLQQAQAQAQLLAAAVQQHSASQQHSAAGATISASAATPMTQIPLSQPIQIAQDLQQLQQLQQQNLNLQQFVLVHPTTNLQPAQFIISQTPQGQQGLLQAQNLLTQLPQQSQANLLQSQPSITLTSQPATPTRTIAATPIQTLPQSQSTPKRIDTPSLEEPSDLEELEQFAKTFKQRRIKLGFTQGDVGLAMGKLYGNDFSQTTISRFEALNLSFKNMCKLKPLLEKWLNDAENLSSDSSLSSPSALNSPGIEGLSRRRKKRTSIETNIRVALEKSFLENQKPTSEEITMIADQLNMEKEVIRVWFCNRRQKEKRINPPSSGGTSSSPIKAIFPSPTSLVATTPSLVTSSAATTLTVSPVLPLTSAAVTNLSVTGTSDTTSNNTATVISTAPPASSAVTSPSLSPSPSASASTSEASSASETSTTQTTSTPLSSPLGTSQVMVTASGLQTAAAAALQGAAQLPANASLAAMAAAAGLNPSLMAPSQFAAGGALLSLNPGTLSGALSPALMSNSTLATIQALASGGSLPITSLDATGNLVFANAGGAPNIVTAPLFLNPQNLSLLTSNPVSLVSAAAASAGNSAPVASLHATSTSAESIQNSLFTVASASGAASTTTTASKAQ

SEQ ID NO: 19683 - protein, 1129 aa, Homo sapiens
MKVNRETKRLYVGGLSQDISEADLQNQFSRFGEVSDVEIITRKDDQGNPQKVFAYINISVAEADLKKCMSVLNKTKWKGGTLQIQLAKESFLHRLAQEREAAKAKKEESTTGNANLLEKTGGVDFHMKAVPGTEVPGHKNWVVSKFGRVLPVLHLKNQHKRKIIKYDPSKYCHNLKKIGEDFSNTIPISSLTWELEGGNDPMSKKRRGEFSDFHGPPKKIIKVQKDESSTGSLAMSTRPRRVIERPPLTQQQAAQKRTCDSITPSKSSPVPVSDTQKLKNLPFKTSGLETAKKRNSISDDDTDSEDELRMMIAKEENLQRTTQPSINESESDPFEVVRDDFKSGVHKLHSLIGLGIKNRVSCHDSDDDIMRNDREYDSGDTDEIIAMKKNVAKVKNSTEFSQMEKSTKKTSFKNRENCELSDHCIKLQKRKSNVESALSHGLKSLNRKSPSHSSSSEDADSASELADSEGGEEYNAMMKNCLRVNLTLADLEQLAGSDLKVPNEDTKSDGPETTTQCKFDRGSKSPKTPTGLRRGRQCIRPAEIVASLLEGEENTCGKQKPKENNLKPKFQAFKGVGCLYEKESMKKSLKDSVASNNKDQNSMKHEDPSIISMEDGSPYVNGSLGEVTPCQHAKKANGPNYIQPQKRQTTFESQDRKAVSPSSSEKRSKNPISRPLEGKKSLSLSAKTHNIGFDKDSCHSTTKTEASQEERSDSSGLTSLKKSPKVSSKDTREIKTDFSLSISNSSDVSAKDKHAEDNEKRLAALEARQKAKEVQKKLVHNALANLESMGKTSGKLFDSSDDDESDSEDDSNRFKIKPQFEGRAGQKLMDLQSHFGTDDRFRMDSRFLETDSEEEQEEVNEKKTAEEEELAEEKKKALNVVQSVLQINLSNSTNRGSVAAKKFKDIIHYDPTKQDHATYERKRDDKPKESKAKRKKKREEAEKLPEVSKEMYYNIAMDLKEIFQTTKYTSEKEEGTPWNEDCGKEKPEEIQDPAALTSDAEQPSGFTFSFFDSDTKDIKEETYRVETVKPGKIVWQEDPRLQDSSSEEEDVTEETDHRNSSPGEASLLEKETTRFFFFSKNDERLQGSDLFWRGVGSNMSRNSWEARTTNLRMDCRKKHKDAKRKMKPK

SEQ ID NO: 19684 - protein, 647 aa, Homo sapiens
MVLPSRLHWIRNRPWRDRIRRRQLNRLPTRLPEIMLVGSQSFSPGGPNGIIRSQSFAGFSGLQERRSRCNSFIENSSALKKPQAKLKKMHNLGHKNNNPPKEPQPKRVEEVYRALKNGLDEYLEVHQTELDKLTAQLKDMKRNSRLGVLYDLDKQIKTIERYMRRLEFHISKVDELYEAYCIQRRLQDGASKMKQAFATSPASKAARESLTEINRSFKEYTENMCTIEVELENLLGEFSIKMKGLAGFARLCPGDQYEIFMKYGRQRWKLKGKIEVNGKQSWDGEETVFLPLIVGFISIKVTELKGLATHILVGSVTCETKELFAARPQVVAVDINDLGTIKLNLEITWYPFDVEDMTASSGAGNKAAALQRRMSMYSQGTPETPTFKDHSFFSNLPDDIFENGKAAEEKMPLSLSFSDLPNGDCALTSHSTGSPSNSTNPEITITPAEFNLSSLASQNEGMDDTSSASSRNSLGEGQEPKSHLKEEDPEEPRKPASAPSEACRRQSSGAGAEHLFLENDVAEALLQESEEASELKPVELDTSEGNITKQLVKRLTSAEVPMATDRLLSEGSVGGESEGCRSFLDGSLEDAFNGLLLALEPHKEQYKEFQDLNQEVMNLDDILKDAKHLDDQKLNGAASWTEITEGE

SEQ ID NO: 19685 - protein, 566 aa, Homo sapiens
MPEDQAGAAMEEASPYSLLDICLNFLTTHLEKFCSARQDGTLCLQEPGVFPQEVADRLLRTMAFHGLLNDGTVGIFRGNQMRLKRACIRKAKISAVAFRKAFCHHKLVELDATGVNADITITDIISGLGSNKWIQQNLQCLVLNSLTLSLEDPYERCFSRLSGLRALSITNVLFYNEDLAEVASLPRLESLDISNTSITDITALLACKDRLKSLTMHHLKCLKMTTTQILDVVRELKHLNHLDISDDKQFTSDIALRLLEQKDILPNLVSLDVSGRKHVTDKAVEAFIQQRPSMQFVGLLATDAGYSEFLTGEGHLKVSGEANETQIAEALKRYSERAFFVREALFHLFSLTHVMEKTKPEILKLVVTGMRNHPMNLPVQLAASACVFNLTKQDLAAGMPVRLLADVTHLLLKAMEHFPNHQQLQKNCLLSLCSDRILQDVPFNRFEAAKLVMQWLCNHEDQNMQRMAVAIISILAAKLSTEQTAQLGTELFIVRQLLQIVKQKTNQNSVDTTLKFTLSALWNLTDESPTTCRHFIENQGLELFMRVLESFPTESSIQQKVLGLLG

SEQ ID NO: 19686 - protein, 484 aa, Homo sapiens
MHSLTMDLWIPNGQAGVMSLLRTLLLDVVPTIQQTAALALGRLANYNDDLAEAVVKCDILPQLVYSLAEQNRFYKKAAAFVLRAVGKHSPQLAQAIVDCGALDTLVICLEDFDPGVKEAAAWALRYIARHNAELSQAVVDAGAVPLLVLCIQEPEIALKRIAASALSDIAKHSPELAQTVVDAGAVAHLAQMILNPDAKLKHQILSALSQVSKHSVDLAEMVVEAEIFPVVLTCLKDKDEYVKKNASTLIREIAKHTPELSQLVVNAGGVAAVIDCIGSCKGNTRLPGIMMLGYVAAHSENLAMAVIISKGVPQLSVCLSEEPEDHIKAAAAWALGQIGRHTPEHARAVAVTNTLPVLLSLYMSTESSEDLQVKSKKAIKNILQKCTYLPALEPFLYDAPPNILKHVVGQFSKVLPHDSKARRLFVTSGGLKKVQEIKAEPGSLLQEYINSINSCYPEEIVRYYSPGYSDTLLQRVDSYQPLNN

SEQ ID NO: 19687 - protein, 2348 aa, Homo sapiens
MFFKMKNEIDNDPESEKCIKDSTIMRREPQNILSPLMLPNLEIPFSVKDIISRIERAQLHRAREDIDMQLSEIMNNVHRIMTRYTLVFNSSSERNVSLTEHKKKQRTNFLEKMATYAKTIEIREKTLANILAWLEEWNDVLSEMTLMDVDEHHHWIAQMELLPDTLKAIENNVKILSRFSTSFLDEKKKQKKKILSRGTLWKSWKERVIKRPSTARALRPDQMISDQLATNTKVSEIQGMLQELIGTTMFSTLENNAIKYISSTIVNLSTALSMLNDELKCVNFQSSTVYAHETSEAEKELSLKIIRDLSNENEMLQQKLQDAEEKCEQLIRSKIVIEQLYAKLSTSSTLKVLPGPSPQSSRAIIKVGDTEDNMDNILDKELENIVDEVQRKETKDSGIKWDSTISYTAQAERTPDLTELRQQPVASEDISEDSTKDNVSLKKGDFYQEDETDEYQSWKRSHKKATYVYETSGPNLSDNKSGQKVSEAKPSQYYELQVLKKKRKEMKSFSEDKSKSPTEAKRKHLSLTETKSQGGKSGTSMMMLEQFRKVKRESPFDKRPTAAEIKVEPTTESLDKEGKGEIRSLVEPLSMIQFDDTAEPQKGKIKGKKHHISSGTITSKEEKTEEKEELTKQVKSHQLVKSLSRVAKETSESTRVLESPDGKSEQSNLEEFQEAIMAFLKQKIDNIGKAFDKKTVPKEEELLKRAEAEKLGIIKAKMEEYFQKVAETVTKILRKYKDTKKEEQVGEKPIKQKKVVSFMPGLHFQKSPISAKSESSTLLSYESTDPVINNLIQMILAEIESERDIPTVSTVQKDHKEKEKQRQEQYLQEGQEQMSGMSLKQQLLGERNLLKEHYEKISENWEEKKAWLQMKEGKQEQQSQKQWQEEEMWKEEQKQATPKQAEQEEKQKQRGQEEEELPKSSLQRLEEGTQKMKTQGLLLEKENGQMRQIQKEAKHLGPHRRREKGKEKQKPERGLEDLERQIKTKDQMQMKETQPKELEKMVIQTPMTLSPRWKSVLKDVQRSYEGKEFQRNLKTLENLPDEKEPISITPPPSLQYSLPGALPISGQPLTKCIHLTPQQAQEVGITLTPQQAQAQGITLTLQQAQELGIPLTPQQAQALEILFTPQQAQALGIPLTPQQTQVQGITLTPQQDQAPGISLTTQQAQKLGIPLTPQQAQALGIPLTPQQAQELGIPLTPQQAQALRVSLTPQQAQELGIPLTPQQAQALGITLTLQQAQQLGIPLTPQQAQALGITLTPKQVQELGIPLTPQQAQALGITLTPKQAQELGIPLNPQQAQTLGIPLTPKQAQALGIPFTPQQAQALGIPLTPQQAQTQEITLTPQQAQALGMPLTTQQAQELGIPLTPQHAQALGMPLTTQQAQELGIPLTPQQAQALGMPLTTQQAQELGIPLTPQQAQELGIPFTPQQAQAQEITLTPQQAQALGMPLTAQQAQELGITLTPQQAQELGIPLTPQQAQALGIPLIPPQAQELGIPLTPQQAQALGILLIPPQAQELGIPLTPQQAQALGIPLIPPQAQELGIPLTPQQVQALGIPLIPPQAQELEIPLTPQQAQALGIPLTPQQAQELGIPLTPQQAQELGIPLTPQQAQAQGIPLTPQQAQALGISLTPQQAQAQGITLTPQQAQALGVPITPVNAWVSAVTLTSEQTHALESPMNLEQAQEQLLKLGVPLTLDKAHTLGSPLTLKQVQWSHRPFQKSKASLPTGQSIISRLSPSLRLSLASSAPTAEKSSIFGVSSTPLQISRVPLNQGPFAPGKPLEMGILSEPGKLGAPQTLRSSGQTLVYGGQSTSAQFPAPQAPPSPGQLPISRAPPTPGQPFIAGVPPTSGQIPSLWAPLSPGQPLVPEASSIPGDLLESGPLTFSEQLQEFQPPATAEQSPYLQAPSTPGQHLATWTLPGRASSLWIPPTSRHPPTLWPSPAPGKPQKSWSPSVAKKRLAIISSLKSKSVLIHPSAPDFKVAQVPFTTKKFQMSEVSDTSEETQILRDTFAIESFRTFQSHFTKYRTPVYQTPYTDERALLTLMKPTTSPSSLTTLLRTSQISPLEWYQKSRFPPIDKPWILSSVSDTKKPKVMVPPSSPQELEEKRYFVDVEAQKKNLILLNQAIKTCGLPSQLHTMARTLIIEILHMDTVQLGYLFRKYIAYRLIQHARNNIMKRLKAIQNTGKGYEARNLHMMLSRLDDYGKKVMQVWTEKQKSLGQKRNQCLKKMIHVFNQLKKIHELNLSQPIPLIIEEKQIPASTTFVQKPFLKLLMEEDRTSDICKKFRQQEDQTEAIWNVDLSTSSYPIAEKTSMHSLWAQLGGYPDIPRLLQLEVQSTFRKSLASLQSRSSG

SEQ ID NO: 19688 - protein, 501 aa, Homo sapiens
MQDRRALSLKAHQSESYLPIGCKLPPQSSGVDTSPCPNSPVFRTGSEPALSPAVVRRVSSDARAGEALRGSDSQLCPKPPPKPCKVPFLKVPSSPSAWLNSEANYCELNPAFATGCGRGAKLPSCAQGSHTELLTAKQNEAPGPRNSGVNYLILDDDDRERPWEPAAAQMEKGQWDKGEFVTPLLETVSSFRPNEFESKFLPPENKPLETAMLKRAKELFTNNDPKVIAQHVLSMDCRVARILGVSEEMRRNMGVSSGLELITLPHGHQLRLDIIERHNTMAIGIAVDILGCTGTLEDRAATLSKIIQVAVELKDSMGDLYSFSALMKALEMPQITRLEKTWTALRHQYTQTAILYEKQLKPFSKLLHEGRESTCVPPNNVSVPLLMPLVTLMERQAVTFEGTDMWEKNDQSCEIMLNHLATARFMAEAADSYRMNAERILAGFQPDEEMNEICKTEFQMRLLWGSKGAQVNQTERYEKFNQILTALSRKLEPPPVKQAEL

SEQ ID NO: 19689 - protein, 265 aa, Homo sapiens
MIDAGTEFGPGTAYGNALIKCGETQKRIGTADRELIQTSALNFLTPLRNFIEGDYKTIAKERKLLQNKRLDLDAAKTRLKKAKAAETRNSSEQELRITQSEFDRQAEITRLLLEGISSTHAHHLRCLNDFVEAQMTYYAQCYQYMLDLQKQLGSFPSNYLSNNNQTSVTPVPSVLPNAIGSSAMASTSGLVITSPSNLSDLKECSGSRKARVLYDYDAANSTELSLLADEVITVFSVVGMDSDWLMGERGNQKGKVPITYLELLN

SEQ ID NO: 19690 - protein, 752 aa, Homo sapiens
SWTHCPWPQHLPALGRLSQDDQCTPPHRRGPQSGCPAELRPHPPAVPCCPLLWAPGQGSFPRRAGCQRGQPVGQCQLLPAARLLVPAGQPAAPGPALSPNPEAGLAAGPPPGLAGEREGVCLANLASRCGLQDDFTLHPPNLLLFYNLSQVREADCRAFIRRAAQGDVELLSHLPDQRVALWRAAVACLVGAGWGWARCIGGSLPLGADLLALQGVARLRLSASDQQLLGALVCDMDASSIGAADPHMLENLRRCPRLTAAQRIALNSLLAGGKTSLGPPGSWTLEGLQALGPLATYISPHLWAQVQEAVGLGFFRSVVASCQVGRLGQREARCFVTSFLESKTKPVSSRPRLSTGNITAATLRDDLFLVHYDCAELESCLDGCILRTNLDTLLQHLLPTECQHVVKAKLAQIYPQGLPEDQLRLITSLVYLYSRTEIGQWSITSQDTVMALLASDVALENQTEAVLQKFLEHNGTVSGALLLAIGGTRLCWMSPHQIQTIHPQELRLAGALDLSSCPQSRKDVLYTKAHETFGSSGTLAAYYRLMRPYLGGSPGGAQPPSPVPPGGAPVEELRHLAHANISMDIDTFTSLNPLELQSLDVGNVTALLGHNVGDLQKARSHPTVRAWLRSLNSSTLGQLGLDASPTSPTGPAHGTRGPPSTTHQVLHLVHTSGLPTNDAQASTSGSLWAPLGYLPLAMALPCSLLCLLHWGTCILVSVDSVASGWLGSQGSGAGKTEVLDSAGRPLGLTGQL

SEQ ID NO: 19691 - protein, 344 aa, Homo sapiens
MKCSRHKVCIAQDSQTAVCISHRRLTHRMKEAGVDHRQWRGPILSTCKQCPVVYPSPVCGSDGHTYSFQCKLEYQACVLGKQISVKCEGHCPCPSDKPTSTSRNVKRACSDLEFREVANRLRDWFKALHESGSQNKKTKTLLRPERSRFDTSILPICKDSLGWMFNRLDTNYDLLLDQSELRSIYLDKNEQCTKAFFNSCDTYKDSLISNNEWCYCFQRQQDPPCQTELSNIQKRQGVKKLLGQYIPLCDEDGYYKPTQCHGSVGQCWCVDRYGNEVMGSRINGVADCAIDFEISGDFASGDFHEWTDDEDDEDDIMNDEDEIEDDDEDEGDDDDGGDDHDVYI

SEQ ID NO: 19692 - protein, 682 aa, Homo sapiens
MELGSRRRSVGCRCRGLCLAVRREQVTFEDVVVGFSQEEWGQLKPAQRTLYRDVMLDTFRLLVSVGHWLPKPNVISLLEQEAELWAVESRLPQGVYPEIKGHFQFLLLSDLETRPKVKLSVLKQGISEEISNSVILVERFLWDGLWYCRGEDTEGHWEWSCESLESLAVPVAFTPVKTPVLEQWQRNGFGENISLNPDLPHQPMTPERQSPHTWGTRGKREKPDLNVLQKTCVKEKPYKCQECGKAFSHSSALIEHHRTHTGERPYECHECLKGFRNSSALTKHQRIHTGEKPYKCTQCGRTFNQIAPLIQHQRTHTGEKPYECSECGKSFSFRSSFSQHERTHTGEKPYECSECGKAFRQSIHLTQHLRIHTGEKPYQCGECGKAFSHSSSLTKHQRIHTGEKPYECHECGKAFTQITPLIQHQRTHTGEKPYECGECGKAFSQSTLLTEHRRIHTGEKPYGCNECGKTFSHSSSLSQHERTHTGEKPYECSQCGKAFRQSTHLTQHQRIHTGEKPYECNDCGKAFSHSSSLTKHQRIHTGEKPYECNQCGRAFSQLAPLIQHQRIHTGEKPYECNQCGRAFSQSSLLIEHQRIHTKEKPYGCNECGKSFSHSSSLSQHERTHTGEKPYECHDCGKSFRQSTHLTQHRRIHTGEKPYACRDCGKAFTHSSSLTKHQRTHTG

SEQ ID NO: 19693 - protein, 614 aa, Homo sapiens
MRPVINRCAPGSLDLMLPQAASEGIVFHSLQISLCFRSWLPAMLAVLLSLAPSASSDISASRPNILLLMADDLGIGDIGCYGNNTMRTPNIDRLAEDGVKLTQHISAASLCTPSRAAFLTGRYPVRSGMVSSIGYRVLQWTGASGGLPTNETTFAKILKEKGYATGLIGKWHLGLNCESASDHCHHPLHHGFDHFYGMPFSLMGDCARWELSEKRVNLEQKLNFLFQVLALVALTLVAGKLTHLIPVSWMPVIWSALSAVLLLASSYFVGALIVHADCFLMRNHTITEQPMCFQRTTPLILQEVASFLKRNKHGPFLLFVSFLHVHIPLITMENFLGKSLHGLYGDNVEEMDWMVGRILDTLDVEGLSNSTLIYFTSDHGGSLENQLGNTQYGGWNGIYKGGKGMGGWEGGIRVPGIFRWPGVLPAGRVIGEPTSLMDVFPTVVRLAGGEVPQDRVIDGQDLLPLLLGTAQHSDHEFLMHYCERFLHAARWHQRDRGTMWKVHFVTPVFQPEGAGACYGRKVCPCFGEKVVHHDPPLLFDLSRDPSETHILTPASEPVFYQVMERVQQAVWEHQRTLSPVPLQLDRLGNIWRPWLQPCCGPFPLCWCLREDDPQ

SEQ ID NO: 19694 - protein, 1075 aa, Homo sapiens
MGTGPGVSGRLAASRPGPGLPLRDSEPSWAGGRARDGDSQVCHHADCQQLHRRGPLNLCEACDSKFHSTMHYDGHVRFDLPPQGSVLARNVSTRSCPPRTSPAVDLEEEEEESSVDGKGDRKSTGLKLSKKKARRRHTDDPSKECFTLKFDLNVDIETEIVPAMKKKSLGEVLLPVFERKGIALGKVDIYLDQSNTPLSLTFEAYRFGGHYLRVKAPAKPGDEGKVEQGMKDSKSLSLPILRPAGTGPPALERVDAQSRRESLDILAPGRRRKNMSEFLGEASIPGQEPPTPSSCSLPSGSSGSTNTGDSWKNRAASRFSGFFSSGPSTSAFGREVDKMEQLEGKLHTYSLFGLPRLPRGLRFDHDSWEEEYDEDEDEDNACLRLEDSWRELIDGHEKLTRRQCHQQEAVWELLHTEASYIRKLRVIINLFLCCLLNLQESGLLCEVEAERLFSNIPEIAQLHRRLWASVMAPVLEKARRTRALLQPGDFLKGFKMFGSLFKPYIRYCMEEEGCMEYMRGLLRDNDLFRAYITWAEKHPQCQRLKLSDMLAKPHQRLTKYPLLLKSVLRKTEEPRAKEAVVAMIGSVERFIHHVNACMRQRQERQRLAAVVSRIDAYEVVESSSDEVDKLLKEFLHLDLTAPIPGASPEETRQLLLEGSLRMKEGKDSKMDVYCFLFTDLLLVTKAVKKAERTRVIRPPLLVDKIVCRELRDPGSFLLIYLNEFHSAVGAYTFQASGQALCRGWVDTIYNAQNQLQQLRAQEPPGSQQPLQSLEEEEDEQEEEEEEEEEEEEGEDSGTSAASSPTIMRKSSGSPDSQHCASDGSTETLAMVVVEPGDTLSSPEFDSGPFSSQSDETSLSTTASSATPTSELLPLGPVDGRSCSMDSAYGTLSPTSLQDFVAPGPMAELVPRAPESPRVPSPPPSPRLRRRTPVQLLSCPPHLLKSKSEASLLQLLAGAGTHGTPSAPSRSLSELCLAVPAPGIRTQGSPQEAGPSWDCRGAPSPGSGPGLVGCLAGEPAGSHRKRCGDLPSGASPRVQPEPPPGVSAQHRKLTLAQLYRIRTTLLLNSTLTASEV

SEQ ID NO: 19695 - protein, 896 aa, Homo sapiens
MKILVILHQETRLSLELLAHFDSLVLSTNLLFIVTPTSRSLLRQPDISCILGTGGKSPRLTQSSGFFGNLSMVTNLDDSNWAAAFSSQRSGLFTNTEPHSITEDVTISAVMLREDDPGEAASMSMFSDFLQSFLKHSSSTVFDLVEEYENICGSQVNILSKIVSRATPGLQKFSKTASMLWLLQQEMVTWRLLASLYRDRIQSALEEESVFAVTAVNASEKTVVEALFQRDSLVRQSQLVVDWLESIAKDEIGEFSDNIEFYAKSVYWENTLHTLKQRQLTSYVGSVRPLVTELDPDAPIRQKMPLDDLDREDEVRLLKYLFTLIRAGMTEEAQRLCKRCGQAWRAATLEGWKLYHDPNVNGGTELEPVEGNPYRRIWKISCWRMAEDELFNRYERAIYAALSGNLKQLLPVCDTWEDTVWAYFRVMVDSLVEQEIQTSVATLDETEELPREYLGANWTLEKVFEELQATDKKRVLEENQEHYHIVQKFLILGDIDGLMDEFSKWLSKSRNNLPGHLLRFMTHLILFFRTLGLQTKEEVSIEVLKTYIQLLIREKHTNLIAFYTCHLPQDLAVAQYALFLESVTEFEQRHHCLELAKEADLDVATITKTVVENIRKKDNGEFSHHDLAPALDTGTTEEDRLKIDVIDWLVFDPAQRAEALKQGNAIMRKFLASKKHEAAKEVFVKIPQDSIAEIYNQCEEQGMESPLPAEDDNAIREHLCIRAYLEAHETFNEWFKHMNSVPQKPALIPQPTFTEKVAHEHKEKKYEMDFGIWKGHLDALTADVKEKMYNVLLFVDGGWMVDVREDAKEDHERTHQMVLLRKLCLPMLCFLLHTILHSTGQYQECLQLADMVSSERHKLYLVFSKEELRKLLQKLRESSLMLLDQGLDPLGYEIQL

SEQ ID NO: 19696 - protein, 3426 aa, Homo sapiens
VLPSHTCGNPGEILKGVLHGTRFNIGDKIRYSCLPGYILEGHAILTCIVSPGNGASWDFPAPFCRAEGACGGTLRGTSSSISSPHFPSEYENNADCTWTILAEPGDTIALVFTDFQLEEGYDFLEISGTEAPSIWLTGMNLPSPVISSKNWLRLHFTSDSNHRRKGFNAQFQVKKAIELKSRGVKMLPSKDGSHKNSVLSQGGVALVSDMCPDPGIPENGRRAGSDFRVGANVQFSCEDNYVLQGSKSITCQRVTETLAAWSDHRPICRARTCGSNLRGPSGVITSPNYPVQYEDNAHCVWVITTTDPDKVIKLAFEEFELERGYDTLTVGDAGKVGDTRSVLYVLTGSSVPDLIVSMSNQMWLHLQSDDSIGSPGFKAVYQEIEKGGCGDPGIPAYGKRTGSSFLHGDTLTFECPAAFELVGERVITCQQNNQWSGNKPSCVFSCFFNFTASSGIILSPNYPEEYGNNMNCVWLIISEPGSRIHLIFNDFDVEPQFDFLAVKDDGISDITVLGTFSGNEVPSQLASSGHIVRLEFQSDHSTTGRGFNITYTTFGQNECHDPGIPINGRRFGDRFLLGSSVSFHCDDGFVKTQGSESITCILQDGNVVWSSTVPRCEAPCGGHLTASSGVILPPGWPGYYKDSLHCEWIIEAKPGHSIKITFDRFQTEVNYDTLEVRDGPASSSPLIGEYHGTQAPQFLISTGNFMYLLFTTDNSRSSIGFLIHYESVTLESDSCLDPGIPVNGHRHGGDFGIRSTVTFSCDPGYTLSDDEPLVCERNHQWNHALPSCDALCGGYIQGKSGTVLSPGFPDFYPNSLNCTWTIEVSHGKGVQMIFHTFHLESSHDYLLITEDGSFSEPVARLTGSVLPHTIKAGLFGNFTAQLRFISDFSISYEGFNITFSEYDLEPCDDPGVPAFSRRIGFHFGVGDSLTFSCFLGYRLEGATKLTCLGGGRRVWSAPLPRCVAECGASVKGNEGTLLSPNFPSNYDNNHECIYKIETEAGKGIHLRTRSFQLFEGDTLKVYDGKDSSSRPLGTFTKNELLGLILNSTSNHLWLEFNTNGSDTDQGFQLTYTSFDLVKCEDPGIPNYGYRIRDEGHFTDTVVLYSCNPGYAMHGSNTLTCLSGDRRVWDKPLPSCIAECGGQIHAATSGRILSPGYPAPYDNNLHCTWIIEADPGKTISLHFIVFDTEMAHDILKVWDGPVDSDILLKEWSGSALPEDIHSTFNSLTLQFDSDFFISKSGFSIQFSTSIAATCNDPGMPQNGTRYGDSREAGDTVTFQCDPGYQLQGQAKITCVQLNNRFFWQPDPPTCIAACGGNLTGPAGVILSPNYPQPYPPGKECDWRVKVNPDFVIALIFKSFNMEPSYDFLHIYEGEDSNSPLIGSYQGSQAPERIESSGNSLFLAFRSDASVGLSGFAIEFKEKPREACFDPGNIMNGTRVGTDFKLGSTITYQCDSGYKILDPSSITCVIGADGKPSWDQVLPSCNAPCGGQYTGSEGVVLSPNYPHNYTAGQICLYSITVPKEFVVFGQFAYFQTALNDLAELFDGTHAQARLLSSLSGSHSGETLPLATSNQILLRFSAKSGASARGFHFVYQAVPRTSDTQCSSVPEPRYGRRIGSEFSAGSIVRFECNPGYLLQGSTALHCQSVPNALAQWNDTIPSCVVPCSGNFTQRRGTILSPGYPEPYGNNLNCIWKIIVTEGSGIQIQVISFATEQNWDSLEIHDGGDVTAPRLGSFSGTTVPALLNSTSNQLYLHFQSDISVAAAGFHLEYKTVGLAACQEPALPSNSIKIGDRYMVNDVLSFQCEPGYTLQGRSHISCMPGTVRRWNYPSPLCIATCGGTLSTLGGVILSPGFPGSYPNNLDCTWRISLPIGYGAHIQFLNFSTEANHDFLEIQNGPYHTSPMIGQFSGTDLPAALLSTTHETLIHFYSDHSQNRQGFKLAYQAYELQNCPDPPPFQNGYMINSDYSVGQSVSFECYPGYILIGHPVLTCQHGINRNWNYPFPRCDAPCGYNVTSQNGTIYSPGFPDEYPILKDCIWLITVPPGHGVYINFTLLQTEAVNDYIAVWDGPDQNSPQLGVFSGNTALETAYSSTNQVLLKFHSDFSNGGFFVLNFHAFQLKKCQPPPAVPQAEMLTEDDDFEIGDFVKYQCHPGYTLVGTDILTCKLSSQLQFEGSLPTCEAQCPANEVRTGSSGVILSPGYPGNYFNSQTCSWSIKVEPNYNITIFVDTFQSEKQFDALEVFDGSSGQSPLLVVLSGNHTEQSNFTSRSNQLYLRWSTDHATSKKGFKIRYAAPYCSLTHPLKNGGILNRTAGAVGSKVHYFCKPGYRMVGHSNATCRRNPLGMYQWDSLTPLCQAVSCGIPESPGNGSFTGNEFTLDSKVVYECHEGFKLESSQQATAVCQEDGLWSNKGKPPTCKPVACPSIEAQLSEHVIWRLVSGSLNEYGAQVLLSCSPGYYLEGWRLLRCQANGTWNIGDERPSCRVISCGSLSFPPNGNKIGTLTVYGATAIFTCNTGYTLVGSHVRECLANGLWSGSETRCLAGHCGSPDPIVNGHISGDGFSYRDTVVYQCNPGFRLVGTSVRICLQDHKWSGQTPVCVPITCGHPGNPAHGFTNGSEFNLNDVVNFTCNTGYLLQGVSRAQCRSNGQWSSPLPTCRVVNCSDPGFVENAIRHGQQNFPESFEYGMSILYHCKKGFYLLGSSALTCMANGLWDRSLPKCLAISCGHPGVPANAVLTGELFTYGAVVHYSCRGSESLIGNDTRVCQEDSHWSGALPHCTGNNPGFCGDPGTPAHGSRLGDDFKTKSLLRFSCEMGHQLRGSPERTCLLNGSWSGLQPVCEAVSCGNPGTPTNGMIVSSDGILFSSSVIYACWEGYKTSGLMTRHCTANGTWTGTAPDCTIISCGDPGTLANGIQFGTDFTFNKTVSYQCNPGYVMEAVTSATIRCTKDGRWNPSKPVCKAVLCPQPPPVQNGTVEGSDFRWGSSISYSCMDGYQLSHSAILSCEGRGVWKGEIPQCLPVFCGDPGIPAEGRLSGKSFTYKSEVFFQCKSPFILVGSSRRVCQADGTWSGIQPTCIDPAHNTCPDPGTPHFGIQNSSRGYEVGSTVFFRCRKGYHIQGSTTRTCLANLTWSGIQTECIPHACRQPETPAHADVRAIDLPTFGYTLVYTCHPGFFLAGGSEHRTCKADMKWTGKSPVCKSKGVREVNETVTKTPVPSDVFFVNSLWKGYYEYLGKRQPATLTVDWFNATSSKVNATFSEASPVELKLTGIYKKEEAHLLLKAFQIKGQADIFVSKFENDNWGLDGYVSSGLERGGFTFQGDIHGKDFGKFKLERQDPLNPDQDSSSHYHGTSSGSVAAAILVPFFALILSGFAFYLYKHRTRPKVQYNGYAGHENSNGQASFENPMYDTNLKPTEAKAVRFDTTLNTVCTVV

SEQ ID NO: 19697 - protein, 1372 aa, Homo sapiens
MAQTPDGISCELRGEITRFLWPKEVELLLKTWLPGEGAVQNHVLALLRWRAYLLHTTCLPLRVDCTFSYLEVQAMALQETPPQVTFELESLRELVLEFPGVAALEQLAQHVAAAIKKVFPRSTLGKLFRRPTPASMLARLERSSPSESTDPCSPCGGFLETYEALCDYNGFPFREEIQWDVDTIYHRQGCRHFSLGDFSHLGSRDLALSVAALSYNLWFRCLSCVDMKLSLEVSEQILHMMSQSSHLEELVLETCSLRGDFVRRLAQALAGHSSSGLRELSLAGNLLDDRGMTALSRHLERCPGALRRLSLAQTGLTPRGMRALGRALATNAAFDSTLTHLDLSGNPGALGASEDSGGLYSFLSRPNVLSFLNLAGTDTALDTLFAAVSRGCCTSLTHLDASRNVFSRTKSRAAPAALQLFLSRARTLRHLGLAGCKLPPDALRALLDGLALNTHLRDLHLDLSACELRSAGAQVIQDLVCDAGAVSSLDLADNGFGSDMVTLVLAIGRSRSLRHVALGRNFNVRCKETLDDVLHRIVQLMQDDDCPLQSLSVAESRLKLGASVLLRALATNPNLTALDISGNAMGDAGAKLLAKALRVNSRLRSVVWDRNHTSALGLLDVAQALEQNHSLKAMPLPLNDVAQAQRSRPELTARAVHQIQACLLRNNRADPASSDHTTRLQPLGLVSDPSEQEVNELCQSVQEHVELLGCGAGPQGEAAVRQAEDAIQNANFSLSILPILYEAGSSPSHHWQLGQKLEGLLRQVGEVCRQDIQDFTQATLDTARSLCPQMLQGSSWREQLEGVLAGSRGLPELLPEQLLQDAFTRLRDMRLSITGTLAESIVAQALAGLSAARDQLVESLAQQATVTMPPALPAPDGGEPSLLEPGELEGLFFPEEKEEEKEKDDSPPQKWPELSHGLHLVPFIHSAAEEAEPEPELAAPGEDAEPQAGPSARGSPSPAAPGPPAGPLPRMDLPLAGQPLRHPTRARPRPRRQHHHRPPPGGPQVPPALPQEGNGLSARVDEGVEEFFSKRLIQQDRLWAPEEDPATEGGATPVPRTLRKKLGTLFAFKKPRSTRGPRTDLETSPGAAPRTRKTTFGDLLRPPTRPSRGEELGGAEGDTSSPDPAGRSRPRYTRDSKAYSMILLPAEEEATLGARPDKRRPLERGETELAPSFEQRVQVMLQRIGVSRGSGGAEGKRKQSKDGEIKKAGSDGDIMDSSTEAPPISIKSRTHSVSADPSCRPGPGSQGPESATWKTLGQQLNAELRSRGWGQQDGPGPPSPGQSPSPCRTSPSPDSLGLPEDPCLGPRNEERPLRLQRSPVLKRRPKLEAPPSPSLGSGLGTEPLPPQPTEPSSPERSPPSPATDQRGGGPNP

SEQ ID NO: 19698 - protein, 611 aa, Homo sapiens
MLASLEKDKTAPGSAQVAGLCGRLTLHRDLRTGRWEPDPQRSRRCLRDPQRVLEYCRQMYPELQIARVEQATQAIPMERWCGGSRSGSCAHPHHQVVPFRCLPGEFVSEALLVPEGCRFLHQERMDQCESSTRRHQEAQEACSSQGLILHGSGMLLPCGSDRFRGVEYVCCPPPGTPDPSGTAVGDPSTRSWPPGSRVEGAEDEEEEESFPQPVDDYFVEPPQAEEEEETVPPPSSHTLAVVGKVTPTPRPTDGVDIYFGMPGEISEHEGFLRAKMDLEERRMRQINEVMREWAMADNQSKNLPKADRQALNEHFQSILQTLEEQVSGERQRLVETHATRVIALINDQRRAALEGFLAALQADPPQAERVLLALRRYLRAEQKEQRHTLRHYQHVAAVDPEKAQQMRFQVHTHLQVIEERVNQSLGLLDQNPHLAQELRPQIQELLHSEHLGPSELEAPAPGGSSEDKGGLQPPDSKDDTPMTLPKGSTEQDAASPEKEKMNPLEQYERKVNASVPRGFPFHSSEIQRDELAPAGTGVSREAVSGLLIMGAGGGSLIVLSMLLLRRKKPYGAISHGVVEVDPMLTLEEQQLRELQRHGYENPTYRFLEERP

SEQ ID NO: 19699 - protein, 1140 aa, Homo sapiens
MPQVLWPRILTFVVPAEYTEALEPLFSIIRILIMAEEKKQHSAKESTALVVSTGAVKLPSPQQLLARLLVISMPASLGELRGAGAIGLLKILPEIIHPKLVDLWKTRLPELLQPLEGKNISTVLWETMLLQLLKESLWKISDVAWTIQLTQDFKQQMGSYSNNSTEKKFLWKALGTTLACCQDSDFVNSQIKEFLTAPNQLGDQRQGITSILGYCAENHLDIVLKVLKTFQNQEKFFMNRCKSLFSGKKSLTKTDVMVIYGAVALHAPKKQLLSRLNQDIISQVLSLHGQCSQVLGMSVMNKDMDLQMSFTRSITEIGIAVQDAEDQGFQFSYKEMLIGYMLDFIRDEPLDSLASPIRWKALIAIRYLSKLKPQLSLQDHLNILEENIRRLLPLPPLENLKSEGQTDKDKEHIQFLYERSMDALGKLLKTMMWDNVNAEDCQEMFNLLQMWLVSQKEWERERAFQITAKVLTNDIEAPENFKIGSLLGLLAPHSCDTLPTIRQAAASSTIGLFYIKGIHLEVERLQGLQEGLESDDVQVQIKISSKIAKIVSKFIPNEEILMFLEEMLDGLESLNPTCTKACGIWMITVLKQQGAALEDQLLEILGTIYHHMPVLRQKEESFQFILEAISQIASFHMDTVVVNLLQKPLPFDRDTKTLWKALAEKPASSGKLLQALIDKLETELEDDIARVEAISVACAMYEVISMGTSVTGLYPELFTLLLKLVSCTLGQKMLTCPWSHRRHVMQQGEQQQIPDPCRLSTATLKCLQAQAMREGLAKESDEGDNLWTLLSSPSTHHIGVCSLARSMAVWQHGVILDIMEQLLSSLTSSSENYRITGAAFFSELMKEPILWKHGNLRNVLILMDQSAWDSNATLRQMAIRGLGNTASGAPHKVKKHKQLMLESIIRGLYHLARTEVVCESLKALKKILELLTDRDVSFYFKEIVLQTRTFFEDEQDDVRLTAIFLFEDLAPLTGRRWKIFFAEEIKKSLISFLLHLWDPNPKIGVACRDVLMVCIPFLGLQELYGVLDRLLDQDLPRARDFYRQFCVKLAKKNQEILWILHTHSFTFFTSTWEVIRSAAVKLTDAVVLNLTSQYVELLDREQLTTRLQALRQDPCISVQRAAEAALQTLLRRCKETSIPL

SEQ ID NO: 19700 - protein, 310 aa, Homo sapiens
MPKSGFTKPIQSENSDSDSNMVEKPYGRKSKDKIASYSKTPKIERSDVSKEMKEKSSMKRKLPFTISPSRNEERDSDTEKEGPEKKKTKKEAGNKKSTPVSILFGYPLSERKQMALLMQMTARDNNSTPNHPSQTTPAQKKTPSSSSRQKDKVNKRNERGETPLHMAAIRGDVKQVKELISLGANVNVKDFAGWTPLHEACNVGYYDVAKILIAAGADVNTQGLDDDTPLHDSASSGHRDIVKLLLRHGGNPFQANKHGERPVDVAETEELELLLKREVPLSDDDESYTDSEEAQSVNPSSVDENIDSET

SEQ ID NO: 19701 - protein, 677 aa, Homo sapiens
MLGSLVLRRKALAPRLLLRLLRSPTLRGHGGASGRNVTTGSLGEPQWLRVATGGRPGTSPALFSGRGAATGGRQGGRFDTKCLAAATWGRLPGPEETLPGQDSWNGVPSRAGLGMCALAAALVVHCYSKSPSNKDAALLEAARANNMQEVSRLLSEGADVNAKHRLGWTALMVAAINRNNSVVQVLLAAGADPNLGDDFSSVYKTAKEQGIHSLEVLITREDDFNNRLNNRASFKGCTALHYAVLADDYRTVKELLDGGANPLQRNEMGHTPLDYAREGEVMKLLRTSEAKYQEKQRKREAEERRRFPLEQRLKEHIIGQESAIATVGAAIRRKENGWYDEEHPLVFLFLGSSGIGKTELAKQTAKYMHKDAKKGFIRLDMSEFQERHEVAKFIGSPPGYVGHEEGGQLTKKLKQCPNAVVLFDEVDKAHPDVLTIMLQLFDEGRLTDGKGKTIDCKDAIFIMTSNVASDEIAQHALQLRQEALEMSRNRIAENLGDVQISDKITISKNFKENVIRPILKAHFRRDEFLGRINEIVYFLPFCHSELIQLVNKELNFWAKRAKQRHNITLLWDREVADVLVDGYNVHYGARSIKHEVERRVVNQLAAAYEQDLLPGGCTLRITVEDSDKQLLKSPELPSPQAEKRLPKLRLEIIDKDSKTRRLDIRAPLHPEKVCNTI

SEQ ID NO: 19702 - protein, 638 aa, Homo sapiens
MPLGRQSHRHHRTHGQKHRRRGRGKGASQGEEGLEALAHDTPSQRVQFILGTEEDEEHVPHELFTELDEICMKEGEDAEWKETARWLKFEEDVEDGGERWSKPYVATLSLHSLFELRSCLINGTVLLDMHANSIEEISDLILDQQELSSDLNDSMRVKVREALLKKHHHQNEKKRNNLIPIVRSFAEVGKKQSDPHLMDKHGQTVSPQSVPTTNLEVKNGVNCEHSPVDLSKVDLHFMKKIPTGAEASNVLVGEVDILDRPIVAFVRLSPAVLLSGLTEVPIPTRFLFILLGPVGKGQQYHEIGRSMATIMTDEIFHDVAYKAKERDDLLAGIDEFLDQVTVLPPGEWDPSIRIEPPKNVPSQEKRKMPGVPNGNVCHIEQEPHGGHSGPELQRTGRLFGGLVLDIKRKAPWYWSDYRDALSLQCLASFLFLYCACMSPVITFGGLLGEATEGRISAIESLFGASMTGIAYSLFAGQALTILGSTGPVLVFEKILFKFCKDYALSYLSLRACIGLWTAFLCIVLVATDASSLVCYITRFTEEAFASLICIIFIYEAIEKLIHLAETYPIHMHSQLDHLSLYYCRCTLPENPNNHTLQYWKDHNIVTAEVHWANLTVSVSLGAARCPSIVTTGLGGTSK

SEQ ID NO: 19703 - protein, 551 aa, Homo sapiens
MPSERCLSIQEMLTGQRLCHSESHNDSVLAALNQQRSDGILCDITLIAEEQKFHAHKAVLAACSDYFRELNSFNYLDLYRLADLFNLTLLEKAVIDFLVKHLSELLKSRPEEVLTLPYCLLQEVLKSDRLTSLSEEQIWQLAVRWLEHNCHYQYMDELLQYIRFGLMDVDTLHTVALSHPLVQASETATALVNEALEYHQSIYAQPVWQTRRTKPRFQSDTLYIIGGKKREVCKVKELRYFNPVDQENALIAAIANWSELAPMPVGRSHHCVAVMGDFLFVAGGEVEHASGRTCAVRTACRYDPRSNSWAEIAPMKNCREHFVLGAMEEYLYAVGGRNELRQVLPTVERYCPKKNKWTFVQSFDRSLSCHAGYVADGLLWISGGVTNTAQYQNRLMVYEPNQNKWISRSPMLQRRVYHSMAAVQRKLYVLGGNDLDYNNDRILVRHIDSYNIDTDQWTRCNFNLLTGQNESGVAVHNGRIYLVGGYSIWTNEPLACIQVLDVSREGKEEVFYGPTLPFASNGIAACFLPAPYFTCPNLQTLQVPHHRIGTI

SEQ ID NO: 19704 - protein, 851 aa, Homo sapiens
MQRSIMSFFHPKKEGKAKKPEKEASNSSRETEPPPKAALKEWNGVVSESDSPVKRPGRKAARVLGSEGEEEDEALSPAKGQKPALDCSQVSPPRPATSPENNASLSDTSPMDSSPSGIPKRRTEAETPTESVSEPEVATKQELQEEEEQTKPPRRAPKTLSSFFTPRKPAVKKEVKEEEPGAPGKEGAAEGPLDPSGYNPAKNNYHPVEDACWKPGQKVPYLAVARTFEKIEEVSARLRMVETLSNLLRSVVALSPPDLLPVLYLSLNHLGPPQQGLELGVGDGVLLKAVAQATGRQLESVRAEAAEKGDVGLVAENSRSTQRLMLPPPPLTASGVFSKFRDIARLTGSASTAKKIDIIKGLFVACRHSEARFIARSLSGRLRLGLAEQSVLAALSQAVSLTPPGQEFPPAMVDAGKGKTAEARKTWLEEQGMILKQTFCEVPDLDRIIPVLLEHGLERLPEHCKLSPGIPLKPMLAHPTRGISEVLKRFEEAAFTCEYKYDGQRAQIHALEGGEVKIFSRNQEDNTGKYPDIISRIPKIKLPSVTSFILDTEAVAWDREKKQIQPFQVLTTRKRKEVDASEIQVQVCLYAFDLIYLNGESLVREPLSRRRQLLRENFVETEGEFVFATSLDTKDIEQIAEFLEQSVKDSCEGLMVKTLDVDATYEIAKRSHNWLKLKKDYLDGVGDTLDLVVIGAYLGRGKRAGRYGGFLLASYDEDSEELQAICKLGTGFSDEELEEHHQSLKALVLPSPRPYVRIDGAVIPDHWLDPSAVWEVKCADLSLSPIYPAARGLVDSDKGISLRFPRFIRVREDKQPEQATTSAQVACLYRKQSQIQNQQGEDSGSDPEDTY

SEQ ID NO: 19705 - protein, 957 aa, Homo sapiens
MEESSSVAMLVPDIGEQEAILTAESIISPSLEIDEQRKTKPDPLIHVIQKLSKIVENEKSQKCLLIGKKRPRSSAATHSLETQELCEIPAKVIQSPAADTRRAEMSQTNFTPDTLAQNEGKAMSYQCSLCKFLSSSFSVLKDHIKQHGQQNEVILMCSECHITSRSQEELEAHVVNDHDNDANIHTQSKAQQCVSPSSSLCRKTTERNETIPDIPVSVDNLQTHTVQTASVAEMGRRKWYAYEQYGMYRCLFCSYTCGQQRMLKTHAWKHAGEVDCSYPIFENENEPLGLLDSSAAAAPGGVDAVVIAIGESELSIHNGPSVQVQICSSEQLSSSSPLEQSAERGVHLSQSVTLDPNEEEMLEVISDAEENLIPDSLLTSAQKIISSSPNKKGHVNVIVERLPSAEETLSQKRFLMNTEMEEGKDLSLTEAQIGREGMDDVYRADKCTVDIGGLIIGWSSSEKKDELMNKGLATDENAPPGRRRTNSESLRLHSLAAEALVTMPIRAAELTRANLGHYGDINLLDPDTSQRQVDSTLAAYSKMMSPLKNSSDGLTSLNQSNSTLVALPEGRQELSDGQVKTGISMSLLTVIEKLRERTDQNASDDDILKELQDNAQCQPNSDTSLSGNNVVEYIPNAERPYRCRLCHYTSGNKGYIKQHLRVHRQRQPYQCPICEHIADNSKDLESHMIHHCKTRIYQCKQCEESFHYKSQLRNHEREQHSLPDTLSIATSNEPRISSDTADGKCVQEGNKSSVQKQYRCDVCDYTSTTYVGVRNHRRIHNSDKPYRKEFRCSLCGYVCSHPPSLKSHMWKHASDQNYNYEQVNKAINDAISQSGRVLGKSPGKTQLKSSEESADPVTGSSENAVSSSELMSQTPSEVLGTNENEKLSPTSNTSYSLEKISSLAPPSMEYCVLLFCCCICGFESTSKENLLDHMKEHEGEIVNIILNKDHNTALNTN

SEQ ID NO: 19706 - protein, 634 aa, Homo sapiens
MLKVHPLKKYPVDLYYLVDVSASMHNNIEKLNSVGNDLSRKMAFFSRDFRLGFGSYVDKTVSPYISIHPERIHNQCSDYNLDCMPPHGYIHVLSLTENITEFEKAVHRQKISGNIDTPEGGFDAMLQAAVCESHIGWRKEAKRLLLVMTDQTSHLALDSKLAGIVVPNDGNCHLKNNVYVKSTTMEHPSLGQLSEKLIDNNINVIFAVQGKQFHWYKDLLPLLPGTIAGEIESKAANLNNLVVEAYQKLISEVKVQVENQVQGIYFNITAICPDGSRKPGMEGCRNVTSNDEVLFNVTVTMKKCDVTGGKNYAIIKPIGFNETAKIHIHRNCSCQCEDNRGPKGKCVDETFLDSKCFQCDENKCHFDEDQFSSESCKSHKDQPVCSGRGVCVCGKCSCHKIKLGKVYGKYCEKDDFSCPYHHGNLCAGHGECEAGRCQCFSGWEGDRCQCPSAAAQHCVNSKGQVCSGRGTCVCGRCECTDPRSIGRFCEHCPTCYTACKENWNCMQCLHPHNLSQAILDQCKTSCALMEQQHYVDQTSECFSSPSYLRIFFIIFIVTFLIGLLKVLIIRQVILQWNSNKIKSSSDYRVSASKKDKLILQSVCTRAVTYRREKPEEIKMDISKLNAHETFRCNF

SEQ ID NO: 19707 - protein, 600 aa, Homo sapiens
MKDIFFQFIIARVRKCYSLSCLHTLPVVPTLRKTERGSYSSYGRESNLQGCHQSLLGGDMDMGNPGTLSPTKPGSQYYQYSSNNPRRRPLHSSAMEVQTKKVRKVPPGLPSSVYAPSASTADYNRDSPGYPSSKPATSTFPSSFFMQDGHHSSDPWSSSSGMNQPGYAGMLGNSSHIPQSSSYCSLHPHERLSYPSHSSADINSSLPPMSTFHRSGTNHYSTSSCTPPANGTDSIMANRGSGAAGSSQTGDALGKALASIYSPDHTNNSFSSNPSTPVGSPPSLSAGTAVWSRNGGQASSSPNYEGPLHSLQSRIEDRLERLDDAIHVLRNHAVGPSTAMPGGHGDMHGIIGPSHNGAMGGLGSGYGTGLLSANRHSLMVGTHREDGVALRGSHSLLPNQVPVPQLPVQSATSPDLNPPQDPYRGMPPGLQGQSVSSGSSEIKSDDEGDENLQDTKSSEDKKLDDDKKDIKSITRSRSSNNDDEDLTPEQKAEREKERRMANNARERLRVRDINEAFKELGRMVQLHLKSDKPQTKLLILHQAVAVILSLEQQVRERNLNPKAACLKRREEEKVSSEPPPLSLAGPHPGMGDASNHMGQM

SEQ ID NO: 19708 - protein, 1531 aa, Homo sapiens
MGNAESQHVEHEFYGEKHASLGRKHTSRSLRLSHKTRRTRHASSGKVIHRNSEVSTRSSSTPSIPQSLAENGLEPFSQDGTLEDFGSPIWVDRVDMGLRPVSYTDSSVTPSVDSSIVLTAASVQSMPDTEESRLYGDDATYLAEGGRRQHSYTSNGPTFMETASFKKKRSKSADIWREDSLEFSLSDLSQEHLTSNEEILGSAEEKDCEEARGMETRASPRQLSTCQRANSLGDLYAQKNSGVTANGGPGSKFAGYCRNLVSDIPNLANHKMPPAAAEETPPYSNYNTLPCRKSHCLSEGATNPQISHSNSMQGRRAKTTQDVNAGEGSEFADSGIEGATTDTDLLSRRSNATNSSYSPTTGRAFVGSDSGSSSTGDAARQGVYENFRRELEMSTTNSESLEEAGSAHSDEQSSGTLSSPGQSDILLTAAQGTVRKAGALAVKNFLVHKKNKKVESATRRKWKHYWVSLKGCTLFFYESDGRSGIDHNSIPKHAVWVENSIVQAVPEHPKKDFVFCLSNSLGDAFLFQTTSQTELENWITAIHSACATAVARHHHKEDTLRLLKSEIKKLEQKIDMDEKMKKMGEMQLSSVTDSKKKKTILDQIFVWEQNLEQFQMDLFRFRCYLASLQGGELPNPKRLLAFASRPTKVAMGRLGIFSVSSFHALVAARTGETGVRRRTQAMSRSASKRRSRFSSLWGLDTTSKKKQGRPSINQREKEVVLPNVHQHNPDCDIWVHEYFTPSWFCLPNNQPALTVVRPGDTARDTLELICKLYKEIEICPKVTQSIHIEKSDTAADTYGFSLSSVEEDGIRRLYVNSVKETGLASKKGLKAGDEILEINNRAADALNSSMLKDFLSQPSLGLLVRTYPELEEGVELLESPPHRVDGPADLGESPLAFLTSNPGHSLCSEQGSSAETAPEETEGPDLESSDETDHSSKSTEQVAAFCRSLHEMNPSDQSPSPQDSTGPQLATMRQLSDADKLRKVICELLETERTYVKDLNCLMERYLKPLQKETFLTQDELDVLFGNLTEMVEFQVEFLKTLEDGVRLVPDLEKLEKVDQFKKVLFSLGGSFLYYADRFKLYSAFCASHTKVPKVLVKAKTDTAFKAFLDAQNPKQQHSSTLESYLIKPIQRILKYPLLLRELFALTDAESEEHYHLDVAIKTMNKVASHINEMQKIHEEFGAVFDQLIAEQTGEKKEVADLSMGDLLLHTTVIWLNPPASLGKWKKEPELAAFVFKTAVVLVYKDGSKQKKKLVGSHRLSIYEDWDPFRFRHMIPTEALQVRALASADAEANAVCEIVHVKSESEGRPERVFHLCCSSPESRKDFLKAVHSILRDKHRRQLLKTESLPSSQQYVPFGGKRLCALKGARPAMSRAVSAPSKSLGRRRRRLARNRFTIDSDAVSASSPEKESQQPPGGGDTDRWVEEQFDLAQYEEQDDIKETDILSDDDEFCESVKGASVDRDLQERLQATSISQRERGRKTLDSHASRMAQLKKQAALSGINGGLESASEEVIWVRREDFAPSRKLNTEI

SEQ ID NO: 19709 - protein, 1144 aa, Homo sapiens
QDPTSTFFQFGASIQQQATVMLKIMQDYDWHVFSLVTTIFPGYREFISFVKTTVDNSFVGWDMQNVITLDTSFEDAKTQVQLKKIHSSVILLYCSKDEAVLILSEARSLGLTGYDFFWIVPSLVSGNTELIPKEFPSGLISVSYDDWDYSLEARVRDGIGILTTAASSMLEKFSYIPEAKASCYGQMERPEVPMHTLHPFMVNVTWDGKDLSFTEEGYQVHPRLVVIVLNKDREWEKVGKWENHTLSLRHAVWPRYKSFSDCEPDDNHLSIVTLEEAPFVIVEDIDPLTETCVRNTVPCRKFVKINNSTNEGMNVKKCCKGFCIDILKKLSRTVKFTYDLYLVTNGKHGKKVNNVWNGMIGEVVYQRAVMAVGSLTINEERSEVVDFSVPFVETGISVMVSRSNGTVSPSAFLEPFSASVWVMMFVMLLIVSAIAVFVFEYFSPVGYNRNLAKGKAPHGPSFTIGKAIWLLWGLVFNNSVPVQNPKGTTSKIMVSVWAFFAVIFLASYTANLAAFMIQEEFVDQVTGLSDKKFQRPHDYSPPFRFGTVPNGSTERNIRNNYPYMHQYMTKFNQKGVEDALVSLKTGKLDAFIYDAAVLNYKAGRDEGCKLVTIGSGYIFATTGYGIALQKGSPWKRQIDLALLQFVGDGEMEELETLWLTGICHNEKNEVMSSQLDIDNMAGVFYMLAAAMALSLITFIWEHLFYWKLRFCFTGVCSDRPGLLFSISRGIYSCIHGVHIEEKKKSPDFNLTGSQSNMLKLLRSAKNISSMSNMNSSRMDSPKRAADFIQRGSLIMDMVSDKGNLMYSDNRSFQGKESIFGDNMNELQTFVANRQKDNLNNYVFQGQHPLTLNESNPNTVEVAVSTESKANSRPRQLWKKSVDSIRQDSLSQNPVSQRDEATAENRTHSLKSPRYLPEEMAHSDISETSNRATCHREPDNSKNHKTKDNFKRSVASKYPKDCSEVERTYLKTKSSSPRDKIYTIDGEKEPGFHLDPPQFVENVTLPENVDFPDPYQDPSENFRKGDSTLPMNRNPLHNEEGLSNNDQYKLYSKHFTLKDKGSPHSETSERYRQNSTHCRSCLSNMPTYSGHFTMRSPFKCDACLRMGNLYDIDEDQMLQETGMTNAWLLGDAPRTLTNTRCHPRR

SEQ ID NO: 19710 - protein, 642 aa, Homo sapiens
MACLLETPIRMSVLSEVTASSRHYVDRLFDPDPQKVLQGVIDMKNAVIGNNKQKANLIVLGAVPRLLYLLQQETSSTELKTECAVVLGSLAMGTENNVKSLLDCHIIPALLQGLLSPDLKFIEACLRCLRTIFTSPVTPEELLYTGPDHQTILFNHGAVQNIAHLLTSLSYKVRMQALKCFSVLAFENPQVSMTLVNVLVDGELLPQIFVKMLQRDKPIEMQLTSAKCLTYMCRAGAIRTDDNCIVLKTLPCLVRMCSKERLLEERVEGAETLAYLIEPDVELQRIASITDHLIAMLADYFKYPSSVSAITDIKRLDHDLKHAHELRQAAFKLYASLGANDEDIRKKIIETENMMDRIVTGLSESSVKVRLAAVRCLHSLSRSVQQLRTSFQDHAVWKPLMKVLQNAPDEILVVASSMLCNLLLEFSPSKEPILESGAVELLCGLTQSENPALRVNGIWALMNMAFQAEQKIKADILRSLSTEQLFRLLSDSDLNVLMKTLGLLRNLLSTRPHIDKIMSTHGKQIMQAVTLILEGEHNIEVKEQTLCILANIADGTTAKDLIMTNDDILQKIKYYMGHSHVKLQLAAMFCISNLIWNEEEGSQERQDKLRDMGIVDILHKLSQSPDSNLCDKAKMALQQYLA

SEQ ID NO: 19711 - protein, 619 aa, Homo sapiens
MMNFSNIMNYMKLLGQSDLPRIKTEIEALKNLRHQHICQLYHVLETANKIFMVLEYCPGGELFDYIISQDRLSEEETRVVFRQIVSAVAYVHSQGYAHRDLKPENLLFDEYHKLKLIDFGLCAKPKGNKDYHLQTCCGSLAYAAPELIQGKSYLGSEADVWSMGILLYVLMCGFLPFDDDNVMALYKKIMRGKYDVPKWLSPSSILLLQQMLQVDPKKRISMKNLLNHPWIMQDYNYPVEWQSKNPFIHLDDDCVTELSVHHRNNRQTMEDLISLWQYDHLTATYLLLLAKKARGKPVRLRLSSFSCGQASATPFTDIKSNNWSLEDVTASDKNYVAGLIDYDWCEDDLSTGAATPRTSQFTKYWTESNGVESKSLTPALCRTPANKLKNKENVYTPKSAVKNEEYFMFPEPKTPVNKNQHKREILTTPNRYTTPSKARNQCLKETPIKIPVNSTGTDKLMTGVISPERRCRSVELDLNQAHMEETPKRKGAKVFGSLERGLDKVITVLTRSKRKGSARDGPRRLKLHYNVTTTRLVNPDQLLNEIMSILPKKHVDFVQKGYTLKCQTQSDFGKVTMQFELEVCQLQKPDVVGIRRQRLKGDAWVYKRLVEDILSSCKV

SEQ ID NO: 19712 - protein, 885 aa, Homo sapiens
LTSFCVCTGPGHQQTGYAFTHLSLQEFLAALHLMASPKVNKDTLTQYVTLHSRWVQRTKARLGLSDHLPTFLAGLASCTCRPFLSHLAQGNEDCVGAKQAAVVQVLKKLATRKLTGPKVVELCHCVDETQEPELASLTAQSLPYQLPFHNFPLTCTDLATLTNILEHREAPIHLDFDGCPLEPHCPEALVGCGQIENLSFKSRKCGDAFAEALSRSLPTMGRLQMLGLAGSKITARGISHLVKALPLCPQLKEVSFRDNQLSDQVVLNIVEVLPHLPRLRKLDLSSNSICVSTLLCLARVAVTCPTVRMLQAREADLIFLLSPPTETTAELQRAPDLQESDGQRKGAQSRSLTLRLQKCQLQVHDAEALIALLQEGPHLEEVDLSGNQLEDEGCRLMAEAASQLHIARKLDLSNNGLSVAGVHCVLRAVSACWTLAELHISLQHKTVIFMFAQEPEEQKGPQERAAFLDSLMLQMPSELPLSSRRMRLTHCGLQEKHLEQLCKALGGSCHLGHLHLDFSGNALGDEGAARLAQLLPGLGALQSLNLSENGLSLDAVLGLVRCFSTLQWLFRLDISFESQHILLRGDKTSSLSECPLEPPSLTRLCATLKDCPGPLELQLSCEFLSDQSLETLLDCLPQLPQLSLLQLSQTGLSPKSPFLLANTLSLCPRVKKVDLRSLHHATLHFRSNEEEEGVCCGFTGCSLSQEHVESLCWLLSKCKDLSQVDLSANLLGDSGLRCLLECLPQVPISGLLDLSHNSISQESALYLLETLPSCPRVREASVNLGSEQSFRIHFSREDQAGKTLRLSECSFRPEHVSRLATGLSKSLQLTELTLTQCCLGQKQLAILLSLVGRPAGLFSLRDSTRHTEKLSFPTLEACALGFKKK

SEQ ID NO: 19713 - protein, 1303 aa, Homo sapiens [sequence omitted]

SEQ ID NO: 19714 - protein, 231 aa, Homo sapiens
MAYSWQTDPNPNESHEKQYEHQEFLFVNQPHSSSQVSLGFDQIVDEISGKIPHYESEIDENTFFVPTAPKWDSTGHSLNEAHQISLNEFTSKSRELSWHQVSKAPAIGFSPSVLPKPQNTNKECSWGSPIGKHHGADDSRFSILAPSFTSLDKINLEKELENENHNYHIGFESSIPPTNSSFSSDFMPKEENKRSGHVNIVEPSLMLLKGSLQPGMWESTWQKNIEVVPFS

SEQ ID NO: 19715 - protein, 1477 aa, Homo sapiens
MEPRMESCLAQVLQKDVGKRLQVGQELIDYFSDKQKSADLEHDQTMLDKLVDGLATSWVNSSNYKVVLLGMDILSALVTRLQDRFKAQIGTVLPSLIDRLGDAKDSVREQDQTLLLKIMDQAANPQYVWDRMLGGFKHKNFRTREGICLCLIATLNASGAQTLTLSKIVPHICNLLGDPNSQVRDAAINSLVEIYRHVGERVRADLSKKGLPQSRLNVIFTKFDEVQKSGNMIQSANDKNFDDEDSVDGNRPSSASSTSSKAPPSSRRNVGMGTTRRLGSSTLGSKSSAAKEGAGAVDEEDFIKAFDDVPVVQIYSSRDLEESINKIREILSDDKHDWEQRVNALKKIRSLLLAGAAEYDNFFQHLRLLDGAFKLSAKDLRSQVVREACITLGHLSSVLGNKFDHGAEAIMPTIFNLIPNSAKIMATSGVVAVRLIIRHTHIPRLIPVITSNCTSKSVAVRRRCFEFLDLLLQEWQTHSLERHISVLAETIKKGIHDADSEARIEARKCYWGFHSHFSREAEHLYHTLESSYQKALQSHLKNSDSIVSLPQSDRSSSSSQESLNRPLSAKRSPTGSTTSRASTVSTKSVSTTGSLQRSRSDIDVNAAASAKSKVSSSSGTTPFSSAAALPPGSYASLESRHMREDMEYIGLDSGRIRTRRQSSGSATNVASTPDNRGRSRAKVVSQSQPGSRSSSPGKLLGSGYGGLTGGSSRGPPVTPSSEKRSKIPRSQGCSRETSPNRIGLDRFGLGQPGRIPGSVNAMRVLSTSTDLEAAVADALLLGDSRSKKPVRRRYEPYGMYSDDDANSDASSVCSERSYGSRNGGIPHYLRQTEDVAEVLNHCASSNWSERKEGLLGLQNLLKSQRTLSRVELKRLCEIFTRMFADPHSKRVFSMFLETLVDFIIIHKDDLQDWLFVLLTQLLKKMGADLLGSVQAKVQKALDVTRDSFPFDQQFNILMRFIVDQTQTPNLKVKVAILKYIESLARQMDPTDFVNSSETRLAVSRIITWTTEPKSSDVRKAAQIVLISLFELNTPEFTMLLGALPKTFQDGATKLLHNHLKNSSNTSVGSPSNTIGRTPSRHTSSRTSPLTSPTNCSHGGLSPSMLDYDTENLNSEEIYSSLRGVTEAIEKFSFRSQEDLNEPIKRDGKKECDIVSRDGGAASPATEGRGGSEVEGGRTALDNKTSLLNTQPPRAFPGPRARDYNPYPYSDAINTYDKTALKEAVFDDDMEQLRDVPIDHSDLVADLLKELSNHNERVEERKGALLELLKITREDSLGVWEEHFKTILLLLLETLGDKDHSIRALALRVLREILRNQPARFKNYAELTIMKTLEAHKDSHKEVVRAAEEAASTLASSIHPEQCIKVLCPIIQTADYPINLAAIKMQTKVVERIAKESLLQLLVDIIPGLLQGYDNTESSVRKASVFCLVAIYSVIGEDLKPHLAQLTGSKMKLLNLYIKRAQTTNSNSSSSSDVSTHS

SEQ ID NO: 19716 - protein, 882 aa, Homo sapiens
SYLTLDEPMNNITTSLGQTAELHCKVSGNPPPTIRWFKNDAPVVQEPRRLSFRSTIYGSRLRIRNLDTTDTGYFQCVATNGKEVVSSTGVLFVKFGPPPTASPGYSDEYEEDGFCQPYRGIACARFIGNRTVYMESLHMQGEIENQITAAFTMIGTSSHLSDKCSQFAIPSLCHYAFPYCDETSSVPKPRDLCRDECEILENVLCQTEYIFARSNPMILMRLKLPNCEDLPQPESPEAANCIRIGIPMADPINKNHKCYNSTGVDYRGTVSVTKSGRQCQPWNSQYPHTHTFTALRFPELNGGHSYCRNPGNQKEAPWCFTLDENFKSDLCDIPACDSKDSKEKNKMEILYILVPSVAIPLAIALLFFFICVCRNNQKSSSAPVQRQPKHVRGQNVEMSMLNAYKPKSKAKELPLSAVRFMEELGECAFGKIYKGHLYLPGMDHAQLVAIKTLKDYNNPQQWTEFQQEASLMAELHHPNIVCLLGAVTQEQPVCMLFEYINQGDLHEFLIMRSPHSDVGCSSDEDGTVKSSLDHGDFLHIAIQIAAGMEYLSSHFFVHKDLAARNILIGEQLHVKISDLGLSREIYSADYYRVQSKSLLPIRWMPPEAIMYGKFSSDSDIWSFGVVLWEIFSFGLQPYYGFSNQEVIEMVRKRQLLPCSEDCPPRMYSLMTECWNEIPSRRPRFKDIHVRLRSWEGLSSHTSSTTPSGGNATTQTTSLSASPVSNLSNPRYPNYMFPSQGITPQGQIAGFIGPPIPQNQRFIPINGYPIPPGYAAFPAAHYQPTGPPRVIQHCPPPKSRSPSSASGSTSTGHVTSLPSSGSNQEANIPLLPHMSIPNHPGGMGITVFGNKSQKPYKIDSKQASLLGDANIHGHTESMISAEL

SEQ ID NO: 19717 - protein, 267 aa, Homo sapiens
MDDDDFGGFEAAETFDGGSGETQTTSPAIPWAAFPAVSGVHLSPSSPEIVLDRDHSSSIGCLSSDAIISSPENTHAANSIVSQTIPKAQIQQSTHTHLDISLFPLGLTDEKSNGTIALVDDSEDPGANVSNIQLQQKISSLEIKLKVSEEEKQRIKQDVESLMEKHNVLEKGFLKEKEQEAISFQDRYKELQEKHKQELEDMRKAGHEALSIIVDEYKALLQSSVKQQVEAIEKQYISAIEKQAHKCEELLNAQSALFSILPAIGCF

SEQ ID NO: 19718 - protein, 154 aa, Homo sapiens
MHDSNNVEKDITPSELPANPGCLHSKEHSIKATLIWRLFFLIMFLTIIVCGMVAALSAIRANCHQEPSVCLQAACPESWIGFQRKCFYFSDDTKNWTSSQRFCDSQDADLAQVESFQELNFLLRYKGPSDHWIGLSREQGQPWKWINGTEWTRQ

SEQ ID NO: 19719 - protein, 346 aa, Homo sapiens
ERGGLMVSEMESHPPSQGPGDGERRLSGSSLCSGSWVSADGFLRRRPSMGHPGMHYAPMGMHPMGQRANMPPVPHGMMPQMMPPMGGPPMGQMPGMMSSVMPGMMMSHMSQASMQPALPPGVNSMDVAAGTASGAKSMWTEHKSPDGRTYYYNTETKQSTWEKPDDLKTPAEQLLSKCPWKEYKSDSGKPYYYNSQTKESRWAKPKELEDLEAMIKAEESSKQEECTTTSTAPVPTTEIPTTMSTMAAAEAAAAVVAAAAAAAAAAAAANANASTSASNTVSGTVPVVPEPEVTSIVATVVDNENTVTISTEEQAQLTSTPAIQDQSVEVSSNTGEETSKQETVAE

SEQ ID NO: 19720 - protein, 681 aa, Homo sapiens
MIEKMQGSRMDEQRCSFPPPLKTEEDYIPYPSVHEVLGREGPFPLILLPQFGGYWIEGTNHEITSIPETEPLQSPTTKVKLECNPTARIYRKHFLGKEHFNYYSLDAALGHLVFSLKYDVIGDQEHLRLLLRTKCRTYHDVIPISCLTEFPNVVQMAKLVCEDVNVDRFYPVLYPKASRLIVTFDEHVISNNFKFGVIYQKLGQTSEEELFSTNEESPAFVEFLEFLGQKVKLQDFKGFRGGLDVTHGQTGTESVYCNFRNKEIMFHVSTKLPYTEGDAQQLQRKRHIGNDIVAVVFQDENTPFVPDMIASNFLHAYVVVQAEGGGPDGPLYKVSVTARDDVPFFGPPLPDPAVFRKGPEFQEFLLTKLINAEYACYKAEKFAKLEERTRAALLETLYEELHIHSQSMMGLGGDEDKMENGSGGGGFFESFKRVIRSRSQSMDAMGLSNKKPNTVSTSHSGSFAPNNPDLAKAAGISLLIPGKSASRFGRRGSAIGIGTVEESLIVPGKSPTRKKSGPFGSRRSSAIGIENIQEVQEKRESPPAGQKTPDSGHVSQEPKSENSSTQSSPEMPTTKNRAETAAQRAEALKDFSRSSSSASSFASVVEETEGVDGEDTGLESVSSSGTPHKRDSFIYSTWLEDSVSTTSGGSSPDAGKLGDPACPEIKIQLEASEQHMPQLGC

SEQ ID NO: 19721 - protein, 354 aa, Homo sapiens
MGFEPLAYRGLETGSREVVSHVIKQGKIVFVLSSALNPWNKEMGDHLVKHGDGVKDIAFEVEDCDYIVQKARERGAKIMREPWVEQDKFGKVKFAVLQTYGDTTHTLVEKMNYIGQFLPGYEAPAFMDPLLPKLPKCSLEMIDHIVGNQPDQEMVSASEWYLKNLQFHRFWSVDDTQVHTEYSSLRSIVVANYEESIKMPINEPAPGKKKSQIQEYVDYNGGAGVQHIALKTEDIITAIRHLRERGLEFLSVPSTYYKQLREKLKTAKIKVKENIDALEELKILVDYDEKGYLLQIFTKPVQDRPTLFLEVIQRHNHQGFGAGNFNSLFKAFEEEQNLRGNLTNMETNGVVPGM

SEQ ID NO: 19722 - protein, 720 aa, Homo sapiens
MDPVGLQLGNKNLWSCLVRLLTKDPEWLNAKMKFFLPNTDLDSRNETLDPEQRVILQLNKLHVQGSDTWQSFIHCVCMQLEVPLDLEVLLLSTFGYDDGFTSQLGAEGKSQPESQLHHGLKRPHQSCGSSPRRKQCKKQQLELAKKYLQLLRTSAQQRYRSQIPGSGQPHAFHQVYVPPILRRATASLDTPEGAIMGDVKVEDGADVSISDLFNTRVNKGPRVTVLLGKAGMGKTTLAHRLCQKWAEGHLNCFQALFLFEFRQLNLITRFLTPSELLFDLYLSPESDHDTVFQYLEKNADQVLLIFDGLDEALQPMGPDGPGPVLTLFSHLCNGTLLPGCRVMATSRPGKLPACLPAEAAMVHMLGFDGPRVEEYVNHFFSAQPSREGALVELQTNGRLRSLCAVPALCQVACLCLHHLLPDHAPGQSVALLPNMTQLYMQMVLALSPPGHLPTSSLLDLGEVALRGLETGKVIFYAKDIAPPLIAFGATHSLLTSFCVCTGPGHQQTGYAFTHLSLQEFLAALHLMASPKVNKDTLTQYVTLHSRWVQRTKARLGLSDHLPTFLAGLASCTCRPFLSHLAQGNEDCVGAKQAAVVQVLKKLATRKLTGPKVVELCHCVDETQEPELASLTAQSLPYQLPFHNFPLTCTDLATLTNILEHREAPIHLDFDGCPLEPHCPEALVGCGQIENLSFKSRKCGDAFAEALSRSLPTMGRLQMLG

SEQ ID NO: 19723 - protein, 204 aa, Homo sapiens
MQKASHKNKKGDVLISVGHANVLGYTLREFLQLLQHITIGTVLQIKVYRDFINIPEEWQEIYDLIPEAKFPVTSTPKKIELAKDESFTSSDDNENVDLDKRLQYYRYPWSTVHHPARRPISISRDWHGYKKKNHTISVGKDINCDVMIHRDDKKEVRAPSPYWIMVKQDNESSSSSTSSTSDAFWLEDCAQVEEGKAQLVSKVG

SEQ ID NO: 19724 - protein, 436 aa, Homo sapiens
MVNLESMHTDIKMSGDVADSTDARSTLSQVEPGNDRNGLDFNRQIKTEDLSDSLQQTLSHRPCHLSQGPAMMSGNQMSGLNASPCQDMASLHPLQQLVLVPGHLQSVSQFLLSQTQPGQQGLQPNLLPFPQQQSGLLLPQTGPGLASQAFGHPGLPGSSLEPHLEASQHLPVPKHLPSSGGADEPSDLEELEKFAKTFKQRRIKLGFTQGDVGLAMGKLYGNDFSQTTISRFEALNLSFKNMCKLKPLLEKWLNDAESSPSDPSVSTPSSYPSLSEVFGRKRKKRTSIETNIRLTLEKRFQDNPKPSSEEISMIAEQLSMEKEVVRVWFCNRRQKEKRINCPVATPIKPPVYNSRLVSPSGSLGPLSVPPVHSTMPGTVTSSCSPGNNSRPSSPGSGLHASSPTASQNNSKAAVNSASSFNSSGSWYRWNHSTYLH

SEQ ID NO: 19725 - protein, 1152 aa, Homo sapiens
MALRVLLLTALTLCHGFNLDTENAMTFQENARGFGQSVVQLQGSRVVVGAPQEIVAANQRGSLYQCDYSTGSCEPIRLQVPVEAVNMSLGLSLAATTSPPQLLACGPTVHQTCSENTYVKGLCFLFGSNLRQQPQKFPEALRGCPQEDSDIAFLIDGSGSIIPHDFRRMKEFVSTVMEQLKKSKTLFSLMQYSEEFRIHFTFKEFQNNPNPRSLVKPITQLLGRTHTATGIRKVVRELFNITNGARKNAFKILVVITDGEKFGDPLGYEDVIPEADREGVIRYVIGVGDAFRSEKSRQELNTIASKPPRDHVFQVNNFEALKTIQNQLREKIFAIEGTQTGSSSSFEHEMSQEGFSAAITSNGPLLSTVGSYDWAGGVFLYTSKEKSTFINMTRVDSDMNDAYLGYAAAIILRNRVQSLVLGAPRYQHIGLVAMFRQNTGMWESNANVKGTQIGAYFGASLCSVDVDSNGSTDLVLIGAPHYYEQTRGGQVSVCPLPRGRARWQCDAVLYGEQGQPWGRFGAALTVLGDVNGDKLTDVAIGAPGEEDNRGAVYLFHGTSGSGISPSHSQRIAGSKLSPRLQYFGQSLSGGQDLTMDGLVDLTVGAQGHVLLLRSQPVLRVKAIMEFNPREVARNVFECNDQVVKGKEAGEVRVCLHVQKSTRDRLREGQIQSVVTYDLALDSGRPHSRAVFNETKNSTRRQTQVLGLTQTCETLKLQLPNCIEDPVSPIVLRLNFSLVGTPLSAFGNLRPVLAEDAQRLFTALFPFEKNCGNDNICQDDLSITFSFMSLDCLVVGGPREFNVTVTVRNDGEDSYRTQVTFFFPLDLSYRKVSTLQNQRSQRSWRLACESASSTEVSGALKSTSCSINHPIFPENSEVTFNITFDVDSKASLGNKLLLKANVTSENNMPRTNKTEFQLELPVKYAVYMVVTSHGVSTKYLNFTASENTSRVMQHQYQVSNLGQRSLPISLVFLVPVRLNQTVIWDRPQVTFSENLSSTCHTKERLPSHSDFLAELRKAPVVNCSIAVCQRIQCDIPFFGIQEEFNATLKGNLSFDWYIKTSHNHLLIVSTAEILFNDSVFTLLPGQGAFVRSQTETKVEPFEVPNPLPLIVGSSVGGLLLLALITAALYKLGFFKRQYKDMMSEGGPPGAEPQ

SEQ ID NO: 19726 - protein, 476 aa, Homo sapiens
MDHISDSFLETNVPLLVLIEAAKSGNEKEVKEYAQVFREHANKLVEVANLACSISNNEEGVKLVRMAATQIDSLCPQVINAALTLAARPQSKVAQDNMDVFKDQWEKQVRVLTEAVDDITSVDDFLSVSENHILEDVNKCVIALQEGDVDTLDRTAGAIRGRAARVIHIINAEMENYEAGVYTEKVLEATKLLSETVMPRFAEQVEVAIEALSANVPQPFEENEFIDASRLVYDGVRDIRKAVLMIRTPEELEDDSDFEQEDYDVRSRTSVQTEDDQLIAGQSARAIMAQLPQEEKAKIAEQVEIFHQEKSKLDAEVAKWDDSGNDIIVLAKQMCMIMMEMTDFTRGKGPLKNTSDVINAAKKIAEAGSRMDKLARAVADQLDSATSLIQAAKNLMNAVVLTVKASYVASTKYQKVYGTAAVNSPVVSWKMKAPEKKPLVKREKPEEFQTRVRRGSQKKHISPVQALSEFKAMDSF

SEQ ID NO: 19727 - protein, 115 aa, Homo sapiens
MQQFGGLEATGILDEATLALMKTPRCSLPDLPVLTQARRRRQAPAPTKWNKRNLSWRVRTFPRDSPLGHDTVRALMYYALKVWSDIAPLNFHEVAGSAADIQIDFSKADHNDGYP

SEQ ID NO: 19728 - protein, 298 aa, Homo sapiens
MAKMELSKAFSGQRTLLSAILSMLSLSFSTTSLLSNYWFVGTQKVPKPLCEKGLAAKCFDMPVSLDGDTNTSTQEVVQYNWETGDDRFSFRSFRSGMWLSCEETVEEPALLHPQSWKQFRALRSSGTAAAKGERCRSFIELTPPAKRGLLGMVAHMMYSQVFQATVNLGPEDWRPHVWNYGWAFYMAWLSFTCCMASAVTTFNTYTRMVLEFKCKHSKSFKENPNCLPHHHQCFPRRLSSAAPTVGPLTSYHQYHNQPIHSVSEGVDFYSELRNKGFQRGASQELKEAVRSSVEEEQC

SEQ ID NO: 19729 - protein, 1837 aa, Homo sapiens
MDPVGLQLGNKNLWSCLVRLLTKDPEWLNAKMKFFLPNTDLDSRNETLDPEQRVILQLNKLHVQGSDTWQSFIHCVCMQLEVPLDLEVLLLSTFGYDDGFTSQLGAEGKSQPESQLHHGLKRPHQSCGSSPRRKQCKKQQLELAKKYLQLLRTSAQQRYRSQIPGSGQPHAFHQVYVPPILRRATASLDTPEGAIMGDVKVEDGADVSISDLFNTRVNKGPRVTVLLGKAGMGKTTLAHRLCQKWAEGHLNCFQALFLFEFRQLNLITRFLTPSELLFDLYLSPESDHDTVFQYLEKNADQVLLIFDGLDEALQPMGPDGPGPVLTLFSHLCNGTLLPGCRVMATSRPGKLPACLPAEAAMVHMLGFDGPRVEEYVNHFFSAQPSREGALVELQTNGRLRSLCAVPALCQVACLCLHHLLPDHAPGQSVALLPNMTQLYMQMVLALSPPGHLPTSSLLDLGEVALRGLETGKVIFYAKDIAPPLIAFGATHSLLTSFCVCTGPGHQQTGYAFTHLSLQEFLAALHLMASPKVNKDTLTQYVTLHSRWVQRTKARLGLSDHLPTFLAGLASCTCRPFLSHLAQGNEDCVGAKQAAVVQVLKKLATRKLTGPKVVELCHCVDETQEPELASLTAQSLPYQLPFHNFPLTCTDLATLTNILEHREAPIHLDFDGCPLEPHCPEALVGCGQIENLSFKSRKCGDAFAEALSRSLPTMGRLQMLGLAGSKITARGISHLVKALPLCPQLKEVSFRDNQLSDQVVLNIVEVLPHLPRLRKLDLSSNSICVSTLLCLARVAVTCPTVRMLQAREADLIFLLSPPTETTAELQRAPDLQESDGQRKGAQSRSLTLRLQKCQLQVHDAEALIALLQEGPHLEEVDLSGNQLEDEGCRLMAEAASQLHIARKLDLSNNGLSVAGVHCVLRAVSACWTLAELHISLQHKTVIFMFAQEPEEQKGPQERAAFLDSLMLQMPSELPLSSRRMRLTHCGLQEKHLEQLCKALGGSCHLGHLHLDFSGNALGDEGAARLAQLLPGLGALQSLNLSENGLSLDAVLGLVRCFSTLQWLFRLDISFESQHILLRGDKTSRDMWATGSLPDFPAAAKFLGFRQRCIPRSLCLSECPLEPPSLTRLCATLKDCPGPLELQLSCEFLSDQSLETLLDCLPQLPQLSLLQLSQTGLSPKSPFLLANTLSLCPRVKKVDLRSLHHATLHFRSNEEEEGVCCGLSANLLGDSGLRCLLECLPQVPISGLLDLSHNSISQESALYLLETLPSCPRVREASVNLGSEQSFRIHFSREDQAGKTLRLSECSFRPEHVSRLATGLSKSLQLTELTLTQCCLGQKQLAILLSLVGRPAGLFSLRVQEPWADRARVLSLLEVCAQASGSVTEISISETQQQLCVQLEFPRQEENPEAVALRLAHCDLGAHHSLLVGQLMETCARLQQLSLSQVNLCEDDDASSLLLQSLLLSLSELKTFRLTSSCVSTEGLAHLASGLGHCHHLEELDLSNNQFDEEGTKALMRALEGKWMLKRLDLSHLLLNSSTLALLTHRLSQMTCLQSLRLNRNSIGDVGCCHLSEALRAATSLEELDLSHNQIGDAGVQHLATILPGLPELRKIDLSGNSISSAGGVQLAESLVLCRRLEELMLGCNALGDPTALGLAQELPQHLRVLHLPFSHLGPGGALSLAQALDGSPHLEEISLAENNLAGGVLRFCMELPLLRQIDLVSCKIDNQTAKLLTSSFTSCPALEVILLSWNLLGDEAAAELAQVLPQMGRLKRVDLEKNQITALGAWLLAEGLAQGSSIQVIRLWNNPIPCDMAQHLKSQEPRLDFAFFDNQPQAPWGT

SEQ ID NO: 19730 - protein, 703 aa, Homo sapiens
MRLWKAVVVTLAFMSVDICVTTAIYVFSHLDRSLLEDIRHFNIFDSVLDLWAACLYRSCLLLGATIGVAKNSALGPRRLRASWLVITLVCLFVGIYAMVKLLLFSEVRRPIRDPWFWALFVWTYISLGASFLLWWLLSTVRPGTQALEPGAATEAEGFPGSGRPPPEQASGATLQKLLSYTKPDVAFLVAASFFLIVAALGETFLPYYTGRAIDGIVIQKSMDQFSTAVVIVCLLAIGSSFAAGIRGGIFTLIFARLNIRLRNCLFRSLVSQETSFFDENRTGDLISRLTSDTTMVSDLVSQNINVFLRNTVKVTGVVVFMFSLSWQLSLVTFMGFPIIMMVSNIYGKYYKRLSKEVQNALARASNTAEETISAMKTVRSFANEEEEAEVYLRKLQQVYKLNRKEAAAYMYYVWGSGLTLLVVQVSILYYGGHLVISGQMTSGNLIAFIIYEFVLGDCMENVSFSLSPGKVTALVGPSGSGKSSCVNILENFYPLEGGRVLLDGKPISAYDHKYLHRVISLVSQEPVLFARSITDNISYGLPTVPFEMVVEAAQKANAHGFIMELQDGYSTETGEKGAQLSGGQKQRVAMARALVRNPPVLILDEATSALDAESEYLIQQAIHGNLQKHTVLIIAHRLSTVEHAHLIVVLDKGRVVQQGTHQQLLAQGGLYAKLVQRQMLGLQPAADFTAGHNEPVANGSHKA

SEQ ID NO: 19731 - protein, 396 aa, Homo sapiens
AAPGSQDAFYPTRAKQARVSQELKKAAKRTVSISEGPDTLGDGMRERRETLALAPEPEPLEKEACEKWKRPFSFKKRRGHSIGGAPEQRYQIIPVCVAARLPTRAQDVLDAHLSEVNAVRFGPNSSLLATGGADRLIHLWNVVGSRLEANQTLEGAGGSITSVDFDPSGYQVLAATYNQAAQLWKVGEAQSKETLSGHKDKVTAAKFKLTRHQAVTGSRDRTVKEWDLGRAYCSRTINVLSYCNDVVCGDHIIISGHNDQKIRFWDSRGPHCTQVIPVQGRVTSLSLSHDQLHLLSCSRDNTLKVIDLRVSNIRQVFRADGFKCGSDWTKAVFSPDRSYALAGSCDGALYIWDVDTGKLESRLQGPHCAAVNAVAWCYSGSHMVSVDQGRKVVLWQ

SEQ ID NO: 19732 - protein, 581 aa, Homo sapiens
MDTKDMNEFETEGFFALHQRRGAIKQAKVHHVKCHEFTATFFPQPTFCSVCHEFVWGLNKQGYQCRQCNAAIHKKCIDKVIAKCTGSAINSRETMFHKERFKIDMPHRFKVYNYKSPTFCEHCGTLLWGLARQGLKCDACGMNVHHRCQTKVANLCGINQKLMAEALAMIESTQQARCLRDTEQIFREGPVEIGLPCSIKNEARPPCLPTPGKREPQGISWESPLDEVDKMCHLPEPELNKERPSLQIKLKIEDFILHKMLGKGSFGKVFLAEFKKTNQFFAIKALKKDVVLMDDDVECTMVEKRVLSLAWEHPFLTHMFCTFQTKENLFFVMEYLNGGDLMYHIQSCHKFDLSRATFYAAEIILGLQFLHSKGIVYRDLKLDNILLDKDGHIKIADFGMCKENMLGDAKTNTFCGTPDYIAPEILLGQKYNHSVDWWSFGVLLYEMLIGQSPFHGQDEEELFHSIRMDNPFYPRWLEKEAKDLLVKLFVREPEKRLGVRGDIRQHPLFREINWEELERKEIDPPFRPKVKSPFDCSNFDKEFLNEKPRLSFADRALINSMDQNMFRNFSFMNPGMERLIS

SEQ ID NO: 19733 - protein, 674 aa, Homo sapiens
QKLKQNQPKRAHVEDGGSRSKQGNEQSKKTPIEKSDFAAATHPRAFYLSKPDETPNAWMSDSGTGLTYWKLEEKDMHHSLPETLEKTFISLSSTDVSPNQVLTLDPTLHMKPKQQISGIQPHGLPNALDDRISFSPDSVLEPSMSSPSDIDSFSQASNVTSQLPGFPKYPSHTKASPVDSWKNQTFQNESRTSSTFPSVYTITSNDISVNTVDEENTVMVASASVSQSQLPGTANSVPECISLTSLEDPVILSKIRQNLKEKHARHIADLRAYYESEINSLKQKLEAKEISGVEDWKITNQILVDRCGQLDSALHEATSRVRTLENKNNLLEIEVNDLRERFSAASSASKILQERIEEMRTSSKEKDNTIIRLKSRLQDLEEAFENAYKLSDDKEAQLKQENKMFQDLLGEYESLGKEHRRVKDALNTTENKLLDAYTQISDLKRMISKLEAQVKQVEHENMLSLRHNSRIHVRPSRANTLATSDVSRRKWLIPGAEYSIFTGQPLDTQDSNVDNQLEETCSLGHRSPLEKDSSPGSSSTSLLIKKQRETSDTPIMRALKELDEGKIFKNWGTQTEKEDTSNINPRQTETSVNASRSPEKCAQQRQKRLNSASQRSSSLPPSNRKSSTPTKREIMLTPVTVAYSPKRSPKENLSPGFSHLLSKNESSPIRKNLF

SEQ ID NO: 19734 - protein, 237 aa, Homo sapiens
EKRSAELPDAVGPIVQLQEKLYVPVKEYPDEEQNRGKPNWEHLNEDLHVLITVEDAQNRAEIKLKRAVEEVKKLLVPAAEGEDSLKKMQLMELAILNGTYRDANIKSPALAFSLAATAQAAPRIITGPAPVLPPAALRTPTPAGPTIMPLIRQIQTAVMPNGTPHPTAAIVPPGPEAGLIYTPYEYPYTLAPATSILEYPIEPSGVLGAVATKVRRHDMRVHPYQRIVTADRAATGN

SEQ ID NO: 19735 - protein, 256 aa, Homo sapiens
MRNQDPGKMGRQRKSIKLYPTHPLVTFPRSWAKFQEKALLVEDTFTIDEVSEVLNGLQAVVHSEVESELINTAYTNVLLLRQLFAQAEKWYLKLQTDISELENRELLEQVAEFEKAEITSSNKKPILDVTKPKLAPLNEGGTAELLNKEILRLQEENEKLKSRLKTIEIQATNALDEKSKLEKALQDLQLDQGNQKDFIKAQDLSNLENTVAALKSEFQKTLNDKTENQKSLEENLATAKHDLLRVQEQLHMAEKI

SEQ ID NO: 19736 - protein, 1364 aa, Homo sapiens
MERPEDSLSLWSLNLSPQFPCLNALRHPLSPGSRVGPEDAMPRIVEQPPDLLVSRGEPATLPCRAEGRPRPNIEWYKNGARVATVREDPRAHRLLLPSGALFFPRIVHGRRARPDEGVYTCVARNYLGAAASRNASLEVAVLRDDFRQSPGNVVVAVGEPAVLECVPPRGHPEPSVSWRKDGARLKEEEGRITIRGGKLMMSHTLKSDAGMYVCVASNMAGERESAAAEVMVLERPSFLRRPVNQVVLADAPVTFLCEVKGDPPPRLRWRKEDGELPTGRYEIRSDHSLWIGHVSAEDEGTYTCVAENSVGRAEASGSLSVHVPPQLVTQPQDQMAAPGESVAFQCETKGNPPPAIFWQKEGSQVLLFPSQSLQPTGRFSVSPRGQLNITAVQRGDAGYYVCQAVSVAGSILAKALLEIKGASLDGLPPVILQGPANQTLVLGSSVWLPCRVTGNPQPSVRWKKDGQWLQGDDLQFKTMANGTLYIANVQEMDMGFYSCVAKSSTGEATWSGWLKMREDWGVSPDPPTEPSSPPGAPSQPVVTEITKNSITLTWKPNPQTGAAVTSYVIEAFSPAAGNTWRTVADGVQLETHTVSGLQPNTIYLFLVRAVGAWGLSEPSPVSEPVRTQDSSPSRPVEDPWRGQQGLAEVAVRLQEPIVLGPRTLQVSWTVDGPVQLVQGFRVSWRVAGPEGGSWTMLDLQSPSQQSTVLRGLPPGTQIQIKVQAQGQEGLGAESLSVTRSIPEEAPSGPPQGVAVALGGDGNSSITVSWEPPLPSQQNGVITEYQIWCLGNESRFHLNRSAAGWARSAMLRGLVPGLLYRTLVAAATSAGVGVPSAPVLVQLPSPPDLEPGLEVGAGLAVRLARVLREPAFLAGSGAACGALLLGLCAALYWRRKQRKELSHYTASFAYTPAVSFPHSEGLSGASSRPPMGLGPAPYSWLADSWPHPSRSPSAQEPRGSCCPSNPDPDDRYYNEAGISLYLAQTARGTAAPGEGPVYSTIDPAGEELQTFHGGFPQHPSGDLGPWSQYAPPEWSQGDSGAKGGKVKLLGKPVQMPSLNWPEALPPPPPSCELSCLEGPEEELEGSSEPEEWCPPMPERSHLTEPSSSGGCLVTPSRRETPSPTPSYGQQSTATLTPSPPDPPQPPTDMPHLHQMPRRVPLGPSSPLSVSQPMLGIREARPAGLGAGPAASPHLSPSPAPSTASSAPGRTWQGNGEMTPPLQGPRARFRKKPKALPYRRENSPGDLPPPPLPPPEEEASWALELRAAGSMSSLERERSGERKAVQAVPLAAQRVLHPDEEAWLPYSRPSFLSRGQGTSTCSTAGSNSSRGSSSSRGSRGPGRSRSRSQSRSQSQRPGQKRREEPR

SEQ ID NO: 19737 - protein, 1072 aa, Homo sapiens
MLRMRTAGWARGWCLGCCLLLPLSLSLAAAKQLLRYRLAEEGPADVRIGNVASDLGIVTGSGEVTFSLESGSEYLKIDNLTGELSTSERRIDREKLPQCQMIFDENECFLDFEVSVIGPSQSWVDLFEGQVIVLDINDNTPTFPSPVLTLTVEENRPVGTLYLLPTATDRDFGRNGIERYELLQEPGGGGSGGESRRAGAADSAPYPGGGGNGASGGGSGGSKRRLDASEGGGGTNPGGRSSVFELQVADTPDGEKQPQLIVKGALDREQRDSYELTLRVRDGGDPPRSSQAILRVLITDVNDNSPRFEKSVYEADLAENSAPGTPILQLRAADLDVGVNGQIEYVFGAATESVRRLLRLDETSGWLSVLHRIDREEVNQLRFTVMARDRGQPPKTDKATVVLNIKDENDNVPSIEIRKIGRIPLKDGVANVAEDVLVDTPIALVQVSDRDQGENGVVTCTVVGDVPFQLKPASDTEGDQNKKKYFLHTSTPLDYEATREFNVVIVAVDSGSPSLSSNNSLIVKVGDTNDNPPMFGQSVVEVYFPENNIPGERVATVLATDADSGKNAEIAYSLDSSVMGIFAIDPDSGDILVNTVLDREQTDRYEFKVNAKDKGIPVLQGSTTVIVQVADKNDNDPKFMQDVFTFYVKENLQPNSPVGMVTVMDADKGRNAEMSLYIEENNNIFSIENDTGTIYSTMSFDREHQTTYTFRVKAVDGGDPPRSATATVSLFVMDENDNAPTVTLPKNISYTLLPPSSNVRTVVATVLATDSDDGINADLNYSIVGGNPFKLFEIDPTSGVVSLVGKLTQKHYGLHRLVVQVNDSGQPSQSTTTLVHVFVNESVSNATAIDSQIARSLHIPLTQDIAGDPSYEISKQRLSIVIGVVAGIMTVILIILIVVMARYCRSKNKNGYEAGKKDHEDFFTPQQHDKSKKPKKDKKNKKSKQPLYSSIVTVEASKPNGQRYDSVNEKLSDSPSMGRYRSVNGGPGSPDLARHYKSSSPLPTVQLHPQSPTAGKKHQAVQDLPPANTFVGAGDNISIGSDHCSEYSCQTNNKYSKQVRCIPNIFKYPREG

SEQ ID NO: 19738 - protein, 122 aa, Homo sapiens
MGLSTVPDLLLPLEPTCTMTVQARGRIRTAGSVRAAPSPLQKTTSDTASAAPNAERKWVRWRSLLAQWTGTPCVAAGRTSTGIIGVKTFSSASIAASASMGPCTSPARRNRTPCAPAMQVSF

SEQ ID NO: 19739 - protein, 1300 aa, Homo sapiens
MSRRKQAKPQHLKSDEELLPPDGAPEHAAPGEGAEDADSGPESRSGGEETSVCEKCCAEFFKWADFLEHQRSCTKLPPVLIVHEDAPAPPPEDFPEPSPASSPSERAESEAAEEAGAEGAEGEARPVEKEAEPMDAEPAGDTRAPRPPPAAPAPPTPAYGAPSTNVTLEALLSTKVAVAQFSQGARAAGGSGAGGGVAAAAVPLILEQLMALQQQQIHQLQLIEQIRSQVALMQRPPPRPSLSPAAAPSAPGPAPSQLPGLAALPLSAGAPAAAIAGSGPAAPAAFEGAQPLSRPESGASTPGGPAEPSAPAAPSAAPAPAAPAPAPAPQSAASSQPQSASTPPALAPGSLLGAAPGLPSPLLPQTSASGVIFPNPLVSIAATANALDPLSALMKHRKGKPPNVSVFEPKASAEDPFFKHKCRFCAKVFGSDSALQIHLRSHTGERPFKCNICGNRFSTKGNLKVHFQRHKEKYPHIQMNPYPVPEYLDNVPTCSGIPYGMSLPPEKPVTTWLDSKPVLPTVPTSVGLQLPPTVPGAHGYADSPSATPASRSPQRPSPASSECASLSPGLNHVESGVSATAESPQSLLGGPPLTKAEPVSLPCTNARAGDAPVGAQASAAPTSVDGAPTSLGSPGLPAVSEQFKAQFPFGGLLDSMQTSETSKLQQLVENIDKKMTDPNQCVICHRVLSCQSALKMHYRTHTGERPFKCKICGRAFTTKGNLKTHFGVHRAKPPLRVQHSCPICQKKFTNAVVLQQHIRMHMGGQIPNTPLPEGFQDAMDSELAYDDKNAETLSSYDDDMDENSMEDDAELKDAATDPAKPLLSYAGSCPPSPPSVISSIAALENQMKMIDSVMSCQQLTGLKSVENGSGESDRLSNDSSSAVGDLESRSAGSPALSESSSSQALSPAPSNGESFRSKSPGLGAPEEPQEIPLKTERPDSPAAAPGSGGAPGRAGIKEEAPFSLLFLSRERGKCPSTVCGVCGKPFACKSALEIHYRSHTKERPFVCALCRRGCSTMGNLKQHLLTHRLKELPSQLFDPNFALGPSQSTPSLISSAAPTMIKMEVNGHGKAMALGEGPPLPAGVQVPAGPQTVMGPGLAPMLAPPPRRTPKQHNCQSCGKTFSSASALQIHERTHTGEKPFGCTICGRAFTTKGNLKVHMGTHMWNNAPARRGRRLSVENPMALLGGDALKFSEMFQKDLAARAMNVDPSFWNQYAAAITNGLAMKNNEISVIQNGGIPQLPVSLGGSALPPLGSMASGMDKARTGSSPPIVSLDKASSETAASRPFTRFIEDNKEIGIN

SEQ ID NO: 19740 - protein, 506 aa, Homo sapiens
MSPADFQRAVDERFPGCMQGRTMYVLPFSMGPVGSPLSRIGVQLTDSAYVVASMRIMTRLGTPVLQALGDGDFVKCLHSVGQPLTGQGEPVSQWPCNPEKTLIGHVPDQREIISFGSGYGGNSLLGKKCFALRIASRLARDEGWLAEHMLILGITSPAGKKRYVAAAFPSACGKTNLAMMRPALPGWKVECVGDDIAWMRFDSEGRLRAINPENGFFGVAPGTSATTNPNAMATIQSNTIFTNVAETSDGGVYWEGIDQPLPPGVTVTSWLGKPWKPGDKEPCAHPNSRFCAPARQCPIMDPAWEAPEGVPIDAIIFGGRRPKGVPLVYEAFNWRHGVFVGSAMRSESTAAAEHKGKIIMHDPFAMRPFFGYNFGHYLEHWLSMEGRKGAQLPRIFHVNWFRRDEAGHFLWPGFGENARVLDWICRRLEGEDSARETPIGLVPKEGALDLSGLRAIDTTQLFSLPKDFWEQEVRDIRSYLTEQVNQDLPKEVLAELEALERRVHKM

SEQ ID NO: 19741 - protein, 174 aa, Homo sapiens
MALPTLPSYWCSQQRLNQQLARQREQEARLRQQWEQNSRYFRMSDICSSKQAEWSSKTSYQRSMHAYQREKMKEEKRRSLEARREKLRQLMQEEQDLLARELEELRLSMNLQERRIREQHGKLKSAKEEQRKLIAEQLLYEHWKKNNPKLREMELDLHQKHVVNSWEMQKEEKK

SEQ ID NO: 19742 - protein, 647 aa, Homo sapiens
MAQGSVSFNDVTVDFTQEEWQHLDHAQKTLYMDVMLENYCHLISVGCHMTKPDVILKLERGEEPWTSFAGHTCLEENWKAEDFLVKFKEHQEKYSRSVVSINHKKLVKEKSKIYEKTFTLGKNPVNSKNLPPEYDTHGRILKNVSELIISNLNPARKRLSEYNGYGKSLLSTKQETTHPEVKSHNQSARAFSHNEVLMQYQKTETPAQSFGYNDCEKSFLQRGGLITHSRPYKGENPSVYNKKRRATNIEKKHTCNECGKSFCRKSVLILHQGIHSEEKPYQCHQCGNAFRRKSYLIDHQRTHTGEKPFVCNECGKSFRLKTALTDHQRTHTGEKSYECLQCRNAFRLKSHLIRHQRTHTGEKPYECNDCGKSFRQKTTLSLHQRIHTGEKPYICKECGKSFHQKANLTVHQRTHTGEKPYICNECGKSFSQKTTLALHEKTHNEEKPYICSECGKSFRQKTTLVAHQRTHTGEKSYECPHCGKAFRMKSYLIDHHRTHTGEKPYECNECGKSFSQKTNLNLHQRIHTGEKPYVCNECGKSFRQKATLTVHQKIHTGQKSYECPQCGKAFSRKSYLIHHQRTHTGEKPYKCSECGKCFRQKTNLIVHQRTHTGEKPYVCNECGKSFSYKRNLIVHQRTHKGENIEMQ

SEQ ID NO: 19743 - protein, 455 aa, Homo sapiens
MCNTNMSVPTDGAVTTSQIPASEQETLVRPKPLLLKLLKSVGAQKDTYTMKEENIYHDLQELGSSQSAGKMHMYIYMESSDSGTSVSENRCHLEGGSDQKDLVQELQEEKPSSSHLVSRPSTSSRRRAISETEENSDELSGERQRKRHKSDSISLSFDESLALCVIREICCERSSSSESTGTPSNPDLDAGVSEHSGDWLDQDSVSDQFSVEFEVESLDSEDYSLSEEGQELSDEDDEVYQVTVYQAGESDTDSFEEDPEISLADYWKCTSCNEMNPPLPSHCNRCWALRENWLPEDKGKDKGEISEKAKLENSTQAEEGFDVPDCKKTIVNDSRESCVEENDDKITQASQSQESEDYSQPSTSSSIIYSSQEDVKEFEREETQDKEESVESSLPLNAIEPCVICQGRPKNGCIVHGKTGHLMACFTCAKKLKKRNKPCPVCRQPIQMIVLTYFP

SEQ ID NO: 19744 - protein, 1214 aa, Homo sapiens
MSPALQDLSQPEGLKKTLRDEINAILQKRIMVLDGGMGTMIQREKLNEEHFRGQEFKDHARPLKGNNDILSITQPDVIYQIHKEYLLAGADIIETNTFSSTSIAQADYGLEHLAYRMNMCSAGVARKAAEEVTLQTGIKRFVAGALGPTNKTLSVSPSVERPDYRNITFDELVEAYQEQAKGLLDGGVDILLIETIFDTANAKAALFALQNLFEEKYAPRPIFISGTIVDKSGRTLSGQTGEGFVISVSHGEPLCIGLNCALGAAEMRPFIEIIGKCTTAYVLCYPNAGLPNTFGDYDETPSMMAKHLKDFAMDGLVNIVGGCCGSTPDHIREIAEAVKNCKPRVPPATAFEGHMLLSGLEPFRIGPYTNFVNIGERCNVAGSRKFAKLIMAGNYEEALCVAKVQVEMGAQVLDVNMDDGMLDGPSAMTRFCNLIASEPDIAKVPLCIDSSNFAVIEAGLKCCQGKCIVNSISLKEGEDDFLEKARKIKKYGAAMVVMAFDEEGQATETDTKIRVCTRAYHLLVKKLGFNPNDIIFDPNILTIGTGMEEHNLYAINFIHATKVIKETLPGARISGGLSNLSFSFRGMEAIREAMHGVFLYHAIKSGMDMGIVNAGNLPVYDDIHKELLQLCEDLIWNKDPEATEKLLRYAQTQGTGGKKVIQTDEWRNGPVEERLEYALVKVIKSARVMKKAVGHLIPFMEKEREETRVLNGTVEEEDPYQGTIVLATVKGDVHDIGKNIVGVVLGCNNFRVIDLGVMTPCDKILKAALDHKADIIGLSGLITPSLDEMIFVAKEMERLAIRIPLLIGGATTSKTHTAVKIAPRYSAPVIHVLDASKSVVVCSQLLDENLKDEYFEEIMEEYEDIRQDHYESLKERRYLPLSQARKSGFQMDWLSEPHPVKPTFIGTQVFEDYDLQKLVDYIDWKPFFDVWQLRGKYPNRGFPKIFNDKTVGGEARKVYDDAHNMLNTLISQKKLRARGVVGFWPAQSIQDDIHLYAEAAVPQAAEPIATFYGLRQQAEKDSASTEPYYCLSDFIAPLHSGIRDYLGLFAVACFGVEELSKAYEDDGDDYSSIMVKALGDRLAEAFAEELHERVRRELWAYCGSEQLDVADLRRLRYKGIRPAPGYPSQPDHTEKLTMWRLADIEQSTGIRLTESLAMAPASAVSGLYFSNLKSKYFAVGKISKDQVEDYALRKNISVAEVEKWLGPILGYDTD

SEQ ID NO: 19745 - protein, 530 aa, Homo sapiens
MASLSLAPVNIFKAGADEERAETARLTSFIGAIAIGDLVKSTLGPKGMDKILLSSGRDASLMVTNDGATILKNIGVDNPAAKVLVDMSRVQDDEVGDGTTSVTVLAAELLREAESLIAKKIHPQTIIAGWREATKAAREALLSSAVDHGSDEVKFRQDLMNIAGTTLSSKLLTHHKDHFTKLAVEAVLRLKGSGNLEAIHIIKKLGGSLADSYLDEGFLLDKKIGVNQPKRIENAKILIANTGMDTDKIKIFGSRVRVDSTAKVAEIEHAEKEKMKEKVERILKHGINCFINRQLIYNYPEQLFGAAGVMAIEHADFAGVERLALVTGGEIASTFDHPELVKLGSCKLIEEVMIGEDKLIHFSGVALGEACTIVLRGATQQILDEAERSLHDALCVLAQTVKDSRTVYGGGCSEMLMAHAVTQLANRTPGKEAVAMESYAKALRMLPTIIADNAGYDSADLVAQLRAAHSEGNTTAGLGNVSLITTPVKHSHVLSIFGPVSSKVVFERYSIKEDCGICLSVPIISLSLDI

SEQ ID NO: 19746 - protein, 3037 aa, Homo sapiens
MHLHQVLTGAVNPGDNCYSVGSVGDVPFTAYGSGCDIVILANDFECVQIIPGAKHGNIQVSCVECSNQQGRIAASYGNAVCIFEPLGINSHKRNCQLKCQWLKTGQFFLSSVTYNLAWDPQDNRLLTATDSIQLWAPPGDDILEEEEEIDNTVPPVLNDWKCVWQCKTSVSVHLMEWSPDGEYFATAGKDDCLLKVWYPMTGWKSSIIPQDHHEVKRRQSSTQFSFVYLAHPRAVTGFSWRKTSKYMPRGSVCNVLLTSCHDGVCRLWAETLLPEDCLLGEQICETTTSSIASSLSHAGRHKDRIQHALETIHHLKNLRKGQRRSSVLVTHAELMPDQTAMHEVQRHISHHANALCHFHIAASINPATDIPNVLVGTAFNVDDGNGGFVVHWLNNKEFHFTSSTEVFMHQLRKLSDKQVDHENDDADREDEEHSQEDRERGLHMKLDHDLSLDRESEAGTGSSEHEDGEREGSPRTYSRLSVPMPLPTVLLDRKIETLLTEWNKNPDMLFTIHPVDGTFLVWHVKYLDEYNPGIFRQVQVSFSSRIPVAFPSGDASSLSKNIMMYACINATKDSHHTLLHQEGMSVGSPHGSQPHSRSHSTHMNILAPTVMMISKHIDGSLNQWAVTFADKSAFTTVLTVSHKFRYCGHRFHLNDLACHSVLPLLLTSSHHNALLTPELDCQWDSDNKLSRLMDPVKHIKGSSKQPLRNAATRTFHDPNAIYSELILWRVDPIGPLSYTGGVSELARINSLHTSAFSNVAWLPTLIPSYCLGTYCNSASACFVASDGKNLRLYQAVVDARKLLDELSDPESSKLIGEVFNIVSQQSTARPGCIIELDAITNQCGSNTQLLHVFQEDFIIGYKPHKEDMEKKETEIFFQPSQGYRPPPFSEKFFLVVIEKDSNNNSILHMWHLHLKSVQACLAKASEGASSESLLSVPGQKNVDSSPETSPSVSPMPHSSSIANLQTASKLILSSRLVYSQPLDLPESVEVIRATPSAGHLSSSSIYPVCLAPYLVVTTCSDNKVRFWKCCMEANPECNKSDEKEIYHWKRWPLMNDEGEDNSSTVSIVGRPVAVSCSYTGRLAVAYKQPIHHNGFVSKEFSMHVCIFECESTGGSEWVLEQTIHLDDLVKVGSVLDSRVSVDSNLFVYSKSDALLSKDRYLIPNIKHLVHLDWVSKEDGSHILTVGVGANIFMYGRLSGIVTEQTNSKDGVAVITLPLGGSIKQGVKSRWVLLRSIDLVSSVDGTPSLPVSLSWVRDGILVVGMDCEMHVYAQWKHAVKFGDTEADSSNAEEAAMQDHSTFKSNMLARKSVVEGTAISDDVFCSPTVIQDGGLFEAAHVLSPTLPQYHPTQLLELMDLGKVRRAKAILSHLVKCIAGEVAIVRDPDAGEGTKRHLSRTISVSGSTAKETVTVGKDGTRDYTEIDSIPPLPLYALLAADQDTSYRISEESTKIPQSYEDQTVSQPEDQYSELFQIQDIPTDDIDLEPEKRENKSKVINLSQYGPAYFGQEHARVLSSHLMHSSLPGLTRLEQMFLVALADTVATTSTELDESRDKSCSGRDTLDECGLRYLLAMRLHTCLLTSLPPLYRVQLLHQGVSTCHFAWAFHSEAEEELINMIPAIQRGDPQWSELRAMGIGWWVRNINTLRRCIEKVAKASFQRNNDALDAALFYLSMKKKAVVWGLFRSQHDEKMTTFFSHNFNEDRWRKAALKNAFSLLGKQRFEQSAAFFLLAGSLKDAIEVCLEKMEDIQLAMVIARLYESEFETSSTYISILNQKILGCQKDGSGFSCKRLHPDPFLRSLAYWVMKDYTRALDTLLEQTPKEDDEHQVIIKSCNPVAFSFYNYLRTHPLLIRRNLASPEGTLATLGLKTEKNFVDKINLIERKLFFTTANAHFKVGCPVLALEVLSKIPKVTKTSALSAKKDQPDFISHRMDDVPSHSKALSDGNGSSGIEWSNVTSSQYDWSQPIVKVDEEPLNLDWGEDHDSALDEEEDDAVGLVMKSTDAREKDKQSDQKASDPNMLLTPQEEDDPEGDTEVDVIAEQLKFRACLKILMTELRTLATGYEVDGGKLRFQLYNWLEKEIAALHEICNHESVIKEYSSKTYSKVESDLLDQEEMVDKPDIGSYERHQIERRRLQAKREHAERRKSWLQKNQDLLRVFLSYCSLHGAQGGGLASVRMELKFLLQESQQETTVKQLQSPLPLPTTLPLLSASIASTKTVIANPVLYLNNHIHDILYTIVQMKTPPHPSIEDVKVHTLHSLAASLSASIYQALCDSHSYSSQTEGNQFTGMAYQGLLLSDRRRLRTESIEEHATPNSSPAQWPGVSSLINLLSSAQDEDQPKLNILLCEAVVAVYLSLLIHALATNSSSELFRLAAHPLNNRMWAAVFGGGVKLVVKPRRQSENISAPPVLSEDIDKHRRRFNMRMLVPGRPVKDATPPPVPAERPSYKEKFIPPELSMWDYFVAKPFLPLSDSGVIYDSDESIHSDEEDDAFFSDTQIQEHQDPNSYSWALLHLTMVKLALHNVKNFFPIAGLEFSELPVTSPLGIAVIKNLENWEQILQEKMDQFEGPPPNYINTYPTDLSVGAGPAILRNKAMLEPENTPFKSRDSSAFPVKRLWHFLVKQEVLQETFIRYIFTKKRKQSEVEADLGYPGGKAKVIHKESDMIMAFSVNKANCNEIVLASTHDVQELDVTSLLACQSYIWIGEEYDRESKSSDDVDYRGSTTTLYQPSATSYSASQVHPPSSLPWLGTGQTSTGASVLMKRNLHNVKRMTSHPVHQYYLTGAQDGSVRMFEWTRPQQLVCFRQAGNARVTRLYFNSQGNKCGVADGEGFLSIWQVNQTASNPKPYMSWQCHSKATSDFAFITSSSLVATSGHSNDNRNVCLWDTLISPGNSLIHGFTCHDHGATVLQYAPKQQLLISGGRKGHVCIFDIRQRQLIHTFQAHDSAIKALALDPYEEYFTTGSAEGNIKVWRLTGHGLIHSFKSEHAKQSIFRNIGAGVMQIDIIQGNRLFSCGADGTLKTRVLPNAFNIPNRILDIL

SEQ ID NO: 19747 - protein, 387 aa, Homo sapiens
MQFLKSAKQKPNYYHIMLVEDQEEGTLHQFNYCERCSESQNNKCISCVDPEDKWYRWPLPSKLCAVWIYLDVLFSTASIMHLCAISLDRYVAIQNPIHHSRFNSRTKAFLKIIAVWTISVGISMPIPVFGLQDDSKVFKEGSCLLADDNFVLIGSFVSFFIPLTIMVITYFLTIKSLQKEATLCVSDLGTRAKLASFSFLPQSSLSSEKLFQRSIHREPGSYTGRRTMQSISNEQKACKVLGIVFFLFVVMWCPFFITNIMAVICKESCNEDVIGALLNVFVWIGYLSSAVNPLVYTLFNKTYRSAFSRYIQCQYKENKKPLQLILVNTIPALAYKSSQLQMGQKKNSKQDAKTTDNDCSMVALGKQHSEEASKDNSDGVNEKVSCV

SEQ ID NO: 19748 - protein, 303 aa, Homo sapiens
MKFLLTTAFLILISLWVEEAYSKEKSSKKGKGKKKQYLCPSQQSAEDLARVPANSTSNILNRLLVSYDPRIRPNFKGIPVDVVVNIFINSFGSIQETTMDYRVNIFLRQKWNDPRLKLPSDFRGSDALTVDPTMYKCLWKPDLFFANEKSANFHDVTQENILLFIFRDGDVLVSMRLSITLSCPLDLTLFPMDTQRCKMQLESFGYTTDDLRFIWQSGDPVQLEKIALPQFDIKKEDIEYGNCTKYYKGTGYYTCVEVIFTLRRQVGFYMMGVYAPTLLIVVLSWLSFWINPDASAARVPLGW

SEQ ID NO: 19749 - protein, 209 aa, Homo sapiens
MQRRLVQQWSVAVFLLSYAVPSCGRSVEGLSRRLKRAVSEHQLLHDKGKSIQDLRRRFFLHHLIAEIHTAEIRATSEVSPNSKPSPNTKNHPVRFGSDDEGRYLTQETNKVETYKEQPLKTPGKKKKGKPGKRKEQEKKKRRTRSAWLDSGVTGSGLEGDHLSDTSTTSLELDSRTALLWGLKKKKENNRRTHHMQLMISLFKSPLLLL

SEQ ID NO: 19750 - protein, 463 aa, Homo sapiens
MYVSTRERYKWLRFSEDCLYLNVYAPARAPGDPQLPVMVWFPGGAFIVGAASSYEGSDLAAREKVVLVFLQHRLGIFGFLSTDDSHARGNWGLLDQMAALRWVQENIAAFGGDPGNVTLFGQSAGAMSISGLMMSPLASGLFHRAISQSGTALFRLFITSNPLKVAKKVAHLAGCNHNSTQILVNCLRALSGTKVMRVSNKMRFLQLNFQRDPEEIIWSMSPVVDGVVIPDDPLVLLTQGKVSSVPYLLGVNNLEFNWLLPYIMKFPLNRQAMRKETITKMLWSTRTLLNITKEQVPLVVEEYLDNVNEHDWKMLRNRMMDIVQDATFVYATLQTAHYHRDAGLPVYLYEFEHHARGIIVKPRTDGADHGDEMYFLFGGPFATGLSMGKEKALSLQMMKYWANFARTGNPNDGNLPCWPRYNKDEKYLQLDFTTRVGMKLKEKKMAFWMSLYQSQRPEKQRQF

SEQ ID NO: 19751 - protein, 347 aa, Homo sapiens
MKRSLNENSARSTAGCLPVPLFNQKKRNRQPLTSNPLKDDSDWAWEAVNPELAPVMKTVDTGQIPHSVSRPLRSQDSVFNSIQSNTGRSQGGWSYRDGNKNTSLKTWNKNDFKPQCKRTNLVANDGKNSCPVSSGAQQQKQLRIPEPPNLSRNKETELLRQTHSSKISGCTMRGLDKNSALQTLKPNFQQNQYKKQMLDDIPEDNTLKETSLYQLQFKEKASSLRIISAVIESMKYWREHAQKTVLLFEVLAVLDSAVTPGPYYSKTFLMRDGKNTLPCVFYEIDRELPRLIRGRVHRCVGNYDQKKNIFQCVSVRPASVSEQKTFQAFVKIADVEMQYYINVMNET

SEQ ID NO: 19752 - protein, 5335 aa, Homo sapiens
MLVIWILTLALRLCASVTTVTPGSTVNTSIGGNTTSASTPSSSDPFTTFSDYGVSVTFITGSTATKHFLDSSTNSGHSEESTVSHSGPGATGTTLFPSHSATSVFVGEPKTSPITSASMETTALPGSTTTAGLSEKSTTFYSSPRSPDRTLSPARTTSSGVSEKSTTSHSRPGPTHTIAFPDSTTMPGVSQESTASHSIPGSTDTTLSPGTTTPSSLGPESTTFHSSPGYTKTTRLPDNTTTSGLLEASTPVHSSTGSPHTTLSPSSSTTHEGEPTTFQSWPSSKDTSPAPSGTTSAFVKLSTTYHSSPSSTPTTHFSASSTTLGHSEESTPVHSSPVATATTPPPARSATSGHVEESTAYHRSPGSTQTMHFPESSTTSGHSEESATFHGSTTHTKSSTPSTTAALAHTSYHSSLGSTETTHFRDSSTISGRSEESKASHSSPDAMATTVLPAGSTPSVLVGDSTPSPISSGSMETTALPGSTTKPGLSEKSTTFYSSPRSPDTTHLPASMTSSGVSEESTTSHSRPGSTHTTAFPGSTTMPGLSQESTASHSSPGPTDTTLSPGSTTASSLGPEYTTFHSRPGSTETTLLPDNTTASGLLEASMPVHSSTRSPHTTLSPAGSTTRQGESTTFHSWPSSKDTRPAPPTTTSAFVEPSTTSHGSPSSIPTTHISARSTTSGLVEESTTYHSSPGSTQTMHFPESDTTSGRGEESTTSHSSTTHTISSAPSTTSALVEEPTSYHSSPGSTATTHFPDSSTTSGRSEESTASHSSQDATGTIVLPARSTTSVLLGESTTSPISSGSMETTALPGSTTTPGLSERSTTFHSSPRSPATTLSPASTTSSGVSEESTTSRSRPGSTHTTAFPDSTTTPGLSRHSTTSHSSPGSTDTTLLPASTTTSGPSQESTTSHSSSGSTDTALSPGSTTALSFGQESTTFHSNPGSTHTTLFPDSTTSSGIVEASTRVHSSTGSPRTTLSPASSTSPGLQGESTAFQTHPASTHTTPSPPSTATAPVEESTTYHRSPGSTPTTHFPASSTTSGHSEKSTIFHSSPDASGTTPSSAHSTTSGRGESTTSRISPGSTEITTLPGSTTTPGLSEASTTFYSSPRSPTTTLSPASMTSLGVGEESTTSRSQPGSTHSTVSPASTTTPGLSEESTTVYSSSRGSTETTVFPHSTTTSVHGEEPTTFHSRPASTHTTLFTEDSTTSGLTEESTAFPGSPASTQTGLPATLTTADLGEESTTFPSSSGSTGTKLSPARSTTSGLVGESTPSRLSPSSTETTTLPGSPTTPSLSEKSTTFYTSPRSPDATLSPATTTSSGVSEESSTSHSQPGSTHTTAFPDSTTTSDLSQEPTTSHSSQGSTEATLSPGSTTASSLGQQSTTFHSSPGDTETTLLPDDTITSGLVEASTPTHSSTGSLHTTLTPASSTSAGLQEESTTFQSWPSSSDTTPSPPGTTAAPVEVSTTYHSRPSSTPTTHFSASSTTLGRSEESTTVHSSPGATGTALFPTRSATSVLVGEPTTSPISSGSTETTALPGSTTTAGLSEKSTTFYSSPRSPDTTLSPASTTSSGVSEESTTSHSRPGSTHTTAFPGSTTMPGVSQESTASHSSPGSTDTTLSPGSTTASSLGPESTTFHSSPGSTETTLLPDNTTASGLLEASTPVHSSTGSPHTTLSPAGSTTRQGESTTFQSWPSSKDTMPAPPTTTSAFVELSTTSHGSPSSTPTTHFSASSTTLGRSEESTTVHSSPVATATTPSPARSTTSGLVEESTAYHSSPGSTQTMHFPESSTASGRSEESRTSHSSTTHTISSPPSTTSALVEEPTSYHSSPGSTATTHFPDSSTTSGRSEESTASHSSQDATGTIVLPARSTTSVLLGESTTSPISSGSMETTALPGSTTTPGLSEKSTTFHSSPRSPATTLSPASTTSSGVSEESTTSHSRPGSTHTTAFPDSTTTPGLSRHSTTSHSSPGSTDTTLLPASTTTSGPSQESTTSHSSPGSTDTALSPGSTTALSFGQESTTFHSSPGSTHTTLFPDSTTSSGIVEASTRVHSSTGSPRTTLSPASSTSPGLQGESTAFQTHPASTHTTPSPPSTATAPVEESTTYHRSPGSTPTTHFPASSTTSGHSEKSTIFHSSPDASGTTPSSAHSTTSGRGESTTSRISPGSTEITTLPGSTTTPGLSEASTTFYSSPRSPTTTLSPASMTSLGVGEESTTSRSQPGSTHSTVSPASTTTPGLSEESTTVYSSSPGSTETTVFPRTPTTSVRGEEPTTFHSRPASTHTTLFTEDSTTSGLTEESTAFPGSPASTQTGLPATLTTADLGEESTTFPSSSGSTGTTLSPARSTTSGLVGESTPSRLSPSSTETTTLPGSPTTPSLSEKSTTFYTSPRSPDATLSPATTTSSGVSEESSTSHSQPGSTHTTAFPDSTTTPGLSRHSTTSHSSPGSTDTTLLPASTTTSGPSQESTTSHSSPGSTDTALSPGSTTALSFGQESTTFHSSPGSTHTTLFPDSTTSSGIVEASTRVHSSTGSPRTTLSPASSTSPGLQGESTTFQTHPASTHTTPSPPSTATAPVEESTTYHRSPGSTPTTHFPASSTTSGHSEKSTIFHSSPDASGTTPSSAHSTTSGRGESTTSRISPGSTEITTLPGSTTTPGLSEASTTFYSSPRSPTTTLSPASMTSLGVGEESTTSRSQPGSTHSTVSPASTTTPGLSEESTTVYSSSPGSTETTVFPRSTTTSVRGEEPTTFHSRPASTHTTLFTEDSTTSGLTEESTAFPGSPASTQTGLPATLTTADLGEESTTFPSSSGSTGTTLSPARSTTSGLVGESTPSRLSPSSTETTTLPGSPTTPSLSEKSTTFYTSPRSPDATLSPATTTSSGVSEESSTSHSQPGSTHTTAFPDSTTTSGLSQEPTASHSSQGSTEATLSPGSTTASSLGQQSTTFHSSPGDTETTLLPDDTITSGLVEASTPTHSSTGSLHTTLTPASSTSAGLQEESTTFQSWPSSSDTTPSPPGTTAAPVEVSTTYHSRPSSTPTTHFSASSTTLGRSEESTTVHSSPGATGTALFPTRSATSVLVGEPTTSPISSGSTETTALPGSTTTAGLSEKSTTFYSSPRSPDTTLSPASTTSSGVSEESTTSHSRPGSTHTTAFPGSTTMPGVSQESTASHSSPGSTDTTLSPGSTTASSLGPESTTFHSGPGSTETTLLPDNTTASGLLEASTPVHSSTGSPHTTLSPAGSTTRQGESTTFQSWPNSKDTTPAPPTTTSAFVELSTTSHGSPSSTPTTHFSASSTTLGRSEESTTVHSSPVATATTPSPARSTTSGLVEESTTYHSSPGSTQTMHFPESDTTSGRGEESTTSHSSTTHTISSAPSTTSALVEEPTSYHSSPGSTATTHFPDSSTTSGRSEESTASHSSQDATGTIVLPARSTTSVLLGESTTSPISSGSMETTALPGSTTTPGLSEKSTTFHSSPRSPATTLSPASTTSSGVSEESTTSHSRPGSTHTTAFPDSTTTPGLSRHSTTSHSSPGSTDTTLLPASTTTSGSSQESTTSHSSSGSTDTALSPGSTTALSFGQESTTFHSSPGSTHTTLFPDSTTSSGIVEASTRVHSSTGSPRTTLSPASSTSPGLQGESTAFQTHPASTHTTPSPPSTATAPVEESTTYHRSPGSTPTTHFPASSTTSGHSEKSTIFHSSPDASGTTPSSAHSTTSGRGESTTSRISPGSTEITTLPGSTTTPGLSEASTTFYSSPRSPTTTLSPASMTSLGVGEESTTSRSQPGSTHSTVSPASTTTPGLSEESTTVYSSSPGSTETTVFPRSTTTSVRREEPTTFHSRPASTHTTLFTEDSTTSGLTEESTAFPGSPASTQTGLPATLTTADLGEESTTFPSSSGSTGTKLSPARSTTSGLVGESTPSRLSPSSTETTTLPGSPTTPSLSEKSTTFYTSPRSPDATLSPATTTSSGVSEESSTSHSQPGSTHTTAFPDSTTTSGLSQEPTTSHSSQGSTEATLSPGSTTASSLGQQSTTFHSSPGDTETTLLPDDTITSGLVEASTPTHSSTGSLHTTLTPASSTSTGLQEESTTFQSWPSSSDTTPSPPSTTAVPVEVSTTYHSRPSSTPTTHFSASSTTLGRSEESTTVHSSPGATGTALFPTRSATSVLVGEPTTSPISSGSTETTALPGSTTTAGLSEKSTTFYSSPRSPDTTLSPASTTSSGVSEESTTSHSRPGSMHTTAFPSSTTMPGVSQESTASHSSPGSTDTTLSPGSTTASSLGPESTTFHSSPGSTETTLLPDNTTASGLLEASTPVHSSTGSPHTTLSPAGSTTRQGESTTFQSWPNSKDTTPAPPTTTSAFVELSTTSHGSPSSTPTTHFSASSTTLGRSEESTTVHSSPVATATTPSPARSTTSGLVEESTTYHSSPGSTQTMHFPESNTTSGRGEESTTSHSSTTHTISSAPSTTSALVEEPTSYHSSPGSTATTHFPDSSTTSGRSEESTASHSSQDATGTIVLPARSTTSVLLGESTTSPISSGSMETTALPGSTTTPGLSEKSTTFHSSPSSTPTTHFSASSTTLGRSEESTTVHSSPVATATTPSPARSTTSGLVEESTAYHSSPGSTQTMHFPESSTASGRSEESRTSHSSTTHTISSPPSTTSALVEEPTSYHSSPGSIATTHFPESSTTSGRSEESTASHSSPDTNGITPLPAHFTTSGRIAESTTFYISPGSMETTLASTATTPGLSAKSTILYSSSRSPDQTLSPASMTSSSISGEPTSLYSQAESTHTTAFPASTTTSGLSQESTTFHSKPGSTETTLSPGSITTSSFAQEFTTPHSQPGSALSTVSPASTTVPGLSEESTTFYSSPGSTETTAFSHSNTMSIHSQQSTPFPDSPGFTHTVLPATLTTTDIGQESTAFHSSSDATGTTPLPARSTASDLVGEPTTFYISPSPTYTTLFPASSSTSGLTEESTTFHTSPSFTSTIVSTESLETLAPGLCQEGQIWNGKQCVCPQGYVGYQCLSPLESFPVETPEKLNATLGMTVKVTYRNFTEKMNDASSQEYQNFSTLFKNRMDVVLKGDNLPQYRGVNIRRLLNGSIVVKNDVILEADYTLEYEELFENLAEIVKAKIMNETRTTLLDPDSCRKAILCYSEEDTFVDSSVTPGFDFQEQCTQKAAEGYTQFYYVDVLDGKLACVNKCTKGTKSQMNCNLGTCQLQRSGPRCLCPNTNTHWYWGETCEFNIAKSLVYGIVGAVMAVLLLALIILIILFSLSQRKRHREQYDVPQEWRKEGTPGIFQKTAIWEDQNLRESRFGLENAYNNFRPTLETVDSGTELHIQRPEMVASTV

SEQ ID NO: 19753 - protein, 409 aa, Homo sapiens
MSPHGDGRGQAQGRAVRVGLRRSGGIRGGVAVFAAVAAVFTFTLPPSVPGGDSGELITAAHELGVAHPPGYPLFTLVAKLAITLFPFGSIAYRVNLLCGLFGAVAASLLFFTVFRLSGSSAGGILAAGVFSFSRLTWQWSIAAEVFSLNNLFVGLLMALTVHFEEAATAKERSKVAKIGAFCCGLSLCNQHTIILYVLCIIPWILFQLLKKKELSLGSLLKLSLYFSAGLLPYVHLPISSYLNHARWTWGDQTTLQGFLTHFLREEYGTFSLAKSEIGSSMSEILLSQVTNMRTELSFNIQALAVCANICLATKDRQNPSLVWLFTGMFCIYSLFFAWRANLDISKPLFMGVVERFWMQSNAVVAVLAGIGLAAVVSETNRVLNSNGLQCLEWLSATLFVVYQIYSNYR

SEQ ID NO: 19754 - protein, 317 aa, Homo sapiens
MGGVIKSIFTFVLIVEFIIGNLGNSFIALVNCIDWVKGRKISSVDRILTALAISRISLVWLIFGSWCVSVFFPALFATEKMFRMLTNIWTVINHFSVWLATGLGTFYFLKIANFSNSIFLYLKWRVKKVVLVLLLVTSVFLFLNIALINIHINASINGYRRNKTCSSDSSNFTRFSSLIVLTSTVFIFIPFTLSLAMFLLLIFSMWKHRKKMQHTVKISGDASTKAHRGVKSVITFFLLYAIFSLSFFISVWTSERLEENLIILSQVMGMAYPSCHSCVLILGNKKLRQASLSVLLWLRYMFKDGEPSGHKEFRESS

SEQ ID NO: 19755 - protein, 2134 aa, Homo sapiens
MSGGAAEKQSSTPGSLFLSPPAPAPKNGSSSDSSVGEKLGAAAADAVTGRTEEYRRRRHTMDKDSRGAAATTTTTEHRFFRRSVICDSNATALELPGLPLSLPQPSIPAAVPQSAPPEPHREETVTATATSQVAQQPPAAAAPGEQAVAGPAPSTVPSSTSKDRPVSQPSLVGSKEEPPPARSGSGGGSAKEPQEERSQQQDDIEELETKAVGMSNDGRFLKFDIEIGRGSFKTVYKGLDTETTVEVAWCELQDRKLTKSERQRFKEEAEMLKGLQHPNIVRFYDSWESTVKGKKCIVLVTELMTSGTLKTYLKRFKVMKIKVLRSWCRQILKGLQFLHTRTPPIIHRDLKCDNIFITGPTGSVKIGDLGLATLKRASFAKSVIGTPEFMAPEMYEEKYDESVDVYAFGMCMLEMATSEYPYSECQNAAQIYRRVTSGVKPASFDKVAIPEVKEIIEGCIRQNKDERYSIKDLLNHAFFQEETGVRVELAEEDDGEKIAIKLWLRIEDIKKLKGKYKDNEAIEFSFDLERDVPEDVAQEMVESGYVCEGDHKTMAKAIKDRVSLIKRKREQRQLVREEQEKKKQEESSLKQQVEQSSASQTGIKQLPSASTGIPTASTTSASVSTQVEPEEPEADQHQQLQYQQPSISVLSDGTVDSGQGSSVFTESRVSSQQTVSYGSQHEQAHSTGTVPGHIPSTVQAQSQPHGVYPPSSVAQGQSQGQPSSSSLTGVSSSQPIQHPQQQGIQQTAPPQQTVQYSLSQTSTSSEATTAQPVSQPQAPQVLPQVSAGKQSTQGVSQVAPAEPVAVAQTQATQPTTLASSVDSAHSDVASGMSDGNENVPSSSGRHEGRTTKRHYRKSVRSRSRHEKTSRPKLRILNVSNKGDRVVECQLETHNRKMVTFKFDLDGDNPEEIATIMVNNDFILAIERESFVDQVREIIEKADEMLSEDVSVEPEGDQGLESLQGKDDYGFSGSQKLEGEFKQPIPASSMPQQIGIPTSSLTQVVHSAGRRFIVSPVPESRLRESKVFPSEITDTVAASTAQSPGMNLSHSASSLSLQQAFSELRRAQMTEGPNTAPPNFSHTGPTFPVVPPFLSSIAGVPTTAAATAPVPATSSPPNDISTSVIQSEVTVPTEEGIAGVATSTGVVTSGGLPIPPVSESPVLSSVVSSITIPAVVSISTTSPSLQVPTSTSEIVVSSTALYPSVTVSATSASAGGSTATPGPKPPAVVSQQAAGSTTVGATLTSVSTTTSFPSTASQLCIQLSSSTSTPTLAETVVVSAHSLDKTSHSSTTGLAFSLSAPSSSSSPGAGVSSYISQPGGLHPLVIPSVIASTPILPQAAGPTSTPLLPQVPSIPPLVQPVANVPAVQQTLIHSQPQPALLPNQPHTHCPEVDSDTQPKAPGIDDIKTLEEKLRSLFSEHSSSGAQHASVSLETSLVIESTVTPGIPTTAVAPSKLLTSTTSTCLPPTNLPLGTVALPVTPVVTPGQVSTPVSTTTSGVKPGTAPSKPPLTKAPVLPVGTELPAGTLPSEQLPPFPGPSLTQSQQPLEDLDAQLRRTLSPEMITVTSAVGPVSMAAPTAITEAGTQPQKVSQVKEGPVLATSSGAGVFKMGRFQVSVAADGAQKEGKNKSEDAKSVHFESSTSESSVLSSSSPESTLVKPEPNGITIPGISSDVPESAHKTTASEAKSDTGQPTKVGRFQVTTTANKVGRFSVSKTEDKITDTKKEGPVASPPFMDLEQAVLPAVIPKKEKPELSEPSHLNGPSSDPEAAFLSRDVDDGSGSPHSPHQLSSKSLPSQNLSQSLSNSFNSSYMSSDNESDIEDEDLKLELRRLRDKHLKEIQDLQSRQKHEIESLYTKLGKVPPAVIIPPAAPLSGRRRRPTKSKGSKSSRSSSLGNKSPQLSGNLSGQSAASVLHPQQTLHPPGNIPESGQNQLLQPLKPSPSSDNLYSAFTSDGAISVPSLSAPGQGTSSTNTVGATVNSQAAQAQPPAMTSSRKGTFTDDLHKLVDNWARDAMNLSGRRGSKGHMNYEGPGMARKFSAPGQLCISMTSNLGGSAPISAASATSLGHFTKSMCPPQQYGFPATPFGAQWSGTGGPAPQPLGQFQPVGTASLQNFNISNLQKSISNPPGSNLRTT

SEQ ID NO: 19756 - protein, 128 aa, Homo sapiens
MNGETIACAEGCQAIVDTGTSLLTGPTSPIANIQSDIGASENSDGDMVVSCSAISSLPDIVFTINGVQYPVPPSAYILQSEGSCISGFQGMNVPTESGELWILGDVFIRQYFTVFDRANNQVGLAPVA

SEQ ID NO: 19757 - protein, 416 aa, Homo sapiens
AGRSRASPVSGREGGSSRPLEEGTGSSPACVRGAAPGSQDAFYPTRAKQARVSQELKKAAKRTVSISEGPDTLGDGMRERRETLALAPEPEPLEKEACEKWKRPFRSASATSLTLSHCVDVVKGLLDFKKRRGHSIGGAPEQRYQIIPVCVAARLPTRAQDVLDAHLSEVNAVRFGPNSSLLATGGADRLIHLWNVVGSRLEANQTLEGAGGSITSVDFDPSGYQVLAATYNQAAQLWKVGEAQSKETLSGHKDKVTAAKFKLTRHQAVTGSRDRTVKEWDLGRAYCSRTINVLSYCNDVVCGDHIIISGHNDQKIRFWDSRGPHCTQVIPVQGRVTSLSLSHDQLHLLSCSRDNTLKVIDLRVSNIRQVFRADGFKCGSDWTKAVFSAAVNAVAWCYSGSHMVSVDQGRKVVLWQ

SEQ ID NO: 19758 - protein, 1457 aa, Homo sapiens
MLVFGDETHSHFLVIGQAVDDVRLAQNMAQMNDVILSPNCWQLCDRSMIEIESVPDQRAVKVNFLKPPPNFNFDEFFTKCTTFMHYYPSGEHKNLLRLACTLKPDPELEMSLQKYVMESILKQIDNKQLQGYLSELRPVTIVFVNLMFEDQDKAEEIGPAIQDAYMHITSVLKIFQGQINKVFMFDKGCSFLCVFGFPGEKVPDELTHALECAMDIFDFCSQVHKIQTVSIGVASGIVFCGIVGHTVRHEYTVIGQKVNLAARMMMYYPGIVTCDSVTYNGSNLPAYFFKELPKKVMKGVADSGPLYQYWGRTEKVMFGMACLICNRKEDYPLLGRNKEINYFMYTMKKFLISNSSQVLMYEGLPGYGKSQILMKIEYLAQGKNHRIIAISLNKISFHQTFYTIQMFMANVLGLDTCKHYKERQTNLRNKVMTLLDEKFYCLLNDIFHVQFPISREISRMSTLKKQKQLEILFMKILKLIVKEERIIFIIDEAQFVDSTSWRFMEKLIRTLPIFIIMSLCPFVNIPCAAARAVIKNRNTTYIVIGAVQPNDISNKICLDLNVSCISKELDSYLGEGSCGIPFYCEELLKNLEHHEVLVFQQTESEEKTNRTWNNLFKYSIKLTEKLNMVTLHSDKESEEVCHLTSGVRLKNLSPPTSLKEISLIQLDSMRLSHQMLVRCAAIIGLTFTTELLFEILPCWNMKMMIKTLATLVESNIFYCFRNGKELQKALKQNDPSFEVHYRSLSLKPSEGMDHGEEEQLRELENEVIECHRIRFCNPMMQKTAYELWLKDQRKAMHLKCARFLEEDAHRCDHCRGRDFIPYHHFTVNIRLNALDMDAIKKMAMSHGFKTEEKLILSNSEIPETSAFFPENRSPEEIREKILNFFDHVLTKMKTSDEDIIPLESCQCEEILEIVILPLAHHFLALGENDKALYYFLEIASAYLIFCDNYMAYMYLNEGQKLLKTLKKDKSWSQTFESATFYSLKGEVCFNMGQIVLAKKMLRKALKLLNRIFPYNLISLFLHIHVEKNRHFHYVNRQAQESPPPGKKRLAQLYRQTVCLSLLWRIYSYSYLFHCKYYAHLAVMMQMNTALETQNCFQIIKAYLDYSLYHHLAGYKGVWFKYEVMAMEHIFNLPLKGEGIEIVAYVAETLVFNKLIMGHLDLAIELGSRALQMWALLQNPNRHYQSLCRLSRCLLLNSRYPQLIQVLGRLWELSVTQEHIFSKAFFYFVCLDILLYSGFVYRTFEECLEFIHQYENNRILKFHSGLLLGLYSSVAIWYARLQEWDNFYKFSNRAKNLLPRRTMTLTYYDGISRYMEGQVLHLQKQIKEQSENAQASGEELLKNLENLVAQNTTGPVFCPRLYHLMAYVCILMGDGQKCGLFLNTALRLSETQGNILEKCWLNMNKESWYSTSELKEDQWLQTILSLPSWEKIVAGRVNIQDLQKNKFLMRANTVDNHF

SEQ ID NO: 19759 - protein, 502 aa, Homo sapiens
MRRRRRRDGFYPAPDFRDREAEDMAGVFDIDLDQPEDAGSEDELEEGGQLNESMDHGGVGPYELGMEHCEKFEISETSVNRGPEKIRPECFELLRVLGKGGYGKAMIVRNAKDTAHTKAERNILEEVKHPFIVDLIYAFQTGGKLYLILEYLSGGELFMQLEREGIFMEDTACFYLAEISMALGHLHQKGIIYRDLKPENIMLNHQGHVKLTDFGLCKESIHDGTVTHTFCGTIEYMAPEILMRSGHNRAVDWWSLGALMYDMLTGAPPFTGENRKKTIDKILKCKLNLPPYLTQEARDLLKKLLKRNAASRLGAGPGDAGEVQAHPFFRHINWEELLARKVEPPFKPLLQSEEDVSQFDSKFTRQTPVDSPDDSTLSESANQVFLGFTYVAPSVLESVKEKFSFEPKIRSPRRFIGSPRTPVSPVKFSPGDFWGRGASASTANPQTPVEYPMETSGIEQMDVTMSGEASAPLPIRQPNSGPYKKQAFPMISKRPEHLRMNL

SEQ ID NO: 19760 - protein, 257 aa, Homo sapiens
MAVFSDKGDYFWWLLLPVCAMSMTCPIFSSALNSMLSKWDLPVFTLPFNMALSMYLSATGHYNPFFPAKLVIPITTAPNISWSDLSALELLKSIPVGVGQIYGCDNPWTGGIFLGAILLSSPLMCLHAAIGSLLGIAAGLSLSAPFEDIYFGLWGFNSSLACIAMGGMFMALTWQTHLLALGCALFTAYLGVGMANFMAEVGLPACTWPFCLATLLFLIMTTKNSNIYKMPLSKVTYPEENRIFYLQAKKRMVESPL

SEQ ID NO: 19761 - protein, 848 aa, Homo sapiens
MCASACKDTAAWCPEEAAEPQAMVPSRRTWNLGATPSLRGLWRVGRAPEPEPGMARPAPAPASPAARPFPHTGPGRLRTGRGKDTPVCGDEDSSARSAARPALAQCRALSVDWAGPGSPHGLYLTLQVEHLKEKLISQAQEVSRLRSELGGTDLEKHRDLLMVENERLRQEMRRCEAELQELRTKPAGPCPGCEHSQESAQLRDKLSQLQLEMAESKGMLSELNLEVQQKTDRLAEVELRLKDCLAEKAQEEERLSRRLRDSHETIASLRAQSPPVKYVIKTVEVESSKTKQALSESQARNQHLQEQVAMQRQVLKEMEQQLQSSHQLTARLRAQIAMYESELERAHGQMLEEMQSLEEDKNRAIEEAFARAQVEMKAVHENLAGVRTNLLTLQPALRTLTNDYNGLKRQVRGFPLLLQEALRSVKAEIGQAIEEVNSNNQELLRKYRRELQLRKKCHNELVRLKGNIRVIARVRPVTKEDGEGPEATNAVTFDADDDSIIHLLHKGKPVSFELDKVFSPQASQQDVFQEVQALVTSCIDGFNVCIFAYGQTGAGKTYTMEGTAENPGINQRALQLLFSEVQEKASDWEYTITVSAAEIYNEVLRDLLGKEPQEKLEIRLCPDGSGQLYVPGLTEFQVQSVDDINKVFEFGHTNRTTEFTNLNEHSSRSHALLIVTVRGVDCSTGLRTTGKLNLVDLAGSERVGKSGAEGSRLREAQHINKSLSALGDVIAALRSRQGHVPFRNSKLTYLLQDSLSGDSKTLMVVQVSPVEKNTSETLYSLKFAERVRSVELGPGLRRAELGSWSSQEHLEWEPACQTPQPSARAHSAPSSGTSSRPGSIRRKLQPSA

SEQ ID NO: 19762 - protein, 655 aa, Homo sapiens
MSRKAHITEKVTSNGSIGRDPPAETQPQNPPAQPAPNAWQVIKGVLFRIFIIWAISSWFRRGPAPQDQAGPGGAPRVASRNLFPKDTLMNLHVYISEHEHFTDFNATSALFWEQHDLVYGDWTSGENSDGCYEHFAELDIPQSVQQNGSIYIHVYFTKSGFHPDPRQKALYRRLATVHMSRMINKYKRRRFQKTKNLLTGETEADPEMIKRAEDYGPVEVISHWHPNITINIVDDHTPWVKGSVPPPLDQYVKFDAVSGDYYPIIYFNDYWNLQKDYYPINESLASLPLRVSFCPLSLWRWQLYAAQSTKSPWNFLGDELYEQSDEEQDSVKVALLETNPYLLALTIIVSIVHSVFEFLAFKNDIQFWNSRQSLEGLSVRSVFFGVFQSFVVLLYILDNETNFVVQVSVFIGVLIDLWKITKVMDVRLDREHRVAGIFPRLSFKDKSTYIESSTKVYDDMAFRYLSWILFPLLGCYAVYSLLYLEHKGWYSWVLSMLYGFLLTFGFITMTPQLFINYKLKSVAHLPWRMLTYKALNTFIDDLFAFVIKMPVMYRIGCLRDDVVFFIYLYQRWIYRVDPTRVNEFGMSGEDPTAAAPVAEVPTAAGALTPTPAPTTTTATREEASTSLPTKPTQGASSASEPQEAPPKPAEDKKKD

SEQ ID NO: 19763 - protein, 784 aa, Homo sapiens
MLPVYQEVKPNPLQDANLCSRVFFWWLNPLFKIGHKRRLEEDDMYSVLPEDRSQHLGEELQGFWDKEVLRAENDAQKPSLTRAIIKCYWKSYLVLGIFTLIEALRLSNMAMGKTTTGQIVNLLSNDVNKFDQVTVFLHFLWAGPLQAIAVTALLWMEIGISCLAGMAVLIILLPLQSCFGKLFSSLRSKTATFTDARIRTMNEVITGIRIIKMYAWEKSFSNLITNLRKKEISKILRSSCLRGMNLASFFSASKIIVFVTFTTYVLLGSVITASRVFVAVTLYGAVRLTVTLFFPSAIERVSEAIVSIRRIQTFLLLDEISQRNRQLPSDGKKMVHVQDFTAFWDKASETPTLQGLSFTVRPGELLAVVGPVGAGKSSLLSAVLGELAPSHGLVSVHGRIAYVSQQPWVFSGTLRSNILFGKKYEKERYEKVIKACALKKDLQLLEDGDLTVIGDRGTTLSGGQKARVNLARAVYQDADIYLLDDPLSAVDAEVSRHLFELCICQILHEKITILVTHQLQYLKAASQILILKDGKMVQKGTYTEFLKSGIDFGSLLKKDNEESEQPPVPGTPTLRNRTFSESSVWSQQSSRPSLKDGALESQDTENVPVTLSEENRSEGKVGFQAYKNYFRAGAHWIVFIFLILLNTAAQVAYVLQDWWLSYWANKQSMLNVTVNGGGNVTEKLDLNWYLGIYSGLTVATVLFGIARSLLVFYVLVNSSQTLHNKMFESILKAPVLFFDRNPIGRILNRFSKDIGHLDDLLPLTFLDFIQRWDLAVLSWLVSNS

SEQ ID NO: 19764 - protein, 882 aa, Homo sapiens
MVVTTSARGGGGDRTPSRRRGCGLAPAGAAALLAGASCLCYGRSLQGEFVHDDVWAIVNNPDVRPGAPLRWGIFTNDFWGKGMAENTSHKSYRPLCVLTFKLNIFLTGMNPFYFHAVNIILHCLVTLVLMYTCDKTVFKNRGLAFVTALLFAVHPIHTEAVAGIVGRADVLACLLFLLAFLSYNRSLDQGCVGGSFPSTVSPFFLLLSLFLGTCAMLVKETGITVFGVCLVYDLFSLSNKQDKSSNGALCPRSPQQPGSPQPSSLPGHPHRENGKQQRFPHKGAWGGCHSPLPPEPKSSGFPVSPRAVWSMMRFLTYSYLLAFNVWLLLAPVTLCYDWQVGSIPLVETIWDMRNLATIFLAVVMALLSLHCLAAFKRLEHKEVLVGLLFLVFPFIPASNLFFRVGFVVAERVLYMPSMGYCILFVHGLSKLCTWLNRCGATTLIVSTVLLLLLFSWKTVKQNEIWLSRESLFRSGVQTLPHNAKVHYNYANFLKDQGRNKEAIYHYRTALKLYPRHASALNNLGTLTRDTAEAKMYYQRALQLHPQHNRALFNLGNLLKSQEKKEEAITLLKDSIKYGPEFADAYSSLASLLAEQERFKEAEEIYQTGIKNCPDSSDLHNNYGVFLVDTGLPEKAVAHYQQAIKLSPSHHVAMVNLGRLYRSLGENSMAEEWYKRALQVAHKAEILSPLGALYYNTGRYEEALQIYQEAAALQPSQRELRLALAQVLAVMGQTKEAEKMTNHIVSEETGCLECYRLLSAIYSKQENHDKALDAIDKALQLKPKDPKVISELFFTKGNQLREQNLLDKAFESYRVAVQLNPDQAQAWMNMGGIQHIKGKYVSARAYYERALQLVPDSKLLKENLAKLDRLEKRLQEVREKDQT

SEQ ID NO: 19765 - protein, 813 aa, Homo sapiens
MPYIDESPTMSPQLSARSQGGGDGVSPTPPEGLAPGVEAGKGLEMRKLVLSGFLASEEIYINQLEALLLPMKPLKATATTSQPVLTIQQIETIFYKIQDIYEIHKEFYDNLCPKVQQWDSQVTMGHLFQKLASQLGVYKAFVDNYKVALETAEKCSQSNNQFQKISEELKVKGPKDSKDSHTSVTMEALLYKPIDRVTRSTLVLHDLLKHTPVDHPDYPLLQDALRISQNFLSSINEDIDPRRTAVTTPKGETRQLVKDGFLVEVSESSRKLRHVFLFTDVLLCAKLKKTSAGKHQQYDCKWYIPLADLVFPSPEESEASPQVHPFPDHELEDMKMKISALKSEIQKEKANKGQSRAIERLKKKMFENEFLLLLNSPTIPFRIHNRNGKSYLFLLSSDYERSEWREAIQKLQKKDLQAFVLSSVELQVLTGSCFKLRTVHNIPVTSNKDDDESPGLYGFLHVIVHSAKGFKQSANLYCTLEVDSFGYFVSKAKTRVFRDTAEPKWDEEFEIELEGSQSLRILCYEKCYDKTKVNKDNNEIVDKIMGKGQIQLDPQTVETKNWHTDVIEMNGIKVEFSMKFTSRDMSLKRTPSKKQTGVFGVKISVVTKRERSKVPYIVRQCVEEVEKRGIEEVGIYRISGVATDIQALKAVFDANNKDILLMLSDMDINAIAGTLKLYFRELPEPLLTDRLYPAFMEGIALSDPAAKENCMMHLLRSLPDPNLITFLFLLEHLKRVAEKEPINKMSLHNLATVFGPTLLRPSEVESKAHLTSAADIWSHDVMAQVQVLLYYLQHPPISFAELKRNTLYFSTDV

SEQ ID NO: 19766 - protein, 382 aa, Homo sapiens
MVSQALRLLCLLLGLQGCLAADGDQCASSPCQNGGSCKDQLQSYICFCLPAFEGRNCETHKDDQLICVNENGGCEQYCSDHTGTKRSCRCHEGYSLLADGVSCTPTVEYPCGKIPILEKRNASKPQGRIVGGKVCPKGECPWQVLLLVNGAQLCGGTLINTIWVVSAAHCFDKIKNWRNLIAVLGEHDLSEHDGDEQSRRVAQVIIPSTYVPGTTNHDIALLRLHQPVVLTDHVVPLCLPERTFSERTLAFVRFSLVSGWGQLLDRGATALELMVLNVPRLMTQDCLQQSRKVGDSPNITEYMFCAGYSDGSKDSCKGDSGGPHATHYRGTWYLTGIVSWGQGCATVGHFGVYTRVSQYIEWLQKLMRSEPRPGVLLRAPFP

SEQ ID NO: 19767 - protein, 298 aa, Homo sapiens
MGLSTVPDLLLPLVLLELLVGIYPSGVIGLVPHLGDREKRDSVCPQGKYIHPQNNSICCTKCHKGTYLYNDCPGPGQDTDCRECESGSFTASENHLRHCLSCSKCRKEMGQVEISSCTVDRDTVCGCRKNQYRHYWSENLFQCFNCSLCLNGTVHLSCQEKQNTVCTCHAGFFLRENECVSCSNCKKSLECTKLCLPQIENVKGTEDSGTTVLLPLVIFFGLCLLSLLFIGLMYRYQRWKSKLYSIGEWGLWEGEGAGGGEGGHGWVRWTCVEGGEECPLSSYRWGLWAEGGPGWLGR

SEQ ID NO: 19768 - protein, 191 aa, Homo sapiens
MNFSGGGRQEAAGSRGRRAPRPREQDRDVQLSKALSYALRHGALKLGLPMGADGFVPLGTLLQLPQFRGFSAEDVQRVVDTNRKQRFALQLGDPSTGLLIRANQGHSLQVGVPKLELMPLETPQALPPMLVHGTFWKHWPSILLKGLSCQGRTHIHLAPGLPGDPGIISGMRSHCEIAVFIDGPLALADGI

SEQ ID NO: 19769 - protein, 651 aa, Homo sapiens
MARELRALLLWGRRLRPLLRAPALAAVPGGSTSKHEFQAETKKLLDIVARSLYSEKEVFIRELISNASDALEKLRHKLVSDGQALPEMEIHLQTNAEKGTITIQDTGIGMTQEELVSNLGTIARSGSKAFLDALQNQAEASSKIIGQFGVGFYSAFMVADRVEVYSRSAAPGSLGYQWLSDGSGVFEIAEASGVRTGTKIIIHLKSDCKEFSSEARVRDVVTKYSNFVSFPLYLNGRRMNTLQAIWMMDPKDVREWQHEEFYRYVAQAHDKPRYTLHYKTDAPLNIRSIFYVPDMKPSMFDVSRELGSSVALYSRKVLIQTKATDILPKWLRFIRGVVDSEDIPLNLSRELLQESALIRKLRDVLQQRLIKFFIDQSKKDAEKYAKFFEDYGLFMREGIVTATEQEVKEDIAKLLRYESSALPSGQLTSLSEYASRMRAGTRNIYYLCAPNRHLAEHSPYYEAMKKKDTEVLFCFEQFDELTLLHLREFDKKKLISVETDIVVDHYKEEKFEDRSPAAECLSEKETEELMAWMRNVLGSRVTNVKVTLRLDTHPAMVTVLEMGAARHFLRMQQLAKTQEERAQLLQPTLEINPRHALIKKLNQLRASEPGLAQLLVDQIYENAMIAAGLVDDPRAMVGRLNELLVKALERH

SEQ ID NO: 19770 - protein, 1157 aa, Homo sapiens
MKTAQALHRMWIQAVKKLRRWKGRAPGMEELIWEQYTVTLQKDSKRGFGIAVSGGRDNPHFENGETSIVISDVLPGGPADGLLQENDRVVMVNGTPMEDVLHSFAVQQLRKSGKVAAIVVKRPRKVQVAALQASPPLDQDDRAFEVMDEFDGRSFRSGYSERSRLNSHGGRSRSWEDSPERGRPHERARSRERDLSRDRSRGRSLERGLDQDHARTRDRSRGRSLERGLDHDFGPSRDRDRDRSRGRSIDQDYERAYHRAYDPDYERAYSPEYRRGARHDARSRGPRSRSREHPHSRSPSPEPRGRPGPIGVLLMKSRANEEYGLRLGSQIFVKEMTRTGLATKDGNLHEGDIILKINGTVTENMSLTDARKLIEKSRGKLQLVVLRDSQQTLINIPSLNDSDSEIEDISEIESNRSFSPEERRHQYSDYDYHSSSEKLKERPSSREDTPSRLSRMGATPTPFKSTGDIAGTVVPETNKEPRYQEDPPAPQPKAAPRTFLRPSPEDEAIYGPNTKMVRFKKGDSVGLRLAGGNDVGIFVAGIQEGTSAEQEGLQEGDQILKVNTQDFRGLVREDAVLYLLEIPKGEMVTILAQSRADVYRDILACGRGDSFFIRSHFECEKETPQSLAFTRGEVFRVVDTLYDGKLGNWLAVRIGNELEKGLIPNKSRAEQMASVQNAQRDNAGDRADFWRMRGQRSGVKKNLRKSREDLTAVVSVSTKFPAYERVLLREAGFKRPVVLFGPIADIAMEKLANELPDWFQTAKTEPKDAGSEKSTGVVRLNTVRQIIEQDKHALLDVTPKAVDLLNYTQWFPIVIFFNPDSRQGVKTMRQRLNPTSNKSSRKLFDQANKLKKTCAHLFTATINLNSANDSWFGSLKDTIQHQQGEAVWVSEGKMEGMDDDPEDRMSYLTAMGADYLSCDSRLISDFEDTDGEGGAYTDNELDEPAEEPLVSSITRSSEPVQHEEAKTQNKEESYDFSKSYEYKSNPSAVAGNETPGASTKGYPPPVAAKPTFGRSILKPSTPIPPQEGEEVGESSEEQDNAPKSVLGKVKIFEKMDHKARLQRMQELQEAQNARIEIAQKHPDIYAVPIKTHKPDPGTPQHTSSRPPEPQKAPSRPYQDTRGSYGSDAEEEEYRQQLSEHSKRGYYGQSARYRDTEL

SEQ ID NO: 19771 - protein, 865 aa, Homo sapiens
MTTESGSDSESKPDQEAEPQEAAGAQGRAGAPVPEPPKEEQQQALEQFAAAAAHSTPVRREVTDKEQEFAARAAKQLEYQQLEDDKLSQKSSSSKLSRSPLKIVKKPKSMQCKVILLDGSEYTCDVEKRSRGQVLFDKVCEHLNLLEKDYFGLTYRDAENQKNWLDPAKEIKKQVRSGAWHFSFNVKFYPPDPAQLSEDITRYYLCLQLRDDIVSGRLPCSFVTLALLGSYTVQSELGDYDPDECGSDYISEFRFAPNHTKELEDKVIELHKSHRGMTPAEAEMHFLENAKKLSMYGVDLHHAKDSEGVEIMLGVCASGLLIYRDRLRINRFAWPKVLKISYKRNNFYIKIRPGEFEQFESTIGFKLPNHRAAKRLWKVCVEHHTFFRLLLPEAPPKKFLTLGSKFRYSGRTQAQTRRASALIDRPAPYFERSSSKRYTMSRSLDGASVNENHEIYMKDSMSAAEVGTGQYATTKGISQTNLITTVTPEKKAEEERDEEEDKRRKGEEVTPISAIRHEGKTDSERTDTAADGETTATEELEKTQDDLMKHQTNISELKRTFLETSTDTAVTNEWEKRLSTSPVRLAARQEDAPMIEPLVPEEKMETKTESSGIETEPTVHHLPLSTEKVVQETVLVEERRVVHASGDASYSAGDSGDAAAQPAFTGIKGKEGSALTEGAKEEGGEEVAKAVLEQEETAAASRERQEEQSAAIHISETLEQKPHFESSTVKTETISFGSVSPGGVKLEISTKEVPVVHTETKTITYESSQVDPGTDLEPGVLMSAQTITSETTSTTTTTHITKTVKGGISETRIEKRIVITGDADIDHDQALAQAIKEAKEQHPDMSVTKVVVHKETEITPEDGED

SEQ ID NO: 19772 - protein, 347 aa, Homo sapiens
MLMPDDFKAYSKIKVDNHLFNKENMPSHFKFKEYCPMVFRNLRERFGIDDQDFQNSLTRSAPLPNDSQARSGARFHTSYDKRYIIKTITSEDVAEMHNILKKYHQYIVECHGITLLPQFLGMYRLNVDGVEIYVIVTRNVFSHRLSVYRKYDLKGSTVAREASDKEKAKELPTLKDNDFINEGQKIYIDDNNKKVFLEKLKKDVEFLAQLKLMDYSLLVGIHDVERAEQEEVECEENDGEEEGESDGTHPVGTPPDSPGNTLNSSPPLAPGEFDPNIDVYGIKCHENSPRKEVYFMAIIDILTHYDAKKKAAHAAKTVKHGAGAEISTVNPEQYSKRFLDFIGHILT

SEQ ID NO: 19773 - protein, 133 aa, Homo sapiens
MFPFYSCWRTGLLLLLLAVAVRESWQTEEKTCDLVGEKGKESEKELALVKRLKPLFNKSFESTVGQGSDTYIYIFRVCREAGNHTSGAGLVQINKSNGKETVVGRLNETHIFNGSLHHWLLFMLLGGSYTSDW

SEQ ID NO: 19774 - protein, 302 aa, Homo sapiens
MYYALKVWSDIAPLNFHEVAGSAADIQIDFSKADHNDGYPFDGPGGTVAHAFFPGHHHTAGDTHFDDDEAWTFRSSDAHGMDLFAVAVHEFGHAIGLSHVAAAHSIMRPYYQGPVGDPLRYGLPYEDKVRVWQLYGVRESVSPTAQPEEPPLLPEPPDNRSSAPPRKDVPHRCSTHFDAVAQIRGEAFFFKGKYFWRLTRDRHLVSLQPAQMHRFWRGLPLHLDSVDAVYERTSDHKIVFFKGDRYWVFKDNNVEEGYPRPVSDFSLPPGGIDAAFSWAHNDRTYFFKDQLYWRYDDHTRHM

SEQ ID NO: 19775 - protein, 241 aa, Homo sapiens [sequence omitted]

SEQ ID NO: 19776 - protein, 712 aa, Homo sapiens
MQTQEILRILRLPELGDLGQFFRSLSATTLVSMGALAAILAYWFTHRPKALQPPCNLLMQSEEVEDSGGARRSVIGSGPQLLTHYYDDARTMYQVFRRGLSISGNGPCLGFRKPKQPYQWLSYQEVADRAEFLGSGLLQHNCKACTDQFIGVFAQNRPEWIIVELACYTYSMVVVPLYDTLGPGAIRYIINTGLSCQEGASATASTQADISTVIVDKPQKAVLLLEHVERKETPGLKLIILMDPFEEALKERGQKCGVVIKSMQAVEDCGQENHQAPVPPQPDDLSIVCFTSGTTGNPKGAMLTHGNVVADFSGFLKVTEKVIFPRQDDVLISFLPLAHMFERVIQSVVYCHGGRVGFFQGDIRLLSDDMKALCPTIFPVVPRLLNRMYDKIFSQANTPLKRWLLEFAAKRKQAEVRSGIIRNDSIWDELFFNKIQASLGGCVRMIVTGAAPASPTVLGFLRAALGCQVYEGYGQTECTAGCTFTTPGDWTSGHVGAPLPCNHIKLVDVEELNYWACKGEGEICVRGPNVFKGYLKDPDRTKEALDSDGWLHTGDIGKWLPAGTLKIIDRKKHIFKLAQGEYVAPEKIENIYIRSQPVAQIYVHGDSLKAFLVGIVVPDPEVMPSWAQKRGIEGTYADLCTNKDLKKAILEDMVRLGKESGLHSFEQVKAIHIHSDMFSVQNGLLTPTLKAKRPELREYFKKQIEELYSISM

SEQ ID NO: 19777 - protein, 251 aa, Homo sapiens
MSAYGMPMYKSGDLVFAKLKGYAHWPARIEHMTQPNRYQVFFFGTHETAFLSPKRLFPYKECKEKFGKPNKRRGFSAGLWEIENNPTVQASDCPLASEKGSGDGPWPEPEAAEGDEDKPTHAGGGGDELGKPDDDKPTEEEKGPLKRSAGDPPEDAPKRPKEAAPDQEEEAEAERAAEAERAAAAAAATAVDEESPFLVAVENGSAPSEPGLVCEPPQPEEEELREEEVADEEASQEWHAEAPGGGDRDSL

SEQ ID NO: 19778 - protein, 161 aa, Homo sapiens
ARTLRAFSTAVYSATPVPTPSLPERTPGNERPPRRKALPPRTEKMAVDQDWPSVYPVAAPFKPSAVPLPVRMGYPVKKGVPMAKEGNLELLKIPNFLHLTPVAIKKHCEALKDFCTEWPAALDSDEKCEKHFPIEIDSTDYVSSGPSVRNPRARVVVLREM

SEQ ID NO: 19779 - protein, 824 aa, Homo sapiens
MADSSEGPRAGPGEVAELPGDESGTPGGEAFPLSSLANLFEGEDGSLSPSPADASRPAGPGDGRPNLRMKFQGAFRKGVPNPIDLLESTLYESSVVPGPKKAPMDSLFDYGTYRHHSSDNKRWRKKIIEKQPQSPKAPAPQPPPILKVFNRPILFDIVSRGSTADLDGLLPFLLTHKKRLTDEEFREPSTGKTCLPKALLNLSNGRNDTIPVLLDIAERTGNMREFINSPFRDIYYRGELPLSLAACTNQPHIVNYLTENPHKKADMRRQDSRGNTVLHALVAIADNTRENTKFVTKMYDLLLLKCARLFPDSNLEAVLNNDGLSPLMMAAKTGKIGIFQHIIRREVTDEDTRHLSRKFKDWAYGPVYSSLYDLSSLDTCGEEASVLEILVYNSKIENRHEMLAVEPINELLRDKWRKFGAVSFYINVVSYLCAMVIFTLTAYYQPLEGTPPYPYRTTVDYLRLAGEVITLFTGVLFFFTNIKDLFMKKCPGVNSLFIDGSFQLLYFIYSVLVIVSAALYLAGIEAYLAVMVFALVLGWMNALYFTRGLKLTGTYSIMIQKILFKDLFRFLLVYLLFMIGYASALVSLLNPCANMKVCNEDQTNCTVPTYPSCRDSETFSTFLLDLFKLTIGMGDLEMLSSTKYPVVFIILLVTYIILTFVLLLNMLIALMGETVGQVSKESKHIWKLQWATTILDIERSFPVFLRKAFRSGEMVTVGKSSDGTPDRRWCFRVDEVNWSHWNQNLGIINEDPGKNETYQYYGFSHTVGRLRRDRWSSVVPRVVELNKNSNPDEVVVPLDSMGNPRCDGHQQGYPRKWRTDDAPL

SEQ ID NO: 19780 - protein, 1203 aa, Homo sapiens
MDLRDFYLLAALIACLRLDSAIAQELIYTIREELPENVPIGNIPKDLNISHINAATGTSASLVYRLVSKAGDAPLVKVSSSTGEIFTTSNRIDREKLCAGASYAEENECFFELEVVILPNDFFRLIKIKIIVKDTNDNAPMFPSPVINISIPENTLINSRFPIPSATDPDTGFNGVQHYELLNGQSVFGLDIVETPEGEKWPQLIVQQNLDREQKDTYVMKIKVEDGGTPQKSSTAILQVTVSDVNDNRPVFKEGQVEVHIPENAPVGTSVIQLHATDADIGSNAEIRYIFGAQVAPATKRLFALNNTTGLITVQRSLDREETAIHKVTVLASDGSSTPARATVTINVTDVNDNPPNIDLRYIISPINGTVYLSEKDPVNTKIALITVSDKDTDVNGKVICFIEREVPFHLKAVYDNQYLLETSSLLDYEGTKEFSFKIVASDSGKPSLNQTALVRVKLEDENDNPPIFNQPVIELSVSENNRRGLYLTTISATDEDSGKNADIVYQLGPNASFFDLDRKTGVLTASRVFDREEQERFIFTVTARDNGTPPLQSQAAVIVTVLDENDNSPKFTHNHFQFFVSENLPKYSTVGVITVTDADAGENKAVTLSILNDNDNFVLDPYSGVIKSNVSFDREQQSSYTFDVKATDGGQPPRSSTAKVTINVMDVNDNSPVVISPPSNTSFKLVPLSAIPGSVVAEVFAVDVDTGMNAELKYTIVSGNNKGLFRIDPVTGNITLEEKPAPTDVGLHRLVVNISDLGYPKSLHTLVLVFLYVNDTAGNASYIYDLIRRTMETPLDRNIGDSSQPYQNEDYLTIMIAIIAGAMVVIVVIFVTVLVRCRHASRFKAAQRSKQGAEWMSPNQENKQNKKKKRKKRKSPKSSLLNFVTIEESKPDDAVHEPINGTISLPAELEEQSIGRFDWGPAPPTTFKPNSPDLAKHYKSASPQPAFHLKPDTPVSVKKHHVIQELPLDNTFVGGCDTLSKRSSTSSDHFSASECSSQGGFKTKGPLHTRQSQRRVTFHLPDGSQESCSDSGLGDHEPVGSGTLISHPLPLVQPQDEFYDQASPDKRTEADGNSDPNSDGPLGPRGLAEATEMCTQECLVLGHSDNCWMPPGLGPYQHPKSPLSTFAPQKEWVKKDKLVNGHTLTRAWKEDSNRNQFNDRKQYGSNEGHFNNGSHMTDIPLANLKSYKQAGGATESPKEHQL

SEQ ID NO: 19781 - protein, 487 aa, Homo sapiens
MSNYSVSLVGPAPWGFRLQGGKDFNMPLTISSLKDGGKAAQANVRIGDVVLSIDGINAQGMTHLEAQNKIKGCTGSLNMTLQRASAAPKPEPVPVQKPTVTSVCSETSQELAEGQRRGSQGDSKQQNGPPRKHIVERYTEFYHVPTHSDASKKRLIEDTEDWRPRTGTTQSRSFRILAQITGTEHLKESEADNTKKANNSQEPSPQLASSVASTRSMPESLDSPTSGRPGVTSLTAAAAFKPVGSTGVIKSPSWQRPNQGVPSTGRISNSATYSGSVAPANSALGQTQPSDQDTLVQRAEHIPAGKRTPMCAHCNQVIRGPFLVALGKSWHPEEFNCAHCKNTMAYIGFVEEKGALYCELCYEKFFAPECGRCQRKILGEVISALKQTWHVSCFVCVACGKPIRNNVFHLEDGEPYCETDYYALFGTICHGCEFPIEAGDMFLEALGYTWHDTCFVCSVCCESLEGQTFFSKKDKPLCKKHAHSVNF

SEQ ID NO: 19782 - protein, 1154 aa, Homo sapiens
MKTKYIFCNITERKDAEGWETVQRGRPIRSRSTAVMPKVSLATEATRSKDDSDKENVCLLPDESIQKGQFVGDGTSNTIESHPKDSLHSCDHPLAEKTQFTVSTLDDVKNSGSIRDNYVRTSEISAVHIDTECVSVMLQAGTPPLQVNEEKFPAEKARIENEMDPSDISNSMAEVLAKKEELADRLEKANEEAIASAIAEEEQLTREIEAEENNDINIETDNDSDFSASMGSGSVSFCGMSMDWNDVLADYEARESWRQNTSWGDIVEEEPARPPGHGIHMHEKLSSPSRKRTIAESKKKHEEKQMKAQQLREKLREEKTLKLQKLLEREKDVRKWKEELLDQRRRMMEEKLLHAEFKREVQLQAIVKKAQEEEAKVNEIAFINTLEAQNKRHDVLSKLKEYEQRLNELQEERQRRQEEKQARDEAVQERKRALEAERQARVEELLMKRKEQEARIEQQRQEKEKAREDAARERARDREERLAALTAAQQEAMEELQKKIQLKHDESIRRHMEQIEQRKEKAAELSSGRHANTDYAPKLTPYERKKQCSLCNVLISSEVYLFSHVKGRKHQQAVRENTSIQGRELSDEEVEHLSLKKYIIDIVVESTAPAEALKDGEERQKNKKKAKKIKARMNFRAKEYESLMETKNSGSDSPYKAKLQRLAKDLLKQVQVQDSGSWANNKVSALDRTLGEITRILEKENVADQIAFQAAGGLTALEHILQAVVPATNVNTVLRIPPKSLCNAINVYNLTCNNCSENCSDVLFSNKITFLMDLLIHQLTVYVPDENNTILGRNTNKQVFEGLTTGLLKVSAVVLGCLIANRPDGNCQPATPKIPTQEMKNKPSQGDPFNNRVQDLISYVVNMGLIDKLCACFLSVQGPVDENPKMAIFLQHAAGLLHAMCTLCFAVTGRSYSIFDNNRQDPTGLTAALQATDLAGVLHMLYCVLFHGTILDPSTASPKENYTQNTIQVAIQSLRFFNSFAALHLPAFQSIVGAEGLSLAFRHMASSLLGHCSQVSCESLLHEVIVCVGYFTVNHPDNQVIVQSGRHPTVLQKLCQLPFQYFSDPRLIKVLFPSLIAACYNNHQNKIILEQEMSCVLLATFIQDLAQTPGQAENQPYQPKGKCLGSQDYLELANRFPQQAWEEARQFFLKKEKK

SEQ ID NO: 19783 - protein, 583 aa, Homo sapiens
MNRYTTMRQLGDGTYGSVLMGKSNESGELVAIKRMKRKFYSWDECMNLREVKSLKKLNHANVIKLKEVIRENDHLYFIFEYMKENLYQLMKDRNKLFPESVIRNIMYQILQGLAFIHKHGFFHRDMKPENLLCMGPELVKIADFGLARELRSQPPYTDYVSTRWYRAPEVLLRSSVYSSPIDVWAVGSIMAELYMLRPLFPGTSEVDEIFKICQVLGTPKKSDWPEGYQLASSMNFRFPQCVPINLKTLIPNASNEAIQLMTEMLNWDPKKRPTASQALKHPYFQVGQVLGPSSNHLESKQSLNKQLQPLESKPSLVEVEPKPLPDIIDQVVGQPQPKTSQQPLQPIQPPQNLSVQQPPKQQSQEKPPQTLFPSIVKNMPTKPNGTLSHKSGRRRWGQTIFKSGDSWEELEDYDFGASHSKKPSMGVFKEKRKKDSPFRLPEPVPSGSNHSTGENKSLPAVTSLKSDSELSTAPTSKQYYLKQSRYLPGVNPKKVSLIASGKEINPHTWSNQLFPKSLGPVGAELAFKRSNAEYTWNTKTGRGQFSGRTYNPTAKNLNIVNRAQPIPSVHGRTDWVAKYGGHR

SEQ ID NO: 19784 - protein, 457 aa, Homo sapiens
MNRYTTMRQLGDGTYGSVLMGKSNESGELVAIKRMKRKFYSWDECMNLREVKSLKKLNHANVIKLKEVIRENDHLYFIFEYMKENLYQLMKDRNKLFPESVIRNIMYQILQGLAFIHKHGFFHRDMKPENLLCMGPELVKIADFGLARELRSQPPYTDYVSTRWYRAPEVLLRSSVYSSPIDVWAVGSIMAELYMLRPLFPGTSEVDEIFKICQVLGTPKKSDWPEGYQLASSMNFRFPQCVPINLKTLIPNASNEAIQLMTEMLNWDPKKRPTASQALKHPYFQVGQVLGPSSNHLESKQSLNKQLQPLESKPSLVEVEPKPLPDIIDQVVGQPQPKTSQQPLQPIQPPQNLSVQQPPKQQSQEKPPQTLFPSIVKNMPTKPNGTLSHKSGRRRWGQTIFKSGDSWEELEDYDFGASHSKKPSMGVFKEKRKKDSPFRQQVKMAVISLSAHQFPTL

SEQ ID NO: 19785 - protein, 949 aa, Homo sapiens
MLRRVTVAAVCATRRKLCEAGRELAALWGIETRGRCEDSAAARPFPILAMPGRNKAKSTCSCPDLQPNGQDLGENSRVARLGADESEEEGRRGSLSNAGDPEIVKSPSDPKQYRYIKLQNGLQALLISDLSNMEGKTGNTTDDEEEEEVEEEEEDDDEDSGAEIEDDDEEGFDDEDEFDDEHDDDLDTEDNELEELEERAEARKKTTEKQSAAALCVGVGSFADPDDLPGLAHFLEHMVFMGSLKYPDENGFDAFLKKHGGSDNASTDCERTVFQFDVQRKYFKEALDRWAQFFIHPLMIRDAIDREVEAVDSEYQLARPSDANRKEMLFGSLARPGHPMGKFFWGNAETLKHEPRKNNIDTHARLREFWMRYYSSHYMTLVVQSKETLDTLEKWVTEIFSQIPNNGLPRPNFGHLTDPFDTPAFNKLYRVVPIRKIHALTITWALPPQQQHYRVKPLHYISWLVGHEGKGSILSFLRKKCWALALFGGNGETGFEQNSTYSVFSISITLTDEGYEHFYEVAYTVFQYLKMLQKLGPEKRIFEEIRKIEDNEFHYQEQTDPVEYVENMCENMQLYPLQDILTGDQLLFEYKPEVIGEALNQLVPQKANLVLLSGANEGKCDLKEKWFGTQYSIEDIENSWAELWNSNFELNPDLHLPAENKYIATDFTLKAFDCPETEYPVKIVNTPQGCLWYKKDNKFKIPKAYIRFHLISPLIQKSAANVVLFDIFVNILTHNLAEPAYEADVAQLEYKLVAGEHGLIIRVKGFNHKLPLLFQLIIDYLAEFNSTPAVFTMITEQLKKTYFNILIKPETLAKDVRLLILEYARWSMIDKYQALMDGLSLESLLSFVKEFKSQLFVEGLVQGNVTSTESMDFLKYVVDKLNFKPLEQEMPVQFQVVELPSGHHLCKVKALNKGDANSEVTVYYQVRYQESKRIYAYGAACDAHGRTLF

SEQ ID NO: 19786 - protein, 759 aa, Homo sapiens
MHLLGPWLLLLVLEYLAFSDSSKWVFEHPETLYAWEGACVWIPCTYRALDGDLESFILFHNPEYNKNTSKFDGTRLYESTKDGKVPSEQKRVQFLGDKNKNCTLSIHPVHLNDSGQLGLRMESKTEKWMERIHLNVSERPFPPHIQLPPEIQESQEVTLTCLLNFSCYGYPIQLQWLLEGVPMRQAAVTSTSLTIKSVFTRSELKFSPQWSHHGKIVTCQLQDADGKFLSNDTVQLNVKHTPKLEIKVTPSDAIVREGDSVTMTCEVSSSNPEYTTVSWLKDGTSLKKQNTFTLNLREVTKDQSGKYCCQVSNDVGPGRSEEVFLQVQYPPKKVTTVIQNPMPIREGDTVTLSCNYNSSNPSVTRYEWKPHGAWEEPSLGVLKIQNVGWDNTTIACAACNSWCSWASPVALNVQYAPRDVRVRKIKPLSEIHSGNSVSLQCDFSSSHPKEVQFFWEKNGRLLGKESQLNFDSISPEDAGSYSCWVNNSIGQTASKAWTLEVLYAPRRLRVSMSPGDQVMEGKSATLTCESDANPPVSHYTWFDWNNQSLPYHSQKLRLEPVKVQHSGAYWCQGTNSVGKGRSPLSTLTVYYSPETIGRRVAVGLGSCLAILILAICGLKLQRRWKRTQSQQGLQENSSGQSFFVRNKKVRRAPLSEGPHSLGCYNPMMEDGISYTTLRFPEMNIPRTGDAESSEMQRPPPDCDDTVTYSALHKRQVGDYENVIPDFPEDEGIHYSELIQFGVGERPQAQENVDYVILKH

SEQ ID NO: 19787 - protein, 277 aa, Homo sapiens
MGQGMGMVGDLRSPRPTSPLPLPQLTLLVVQVSILYYGGHLVISGQMTSGNLIAFIIYEFVLGDCMENVSFSLSPGKVTALVGPSGSGKSSCVNILENFYPLEGGRVLLDGKPISAYDHKYLHRVISLVSQEPVLFARSITDNISYGLPTVPFEMVVEAAQKANAHGFIMELQDGYSTETGEKGAQLSGGQKQRVAMARALVRNPPVLILDEATSALDAESEYLIQQAIHGNLQKHTVLIIAHRLSTVEHAHLIVVLDKGRVVQQGTHQQLLAQGGL

SEQ ID NO: 19788 - protein, 424 aa, Homo sapiens
MPMLLPHPHQHFLKGLLRAPFRCYHFIFHSSTHLGSGIPCAQPFNSLGLHCTKWMLLSDGLKRKLCVQTTLKDHTEGLSDKEQRFVDKLYTGLIQGQRACLAEAITLVESTHSRKKELAQVLLQKVLLYHREQEQSNKGKPLAFRVGLSGPPGAGKSTFIEYFGKMLTERGHKLSVLAVDPSSCTSGGSLLGDKTRMTELSRDMNAYIRPSPTRGTLGGVTRTTNEAILLCEGAGYDIILIETVGVGQSEFAVADMVDMFVLLLPPAGGDELQGIKRGIIEMADLVAVTKSDGDLIVPARRIQAEYVSALKLLRKRSQVWKPKVIRISARSGEGISEMWDKMKDFQDLMLASGELTAKRRKQQKVWMWNLIQESVLEHFRTHPTVREQIPLLEQKVLIGALSPGLAADFLLKALKAETNKIHPV

SEQ ID NO: 19789 - protein, 546 aa, Homo sapiens
MEPELLVRKVSALQVRGRARGSQDFSFREIMGSRTWTSQRDATTFSPLTARQPLEIPAVPNRAEESWDPRTPCPARPHSHHTLAPDQGNGKSLKACVRGFLVRRQFQSLRAEYEAIVREVEGDLGTLQWTEGRIPRPRFLPEKAKSHQTWKAGDRVANPEQGLWNHFPCEESEGEATWEEMVLKKSGESSANQGSLCRDHSSWLQMKQNRKPSQEKTRDTTRMENPEATDQRLPHSQPQLQELQYHRSHLAMELLWLQQAINSRKEYLLLKQTLRSPEAGPIREEPRVFLEHGEQACERDQSQPSAPLEDQSYRDRTTGELEQEDDSCHRVKSPHRSPGSLATTQKNIAGAKCREPCYSKSGPPSSIPSNSQALGDRLTKGPDDGRQTFGGTCLLQMKILEDQTPRGLKPRNHCPRKSRTQLSALYEDSNIKEMSPRKLDHKEPDCRTVRTQELGLSEDHIIWDGTLGGPEHSVLDLWRTKPPKGQAPTDRSSRDGTSNEPSHEGQKKQRTIPWRSKSPEILSSTKAGCTGEEQWRGRPWKTEPPG

SEQ ID NO: 19790 - protein, 354 aa, Homo sapiens
MAPARRPAGARLLLVYAGLLAAAAAGLGSPEPGAPSRSRARREPPPGNELPRGPGESRAGPAARPPEPTAERAHSVDPRDAWMLFVRQSDKGVNGKKRSRGKAKKLKFGLPGPPGPPGPQGPPGPIIPPEALLKEFQLLLKGAVRQRERAEPEPCTCGPAGPVAASLAPVSATAGEDDDDVVGDVLALLAAPLAPGPRAPRVEAAFLCRLRRDALVERRALHELGVYYLPDAEGAFRRGPGLNLTSGQYRAPVAGFYALAATLHVALGEPPRRGPPRPRDHLRLLICIQSRCQRNASLEAIMGLESSSELFTISVNGVLYLQMGQWTSVFLDNASGCSLTVRSGSHFSAVLLGV

SEQ ID NO: 19791 - protein, 854 aa, Homo sapiens
MASNQNSPIRTFGLNLSSDSSALGAVASDSEQSKTEEERESRSLFPGSLKPKLGKRDYLEKAGELIKLALKKEEEDDYEAASDFYRKGVDLLLEGVQGESSPTRREAVKRRTAEYLMRAESISSLYGKPQLDDVSQVLLVMDTRTEQTFILKGLRKSSEYSRNRKTIIPRCVPNMVCLHKYIISEESVFLVLQHAEGGKLWSYISKFLNRSPEESFDIKEVKKPTLAKVHLQQPTSSPQDSSSFESRGSDGGSMLKALPLKSSLTPSSQDDSNQEDDGQDSSPKWPDSGSSSEEECTTSYLTLCNEYGQEKIEPGSLNEEPFMKTEGNGVDTKAIKSFPAHLAADSDSPSTQLRAHELKFFPNDDPEAVSSPRTSDSLSRSKNSPMEFFRIDSKDSASELLGLDFGEKLYSLKSEPLKPFFTLPDGDSASRSFNTSESKVEFKAQDTISRGSDDSVPVISFKDAAFDDVSGTDEGRPDLLVNLPGELESTREAAAMGPTKFTQTNIGIIENKLLEAPDVLCLRLSTEQCQAHEEKGIEELSDPSGPKSYSITEKHYAQEDPRMLFVAAVDHSSSGDMSLLPSSDPKFQGLGVVESAVTANNTEESLFRICSPLSGANEYIASTDTLKTEEVLLFTDQTDDLAKEEPTSLFQRDSETKGESGLVLEGDKEIHQIFEDLDKKLALASRFYIPEGCIQRWAAEMVVALDALHREGIVCRDLNPNNILLNDRGHIQLTYFSRWSEVEDSCDSDAIERMYCAPEVGAITEETEACDWWSLGAVLFELLTGKTLVECHPAGINTHTTLNMPECVSEEARSLIQQLLQFNPLERLGAGVAGVEDIKSHPFFTPVDWAELMR

SEQ ID NO: 19792 - protein, 1525 aa, Homo sapiens
MEVCLVEELPPTTELEEGLRNGVYLAKLAKFFAPKMVSEKKIYDVEQTRYKKSGLHFRHTDNTVQWLRAMESIGLPKIFYPETTDVYDRKNIPRMIYCIHALSLYLFKLGIAPQIQDLLGKVDFTEEEISNMRKELEKYGIQMPSFSKIGGILANELSVDEAALHAAVIAINEAVEKGIAEQTVVTLRNPNAVLTLVDDNLAPEYQKELWDAKKKKEENARLKNSCISEEERDAYEELLTQAEIQGNINKVNRQAAVDHINAVIPEGDPENTLLALKKPEAQLPAVYPFAAAMYQNELFNLQKQNTMNYLAHEELLIAVEMLSAVALLNQALESNDLVSVQNQLRSPAIGLNNLDKAYVERYANTLLSVKLEVLSQGQDNLSWNEIQNCIDMVNAQIQEENDRVVAVGYINEAIDEGNPLRTLETLLLPTANISDVDPAHAQHYQDVLYHAKSQKLGDSESVSKVLWLDEIQQAVDDANVDKDRAKQWVTLVVDVNQCLEGKKSSDILSVLKSSTSNANDIIPECADKYYDALVKAKELKSERVSSDGSWLKLNLHKKYDYYYNTDSKESSWVTPESCLYKESWLTGKEIEDIIEEVTVGYIRENIWSASEELLLRFQATSSGPILREEFEARKSFLHEQEENVVKIQAFWKGYKQRKEYMHRRQTFIDNTDSIVKIQSWFRMATARKSYLSRLQYFRDHNNEIVKIQSLLRANKARDDYKTLVGSENPPLTVIRKFVYLLDQSDLDFQEELEVARLREEVVTKIRANQQLEKDLNLMDIKIGLLVKNRITLEDVISHSKKLNKKKGGEMEILNNTDNQGIKSLSKERRKTLETYQQLFYLLQTNPLYLAKLIFQMPQNKSTKFMDTVIFTLYNYASNQREEYLLLKLFKTALEEEIKSKVDQVQDIVTGNPTVIKMVVSFNRGARGQNTLRQLLAPVVKEIIDDKSLIINTNPVEVYKAWVNQLETQTGEASKLPYDVTTEQALTYPEVKNKLEASIENLRRVTDKVLNSIISSLDLLPYGLRYIAKVLKNSIHEKFPDATEDELLKIVGNLLYYRYMNPAIVAPDGFDIIDMTAGGQINSDQRRNLGSVAKVLQHAASNKLFEGENEHLSSMNNYLSETYQEFRKYFKEACNVPEPEEKFNMDKYTDLVTVSKPVIYISIEEIISTHSLLLEHQDAIAPEKNDLLSELLGSLGEVPTVESFLGEGAVDPNDPNKANTLSQLSKTEISLVLTSKYDIEDGEAIDSRSLMIKTKKLIIDVIRNQPGNTLTEILETPATAQQEVDHATDMVSRAMIDSRTPEEMKHSQSMIEDAQLPLEQKKRKIQRNLRTLEQTGHVSSENKYQDILNEIAKDIRNQRIYRKLRKAELAKLQQTLNALNKKAAFYEEQINYYDTYIKTCLDNLKRKNTRRSIKLDGKGEPKGAKRAKPVKYTAAKLHEKGVLLDIDDLQTNQFKNVTFDIIATEDVGIFDVRSKFLGVEMEKVQLNIQDLLQMQYEGVAVMKMFDKVKVNVNLLIYLLNKKFYGK

SEQ ID NO: 19793 - protein, 1230 aa, Homo sapiens
MASASYHISNLLEKMTSSDKDFRFMATNDLMTELQKDSIKLDDDSERKVVKMILKLLEDKNGEVQNLAVKCLGPLVSKVKEYQVETIVDTLCTNMLSDKEQLRDISSIGLKTVIGELPPASSGSALAANVCKKITGRLTSAIAKQEDVSVQLEALDIMADMLSRQGGLLVNFHPSILTCLLPQLTSPRLAVRKRTIIALGHLVMSCGNIVFVDLIEHLLSELSKNDSMSTTRTYIQCIAAISRQAGHRIGEYLEKIIPLVVKFCNVDDDELREYCIQAFESFVRRCPKEVYPHVSTIINICLKYLTYDPNYNYDDEDEDENAMDADGGDDDDQGSDDEYSDDDDMSWKVRRAAAKCLDAVVSTRHEMLPEFYKTVSPALISRFKEREENVKADVFHAYLSLLKQTRPVQSWLCDPDAMEQGETPLTMLQSQVPNIVKALHKQMKEKSVKTRQCCFNMLTELVNVLPGALTQHIPVLVPGIIFSLNDKSSSSNLKIDALSCLYVILCNHSPQVFHPHVQALVPPVVACVGDPFYKITSEALLVTQQLVKVIRPLDQPSSFDATPYIKDLFTCTIKRLKAADIDQEVKERAISCMGQIICNLGDNLGSDLPNTLQIFLERLKNEITRLTTVKALTLIAGSPLKIDLRPVLGEGVPILASFLRKNQRALKLGTLSALDILIKNYSDSLTAAMIDAVLDELPPLISESDMHVSQMAISFLTTLAKVYPSSLSKISGSILNELIGLVRSPLLQGGALSAMLDFFQALVVTGTNNLGYMDLLRMLTGPVYSQSTALTHKQSYYSIAKCVAALTRACPKEGPAVVGQFIQDVKNSRSTDSIRLLALLSLGEVGHHIDLSGQLELKSVILEAFSSPSEEVKSAASYALGSISVGNLPEYLPFVLQEITSQPKRQYLLLHSLKEIISSASVVGLKPYVENIWALLLKHCECAEEGTRNVVAECLGKLTLIDPETLLPRLKGYLISGSSYARSSVVTAVKFTISDHPQPIDPLLKNCIGDFLKTLEDPDLNVRRVALVTFNSAAHNKPSLIRDLLDTVLPHLYNETKVRKELIREVEMGPFKHTVDDGLDIRKAAFECMYTLLDSCLDRLDIFEFLNHVEDGLKDHYDIKMLTFLMLVRLSTLCPSAVLQRLDRLVEPLRATCTTKVKANSVKQEFEKQDELKRSAMRAVAALLTIPEAEKSPLMSEFQSQISSNPELAAIFESIQKDSSSTNLESMDTS

SEQ ID NO: 19794 - protein, 1167 aa, Homo sapiens
MIGDGCDLGLGEEEGGTGLPYPCQFCDKSFIRLSYLKRHEQIHSDKLPFKCTYCSRLFKHKRSRDRHIKLHTGDKKYHCHECEAAFSRSDHLKIHLKTHSSSKPFKCTVCKRGFSSTSSLQSHMQAHKKNKEHLAKSEKEAKKDDFMCDYCEDTFSQTEELEKHVLTRHPQLSEKADLQCIHCPEVFVDENTLLAHIHQAHANQKHKCPMCPEQFSSVEGVYCHLDSHRQPDSSNHSVSPDPVLGSVASMSSATPDSSASVERGSTPDSTLKPLRGQKKMRDDGQGWTKVVYSCPYCSKRDFNSLAVLEIHLKTIHADKPQQSHTCQICLDSMPTLYNLNEHVRKLHKNHAYPVMQFGNISAFHCNYCPEMFADINSLQEHIRVSHCGPNANPSDGNNAFFCNQCSMGFLTESSLTEHIQQAHCSVGSAKLESPVVQPTQSFMEVYSCPYCTNSPIFGSILKLTKHIKENHKNIPLAHSKKSKAEQSPVSSDVEVSSPKRQRLSASANSISNGEYPCNQCDLKFSNFESFQTHLKLHLELLLRKQACPQCKEDFDSQESLLQHLTVHYMTTSTHYVCESCDKQFSSVDDLQKHLLDMHTFVLYHCTLCQEVFDSKVSIQVHLAVKHSNEKKMYRCTACNWDFRKEADLQVHVKHSHLGNPAKAHKCIFCGETFSTEVELQCHITTHSKKYNCKFCSKAFHAIILLEKHLREKHCVFDAATENGTANGVPPMATKKAEPADLQGMLLKNPEAPNSHEASEDDVDASEPMYGCDICGAAYTMEVLLQNHRLRDHNIRPGEDDGSRKKAEFIKGSHKCNVCSRTFFSENGLREHLQTHRGPAKHYMCPICGERFPSLLTLTEHKVTHSKSLDTGTCRICKMPLQSEEEFIEHCQMHPDLRNSLTGFRCVVCMQTVTSTLELKIHGTFHMQKLAGSSAASSPNGQGLQKLYKCALCLKEFRSKQDLVKLDVNGLPYGLCAGCMARSANGQVGGLAPPEPADRPCAGLRCPECSVKFESAEDLESHMQVDHRDLTPETSGPRKGTQTSPVPRKKTYQCIKCQMTFENEREIQIHVANHMIEEGINHECKLCNQMFDSPAKLLCHLIEHSFEGMGGTFKCPVCFTVFVQANKLQQHIFAVHGQEDKIYDCSQCPQKFFFQTELQNHTMSQHAQ

SEQ ID NO: 19795 - protein, 420 aa, Homo sapiens
MNPIVVFHGYEAVKEALIDNGEEFSGRGNSPISQRITKGLGIISSNGKRWKEIRRFSLTTLRNFGMGKRSIEDRVQEEAHCLVEELRKTKASPCDPTFILGCAPCNVICSVVFQKRFDYKDQNFLTLMKRFNENFRILNSPWIQVCNNFPLLIDCFPGTHNKVLKNVALTRSYIREKVKEHQASLDVNNPRDFIDCFLIKMEQEKDNQKSEFNIENLVGTVADLFVAGTETTSTTLRYGLLLLLKHPEVTAKVQEEIDHVIGRHRSPCMQDRSHMPYTDAVVHEIQRYSDLVPTGVPHAVTTDTKFRNYLIPKGTTIMALLTSVLHDDKEFPNPNIFDPGHFLDKNGNFKKSDYFMPFSAGKRICAGEGLARMELFLFLTTILQNFNLKSVDDLKNLNTTAVTKGIVSLPPSYQICFIPV

SEQ ID NO: 19796 - protein, 351 aa, Homo sapiens
MVLSQDGSVQSGFLAEGHLDGQPFLRYDRQKRRAKPQGQWAENVLGAKTWDTETEDLTENGQDLRRTLTHIKDQKGGLHSLQEIRVCEIHEDSSTRGSRHFYYDGELFLSQNLETQESTVPQSSRAQTLAMNVTNFWKEDAMKTKTHYRAMQADCLQKLQRYLKSGVAIRRTVPPMVNVTCSEVSEGNITVTCRASSFYPRNITLTWRQDGVSLSHNTQQWGDVLPDGNGTYQTWVATRIRQGEEQRFTCYMEHSGNHGTHPVPSGKALVLQSQRTDFPYVSAAMPCFVIIIILCVPCCKKKTSAAEGPELVSLQVLDQHPVGTGDHRDAAQLGFQPLMSATGSTGSTEGT

SEQ ID NO: 19797 - protein, 307 aa, Homo sapiens
MRLLVLLWGCLLLPGYEALEGPEEISGFEGDTVSLQCTYREELRDHRKYWCRKGGILFSRCSGTIYAEEEGQETMKGRVSIRDSRQELSLIVTLWNLTLQDAGEYWCGVEKRGPDESLLISLFVFPGPCCPPSPSPTFQPLATTRLQPKAKAQQTQPPGLTSPGLYPAATTAKQGKTGAEAPPLPGTSQYGHERTSQYTGTSPHPATSPPAGSSRPPMQLDSTSAEDTSPALSSGSSKPRVSIPMVRILAPVLVLLSLLSAAGLIAFCSHLLLWRKEAQQATETQRNEKFCLSRLNSLMFSLSLPWL

SEQ ID NO: 19798 - protein, 96 aa, Homo sapiens
MTSPHFSSYDEGPLDVSMAATNLENQLHSAQKNLLFLQREHASTLKGLHSEIRRLQQHCTDLTYELTVKSSEQTGDGTSKSSELKKRCEELEAQLK

SEQ ID NO: 19799 - protein, 616 aa, Homo sapiens
MRRTKSAGLDLYLWRQHWPRRGKQPHEVGISNSYLVLEFERVYLDNLPSASMYERSYMHRDVITHVVCTKTDFIITASHDGHVKFWKKIEEGIEFVKHFRSHLGVIESIAVSSEGALFCSVGDDKAMKVFDVVNFDMINMLKLGYFPGQCEWIYCPGDAISSVAASEKSTGKIFIYDGRGDNQPLHIFDKLHTSPLTQIRLNPVYKAVVSSDKSGMIEYWTGPPHEYKFPKNVNWEYKTDTDLYEFAKCKAYPTSVCFSPDGKKIATIGSDRKVRIFRFVTGKLMRVFDESLSMFTELQQMRQQLPDMEFGRRMAVERELEKVDAVRLINIVFDETGHFVLYGTMLGIKVINVETNRCVRILGKQENIRVMQLALFQGIAKKHRAATTIEMKASENPVLQNIQADPTIVCTSFKKNRFYMFTKREPEDTKSADSDRDVFNEKPSKEEVMAATQAEGPKRVSDSAIIHTSMGDIHTKLFPVECPKTVENFCVHSRNGYYNGHTFHRIIKGFMIQTGDPTGTGMGGESIWGGEFEDEFHSTLRHDRPYTLSMANAGSNTNGSQFFITVVPTPWLDNKHTVFGRVTKGMEVVQRISNVKVNPKTDKPYEDVSIINITVK

SEQ ID NO: 19800 - protein, 1063 aa, Homo sapiens
MTRLGWPSPCCARKQCSEGRTYSNAVISPNLETTRIMRVSHTFPVVDCTAACCDLSSCDLAWWFEGRCYLVSCPHKENCEPKKMGPIRSYLTFVLRPVQRPAQLLDYGDMMLNRGSPSGIWGDSPEDIRKDLTFLGKDWGLEEMSEYSDDYRELEKDLLQPSGKQEPRGSAEYTDWGLLPGSEGAFNSSVGDSPAVPAETQQDPELHYLNESASTPAPKLPERSVLLPLPTTPSSGEVLEKEKASQLQEQSSNSSGKEVLMPSHSLPPASLELSSVTVEKSPVLTVTPGSTEHSIPTPPTSAAPSESTPSELPISPTTAPRTVKELTVSAGDNLIITLPDNEVELKAFVAPAPPVETTYNYEWNLISHPTDYQGEIKQGHKQTLNLSQLSVGLYVFKVTVSSENAFGEGFVNVTVKPARRVNLPPVAVVSPQLQELTLPLTSALIDGSQSTDDTEIVSYHWEEINGPFIEEKTSVDSPVLRLSNLDPGNYSFRLTVTDSDGATNSTTAALIVNNAVDYPPVANAGPNHTITLPQNSITLNGNQSSDDHQIVLYEWSLGPGSEGKHVVMQGVQTPYLHLSAMQEGDYTFQLKVTDSSRQQSTAVVTVIVQPENNRPPVAVAGPDKELIFPVESATLDGSSSSDDHGIVFYHWEHVRGPSAVEMENIDKAIATVTGLQVGTYHFRLTVKDQQGLSSTSTLTVAVKKENNSPPRARAGGRHVLVLPNNSITLDGSRSTDDQRIVSYLWIRDGQSPAAGDVIDGSDHSVALQLTNLVEGVYTFHLRVTDSQGASDTDTATVEVQPDPRKSGLVELTLQVGVGQLTEQRKDTLVRQLAVLLNVLDSDIKVQKIRAHSDLSTVIVFYVQSRPPFKVLKAAEVARNLHMRLSKEKADFLLFKVLRVDTAGCLLKCSGHGHCDPLTKRCICSHLWMENLIQRYIWDGESNCEWSIFYVTVLAFTLIVLTGGFTWLCICCCKRQKRTKIRKKTKYTILDNMDEQERMELRPKYGIKHRSTEHNSSLMVSESEFDSDQDTIFSREKMERGNPKVSMNGSIRNGASFSYCSKDR

SEQ ID NO: 19801 - protein, 590 aa, Homo sapiens
MRKVPCKKDAASGSFFARDNTANFLHWCRDIGVDETYLFESEGLVLHKDPRQVYLCLLEIGRIVSRYGVEPPVLVKLEKEIELEETLLNTSGPEDSISIPKSCCRHEELHEAVKHIAEDPPCSCSHRFSIEYLSEGRYRLGDKILFIRMLHGKHVMVRVGGGWDTLQGFLLKYDPCRILQFATLEQKILAFQKGVSNESVPDSPARTPQPPEMNPLSAVNMFQKQNSKPSVPVSIPKSKEKQGRPPGALVPASSLKGGNLGSMSVRSKLPNSPAASSHPKLKSSKGITKKPQAPSNNASSSLASLNPVGKNTSSPALPRTAPCISESPRKCISSPNTPKAKVIPAQNSADLPESTLLPNKCSGKTQPKYLKHNHISSRDNAVSHLAAHSNSSSKCPKLPKANIPVRPKPSFQSSAKMTKTSSKTIATGLGTQSQPSDGAPQAKPVPAQKLKSALNLNQPVSVSSVSPVKATQKSKDKNIVSATKKQPQNKSAFQKTGPSSLKSPGRTPLSIVSLPQSSTKTQTAPKSAQTVAKSQHSTKGPPRSGKTPASIRKPPSSVKDADSGDKKPTAKKKEDDDHYFVMTGSKKPRK

SEQ ID NO: 19802 - protein, 529 aa, Homo sapiens
MQQLRRLWVLAAQPFCHLPERCRLFFEIGGISLAMPQCLLWICLAVWEARGDLPFIAENDAVLTVNWNAVKEHRTFYAIYETSVNDPGNMSFVKETVDKLLKGYDIRLRPDFGGPPVCVGMNIDIASIDMVSEVNMDYTLTMYFQQYWRDKRLAYSGIPLNLTLDNRVADQLWVPDTYFLNDKKSFVHGVTVKNRMIRLHPDGTVLYGLRITTTAACMMDLRRYPLDEQNCTLEIESYGYTTDDIEFYWRGGDKAVTGVERIELPQFSIVEHRLVSRNVVFATGAYPRLSLSFRLKRNIGYFILQTYMPSILITILSWVSFWINYDASAARVALGITTVLTMTTINTHLRETLPKIPYVKAIDMYLMGCFVFVFLALLEYAFVNYIFFGRGPQRQKKLAEKTAKAKNDRSKSESNRVDAHGNILLTSLEVHNEMNEVSGGIGDTRNSAISFDNSGIQYRKQSMPREGHGRFLGDRSLPHKKTHLRRRSSQLKIKIPDLTDVNAIDRWSRIVFPFTFSLFNLVYWLYYVN

SEQ ID NO: 19803 - protein, 1148 aa, Homo sapiens
MSLENEDKRARTRSKALRGPPETTAADLSCPTPGCTGSGHVRGKYSRHRSLQSCPLAKKRKLEGAEAEHLVSKRKSHPLKLALDEGYGVDSDGSEDTEVKDASVSDESEGTLEGAEAETSGQDEIHRPETAEGRSPVKSHFGSNPIGSATASSKGSYSSYQGIIATSLLNLGQIAEETLVEEDLGQAAKPGPGIVHLLQEAAEGAASEEGEKGLFIQPEDAEEVVEVTTERSQDLCPQSLEDAASEESSKQKGILSHEEEDEEEEEEEEEEEEDEEEEEEEEEEEEEEEEEEEEEEEEEEEEEEEEAAPDVIFQEDTSHTSAQKAPELRGPESPSPKPEYSVIVEVRSDDDKDEDTHSRKSTVTDESEMQDMMTRGNLGLLEQAIALKAEQVRTVCEPGCPPAEQSQLGLGEPGKAAKPLDTVRKSYYSKDPSRAEKREIKCPTPGCDGTGHVTGLYPHHRSLSGCPHKDRIPPEILAMHENVLKCPTPGCTGQGHVNSNRNTHRSLSGCPIAAAEKLAKSHEKQQPQTGDPSKSSSNSDRILRPMCFVKQLEVPPYGSYRPNVAPATPRANLAKELEKFSKVTFDYASFDAQVFGKRMLAPKIQTSETSPKAFQSKPFPKASSPRHSPSSSYVRSTSSSSAGFDYSQDAEAAHMAATAILNLSTRCWEMPENLSTKPQDLPSKSVDIEVDENGTLDLSMHKHRKRENAFPSSSSCSSSPGVKSPDASQRHSSTSAPSSSMTSPQSSQASRQDEWDRPLDYTKPSRLREEEPEESEPAAHSFASSEADDQEVSEENFEERKYPGEVTLTNFKLKFLSKDIKKELLTCPTPGCDGSGHITGNYASHRSLSGCPLADKSLRNLMAAHSADLKCPTPGCDGSGHITGNYASHRSLSGCPRAKKSGVKVAPTKDDKEDPELMKCPVPGCVGLGHISGKYASHRSASGCPLAARRQKEGSLNGSSFSWKSLKNEGPTCPTPGCDGSGHANGSFLTHRSLSGCPRATFAGKKGKLSGDEVLSPKFKTSDVLENDEEIKQLNQEIRDLNESNSEMEAAMVQLQSQISSMEKNLKNIEEENKLIEEQNEALFLELSGLSQALIQSLANIRLPHMEPICEQNFDAYVSTLTDMYSNQDPENKDLLESIKQAVRGIQV

SEQ ID NO: 19804 - protein, 753 aa, Homo sapiens
MSFLKSLSLCLGKPFCNNETFGQYPLQVNGYRNLDECLEGAMVEGDVELLPSDHSVKYGQERWFTKLPPVLTFELSRFEFNQSLGQPEKIHNKLEFPQIIYMDRYMYRSKELIRNKRECIRKLKEEIKILQQKLERYVKYGSGPARFPLPDMLKYVIEFASTKPASESCPPESDTHMTLPLSSVHCSVSDQTSKESTSTESSSQDVESTFSSPEDSLPKSKPLTSSRSSMEMPSQPAPRTVTDEEINFVKTCLQRWRSEIEQDIQDLKTCIASTTQTIEQMYCDPLLRQVPYRLHAVLVHEGQANAGHYWAYIYNQPRQSWLKYNDISVTESSWEEVERDSYGGLRNVSAYCLMYINDKLPYFNAEAAPTESDQMSEVEALSVELKHYIQEDNWRFEQEVEEWEEEQSCKIPQMESSTNSSSQDYSTSQEPSVASSHGVRCLSSEHAVIVKEQTAQAIANTARAYEKSGVEAALSEAFHEEYSRLYQLAKETPTSHSDPRLQHVLVYFFQNEAPKRVVERTLLEQFADKNLSYDERSISIMKVAQAKLKEIGPDDMNMEEYKKWHEDYSLFRKVSVYLLTGLELYQKGKYQEALSYLVYAYQSNAALLMKGPRRGVKESVIALYRRKCLLELNAKAASLFETNDDHSVTEGINVMNELIIPCIHLIINNDISKDDLDAIEVMRNHWCSYLGQDIAENLQLCLGEFLPRLLDPSAEIIVLKEPPTIRPNSPYDLCSRFAAVMESIQGVSTVTVK

SEQ ID NO: 19805 - protein, 829 aa, Homo sapiens
MGDLKSGFEEVDGVRLGYLIIKGKQMFALSQVFTDLLKNIPRTTVHKRMDHLKVKKHHCDLEELRKLKAINSIAFHAAKCTLISREDVEALYTSCKTERVLKTKRRRVGRALATKAPPPERAAAASPRPGFWKDKHQLWRGLSGAARPLPISAQSQRPGAAAARPAAHLPQIFSKYPGSHYPEIVRSPCKPPLNYETAPLQGNYVAFPSDPAYFRSLLCSKHPAAAAAAAAAAAAAAAAGATCLERFHLVNGFCPPPHHHHHHHHHHHHHHHRAQPPQQSHHPPHHHRPQPHLGSFPESCSSDSESSSYSDHAANDSDFGSSLSSSSNSVSSEEEEEEGEEEEEEEEEEGGSGASDSSEVSSEEEDSSTESDSSSGSSQVSVQSIRFRRTSFCKPPSVQAQANFLYHLASAAAATKPAAFEDAGRLPDLKSSVKAESPAEWNLQSWAPKASPVYCPASLGSCFAEIRNDRVSEITFPHSEISNAVKRTDLTINCLAEGASSPSPKTNNAFPQQRILREARKCLQTTPTTHCADNNTIAARFLNNDSSGAEANSEKYSKILHCPEFATDLPSSQTDPEVNAAGAAATKAENPCTDTGDKTLPFLHNIKIKVEDSSANEEYEPHLFTNKLKCECNDTKGEFYSVTESKEEDALLTTAKEGFACPEKETPSLNPLAQSQGLSCTLGSPKPEDGEYKFGARVRKNYRTLVLGKRPVLQTPPVKPNLKSARSPRPTGKTETNEGTLDDFTVINRRKKVASNVASAVKRPFHFMANFPCPPSLIIGRDGDLWPAYSLNTTKDSQTPHKAHPIWKWQLGGSAIPLPPSHKFRKFNS

SEQ ID NO: 19806 - protein, 713 aa, Homo sapiens
MPSTSFPVPSKFPLGPAAAVFGRGETLGPAPRAGGTMKSAEEEHYGYASSNVSPALPLPTAHSTLPAPCHNLQTSTPGIIPPADHPSGYGAALDGGPAGYFLSSGHTRPDGAPALESPRIEITSCLGLYHNNNQFFHDVEVEDVLPSSKRSPSTATLSLPSLEAYRDPSCLSPASSLSSRSCNSEASSYESNYSYPYASPQTSPWQSPCVSPKTTDPEEGFPRGLGACTLLGSPRHSPSTSPRASVTEESWLGARSSRPASPCNKRKYSLNGRQPPYSPHHSPTPSPHGSPRVSVTDDSWLGNTTQYTSSAIVAAINALTTDSSLDLGDGVPVKSRKTTLEQPPSVALKVEPVGEDLGSPPPPADFAPEDYSSFQHIRKGGFCDQYLAVPQHPYQWAKPKPLSPTSYMSPTLPALDWQLPSHSGPYELRIEVQPKSHHRAHYETEGSRGAVKASAGGHPIVQLHGYLENEPLMLQLFIGTADDRLLRPHAFYQVHRITGKTVSTTSHEAILSNTKVLEIPLLPENSMRAVIDCAGILKLRNSDIELRKGETDIGRKNTRVRLVFRVHVPQPSGRTLSLQVASNPIECSQRSAQELPLVEKQSTDSYPVVGGKKMVLSGHNFLQDSKVIFVEKAPDGHHVWEMEAKTDRDLCKPNSLVVEIPPFRNQRITSPVHVSFYVCNGKRKRSQYQRFTYLPANVNEIIRNDLSSTSTHS

SEQ ID NO: 19807 - protein, 602 aa, Homo sapiens
MAAEEEAAAGGKVLREENQCIAPVVSSRVSPGTRPTAMGSFSSHMTEFPRKRKGSDSDPSQVEDGEHQVKMKAFREAHSQTEKRRRDKMNNLIEELSAMIPQCNPMARKLDKLTVLRMAVQHLRSLKGLTNSYVGSNYRPSFLQDNELRHLILKTAEGFLFVVGCERGKILFVSKSVSKILNYDQASLTGQSLFDFLHPKDVAKVKEQLSSFDISPREKLIDAKTGLQVHSNLHAGRTRVYSGSRRSFFCRIKSCKISVKEEHGCLPNSKKKEHRKFYTIHCTGYLRSWPPNIVGMEEERNSKKDNSNFTCLVAIGRLQPYIVPQNSGEINVKPTEFITRFAVNGKFVYVDQRATAILGYLPQELLGTSCYEYFHQDDHNNLTDKHKAVLQSKEKILTDSYKFRAKDGSFVTLKSQWFSFTNPWTKELEYIVSVNTLVLGHSEPGEASFLPCSSQSSEESSRQSCMSVPGMSTGTVLGAGSIGTDIANEILDLQRLQSSSYLDDSSPTGLMKDTHTVNCRSMSNKELFPPSPSEMGELEATRQNQSTVAVHSHEPLLSDGAQLDFDALCDNDDTAMAAFMNYLEAEGGLGDPGDFSDIQWTL

SEQ ID NO: 19808 - protein, 2856 aa, Homo sapiens
MEEKQQIILANQDGGTVAGAAPTFFVILKQPGNGKTDQGILVTNQDACALASSVSSPVKSKGKICLPADCTVGGITVTLDNNSMWNEFYHRSTEMILTKQGRRMFPYCRYWITGLDSNLKYILVMDISPVDNHRYKWNGRWWEPSGKAEPHVLGRVFIHPESPSTGHYWMHQPVSFYKLKLTNNTLDQEGHIILHSMHRYLPRLHLVPAEKAVEVIQLNGPGVHTFTFPQTEFFAVTAYQNIQITQLKIDYNPFAKGFRDDGLNNKPQRDGKQKNSSDQEGNNISSSSGHRVRLTEGQGSEIQPGDLDPLSRGHETSGKGLEKTSLNIKRDFLGFMDTDSALSEVPQLKQEISECLIASSFEDDSRVASPLDQNGSFNVVIKEEPLDDYDYELGECPEGVTVKQEETDEETDVYSNSDDDPILEKQLKRHNKVDNPEADHLSSKWLPSSPSGVAKAKMFKLDTGKMPVVYLEPCAVTRSTVKISELPDNMLSTSRKDKSSMLAELEYLPTYIENSNETAFCLGKESENGLRKHSPDLRVVQKYPLLKEPQWKYPDISDSISTERILDDSKDSVGDSLSGKEDLGRKRTTMLKIATAAKVVNANQNASPNVPGKRGRPRKLKLCKAGRPPKNTGKSLISTKNTPVSPGSTFPDVKPDLEDVDGVLFVSFESKEALDIHAVDGTTEESSSLQASTTNDSGYRARISQLEKELIEDLKTLRHKQVIHPGLQEVGLKLNSVDPTMSIDLKYLGVQLPLAPATSFPFWNLTGTNPASPDAGFPFVSRTGKTNDFTKIKGWRGKFHSASASRNEGGNSESSLKNRSAFCSDKLDEYLENEGKLMETSMGFSSNAPTSPVVYQLPTKSTSYVRTLDSVLKKQSTISPSTSYSLKPHSVPPVSRKAKSQNRQATFSGRTKSSYKSILPYPVSPKQKYSHVILGDKVTKNSSGIISENQANNFVVPTLDENIFPKQISLRQAQQQQQQQQGSRPPGLSKSQVKLMDLEDCALWEGKPRTYITEERADVSLTTLLTAQASLKTKPIHTIIRKRAPPCNNDFCRLGCVCSSLALEKRQPAHCRRPDCMFGCTCLKRKVVLVKGGSKTKHFQRKAAHRDPVFYDTLGEEAREEEEGIREEEEQLKEKKKRKKLEYTICETEPEQPVRHYPLWVKVEGEVDPEPVYIPTPSVIEPMKPLLLPQPEVLSPTVKGKLLTGIKSPRSYTPKPNPVIREEDKDPVYLYFESMMTCARVRVYERKKEDQRQPSSSSSPSPSFQQQTSCHSSPENHNNAKEPDSEQQPLKQLTCDLEDDSDKLQEKSWKSSCNEGESSSTSYMHQRSPGGPTKLIEIISDCNWEEDRNKILSILSQHINSNMPQSLKVGSFIIELASQRKSRGEKNPPVYSSRVKISMPSCQDQDDMAEKSGSETPDGPLSPGKMEDISPVQTDALDSVRERLHGGKGLPFYAGLSPAGKLVAYKRKPSSSTSGLIQVASNAKVAASRKPRTLLPSTSNSKMASSSGTATNRPGKNLKAFVPAKRPIENAAQIPVATPQVSPNTVKRAGPRLLLIPVQQGSPTLRPVSNTQLQGHRMVLQPVRSPSGMNLFRHPNGQIVQLLPLHQLRGSNTQPNLQPVMFRNPGSVMGIRLPAPSKPSETPPSSTSSSAFSVMNPVIQAVGSSSAVNVITQAPSLLSSGASFVSQAGTLTLRISPPEPQSFASKTGSETKITYSSGGQPVGTASLIPLQSGSFALLQLPGQKPVPSSILQHVASLQMKRESQNPDQKDETNSIKREQETKKVLQSEGEAVDPEANVIKQNSGAATSEETLNDSLEDRGDHLDEECLPEEGCATVKPSEHSCITGSHTDQDYKDVNEEYGARNRKSSKEKVAVLEVRTISEKASNKTVQNLSKVQHQKLGDVKVEQQKGFDNPEENSSEFPVTFKEESKFELSGSKVMEQQSNLQPEAKEKECGDSLEKDRERWRKHLKGPLTRKCVGASQECKKEADEQLIKETKTCQENSDVFQQEQGISDLLGKSGITEDARVLKTECDSWSRISNPSAFSIVPRRAAKSSRGNGHFQGHLLLPGEQIQPKQEKKGGRSSADFTVLDLEEDDEDDNEKTDDSIDEIVDVVSDYQSEEVDDVEKNNCVEYIEDDEEHVDIETVEELSEEINVAHLKTTAAHTQSFKQPSCTHISADEKAAERSRKAPPIPLKLKPDYWSDKLQKEAEAFAYYRRTHTANERRRRGEMRDLFEKLKITLGLLHSSKVSKSLILTRAFSEIQGLTDQADKLIGQKNLLTRKRNILIRKVSSLSGKTEEVVLKKLEYIYAKQQALEAQKRKKKMGSDEFDISPRISKQQEGSSASSVDLGQMFINNRRGKPLILSRKKDQATENTSPLNTPHTSANLVMTPQGQLLTLKGPLFSGPVVAVSPDLLESDLKPQVAGSAVALPENDDLFMMPRIVNVTSLATEGGLVDMGGSKYPHEVPDSKPSDHLKDTVRNEDNSLEDKGRISSRGNRDGRVTLGPTQVFLANKDSGYPQIVDVSNMQKAQEFLPKKISGDMRGIQYKWKESESRGERVKSKDSSFHKLKMKDLKDSSIEMELRKVTSAIEEAALDSSELLTNMEDEDDTDETLTSLLNEIAFLNQQLNDDSVGLAELPSSMDTEFPGDARRAFISKVPPGSRATFQVEHLGTGLKELPDVQGESDSISPLLLHLEDDDFSENEKQLAEPASEPDVLKIVIDSEIKDSLLSNKKAIDGGKNTSGLPAEPESVSSPPTLHMKTGLENSNSTDTLWRPMPKLAPLGLKVANPSSDADGQSLKVMPCLAPIAAKVGSVGHKMNLTGNDQEGRESKVMPTLAPVVAKLGNSGASPSSAGK

SEQ ID NO: 19809 - protein, 275 aa, Homo sapiens
MPACCSCSDVFQYETNKVTRIQSMNYGTIKWFFHVIIFSYVCFALVSDKLYQRKEPVISSVHTKVKGIAEVKEEIVENGVKKLVHSVFDTADYTFPLQGNSFFVMTNFLKTEGQEQRLCPEYPTRRTLCSSDRGCKKGWMDPQSKGIQTGRCVVYEGNQKTCEVSAWCPIEAVEEAPRPALLNSAENFTVLIKNNIDFPGHNYTTYAKYYKENNVEKRTLIKVFGIRFDILVFGTGGKFDIIQLVVYIGSTLSYFGLVRDSLFHALGKWFGEGSD

SEQ ID NO: 19810 - protein, 1568 aa, Homo sapiens
MGAVLRSLLACSFCVLLRAAPLLLYANRRDLRLVDATNGKENATIVVGGLEDAAAVDFVFSHGLIYWSDVSEEAIKRTEFNKTESVQNVVVSGLLSPDGLACDWLGEKLYWTDSETNRIEVSNLDGSLRKVLFWQELDQPRAIALDPSSGFMYWTDWGEVPKIERAGMDGSSRFIIINSEIYWPNGLTLDYEEQKLYWADAKLNFIHKSNLDGTNRQAVVKGSLPHPFALTLFEDILYWTDWSTHSILACNKYTGEGLREIHSDIFSPMDIHAFSQQRQPNATNPCGIDNGGCSHLCLMSPVKPFYQCACPTGVKLLENGKTCKDGATELLLLARRTDLRRISLDTPDFTDIVLQLEDIRHAIAIDYDPVEGYIYWTDDEVRAIRRSFIDGSGSQFVVTAQIAHPDGIAVDWVARNLYWTDTGTDRIEVTRLNGTMRKILISEDLEEPRAIVLDPMVGYMYWTDWGEIPKIERAALDGSDRVVLVNTSLGWPNGLALDYDEGKIYWGDAKTDKIEVMNTDGTGRRVLVEDKIPHIFGFTLLGDYVYWTDWQRRSIERVHKRSAEREVIIDQLPDLMGLKATNVHRVIGSNPCAEENGGCSHLCLYRPQGLRCACPIGFELISDMKTCIVPEAFLLFSRRADIRRISLETNNNNVAIPLTGVKEASALDFDVTDNRIYWTDISLKTISRAFMNGSALEHVVEFGLDYPEGMAVDWLGKNLYWADTGTNRIEVSKLDGQHRQVLVWKDLDSPRALALDPAEGFMYWTEWGGKPKIDRAAMDGSERTTLVPNVGRANGLTIDYAKRRLYWTDLDTNLIESSNMLGLNREVIADDLPHPFGLTQYQDYIYWTDWSRRSIERANKTSGQNRTIIQGHLDYVMDILVFHSSRQSGWNECASSNGHCSHLCLAVPVGGFVCGCPAHYSLNADNRTCSAPTTFLLFSQKSAINRMVIDEQQSPDIILPIHSLRNVRAIDYDPLDKQLYWIDSRQNMIRKAQEDGSQGFTVVVSSVPSQNLEIQPYDLSIDIYSRYIYWTCEATNVINVTRLDGRSVGVVLKGEQDRPRAVVVNPEKGYMYFTNLQERSPKIERAALDGTEREVLFFSGLSKPIALALDSRLGKLFWADSDLRRIESSDLSGANRIVLEDSNILQPVGLTVFENWLYWIDKQQQMIEKIDMTGREGRTKVQARIAQLSDIHAVKELNLQEYRQHPCAQDNGGCSHICLVKGDGTTRCSCPMHLVLLQDELSCGESQFQCASGQCIDGALRCNGDANCQDKSDEKNCEVLCLIDQFRCANGQCIGKHKKCDHNVDCSDKSDELDCYPTEEPAPQATNTVGSVIGVIVTIFVSGTVYFICQRMLCPRMKGDGETMTNDYVVHGPASVPLGYVPHPSSLSGSLPGMSRGKSMISSLSIMGGSSGPPYDRAHVTGASSSSSSSTKGTYFPAILNPPPSPATERSHYTMEFGYSSNSPSTHRSYSYRPYSYRHFAPPTTPCSTDVCDSDYAPSRRMTSVATAKGYTSDLNYDSEPVPPPPTPRSQYLSAEENYESCPPSPYTERSYSHHLYPPPPSPCTDSS

SEQ ID NO: 19811 - protein, 121 aa, Homo sapiens
KAHAEERELWKTEHAKDQEKVSQEIQKAIQEQRKISQETVKAAIIEEQKRSEKAVEEAVKRTRDELIEYIKEQKRLDQVIRQRSLSSLELFLSCAQKQDTEGLLVRWQKRDMATRISLSRP

SEQ ID NO: 19812 - protein, 1177 aa, Homo sapiens
MESEMLQSPLLGLGEEDEADLTDWNLPLAFMKKRHCEKIEGSKSLAQSWRMKDRMKTVSVALVLCLNVGVDPPDVVKTTPCARLECWIDPLSMGPQKALETIGANLQKQYENWQPRARYKQSLDPTVDEVKKLCTSLRRNAKEERVLFHYNGHGVPRPTVNGEVWVFNKNYTQYIPLSIYDLQTWMGSPSIFVYDCSNAGLIVKSFKQFALQREQELEVAAINPNHPLAQMPLPPSMKNCIQLAACEATELLPMIPDLPADLFTSCLTTPIKIALRWFCMQKCVSLVPGVTLDLIEKIPGRLNDRRTPLGELNWIFTAITDTIAWNVLPRDLFQKLFRQDLLVASLFRNFLLAERIMRSYNCTPVSSPRLPPTYMHAMWQAWDLAVDICLSQLPTIIEEGTAFRHSPFFAEQLTAFQVWLTMGVENRNPPEQLPIVLQVLLSQVHRLRALDLLGRFLDLGPWAVSLALSVGIFPYVLKLLQSSARELRPLLVFIWAKILAVDSELVVALSHLVVQYESNFCTVALQFIEEEKNYALPSPATTEGGSLTPVRDSPCTPRLRSVSSYGNIRAVATARSLNKSLQNLSLTEESGGAVAFSPGNLSTSSSASSTLGSPENEEHILSFETIDKMRRASSYSSLNSLIGVSFNSVYTQIWRVLLHLAADPYPEVSDVAMKVLNSIAYKATVNARPQRVLDTSSLTQSAPASPTNKGVHIHQAGGSPPASSTSSSSLTNDVAKQPVSRDLPSGRPGTTGPAGAQYTPHSHQFPRTRKMFDKGPEQTADDADDAAGHKSFISATVQTGFCDWSARYFAQPVMKIPEEHDLESQIRKEREWRFLRNSRVRRQAQQVIQKGITRLDDQIFLNRNPGVPSVVKFHPFTPCIAVADKDSICFWDWEKGEKLDYFHNGNPRYTRVTAMEYLNGQDCSLLLTATDDGAIRVWKNFADLEKNPEMVTAWQGLSDMLPTTRGAGMVVDWEQETGLLMSSGDVRIVRIWDTDREMKVQDIPTGADSCVTSLSCDSHRSLIVAGLGDGSIRVYDRRMALSECRVMTYREHTAWVVKASLQKRPDGHIVSVSVNGDVRIFDPRMPESVNVLQIVKGLTALDIHPQADLIACGSVNQFTAIYNSSGELINNIKYYDGFMGQRVGAISCLAFHPHWPHLAVGSNDYYISVYSVEKRVR

SEQ ID NO: 19813 - protein, 2022 aa, Homo sapiens
MSGRQRTLFQTWGSSISRSSGTPGCSSGTERPQSPGSSKAPLPAAAEAQLESDDDVLLVAAYEAERQLCLENGGFCTSAGALWIYPTNCPVRDYQLHISRAALFCNTLVCLPTGLGKTFIAAVVMYNFYRWFPSGKVVFMAPTKPLVTQQIEACYQVMGIPQSHMAEMTGSTQASTRKEIWCSKRVLFLTPQVMVNDLSRGACPAAEIKCLVIDEAHKALGNYAYCQAVQQVITNLLIGQIELRSEDSPDILTYSHERKVEKLIVPLGEELAAIQKTYIQILESFARSLIQRNVLMRRDIPNLTKYQIILARDQFRKNPSPNIVGIQQGIIEGEFAICISLYHGYELLQQMGMRSLYFFLCGIMDGTKGMTRSKNELGRNEDFMKLYNHLECMFARTRSTSANGISAIQQGDKNKKFVYSHPKLKKLEEVVIEHFKSWNAENTTEKKRDETRVMIFSSFRDSVQEIAEMLSQHQPIIRVMTFVGHASGKSTKGFTQKEQLEVVKQFRDGGYNTLVSTCVGEEGLDIGEVDLIICFDSQKSPIRLVQRMGRTGRKRQGRIVIILSEGREERIYNQSQSNKRSIYKAISSNRQVLHFYQRSPRMVPDGINPKLHKMFITHGVYEPEKPSRNLQRKSSIFSYRDGMRQSSLKKDWFLSEEEFKLWNRLYRLRDSDEIKEITLPQVQFSSLQNEENKPAQESTTGIHQLSLSEWRLWQDHPLPTHQVDHSDRCRHFIGLMQMIEGMRHEEGECSYELEVESYLQMEDVTSTFIAPRNESNNLASDTFITHKKSSFIKNINQGSSSSVIESDEECAEIVKQTHIKPTKIVSLKKKVSKEIKKDQLKKENNHGIIDSVDNDRNSTVENIFQEDLPNDKRTSDTDEIAATCTINENVIKEPCVLLTECQFTNKSTSSLAGNVLDSGYNSFNDEKSVSSNLFLPFEEELYIVRTDDQFYNCHSLTKEVLANVERFLSYSPPPLSGLSDLEYEIAKGTALENLLFLPCAEHLRSDKCTCLLSHSAVNSQQNLELNSLKCINYPSEKSCLYDIPNDNISDEPSLCDCDVHKHNQNENLVPNNRVQIHRSPAQNLVGENNHDVDNSDLPVLSTDQDESLLLFEDVNTEFDDVSLSPLNSKSESLPVSDKTAISETPLVSQFLISDELLLDNNSELQDQITRDANSFKSRDQRGVQEEKVKNHEDIFDCSRDLFSVTFDLGFCSPDSDDEILEHTSDSNRPLDDLYGRYLEIKEISDANYVSNQALIPRDHSKNFTSGTVIIPSNEDMQNPNYVHLPLSAAKNEELLSPGYSQFSLPVQKKVMSTPLSKSNTLNSFSKIRKEILKTPDSSKEKVNLQRFKEALNSTFDYSEFSLEKSKSSGPMYLHKSCHSVEDGQLLTSNESEDDEIFRRKVKRAKGNVLNSPEDQKNSEVDSPLHAVKKRRFPINRSELSSSDESENFPKPCSQLEDFKVCNGNARRGIKVPKRQSHLKHVARKFLDDEAELSEEDAEYVSSDENDESENEQDSSLLDFLNDETQLSQAINDSEMRAIYMKSLRSPMMNNKYKMIHKTHKNINIFSQIPEQDETYLEDSFCVDEEESCKGQSSEEEVCVDFNLITDDCFANSKKYKTRRAVMLKEMMEQNCAHSKKKLSRIILPDDSSEEENNVNDKRESNIAVNPSTVKKNKQQDHCLNSVPSGSSAQSKVRSTPRVNPLAKQSKQTSLNLKDTISEVSDFKPQNHNEVQSTTPPFTTVDSQKDCRKFPVPQKDGSALEDSSTSGASCSKSRPHLAGTHTSLRLPQEGKGTCILVGGHEITSGLEVISSLRAIHGLQVEVCPLNGCDYIVSNRMVVERRSQSEMLNSVNKNKFIEQIQHLQSMFERICVIVEKDREKTGDTSRMFRRTKSYDSLLTTLIGAGIRILFSSCQEETADLLKELSLVEQRKNVGIHVPTVVNSNKSEALQFYLSIPNISYITALNMCHQFSSVKRMANSSLQEISMYAQVTHQKAEEIYRYIHYVFDIQMLPNDLNQDRLKSDI

SEQ ID NO: 19814 - protein, 526 aa, Homo sapiens
MLERLNKEADEALLHNLRLQLEAQFLQDDISAAKDRHKKNLLEVQTYISILQQIIHTTPPASIVTSGMREEKLLTEREVAALRSQLEEGREVLSHLQAQRVELQAQTTTLEQAIKSAHECYDDEIQLYNEQIETLRKEIEETERVLEKSSYDCRQLAVAQQTLKNELDRYHRIIEIEGNRLTSAFIETPIPLFTQSHGVSLSTGSGGKDLTRALQDITAAKPRQKALPKNVPRRKEIITKDKTNGALEDAPLKGLEDTKLVQVVLKEESESKFESESKEVSPLTQEGAPEDVPDGGQISKGFGKLYRKVKEKVRSPKEPETPTELYTKERHVLVTGDANYVDPRFYVSSITAKGGVAVSVAEDSVLYDGQVEPSPESPKPPLENGQVGLQEKEDGQPIDQQPIDKEIEPDGAELEGPEEKREGEERDEESRRPCAMVTPGAEEPSIPEPPKPAADQDGAEVLGTRSRSLPEKGPPKALAYKTVEVVESIEKISTESIQTYEETAVIVETMIGKTKSDKKKSGEKSS

SEQ ID NO: 19815 - protein, 431 aa, Homo sapiens
MAHSPVQSGLPGMQNLKADPEELFTKLEKIGKGSFGEVFKGIDNRTQKVVAIKIIDLEEAEDEIEDIQQEITVLSQCDSPYVTKYYGSYLKDTKLWIIMEYLGGGSALDLLEPGPLDETQIATILREILKGLDYLHSEKKIHRDIKAANVLLSEHGEVKLADFGVAGQLTDTQIKRNTFVGTPFWMAPEVIKQSAYDSKADIWSLGITAIELARGEPPHSELHPMKVLFLIPKNNPPTLEGNYSKPLKEFVEACLNKEPSFRPTAKELLKHKFILRNAKKTSYLTELIDRYKRWKAEQSHDDSSSEDSDAETDGQASGGSDSGDWIFTIREKDPKNLENGALQPSDLDRNKMKDIPKRPFSQCLSTIISPLFAELKEKSQACGGNLGSIEELRGAIYLAEEACPGISDTMVAQLVQRLQRYSLSGGGTSSH

SEQ ID NO: 19816 - protein, 362 aa, Homo sapiens
MDDDDFGGFEAAETFDGGSGETQTTSPAIPWAAFPAVSGVHLSPSSPEIVLDRDHSSSIGCLSSDAIISSPENTHAANSIVSQTIPKAQIQQSTHTHLDISLFPLGLTDEKSNGTIALVDDSEDPGANVSNIQLQQKISSLEIKLKVSEEEKQRIKQDVESLMEKHNVLEKGFLKEKEQEAISFQDRYKELQEKHKQELEDMRKAGHEALSIIVDEYKALLQSSVKQQVEAIEKQYISAIEKQAHKCEELLNAQHQRLLEMLDTEKELLKEKIKEALIQQSQEQKEILEKCLEEERQRNKEALVSAAKLEKEAVKDAVLKVVEEERKNLEKAHAEERELWKTEHAKDQEKVSQEIQKAIQEQ

SEQ ID NO: 19817 - protein, 539 aa, Homo sapiens
MRSVDVTLMPIDCELSSWSSWTTCDPCQKKRYRYAYLLQPSQFHGEPCNFSDKEVEDCVTNRPCGSQVRCEGFVCAQTGRCVNRRLLCNGDNDCGDQSDEANCRRIYKKCQHEMDQYWGIGSLASGINLFTNSFEGPVLDHRYYAGGCSPHYILNTRFRKPYNVESYTPQTQGKYEFILKEYESYSDFERNVTEKMASKSGFSFGFKIPGIFELGISSQSDRGKHYIRRTKRFSHTKSVFLHARSDLEVAHYKLKPRSLMLHYEFLQRVKRLPLEYSYGEYRDLFRDFGTHYITEAVLGGIYEYTLVMNKEAMERGDYTLNNVHACAKNDFKIGGAIEEVYVSLGVSVGKCRGILNEIKDRNKRDTMVEDLVVLVRGGASEHITTLAYQELPTADLMQEWGDAVQYNPAIIKVKVEPLYELVTATDFAYSSTVRQNMKQALEEFQKEVSSCHCAPCQGNGVPVLKGSRCDCICPVGSQGLACEVSYRKNTPIDGKWNCWSNWSSCSGRRKTRQRQCNNPPPQNGGSPCSGPASETLDCS

SEQ ID NO: 19818 - protein, 510 aa, Homo sapiens
MGRPTQWPSLLLLLLLPGPPPVAGLEDAAFPHLGESLQPLPRACPLRCSCPRVDTVDCDGLDLRVFPDNITRAAQHLSLQNNQLQELPYNELSRLSGLRTLNLHNNLISSEGLPDEAFESLTQLQHLCVAHNKLSVAPQFLPRSLRVADLAANQVMEIFPLTFGEKPALRSVYLHNNQLSNAGLPPDAFRGSEAIATLSLSNNQLSYLPPSLPPSLERLHLQNNLISKVPRGALSRQTQLRELYLQHNQLTDSGLDATTFSKLHSLEYLDLSHNQLTTVPAGLPRTLAILHLGRNRIRQVEAARLHGARGLRYLLLQHNQLGSSGLPAGALRPLRGLHTLHLYGNGLDRVPPALPRRLRALVLPHNHVAALGARDLVATPGLTELNLAYNRLASARVHHRAFRRLRALRSLDLAGNQLTRLPMGLPTGLRTLQLQRNQLRMLEPEPLAGLDQLRELSLAHNRLRVGDIGPGTWHELQALQVRHRLVSHTVPRAPPSPCLPCHVPNILVSW

SEQ ID NO: 19819 - protein, 495 aa, Homo sapiens
MVKQLENGEINIEELKKNLEYTASLLEAVYIDETRQILDTEDELQELRSDAVPSEVRDWLASTFTQQARAKGRRAEEKPKFRSIVHAVQAGIFVERMFRRTYTSVGPTYSTAVLNCLKNLDLWCFDVFSLNQAADDHALRTIVFELLTRHNLISRFKIPTVFLMSFLDALETGYGKYKNPYHNQIHAADVTQTVHCFLLRTGMVHCLSEIELLAIIFAAAIHDYEHTGTTNSFHIQTKSECAIVYNDRSVLENHHISSVFRLMQDDEMNIFINLTKDEFVELRALVIEMVLATDMSCHFQQVKTMKTALQQLERIDKPKALSLLLHAADISHPTKQWLVHSRWTKALMEEFFRQGDKEAELGLPFSPLCDRTSTLVAQSQIGFIDFIVEPTFSVLTDVAEKSVQPLADEDSKSKNQPSFQWRQPSLDVEVGDPNPDVVSFRSTWVKRIQENKQKWKERAASGITNQMSIDELSPCEEEAPPSPAEDEHNQNGNLD

SEQ ID NO: 19820 - protein, 747 aa, Homo sapiens
MPLGRQSHRHHRTHGQKHRRRGRGKGASQGEEGLEALAHDTPSQRVQFILGTEEDEEHVPHELFTELDEICMKEGEDAEWKETARWLKFEEDVEDGGERWSKPYVATLSLHSLFELRSCLINGTVLLDMHANSIEEISDLILDQQELSSDLNDSMRVKVREALLKKHHHQNEKKRNNLIPIVRSFAEVGKKQSDPHLMDKHGQTVSPQSVPTTNLEVKNGVNCEHSPVDLSKVDLHFMKKIPTGAEASNVLVGEVDILDRPIVAFVRLSPAVLLSGLTEVPIPTRFLFILLGPVGKGQQYHEIGRSMATIMTDEIFHDVAYKAKERDDLLAGIDEFLDQVTVLPPGEWDPSIRIEPPKNVPSQEKRKMPGVPNGNVCHIEQEPHGGHSGPELQRTGRLFGGLVLDIKRKAPWYWSDYRDALSLQCLASFLFLYCACMSPVITFGGLLGEATEGRISAIESLFGASMTGIAYSLFAGQALTILGSTGPVLVFEKILFKFCKDYALSYLSLRACIGLWTAFLCIVLVATDASSLVCYITRFTEEAFASLICIIFIYEAIEKLIHLAETYPIHMHSQLDHLSLYYCRCTLPENPNNHTLQYWKDHNIVTAEVHWANLTVSECQEMHGEFMGSACGHHGPYTPDVLFWSCILFFTTFILSSTLKTFKTSRYFPTRMESCSVAWLECGGVILAHCNLRLLPSSWDYRHAPPQPANFCIFSRDGVSPCWPGWSQSLDLVICLPRPPKMLGLQA

SEQ ID NO: 19821 - protein, 364 aa, Homo sapiens
MPACCSCSDVFQYETNKVTRIQSMNYGTIKWFFHVIIFSYVCFALVSDKLYQRKEPVISSVHTKVKGIAEVKEEIVENGVKKLVHSVFDTADYTFPLQGNSFFVMTNFLKTEGQEQRLCPEYPTRRTLCSSDRGCKKGWMDPQSKGIQTGRCVVYEGNQKTCEVSAWCPIEAVEEAPRPALLNSAENFTVLIKNNIDFPGHNYTTRNILPGLNITCTFHKTQNPQCPIFRLGDIFRETGDNFSDVAIQGGIMGIEIYWDCNLDRWFHHCRPKYSFRRLDDKTTNVSLYPGYNFRYAKYYKENNVEKRTLIKVFGIRFDILVFGTGGKFDIIQLVVYIGSTLSYFGLVRDSLFHALGKWFGEGSD

SEQ ID NO: 19822 - protein, 310 aa, Homo sapiens
MSLRSGGRRRADPGADGEASRDDGATSSVSALKRLERSQWTDKMDLRFGFERLKEPGEKTGWLINMHPTEILDEDKRLGSAVDYYFIQDDGSRFKVALPYKPYFYIATRKGCEREVSSFLSKKFQGKIAKVETVPKEDLDLPNHLVGLKRNYIRLSFHTVEDLVKVRKEISPAVKKNREQDHASDAYTALLSSVLQRGGVITDEEETSKKIADQLDNIVDMREYDVPYHIRLSIDLKIHVAHWYNVRYRGNAFPVEITRRDDLVERPDPVVLAFDIETTKLPLKFPDAETDQIMMISYMIDGQGDCFRRY

SEQ ID NO: 19823 - protein, 324 aa, Homo sapiens
MSPHGDGRGQAQGRAVRVGLRRSGGIRGGVAVFAAVAAVFTFTLPPSVPGGDSGELITAAHELGVAHPPGYPLFTLVAKLAITLFPFGSIAYRVNLLCGLFGAVAASLLFFTVFRLSGSSAGGILAAGVFSFSRLTWQWSIAAEVFSLNNLFVGLLMALTVHFEEAATAKERSKVAKIGAFCCGLSLCNQHTIILYVLCIIPWILFQLLKKKELSLGSLLKLSLYFSAGLLPYVHLPISSYLNHARWTWGDQTTLQGFLTHFLREEYGTFSLAKSEIGSSMSEILLSQVTNMRTELSFNIQALAVCANICLATKWNDSGCRAMQ

SEQ ID NO: 19824 - protein, 1134 aa, Homo sapiens
MDGASAEQDGLQEDRSHSGPSSLPEAPLKPPGPLVPPDQQDKVQCAEVNRASTEGESPDGPGQGGLCQNGPTPPFPDPPSSLDPTTSPVGPDASPGVAGFHDNLRKSQGTSAEGSVRKEALQSLRLSLPMQETQLCSTDSPLPLEKEEQVRLQARKWLEEQLKQYRVKRQQERSSQPATKTRLFSTLDPELMLNPENLPRASTLAMTKEYSFLRTSVPRGPKVGSLGLPAHPREKKTSKSSKIRSLADYRTEDSNAGNSGGNVPAPDSTKGSLKQNRSSAASVVSEISLSPDTDDRLENTSLAGDSVSEVDGNDSDSSSYSSASTRGTYGILSKTVGTQDTPYMVNGQEIPADTLGQFPSIKDVLQAAAAEHQDQGQEVNGEVRSRRDSICSSVSLESSAAETQEEMLQVLKEKMRLEGQLEALSLEASQALKEKAELQAQLAALSTKLQAQVECSHSSQQRQDSLSSEVDTLKQSCWDLERAMTDLQNMLEAKNASLASSNNDLQVAEEQYQRLMAKVEDMQRSMLSKDNTVHDLRQQMTALQSQLQQVQLERTTLTSKLKASQAEISSLQSVRQWYQQQLALAQEARVRLQGEMAHIQVGQMTQAGLLEHLKLENVSLSQQLTETQHRSMKEKGRIAAQLQGIEADMLDQEAAFMQIQEAKTMVEEDLQRRLEEFEGERERLQRMADSAASLEQQLEQVKLTLLQRDQQLEALQQEHLDLMKQLTLTQEALQSREQSLDALQTHYDELQARLGELQGEAASREDTICLLQNEKIILEAALQAAKSGKEELDRGARRLEEGTEETSETLEKLREELAIKSGQVEHLQQETAALKKQMQKIKEQFLQQKVMVEAYRRDATSKDQLISELKATRKRLDSELKELRQELMQVHGEKRTAEAELSRLHREVAQVRQHMADLEGHLQSAQKERDEMETHLQSLQFDKEQMVAVTEANEALKKQIEELQQEARKAITEQKQKMRRLGSDLTSAQKEMKTKHKAYENAVGILSRRLQEALAAKEAADAELGQLRAQGGSSDSSLALHERIQALEAELQAVSHSKTLLEKELQEVIALTSQELEESREKVLELEDEVRPGHLLWRQRGAGHVSPGHAATRETRRTKLHRVPSVATFGVATF

SEQ ID NO: 19825 - protein, 457 aa, Homo sapiens
MAHNKIPPRWLNCPRRGQPVAGRFLPLKTMLGPRYDSQVAEENRFHPSMLSNYLKSLKVKMGLLVDLTNTSRFYDRNDIEKEGIKYIKLQCKGHGECPTTENTETFIRLCERFNERNPPELIGVHCTHGFNRTGFLICAFLVEKMDWSIEAAVATFAQARPPGIYKGDYLKELFRRYGDIEEAPPPPLLPDWCFEDDEDEDEDEDGKKESEPGSSASFGKRRKERLKLGAIFLEGVTVKGVTQVTTQPKLGEVQQKCHQFCGWEGSGFPGAQPVSMDKQNIKLLDLKPYKVSWKADGTRYMMLIDGTNEVFMIDRDNSVFHVSNLEFPFRKDLRMHLSNTLLDGEMIIDRVNGQAVPRYLIYDIIKFNSQPVGDCDFNVRLQCIEREIISPRHEKMKTGLIDKTQEPFSVRNKPFFDICTSRKKYKPGRCDDILKWKPPSLNSVDFRLKITRMGGEG

SEQ ID NO: 19826 - protein, 128 aa, Homo sapiens
MGFLQLLVVAVLASEHRVAGAAEVFGNSSEDPVPGGCNLEFDLDIDPNIYLEYNFFETTIKFAPANLGYARGVDPPPCDAGTDQDSRWRLQYDVYQYFLPENDLTEEMLLKHLQRMVSVPQVKASALK

SEQ ID NO: 19827 - protein, 117 aa, Homo sapiens
MSAFNLLHLVTKSQPVALRACGLPSGSCRDKKNCKVVFSQQELRKRLTPLQYHVTQEKGTESAFEGEYTHHKDPGIYKCVVCGTPLFKSETKFDSGSGWPSFHDVINSEAITFTDDF

SEQ ID NO: 19828 - protein, 428 aa, Homo sapiens
MLPRWELALYLLASLGFHFYSFYEVYKVSREHEEELDQEFELETDTLFGGLKKDATDFEWSFWMEWGKQWLVWLLLGHMVVSQMATLLARKRRWYKTENEYYLLQFTLTVRCLYYTSFSLELCWQQLPAASTSYSFPWMLAYVFYYPVLHNGPILSFSEFIKQMQQQEHDSLKASLCVLALGLGRLLCWWWLAELMAHLMYMHAIYSSIPLLETVSCWTLGGLALAQVLFFYVKYLVLFGVPALLMRLDGLTPPALPRCVSTMFSFTGMWRYFDVGLHNFLIRYVYIPVGGSQHGLLGTLFSTAMTFAFVSYWHGGYDYLWCWAALNWLGVTVENGVRRLVETPCIQDSLARYFSPQARRRFHAALASCSTSMLILSNLVFLGGNEVGKTYWNRIFIQGWPWVTLSVLGFLYCYSHVGIAWAQTYATD

SEQ ID NO: 19829 - protein, 351 aa, Homo sapiens
MLLILLSVALLALSSAQSLNEDVSQEESPSVISGKPEGRRPQGGNQPQRTPPPPGKPEGRPPQGGNQSQGPPPRPGKPEGPPPQGGNQSQGPPPRPGKPEGQPPQGGNQSQGPPPRPGKPEGPPPQGGNQSQGPPPRPGKPEGPPPQGGNQSQGPPPRPGKPEGPPPQGGNQSQGPPPHPGKPEGPPPQGGNQSQGPPPRPGKPEGPPPQGGNQSQGPPPRPGKPEGPPPQGGNKPQGPPPRPGKPEGPPPQGGNQSQGPPPRPGKPEGPPSQGGNKPQGPPPHPGKPQGPPPQEGNKPQRPPPPGRPQGPPPPGGNPQQPLPPPAGKPQGPPPPPQGGRPHRPPQGQPPQ

SEQ ID NO: 19830 - protein, 541 aa, Homo sapiens
MVSYWDTGVLLCALLSCLLLTGSSSGSKLKDPELSLKGTQHIMQAGQTLHLQCRGEAAHKWSLPEMVSKESERLSITKSACGRNGKQFCSTLTLNTAQANHTGFYSCKYLAVPTSKKKETESAIYIFISDTGRPFVEMYSEIPEIIHMTEGRELVIPCRVTSPNITVTLKKFPLDTLIPDGKRIIWDSRKGFIISNATYKEIGLLTCEATVNGHLYKTNYLTHRQTNTIIDVQISTPRPVKLLRGHTLVLNCTATTPLNTRVQMTWSYPDEKNKRASVRRRIDQSNSHANIFYSVLTIDKMQNKDKGLYTCRVRSGPSFKSVNTSVHIYDKAFITVKHRKQQVLETVAGKRSYRLSMKVKAFPSPEVVWLKDGLPATEKSARYLTRGYSLIIKDVTEEDAGNYTILLSIKQSNVFKNLTATLIVNVKPQIYEKAVSSFPDPALYPLGSRQILTCTAYGIPQPTIKWFWHPCNHNHSEARCDFCSNNEESFILDADSNMGNRIESITQRMAIIEGKNKLPPANSSFMLPPTSFSSNYFHFLP

SEQ ID NO: 19831 - protein, 2365 aa, Homo sapiens
YPNPISTHSGPQDIKWEIIHEVIPFLDKILSQNSTEIGSFLKMVICLTLEALWKNLKKDNWNVSNVLMTFTQHPNNLLKTIETVLEASSGIKSDYEGDLNKSLYFDTPLSQNITHHQLEKAIHNVLSRIALWRKGLLFNNSEWITSTRTLFQPLFEIFIKATTGKNVTSEKEERTKKEMIDFPYSFKPFFCLEKYLGGLFVLTKYWQQIPLTDQSVVEICEVFQQTVKPSEAMEMLQKVKMMVVRVLTIVAENPSWTKDILCATLSCKQNGIRHLILSAIQGVTLAQDHFQEIEKIWSSPNQLNCESLSKNLSSTLESFKSSLENATGQDCTSQPRLETVQQHLYMLAKSLEETWSSGNPIMTFLSNFTVTEDVKIKDLMKNITKLTEELRSSIQISNETIHSILEANISHSKVLFSALTVALSGKCDQEILHLLLTFPKGEKSWIAAEELCSLPGSKVYSLIVLLSRNLDVRAFIYKTLMPSEANGLLNSLLDIVSSLSALLAKAQHVFEYLPEFLHTFKITALLETLDFQQVSQNVQARSSAFGSFQFVMKMVCKDQASFLSDSNMFINLPRVKELLEDDKEKFNIPEDSTPFCLKLYQEILQLPNGALVWTFLKPILHGKILYTPNTPEINKVIQKANYTFYIVDKLKTLSETLLEMSSLFQRSGSGQMFNQLQEALRNKFVRNFVENQLHIDVDKLTEKLQTYGGLLDEMFNHAGAGRFRFLGSILVNLSSCVALNRFQALQSVDILETKAHELLQQNSFLASIIFSNSLFDKNFRSESVKLPPHVSYTIRTNVLYSVRTDVVKNPSWKFHPQNLPADGFKYNYVFAPLQDMIERAIILVQTGQEALEPAAQTQAAPYPCHTSDLFLNNVGFFFPLIMMLTWMVSVASMVRKLVYEQEIQIEEYMRMMGVHPVIHFLAWFLENMAVLTISSATLAIVLKTSGIFAHSNTFIVFLFLLDFGMSVVMLSYLLSAFFSQANTAALCTSLVYMISFLPYIVLLVLHNQLSFVNQTFLCLLSTTAFGQGVFFITFLEGQETGIQWNNMYQALEQGGMTFGWVCWMILFDSSLYFLCGWYLSNLIPGTFGLRKPWYFPFTASYWKSVGFLVEKRQYFLSSSLFFFNENFDNKGSSLQNREGELEGSAPGVTLVSVTKEYEGHKAVVQDLSLTFYRDQITALLGTNGAGKTTIISMLTGLHPPTSGTIIINGKNLQTDLSRVRMELGVCPQQDILLDNLTVREHLLLFASIKAPQWTKKELHQQVNQTLQDVDLTQHQHKQTRALSGGLKRKLSLGIAFMGMSRTVVLDEPTSGVDPCSRHSLWDILLKYREGRTIIFTTHHLDEAEALSDRVAVLQHGRLRCCGPPFCLKEAYGQGLRLTLTRQPSVLEAHDLKDMACVTSLIKIYIPQAFLKDSSGSELTYTIPKDTDKACLKGLFQALDENLHQLHLTGYGISDTTLEEVFLMLLQDSNKKSHIALGTESELQNHRPTGHLSGYCGSLARPATVQGVQLLRAQVAAILARRLRRTLRAGKSTLADLLLPVLFVALAMGLFMVRPLATEYPPLRLTPGHYQRAETYFFSSSGGDNLDLTRVLLRKFRDQDLPCADLNPRQKNSSCWRTDPFSHPEFQDSCGCLKCPNRSASAPYLTNHLGHTLLNLSGFNMEEYLLAPSEKPRLGGWSFGLKIPSEAGGANGNISKPPTLAKVWYNQKGFHSLPSYLNHLNNLILWQHLPPTVDWRQYGITLYSHPYGGALLNEDKILESIRQCGVALCIVLGFSILSASIGSSVVRDRVIGAKRLQHISGLGYRMYWFTNFLYDMLFYLVSVCLCVAVIVAFQLTAFTFRKNLAATALLLSLFGYATLPWMYLMSRIFSSSDVAFISYVSLNFIFGLCTMLITIMPRLLAIISKAKNLQNIYDVLKWVFTIFPQFCLGQGLVELCYNQIKYDLTHNFGIDSYVSPFEMNFLGWIFVQLASQGTVLLLLRVLLHWDLLRWPRGHSTLQGTVKSSKDTDVEKEEKRVFEGRTNGDILVLYNLSKHYRRFFQNIIAVQDISLGIPKGECFGLLGVNGAGKSTTFKMLNGEVSLTSGHAIIRTPMGDAVDLSSAGTAGVLIGYCPQQDALDELLTGWEHLYYYCSLRGIPRQCIPEVAGDLIRRLHLEAHADKPVATYSGGTKRKLSTALALVGKPDILLLDEPSSGMDPCSKRYLWQTIMKEVREGCAAVLTSHSMEECEALCTRLAIMVNGSFKCLGSPQHIKNRFGDGYTVKVWLCKEANQHCTVSDHLKLYFPGIQFKGQHLNLLEYHVPKRWGCLADLFKVIENNKTFLNIKHYSINQTTLEQVFINFASEQQQTLQSTLDPSTDSHHTHHLPI

SEQ ID NO: 19832 - protein, 546 aa, Homo sapiens
MAESAGASSFFPLVVLLLAGSGGSGPRGVQALLCACTSCLQANYTCETDGACMVSIFNLDGMEHHVRTCIPKVELVPAGKPFYCLSSEDLRNTHCCYTDYCNRIDLRVPSGHLKEPEHPSMWGPVELVGIIAGPVFLLFLIIIIVFLVINYHQRVYHNRQRLDMEDPSCEMCLSKDKTLQDLVYDLSTSGSGSGLPLFVQRTVARTIVLQEIIGKGRFGEVWRGRWRGGDVAVKIFSSREERSWFREAEIYQTVMLRHENILGFIAADNKADCSFLTLPWEVVMVSAAPKLRSLRLQYKGGRGRARFLFPLNNGTWTQLWLVSDYHEHGSLFDYLNRYTVTIEGMIKLALSAASGLAHLHMEIVGTQGKPGIAHRDLKSKNILVKKNGMCAIADLGLAVRHDAVTDTIDIAPNQRVGTKRYMAPEVLDETINMKHFDSFKCADIYALGLVYWEIARRCNSGGVHEEYQLPYYDLVPSDPSIEEMRKVVCDQKLRPNIPNWWQSYEALRVMGKMMRECWYANGAARLTALRIKKTLSQLSVQEDVKI

SEQ ID NO: 19833 - protein, 911 aa, Homo sapiens
MKRIFSCSSTQCVKVLLQHGANEDAVDAENRSPLHWAASSGCASSVLLLCDHEAFLDVLDNDGRTPLMIASLGGHAAICSQLLQRGARVNVTDKNDKSALILACEKGSAEVAELLLSHGADAGAVDSTGHDALHYALHTQDKALWRHLQQALSRRRRGGQRLVQHPDLASQASPSEPQAGSPPKSSWRAEPEEEQEEKEDEDPCSEEWRWKYEEERRKVVRLEQELVQKTEECKTQAAAYLDLENQIREQAQELGVLLSWEPRASGKQGSSLRPGGDGMEQGCPKDLLAESTQELKKQQQAAATVNPVLAPKKAEDSAPGKIQYEVHGRSQPEEQGPPQSPASETIRKATGQQLTTNGAQTFGPDHADQLPAGQKESSQVLGVEPGGTVAEPVGPAAMNQLLLQLREELAAVWREKDAARGALSRPVMEGALGTPRAEAAAAAWEKMEARLERVLARLEWAKAGLQVKPEVPSQESREGALKAAPGSIKQDEEKEKRVPGAQGEPLGALGGEKALGGLAKGQLEKEMSVLRLSNSNLLEELGELGRERQRLQRELQSLSQRLQREFVPKPQAQVQLQQLRQSVGLLTNELAMEKEATEKLRKLLASQSSGLRGLWDCLPADLVGERSAQSKAAESLEELRACISTLVDRHREAQQVLARLQEENQQLRGSLSPCREPGTSLKAPASPQVAALEQDLGKLEEELRAVQATMSGKSQEIGKLKQLLYQATEEVAELRAREAASLRQHEKTRGSLVAQAQAWGQELKALLEKYNTACREVGRLREAVAEERRRSGDLAAQAAEQERQASEMRGRSEQFEKTAELLKEKMEHLIGACRDKEAKIKELLKKLEQLSEEVLAIRGENARLALQLQDSQKNHEEIISTYRNHLLNAARGYMEHEVYNILLQILSMEEE

SEQ ID NO: 19834 - protein, 868 aa, Homo sapiens
MGPAGAKNLQSVVLSKMNFESFVKDLLLVRQYRVEVYKNRAGNKASKENDWYLAYKASPGNLSQFEDILFGNNDMSASIGVVGVKMSAVDGQRQVGVGYVDSIQRKLGLCEFPDNDQFSNLEALLIQIGPKECVLPGGETAGDMGKLRQIIQRGGILITERKKADFSTKDIYQDLNRLLKGKKGEQMNSAVLPEMENQVAVSSLSAVIKFLELLSDDSNFGQFELTTFDFSQYMKLDIAAVRALNLFQGSVEDTTGSQSLAALLNKCKTPQGQRLVNQWIKQPLMDKNRIEERLNLVEAFVEDAELRQTLQEDLLRRFPDLNRLAKKFQRQAANLQDCYRLYQGINQLPNVIQALEKHEGKHQKLLLAVFVTPLTDLRSDFSKFQEMIETTLDMDQVENHEFLVKPSFDPNLSELREIMNDLEKKMQSTLISAARDLGLDPGKQIKLDSSAQFGYYFRVTCKEEKVLRNNKNFSTVDIQKNGVKFTNSKLTSLNEEYTKNKTEYEEAQDAIVKEIVNISSGYVEPMQTLNDVLAQLDAVVSFAHVSNGAPVPYVRPAILEKGQGRIILKASRHACVEVQDEIAFIPNDVYFEKDKQMFHIITGPNMGGKSTYIRQTGVIVLMAQIGCFVPCESAEVSIVDCILARVGAGDSQLKGVSTFMAEMLETASILRSATKDSLIIIDELGRGTSTYDGFGLAWAISEYIATKIGAFCMFATHFHELTALANQIPTVNNLHVTALTTEETLTMLYQVKKGVCDQSFGIHVAELANFPKHVIECAKQKALELEEFQYIGESQGYDIMEPAAKKCYLEREQGEKIIQEFLSKVKQMPFTEMSEENITIKLKQLKAEVIAKNNSFVNEIISRIKVTT

SEQ ID NO: 19835 - protein, 498 aa, Homo sapiens
MAEGEDMQTFTSIMDALVRISTSMKNMEKELLCPVCQEMYKQPLVLPCTHNVCQACAREVLGQQGYIGHGGDPSSEPTSPASTPSTRSPRLSRRTLPKPDRLDRLLKSGFGTYPGRKRGALHPQVIMFPCPACQGDVELGERGLAGLFRNLTLERVVERYRQSVSVGGAILCQLCKPPPLEATKGCTECRATFCNECFKLFHPWGTQKAQHEPTLPTLSFRPKGLMCPDHKEEVTHYCKTCQRLVCQLCRVRRTHSGHKITPVLSAYQALKDKLTKSLTYILGNQDTVQTQICELEEAVRHTEVSGQQAKEEVSQLVRGLGAVLEEKRASLLQAIEECQQERLARLSAQIQEHRSLLDGSGLVGYAQEVLKETDQPCFVQAAKQLHNRIARATEALQTFRPAASSSFRHCQLDVGREMKLLTELNFLRGCGHRGLCSGAPQCLRPPSLTPSAPLPMIRSSCAGGCPPIHHLPGTIPLSSGARMCLLSQAPPAGSGGRR

SEQ ID NO: 19836 - protein, 423 aa, Homo sapiens
MRRHMVTYAWQLLKKELGLYQLAMDIIIMIRVCKMFRQGLRGFREYQIIETAHWKHPIFSFWDKKMQSRVTFDTMDFIAEEGHFPPKAIQIMQKKPSWRTEDEIQAVCNILQVLDSYRNYAEPLQLLLAKVMRFERFGRRRVIIKKGQKGNSFYFIYLGTVAITKDEDGSSAFLDPHPKLLHKGSCFGEMDVLHASVRRSTIVCMEETEFLVVDREDFFANKLDQEVQKDAQYRFEFFRKMELFASWSDEKLWQLVAMAKIERFSYGQLISKDFGESPFIMFISKGSCEVLRLLDLGASPSYRRWIWQHLELIDGRPLKTHLSEYSPMERFKEFQIKSYPLQDFSSLKLPHLKKAWGLQGTSFSRKIRTSGDTLPKMLGPKIQSRPAQSIKCAMINIKPGELPKEAAVGAYVKVHTVEQGEIL

SEQ ID NO: 19837 - protein, 920 aa, Homo sapiens
MAEPSAATQSHSISSSSFGAEPSAPGGGGSPGACPALGTKSCSSSCAASFPEHPAFLSKKIGQVEEQIDKETKNPNGVSSREAKTALDADDRFTLLTAQKPPTEYSKVEGIYTYSLSPSKVSGDDVIEKDSPESPFEVIIDKAAFDKEFKDSYKESTDDFGSWSVHTDKESSEDISETNDKLFPLRNKEAGRYPMSALLSRQFSHTNAALEEVSRCVNDMHNFTNEILTWDLVPQVKQQTDKSSDCITKTTGLDMSEYNSEIPVVNLKTSTHQKTPVCSIDGSTPITKSTGDWAEASLQQENAITGKPVPDSLNSTKEFSIKGVQGNMQKQDDTLAELPGSPPEKCDSLGSGVATVKVVLPDDHLKDEMDWQSSALGEITEADSSGESDDTVIEDITADTSFENNKIQAEKPVSIPSAVVKTGEREIKEIPSCEREEKTSKNFEELVSDSELHQDQPDILGRSPASEAACSKVPDTNVSLEDVSEVAPEKPITTENPKLPSTVSPNVFNETEFSLNVTTSAYLESLHGKNVKHIDDSSPEDLIAAFTETRDKGIVDSERNAFKAISEKMTDFKTTPPVEVLHENESGGSEIKDIGSKYSEQSKETNGSEPLGVFPTQGTPVASLDLEQEQLTIKALKELGERQVEKSTSAQRDAELPSEEVLKQTFTFAPESWPQRSYDILERNVKNGSDLGISQKPITIRETTRVDAVSSLSKTELVKKHVLARLLTDFSVHDLIFWRDVKKTGFVFGTTLIMLLSLAAFSVISVVSYLILALLSVTISFRIYKSVIQAVQKSEEGHPFKAYLDVDITLSSEAFHNYMNAAMVHINRALKLIIRLFLVEDLVDSLKLAVFMWLMTYVGAVFNGITLLILAELLIFSVPIVYEKYKTQIDHYVGIARDQTKSIVEKIQAKLPGIAKKKAE

SEQ ID NO: 19838 - protein, 678 aa, Homo sapiens [sequence omitted]

SEQ ID NO: 19839 - protein, 1932 aa, Homo sapiens
MELTPASSLTCSLLSPRLPGSFPQLRRVPPCSRPWLPKAPVMARWPPFGLCLLLLLLSPPPLPLTGAHRFSAPNTTLNHLALAPGRGTLYVGAVNRLFQLSPELQLEAVAVTGPVIDSPDCVPFRDPAECPQAQLTDNANQLLLVSSRAQELVACGQVRQGVCETRRLGDVAEVLYQAEDPGDGQFVAANTPGVATVGLVVPLPGRDLLLVARGLAGKLSAGVPPLAIRQLAGSQPFSSEGLGRLVVGDFSDYNNSYVGAFADARSAYFVFRRRGARAQAEYRSYVARVCLGDTNLYSYVEVPLACQGQGLIQAAFLAPGTLLGVFAAGPRGTQAALCAFPMVELGASMEQARRLCYTAGGRGPSGAEEATVEYGVTSRCVTLPLDSPESYPCGDEHTPSPIAGRQPLEVQPLLKLGQPVSAVAALQADGHMIAFLGDTQGQLYKVFLHGSQGQVYHSQQVGPPGSAISPDLLLDSSGSHLYVLTAHQVDRIPVAACPQFPDCASCLQAQDPLCGWCVLQGRCTRKGQCGRAGQLNQWLWSYEEDSHCLHIQSLLPGHHPRQEQGQVTLSVPRLPILDADEYFHCAFGDYDSLAHVEGPHVACVTPPQDQVPLNPPGTDHVTVPLALMFEDVTVAATNFSFYDCSAVQALEAAAPCRACVGSIWRCHWCPQSSHCVYGEHCPEGERTIYSAQEVDIQVRGPGACPQVEGLAGPHLVPVGWESHLALRVRNLQHFRGLPASFHCWLELPGELRGLPATLEETAGDSGLIHCQAHQFYPSMSQRELPVPIYVTQGEAQRLDNTHALYVILYDCAMGHPDCSHCQAANRSLGCLWCADGQPACRYGPLCPPGAVELLCPAPSIDAVEPLTGPPEGGLALTILGSNLGRAFADVQYAVSVASRPCNPEPSLYRTSARIVCVTSPAPNGTTGPVRVAIKSQPPGISSQHFTYQDPVLLSLSPRWGPQAGGTQLTIRGQHLQTGGNTSAFVGGQPCPILEPVCPEAIVCRTRPQAAPGEAAVLVVFGHAQRTLLASPFRYTANPQLVAAEPSASFRGGGRLIRVRGTGLDVVQRPLLSVWLEADAEVQASRAQPQDPQPRRSCGAPAADPQACIQLGGGLLQCSTVCSVNSSSLLLCRSPAVPDRAHPQRVFFTLDNVQVDFASASGGQGFLYQPNPRLAPLSREGPARPYRLKPGHVLDVEGEGLNLGISKEEVRVHIGRGECLVKTLTRTHLYCEPPAHAPQPANGSGLPQFVVQMGNVQLALGPVQYEAEPPLSAFPVEAQAGVGMGAAVLIAAVLLLTLMYRHKSKQALRDYQKVLVQLESLETGVGDQCRKEFTDLMTEMTDLSSDLEGSGIPFLDYRTYAERAFFPGHGGCPLQPKPEGPGEDGHCATVRQGLTQLSNLLNSKLFLLTLIHTLEEQPSFSQRDRCHVASLLSLALHGKLEYLTDIMRTLLGDLAAHYVHRNPKLMLRRTETMVEKLLTNWLSICLYAFLREVAGEPLYMLFRAIQYQVDKGPVDAVTGKAKRTLNDSRLLREDVEFQPLTLMVLVGPGAGGAAGSSEMQRVPARVLDTDTITQVKEKVLDQVYKGTPFSQRPSVHALDLEWRSGLAGHLTLSDEDLTSVTQNHWKRLNTLQHYKVPDGATVGLVPQLHRGSTISQSLAQRCPLGENIPTLEDGEEGGVCLWHLVKATEEPEGAKVRCSSLREREPARAKAIPEIYLTRLLSMKGTLQKFVDDTFQAILSVNRPIPIAVKYLFDLLDELAEKHGIEDPGTLHIWKTNSLLLRFWVNALKNPQLIFDVRVSDNVDAILAVIAQTFIDSCTTSEHKVGRDSPVNKLLYAREIPRYKQMVERYYADIRQSSPASYQEMNSALAELSGNYTSAPHCLEALQELYNHIHRYYDQIISALEEDPVGQKLQLACRLQQVAALVENKVTDL

SEQ ID NO: 19840 - protein, 811 aa, Homo sapiens
MADSSEGPRAGPGEVAELPGDESGTPGGEAFPLSSLANLFEGEDGSLSPSPADASRPAGPGDGRPNLRMKFQGAFRKGVPNPIDLLESTLYESSVVPGPKKAPMDSLFDYGTYRHHSSDNKRWRKKIIEKQPQSPKAPAPQPPPILKVFNRPILFDIVSRGSTADLDGLLPFLLTHKKRLTDEEFREPSTGKTCLPKALLNLSNGRNDTIPVLLDIAERTGNMREFINSPFRDIYYRGQTALHIAIERRCKHYVELLVAQGADVHAQARGRFFQPKDEGGYFYFGELPLSLAACTNQPHIVNYLTENPHKKADMRRQDSRGNTVLHALVAIADNTRENTKFVTKMYDLLLLKCARLFPDSNLEAVLNNDGLSPLMMAAKTGKIGNRHEMLAVEPINELLRDKWRKFGAVSFYINVVSYLCAMVIFTLTAYYQPLEGTPPYPYRTTVDYLRLAGEVITLFTGVLFFFTNIKDLFMKKCPGVNSLFIDGSFQLLYFIYSVLVIVSAALYLAGIEAYLAVMVFALVLGWMNALYFTRGLKLTGTYSIMIQKILFKDLFRFLLVYLLFMIGYASALVSLLNPCANMKVCNEDQTNCTVPTYPSCRDSETFSTFLLDLFKLTIGMGDLEMLSSTKYPVVFIILLVTYIILTFVLLLNMLIALMGETVGQVSKESKHIWKLQWATTILDIERSFPVFLRKAFRSGEMVTVGKSSDGTPDRRWCFRVDEVNWSHWNQNLGIINEDPGKNETYQYYGFSHTVGRLRRDRWSSVVPRVVELNKNSNPDEVVVPLDSMGNPRCDGHQQGYPRKWRTDDAPL

SEQ ID NO: 19841 - protein, 1120 aa, Homo sapiens
MYGSARSVGKVEPSSQSPGRSPRLPRSPRLGHRRTNSTGGSSGSSVGGGSGKTLSMENIQSLNAAYATSGPMYLSDHENVGSETPKSTMTLGRSGGRLPYGVRMTAMGSSPNIASSGVASDTIAFGEHHLPPVSMASTVPHSLRQARDNTIMDLQTQLKEVLRENDLLRKDVEVKESKLSSSMNSIKTFWSPELKKERALRKDEASKITIWKEQYRVVQEENQHMQMTIQALQDELRIQRDLNQLFQQDSSSRTGEPCVAELTEENFQRLHAEHERQAKELFLLRKTLEEMELRIETQKQTLNARDESIKKLLEMLQSKGLSAKATEEDHERTRRLAEAEMHVHHLESLLEQKEKENSMLREEMHRRFENAPDSAKTKALQTVIEMKDSKISSMERGLRDLEEEIQMLKSNGALSTEEREEEMKQMEVYRSHSKFMKNKVEQLKEELSSKEAQWEELKKKAAGLQAEIGQVKQELSRKDTELLALQTKLETLTNQFSDSKQHIEVLKESLTAKEQRAAILQTEVDALRLRLEEKETMLNKKTKQIQDMAEEKGTQAGEIHDLKDMLDVKERKVNVLQKKIENLQEQLRDKEKQMSSLKERVKSLQADTTNTDTALTTLEEALAEKERTIERLKEQRDRDEREKQEEIDNYKKDLKDLKEKVSLLQGDLSEKEASLLDLKEHASSLASSGLKKDSRLKTLEIALEQKKEECLKMESQLKKAHEAALEARASPEMSDRIQHLEREITRYKDESSKAQAEVDRLLEILKEVENEKNDKDKKIAELESLTSRQVKDQNKKVANLKHKEQVEKKKSAQMLEEARRREDNLNDSSQQLQDSLRKKDDRIEELEEALRESVQITAEREMVLAQEESARTNAEKQVEELLMAMEKVKQELESMKAKLSSTQQSLAEKETHLTNLRAERRKHLEEVLEMKQEALLAAISEKDANIALLELSSSKKKTQEEVAALKREKDRLVQQLKQQTQNRMKLMADNYEDDHFKSSHSNQTNHKPSPDQIIQPLLELDQNRSKLKLYIGHLTTLCHDRDPLILRGLTPPASYNLDDDQAAWENELQKMTRGQLQDELEKGERDNAELQEFANAILQQIADHCPDILEQVVNALEESS

SEQ ID NO: 19842 - protein, 471 aa, Homo sapiens
MPLMMSEEGFENEESDYHTLPRARIMQRKRGLEWFVCDGWKFLCTSCCGWLINICRRKKELKARTVWLGCPEKCEEKHPRNSIKNQKYNVFTFIPGVLYEQFKFFLNLYFLVISCSQFVPALKIGYLYTYWAPLGFVLAVTMTREAIDEFRRFQRDKEVNSQLYSKLTVRGKVQVKSSDIQVGDLIIVEKNQRIPSDMVFLRTSEKAGSCFIRTDQLDGETDWKLKVAVSCTQQLPALGDLFSISAYVYAQKPQMDIHSFEGTFTREDSDPPIHESLSIENTLWASTIVASGTVIGVVIYTGKETRSVMNTSNPKNKVGLLDLELNRLTKALFLALVALSIVMVTLQGFVGPWYRNLFRFLLLFSYIIPISLRVNLDMGKAVYGWMMMKDENIPGTVVRTSTIPEELGRLVYLLTDKTGASPLLFFLFLYCQNCISILKQLEFLLKMSPNYFTITVKGSSYSGILRIRLKV

SEQ ID NO: 19843 - protein, 1274 aa, Homo sapiens
MPEPGKKPVSAFSKKPRSVEVAAGSPAVFEAETERAGVKVRWQRGGSDISASNKYGLATEGTRHTLTVREVGPADQGSYAVIAGSSKVKFDLKVIEAEKAEPMLAPAPAPAEATGAPGEAPAPAAELGESAPSPKGSSSAALNGPTPGAPDDPIGLFVMRPQDGEVTVGGSITFSARVAGASLLKPPVVKWFKGKWVDLSSKVGQHLQLHDSYDRASKVYLFELHITDAQPAFTGSYRCEVSTKDKFDCSNFNLTVHEAMGTGDLDLLSAFRRTSLAGGGRRISDSHEDTGILDFSSLLKKRDSFRTPRDSKLEAPAEEDVWEILRQAPPSEYERIAFQYGVTDLRGMLKRLKGMRRDEKKSTAFQKKLEPAYQVSKGHKIRLTVELADHDAEVKWLKNGQEIQMSGSKYIFESIGAKRTLTISQCSLADDAAYQCVVGGEKCSTELFVKEPPVLITRPLEDQLVMVGQRVEFECEVSEEGAQVKWLKDGVELTREETFKYRFKKDGQRHHLIINEAMLEDAGHYALCTSGGQALAELIVQEKKLEVYQSIADLMVGAKDQAVFKCEVSDENVRGVWLKNGKELVPDSRIKVSHIGRVHKLTIDDVTPADEADYSFVPEGFACNLSAKLHFMEVKIDFVPRQEPPKIHLDCPGRIPDTIVVVAGNKLRLDVPISGDPAPTVIWQKAITQGNKAPARPAPDAPEDTGDSDEWVFDKKLLCETEGRVRVETTKDRSIFTVEGAEKEDEGVYTVTVKNPVGEDQVNLTVKVIDVPDAPAAPKISNVGEDSCTVQWEPPAYDGGQPILGYILERKKKKSYRWMRLNFDLIQELSHEARRMIEGVVYEMRVYAVNAIGMSRPSPASQPFMPIGPPSEPTHLAVEDVSDTTVSLKWRPPERVGAGGLDGYSVEYCPEGCSEWVAALQGLTEHTSILVKDLPTGARLLFRVRAHNMAGPGAPVTTTEPVTVQEILQRPRLQLPRHLRQTIQKKVGEPVNLLIPFQGKPRPQVTWTKEGQPLAGEEVSIRNSPTDTILFIRAARRVHSGTYQVTVRIENMEDKATLVLQVVDKPSPPQDLRVTDAWGLNVALEWKPPQDVGNTELWGYTVQKADKKTMEWFTVLEHYRRTHCVVPELIIGNGYYFRVFSQNMVGFSDRAATTKEPVFIPRPGITYEPPNYKALDFSEAPSFTQPLVNRSVIAGYTAMLCCAVRGSPKPKISWFKNGLDLGEDARFRMFSKQGVLTLEIRKPCPFDGGIYVCRATNLQGEARCECRLEVRVPQ

SEQ ID NO: 19844 - protein, 498 aa, Homo sapiens
MAAAAPVAADDDERRRRPGADSISSYEAQITALKQERQQQQQDCEEKERELGRLKQLLSRAYPLDSLEKQMEKAHEDSEKLREIVLPMEKEIEELKAKLLRAEELIQEIQRRPRHAPSLHGSTELLPLSRDPSPPLEPLEELSGDGGPAAEAFAHNCDDSASISSFSLGGGVGSSSSLPQSRQGLSPEQEETASLVSTGTLVPEGIYLPPPGYQLVPDTQWEQLQTEGRQLQKDLESVSRERDELQEGLRRSNEDCAKQMQVLLAQVQNSEQLLRTLQGTVSQAQERVQLQMAELVTTHKCLHHEVKRLNEENQGLRAEQLPSSAPQGSQQEQGEEESLPSSVPELQQLLCCTRQEARARLQAQEHGAERLRIEIVTLREALEEETVARASLEGQLRVQREETEVLEASLCSLRTEMERVQQEQSKAQLPDLLSEQRAKVLRLQAELETSEQVQRDFVRLSQALQVRLERIRQAETLEQVRSIMDEAPLTDVRDIKDT

SEQ ID NO: 19845 - protein, 404 aa, Homo sapiens
MPGLMRMRERYSASKPLKGARIAGCLHMTVETAVLIETLVTLGAEVQWSSCNIFSTQDHAAAAIAKAGIPVYAWKGETDEEYLWCIEQTLYFKDGPLNMILDDGGDLTNLIHTKYPQLLPGIRGISEETTTGVHNLYKMMANGILKVPAINVNDSVTKSKFDNLYGCRESLIDGIKRATDVMIAGKVAVVAGYGDVGKGCAQALRGFGARVIITEIDPINALQAAMEGYEVTTMDEACQEGNIFVTTTGCIDIILGRHFEQMKDDAIVCNIGHFDVEIDVKWLNENAVEKVNIKPQVDRYRLKNGRRIILLAEGRLVNLGCAMGHPSFVMSNSFTNQVMAQIELWTHPDKYPVGVHFLPKKLDEAVAEAHLGKLNVKLTKLTEKQAQYLGMSCDGPFKPDHYRY

SEQ ID NO: 19846 - protein, 143 aa, Homo sapiens
MAAEDVVATGADPSDLESGGLLHEIFTSPLNLLLLGLCIFLLYKIVRGDQPAASGDSDDDEPPPLPRLKRRDFTPAELRRFDGVQDPRILMAINGKVFDVTKGRKFYGPVKYHHVGKLLKEGEEPTVYSDEEEPKDESARKND

SEQ ID NO: 19847 - protein, 495 aa, Homo sapiens
MKAFGPPHEGPLQGLVASRIETYGGRHRASAQSTAGRLYPRGYPVLDPSRRRLQQYVPFARGSGQARGLSPMRLRDPEPEKRHGGHVGAGLLHSPKLKELTKAHELEVRLHTFSMFGMPRLPPEDRRHWEIGEGGDSGLTIEKSWRELVPGHKEMSQELCHQQEALWELLTTELIYVRKLKIMTDLLAAGLLNLQRVGLLMEVSAETLFGNVPSLIRTHRSFWDEVLGPTLEETRASGQPLDPIGLQSGFLTFGQRFHPYVQYCLRVKQTMAYAREQQETNPLFHAFVQWCEKHKRSGRQMLCDLLIKPHQRITKYPLLLHAVLKRSPEARAQEALNAMIEAVESFLRHINGQVRQGEEQESLAAAAQRIGPYEVLEPPSDEVEKNLRPFSTLDLTSPMLGVASEHTRQLLLEGPVRVKEGREGKLDVYLFLFSDVLLVTKPQRKADKAKVIRPPLMLEKLVCQPLRDPSTSFLQGVFSSPSSQRGEGGAGTEIK

SEQ ID NO: 19848 - protein, 888 aa, Homo sapiens
MQRSIMAALKEWNGVVSESDSPVKRPGRKAARVLGSEGEEEDEALSPAKGQKPALDCSQVSPPRPATSPENNASLSDTSPMDSSPSGIPKRRTARKQLPKRTIQEVLEEQSEDEDREAKRKKEEEEETPKESLTEAEVATEKEGEDGDQPTTPPKPLKTSKAETPTESVSEPEVATKQELQEEEEQTKPPRRAPKTLSSFFTPRKPAVKKEVKEEEPGAPGKEGAAEGPLDPSGYNPAKNNYHPVEDACWKPGQKVPYLAVARTFEKIEEVSARLRMVETLSNLLRSVVALSPPDLLPVLYLSLNHLGPPQQGLELGVGDGVLLKAVAQATGRQLESVRAEAAEKGDVGLVAENSRSTQRLMLPPPPLTASGVFSKFRDIARLTGSASTAKKIDIIKGLFVACRHSEARFIARSLSGRLRLGLAEQSVLAALSQAVSLTPPGQEFPPAMVDAGKGKTAEARKTWLEEQGMILKQTFCEVPDLDRIIPVLLEHGLERLPEHCKLSPGIPLKPMLAHPTRGISEVLKRFEEAAFTCEYKYDGQRAQIHALEGGEVKIFSRNQEDNTGKYPDIISRIPKIKLPSVTSFILDTEAVAWDREKKQIQPFQVLTTRKRKEVDASEIQVQVCLYAFDLIYLNGESLVREPLSRRRQLLRENFVETEGEFVFATSLDTKDIEQIAEFLEQSVKDSCEGLMVKTLDVDATYEIAKRSHNWLKLKKDYLDGVGDTLDLVVIGAYLGRGKRAGRYGGFLLASYDEDSEELQAICKLGTGFSDEELEEHHQSLKALVLPSPRPYVRIDGAVIPDHWLDPSAVWEVKCADLSLSPIYPAARGLVDSDKGISLRFPRFIRVREDKQPEQATTSAQVACLYRKQSQIQNQQGEDSGSDPEDTY

SEQ ID NO: 19849 - protein, 1134 aa, Homo sapiens
MPEPTKKEEPSKEKEAGTTPAKDWTLVETPPGEEQAKQNANSQLSILFIEKPQGGTVKVGEDITFIAKVKAEDLLRKPTIKWFKGKWMDLASKAGKHLQLKETFERHSRVYTFEMQIIKAKDNFAGNYRCEVTYKDKFDSCSFDLEVHESTGTTPNIDIRSAFKRSGEGQEDAGELDFSGLLKRREVKQQEEEPQVDVWELLKNAKPSEYEKIAFQYGITDLRGMLKRLKRMRREEKKSAAFAKILDPAYQVDKGGRVRFVVELADPKLEVKWYKNGQEIRPSTKYIFEHKGCQRILFINNCQMTDDSEYYVTAGDEKCSTELFVREPPIMVTKQLEDTTAYCGERVELECEVSEDDANVKWFKNGEEIIPGPKSRYRIRVEGKKHILIIEGATKADAAEYSVMTTGGQSSAKLSVDLKPLKILTPLTDQTVNLGKEICLKCEISENIPGKWTKNGLPVQESDRLKVVHKGRIHKLVIANALTEDEGDYVFAPDAYNVTLPAKVHVIDPPKIILDGLDADNTVTVIAGNKLRLEIPISGEPPPKAMWSRGDKAIMEGSGRIRTESYPDSSTLVIDIAERDDSGVYHINLKNEAGEAHASIKVKVVDFPDPPVAPTVTEVGDDWCIMNWEPPAYDGGSPILGYFIERKKKQSSRWMRLNFDLCKETTFEPKKMIEGVAYEVRIFAVNAIGISKPSMPSRPFVPLAVTSPPTLLTVDSVTDTTVTMRWRPPDHIGAAGLDGYVLEYCFEGTEDWIVANKDLIDKTKFTITGLPTDAKIFVRVKAVNAAGASEPKYYSQPILVKEIIEPPKIRIPRHLKQTYIRRVGEAVNLVIPFQGKPRPELTWKKDGAEIDKNQINIRNSETDTIIFIRKAERSHSGKYDLQVKVDKFVETASIDIQIIDRPGPPQIVKIEDVWGENVALTWTPPKDDGNAAITGYTIQKADKKSMEWFTVIEHYHRTSATITELVIGNEYYFRVFSENMCGLSEDATMTKESAVIARDGKIYKNPVYEDFDFSEAPMFTQPLVNTYAIAGYNATLNCSVRGNPKPKITWMKNKVAIVDDPRYRMFSNQGVCTLEIRKPSPYDGGTYCCKAVNDLGTVEIECKLEVKVIYQGVNTPGQPVFLEGQQQSLHNKDF

SEQ ID NO: 19850 - protein, 184 aa, Homo sapiens
LKRAVEEVKKLLVPAAEGEDSLKKMQLMELAILNGTYRDANIKSPALAFSLAATAQAAPRIITGPAPVLPPAALRTPTPAGPTIMPLIRQIQTAVMPNGTPHPTAAIVPPGPEAGLIYTPYEYPYTLAPATSILEYPIEPSGVLGAVATKVRRHDMRVHPYQRIVTADRVTMATVQKILSNLRI

SEQ ID NO: 19851 - protein, 555 aa, Homo sapiens
MFLLCLTGNPLREEDRLGNHASDICGGSELDAVKTDSSLPSPSSLWSASHPSSSKKMDGYILSLVQKKTHPVRTNKPRTSVNADPTKGLLRNGSVCVRAPGGVSQGNSVNLKNSKQACLPSGGIPSLNNGTFSPPKQWSKESKAEQAESKRVPLPEGCPSGAASDLQSKHLPKTAKPASQEHARCSAIGTGESPKESAQLSGASPKESPSRGPAPPQENKVVQPLKKMSQKNSLQGVPPATPPLLSTAFPVEERPALDFKSEGSSQSLEEAHLVKAQFIPGQQPSVRLHRGHRNMGVVKNSSLKHRGPALQGLENGLPTVREKTRAGSKKCRFPDDLDTNKKLKKASSKGRKSGGGPEAGVPGRPAGGGHRAGSRAHGHGREAVVAKPKHKRTDYRRWKSSAEISYEEALRRARRGRRENVGLYPAPVPLPYASPYAYVASDSEYSAECESLFHSTVVDTSEDEQSNYTTNCFGDSESSVSEGEFVGESTTTSDSEESGGLIWSQFVQTLPIQTVTAPDLHNHPAKTFVKIKASHNLKKKILRFRSGSLKLMTTV

SEQ ID NO: 19852 - protein, 429 aa, Homo sapiens
MIMNATSNEQQELFCQKLQQCCILFDFMDSVSDLKSKEIKRATLNELVEYVSTNRGVIVESAYSDIVKMISANIFRTLPPSDNPDFDPEEDEPTLEASWPHIQLVYEFFLRFLESPDFQPSIAKRYIDQKFVQQLLELFDSEDPRERDFLKTVLHRIYGKFLGLRAFIRKQINNIFLRFIYETEHFNGVAELLEILGSIINGFALPLKAEHKQFLMKVLIPMHTAKGLALFHAQLAYCVVQFLEKDTTLTEPVIRGLLKFWPKTCSQKEVMFLGEIEEILDVIEPTQFKKIEEPLFKQISKCVSSSHFQVAERALYFWNNEYILSLIEENIDKILPIMFASLYKISKEHWNPTIVALVYNVLKTLMEMNGKLFDDLTSSYKAERQREKKKELEREELWKKLEELKLKKALEKQNSAYNMHSILSNTSAE

SEQ ID NO: 19853 - protein, 242 aa, Homo sapiens
MLKKISVGVAGDLNTVTMKLGCVLMAWALYLSLGVLWVAQMLLAAGCHAELFPAPILRAVPSAEPQAGSPMTLSCQTKLPLQRSAARLLFSFYKDGRIVQSRGLSSEFQIPTASEDHSGSYWCEAATEDNQVWKQSPQLEIRVQGASSSAAPPTLNPAPQKSAAPGTAPEEAPGPLPPPPTPSSEDPGFSSPLGMPDPHLYHQMGLLLKHMQDVRVLLGHLLMELRELSGHRKPGTTKATAE

SEQ ID NO: 19854 - protein, 612 aa, Homo sapiens
MLGEYDWALQANIKAQKLCKNDPEGIKDLIQQHVKLQKQIEDLQGRTANKDPIKAFYENRAYTPRSLSAPIFTTSLNFVEKERDFRKINHEMANGGNQNLKVADEALKVDDCDCHPEFSPPSSQPPKHKGKQKSRNNESEKFSSSSPLTLPADLKNILEKQFSKSSRAAHQDFANIMKMLRSLIQDGYMALLEQRCRSAAQAFTELLNGLDPQKIKQLNLAMINYVLVVYGLAISLLGIGQPEELSEAENQFKRIIEHYPSEGLDCLAYCGIGKVYLKKNRFLEALNHFEKARTLIYRLPGVLTWPTSNVIIEESQPQKIKMLLEKFVEECKFPPVPDAICCYQKCHGYSKIQIYITDPDFKGFIRISCCQYCKIEFHMNCWKKLKTTTFNDKIDKDFLQGICLTPDCEGVISKIIIFSSGGEVKCEFEHKVIKEKVPPRPILKQKCSSLEKLRLKEDKKLKRKIQKKEAKKLAQERMEEDLRESNPPKNEEQKETVDNVQRCQFLDDRILQCIKQYADKIKSGIQNTAMLLKELLSWKVLSTEDYTTCFSSRNFLNEAVDYVIRHLIQENNRVKTRIFLHVLSELKEVEPKLAAWIQKLNSFGMSLYIPEQ

SEQ ID NO: 19855 - protein, 453 aa, Homo sapiens
MVSIFNLDGMEHHVRTCIPKVELVPAGKPFYCLSSEDLRNTHCCYTDYCNRIDLRVPSGHLKEPEHPSMWGPVELVGIIAGPVFLLFLIIIIVFLVINYHQRVYHNRQRLDMEDPSCEMCLSKDKTLQDLVYDLSTSGSGSGLPLFVQRTVARTIVLQEIIGKGRFGEVWRGRWRGGDVAVKIFSSREERSWFREAEIYQTVMLRHENILGFIAADNKDNGTWTQLWLVSDYHEHGSLFDYLNRYTVTIEGMIKLALSAASGLAHLHMEIVGTQGKPGIAHRDLKSKNILVKKNGMCAIADLGLAVRHDAVTDTIDIAPNQRVGTKRYMAPEVLDETINMKHFDSFKCADIYALGLVYWEIARRCNSGGVHEEYQLPYYDLVPSDPSIEEMRKVVCDQKLRPNIPNWWQSYEALRVMGKMMRECWYANGAARLTALRIKKTLSQLSVQEDVKI

SEQ ID NO: 19856 - protein, 1179 aa, Homo sapiens
HLNCFQALFLFEFRQLNLITRFLTPSELLFDLYLSPESDHDTVFQYLEKNADQVLLIFDGLDEALQPMGPDGPGPVLTLFSHLCNGTLLPGCRVMATSRPGKLPACLPAEAAMVHMLGFDGPRVEEYVNHFFSAQPSREGALVELQTNGRLRSLCAVPALCQVACLCLHHLLPDHAPGQSVALLPNMTQLYMQMVLALSPPGHLPTSSLLDLGEVALRGLETGKVIFYAKDIAPPLIAFGATHSLLTSFCVCTGPGHQQTGYAFTHLSLQEFLAALHLMASPKVNKDTLTQYVTLHSRWVQRTKARLGLSDHLPTFLAGLASCTCRPFLSHLAQGNEDCVGAKQAAVVQVLKKLATRKLTGPKVVELCHCVDETQEPELASLTAQSLPYQLPFHNFPLTCTDLATLTNILEHREAPIHLDFDGCPLEPHCPEALVGCGQIENLSFKSRKCGDAFAEALSRSLPTMGRLQMLGLAGSKITARGISHLVKALPLCPQLKEVSFRDNQLSDQVVLNIVEVLPHLPRLRKLDLSSNSICVSTLLCLARVAVTCPTVRMLQAREADLIFLLSPPTETTAELQRAPDLQESDGQRKGAQSRSLTLRLQKCQLQVHDAEALIALLQEGPHLEEVDLSGNQLEDEGCRLMAEAASQLHIARKLDLSNNGLSVAGVHCVLRAVSACWTLAELHISLQHKTVIFMFAQEPEEQKGPQERAAFLDSLMLQMPSELPLSSRRMRLTHCGLQEKHLEQLCKALGGSCHLGHLHLDFSGNALGDEGAARLAQLLPGLGALQSLNLSENGLSLDAVLGLVRCFSTLQWLFRLDISFESQHILLRGDKTSRDMWATGSLPDFPAAAKFLGFRQRCIPRSLCLSECPLEPPSLTRLCATLKDCPGPLELQLSCEFLSDQSLETLLDCLPQLPQLSLLQLSQTGLSPKSPFLLANTLSLCPRVKKVDLRSLHHATLHFRSNEEEEGVCCGFTGCSLSQEHVESLCWLLSKCKDLSQVDLSANLLGDSGLRCLLECLPQVPISGLLDLSHNSISQESALYLLETLPSCPRVREASVNLGSEQSFRIHFSREDQAGKTLRLSECSFRPEHVSRLATGLSKSLQLTELTLTQCCLGQKQLAILLSLVGRPAGLFSLRDSTRHTEKLSFPTLEACALGFKKKRKKERKKVSEDTELRTKIN

SEQ ID NO: 19857 - protein, 97 aa, Homo sapiens
MSQVQRVHSQAAKAEFEKAAEEVRHLKTKPSDEEMLFIYGHYKQATVGDINTERPGMLDFTGKAKWDAWNELKGTSKEDAMKAYINKVEELKKKYGI

SEQ ID NO: 19858 - protein, 118 aa, Homo sapiens
MGLSTVPDLLLPLVLLELLVGIYPSGVIGLVPHLGDREKRDSVCPQGKYIHPQNNSICCTKCHKGPGQDTDCRECESGSFTASENHLRHCLSCSKCRKEMGQVEISSCTVDRDTVCGC

SEQ ID NO: 19859 - protein, 176 aa, Homo sapiens
MQLHHSKHHAAYVNNLNVTEEKYQEALAKGDVTAQIALQPALKFNGGGHINHSIFWTNLSPNGGGEPKGELLEAIKRDFGSFDKFKEKLTAASVGVQGSGWGWLGFNKERGHLQIAACPNQDPLQGTTGLIPLLGIDVWEHAYYLQYKNVRPDYLKAIWNVINWENVTERYMACKK

SEQ ID NO: 19860 - protein, 1923 aa, Homo sapiens
MENSHPPHHHHQQPPPQPGPSGERRNHHWRSYKLMIDPALKKGHHKLYRYDGQHFSLAMSSNRPVEIVEDPRVVGIWTKNKELELSVPKFKIDEFYVGPVPPKQVTFAKLNDNIRENFLRDMCKKYGEVEEVEILYNPKTKKHLGIAKVVFATVRGAKDAVQHLHSTSVMGNIIHVELDTKGETRMRFYELLVTGRYTPQTLPVGELDAVSPIVNETLQLSDALKRLKDGGLSAGCGSGSSSVTPNSGGTPFSQDTAYSSCRLDTPNSYGQGTPLTPRLGTPFSQDSSYSSRQPTPSYLFSQDPAVTFKARRHESKFTDAYNRRHEHHYVHNSPAVTAVAGATAAFRGSSDLPFGAVGGTGGSSGPPFKAQPQDSATFAHTPPPAQATPAPGFKSAFSPYQTPVAHFPPPPEEPTATAAFGARDSGEFRRAPAPPPLPPAEPLAKEKPGTPPGPPPPDTNSMELGGRPTFGWSPEPCDSPGTPTLESSPAGPEKPHDSLDSRIEMLLKEQRTKLLFLREPDSDTELQMEGSPISSSSSQLSPLAPFGTNSQPGFRGPTPPSSRPSSTGLEDISPTPLPDSDEDEELDLGLGPRPPPEPGPPDPAGLLSQTAEVALDLVGDRTPTSEKMDEGQQSSGEDMEISDDEMPSAPITSADCPKPMVVTPGAAAVAAPSVLAPTLPLPPPPGFPPLPPPPPPPPPQPGFPMPPPLPPPPPPPPPAHPAVTVPPPPLPAPPGVPPPPILPPLPPFPPGLFPVMQVDMSHVLGGQWGGMPMSFQMQTQVLSRLMTGQGACPYPPFMAAAAAAASAGLQFVNLPPYRGPFSLSNSGPGRGQHWPPLPKFDPSVPPPGYMPRQEDPHKATVDGVLLVVLKELKAIMKRDLNRKMVEVVAFRAFDEWWDKKERMAKASLTPVKSGEHKDEDRPKPKDRIASCLLESWGKGEGLGYEGLGLGIGLRGAIRLPSFKVKRKEPPDTTSSGDQKRLRPSTSVDEEDEESERERDRDMADTPCELAKRDPKGVGVRRRPARPLELDSGGEEDEKESLSEEQESTEEEEEAEEEEEEEDDDDDDSDDRDESENDDEDTALSEASEKDEGDSDEEETVSIVTSKAEATSSSESSESSEFESSSESSPSSSEDEEEVVAREEEEEEEEEEMVAEESMASAGPEDFEQDGEEAALAPGAPAVDSLGMEEEVDIETEAVAPEERPSMLDEPPLPVGVEEPADSREPPEEPGLSQEGAMLLSPEPPAKEVEARPPLSPERAPEHDLEVEPEPPMMLPLPLQPPLPPPRPPRPPSPPPEPETTDASHPSVPPEPLAEDHPPHTPGLCGSLAKSQSTETVPATPGGEPPLSGGSSGLSLSSPQVPGSPFSYPAPSPSLSSGGLPRTPGRDFSFTPTFSEPSGPLLLPVCPLPTGRRDERSGPLASPVLLETGLPLPLPLPLPLPLALPAVLRAQARAPTPLPPLLPAPLASCPPPMKRKPGRPRRSPPSMLSLDGPLVRPPAGAALGRELLLLPGQPQTPVFPSTHDPRTVTLDFRNAGIPAPPPPLPPQPPPPPPPPPVEPTKLPFKELDNQWPSEAIPPGPRGRDEVTEEYMELAKSRGPWRRPPKKRHEDLVPPAGSPELSPPQPLFRPRSEFEEMTILYDIWNGGIDEEDIRFLCVTYERLLQQDNGMDWLNDTLWVYHPSTSLSSAKKKKRDDGIREHVTGCARSEGFYTIDKKDKLRYLNSSRASTDEPPADTQGMSIPAQPHASTRAGSERRSEQRRLLSSFTGSCDSDLLKFNQLKFRKKKLKFCKSHIHDWGLFAMEPIAADEMVIEYVGQNIRQVIADMREKRYEDEGIGSSYMFRVDHDTIIDATKCGNFARFINHSCNPNCYAKVITVESQKKIVIYSKQHINVNEEITYDYKFPIEDVKIPCLCGSENCRGTLN

SEQ ID NO: 19861 - protein, 470 aa, Homo sapiens
MHSFLHQYTGSFKKPPLRRPHSVIGGSLGSFMAMPRNGSRLDIVHENLKMGSDGESDQASGTSSDEVQSPTGVCLRNRIHRRISMEDLNKRLSLPADIRIPDGYLEKLQINSPPFDQPMSRRSRRASLSEIGFGKMETYIKLEKLGEGTYATVYKGRSKLTENLVALKEIRLEHEEGAPCTAIREVSLLKDLKHANIVTLHDIVHTDKSLTLVFEYLDKDLKQYMDDCGNIMSMHNVKLFLYQILRGLAYCHRRKVLHRDLKPQNLLINEKGELKLADFGLARAKSVPTKTYSNEVVTLWYRPPDVLLGSSEYSTQIDMWGVGCIFFEMASGRPLFPGSTVEDELHLIFRLLGTPSQETWPGISSNEEFKNYNFPKYKPQPLINHAPRLDSEGIELITKFLQYESKKRVSAEEAMKHVYFRSLGPRIHALPESVSIFSLKEIQLQKDPGFRNSSYPETGVFVINHFTCRS

SEQ ID NO: 19862 - protein, 98 aa, Homo sapiens
LVQRKARAAAERNLRNERRERAKQARVSQELKKAAKRTVSISEGPDTLGDGMRERRETLALAPEPEPLEKEACEKWKRPFRPRLSFPGTFVGLPQPPP

SEQ ID NO: 19863 - protein, 691 aa, Homo sapiens
MTLHATRGAALLSWVNSLHVADPVEAVLQLQDCSIFIKIIDRIHGTEEGQQILKQPVSERLDFVCSFLQKNRKHPSSPECLVSAQKVLEGSELELAKMTMLLLYHSTMSSKSPRDWEQFEYKIQAELAVILKFVLDHEDGLNLNEDLENFLQKAPVPSTCSSTFPEELSPPSHQAKREIRFLELQKVASSSSGNNFLSGSPASPMGDILQTPQFQMRRLKKQLADERSNRDELELELAENRKLLTEKDAQIAMMQQRIDRLALLNEKQAASPLEPKELEELRDKNESLTMRLHETLKQCQDLKTEKSQMDRKINQLSEENGDLSFKLREFASHLQQLQDALNELTEEHSKATQEWLEKQAQLEKELSAALQDKKCLEEKNEILQGKLSQLEEHLSQLQDNPPQEKGEVLGDVLQLETLKQEAATLAANNTQLQARVEMLETERGQQEAKLLAERGHFEEEKQQLSSLITDLQSSISNLSQAKEELEQASQAHGARLTAQVASLTSELTTLNATIQQQDQELAGLKQQAKEKQAQLAQTLQQQEQASQGLRHQVEQLSSSLKQKEQQLKEVAEKQEATRQDHAQQLATAAEEREASLRERDAALKQLEALEKEKAAKLEILQQQLQVANEARDSAQTSVTQAQREKAELSRKVEELQACVETARQEQHEAQAQVAELELQLRSEQQKATEKE

SEQ ID NO: 19864 - protein, 537 aa, Homo sapiens
SPLRRTFKSKVLAHYPQNIEWNPFDQDAVNMLCMPKGLSFRTQTDNKDPQFHSFIITREDGSRTYGFVLTFYEEVTSKQICTAMQTLYQMHNAEHYSSVYASSSCSMDSLASSLDEGDTTSLLKLQRYNSYDISRDTLYVSKSICLITPLPFMQACKKFLIQLYKAVTSQQPPPLPLESYIHNILYEVPLPPPGRSLKFYGVYEPVICQRPGPSELPLSDYPLREAFELLGLENLVQVFTCVLLEMQILLYSQDYQRLMTVAEGITTLLFPFQWQHVYVPILPASLLHFLDAPVPYLMGLQSKEGTDRSKLELPQEANLCFVDIDNHFIELPEEFPQFPNKVDFIQELSEVLVQFGIPPEGSLHCSESTSKLKNMVLKDLVNDKKNGNVCTNNISMYELLKGNETIARLQALAKRTGVAVEKMDLSASLGEKDKDLKLHCEEAELRDYQLNVQLREVFANRFTQMFADYEAFVIQTAQDMESWLTNREQMQNFDKVKRTIVFLLWLLVALLLILTFLNFLFFCAYAYPYIIDFVNLF

SEQ ID NO: 19865 - protein, 622 aa, Homo sapiens
MALPTARPLLGSCGTPALGSLLFLLFSLGWVQPSRTLAGETGQEAAPLDGVLANPPNISSLSPRQLLGFPCAEVSGLSTERVRELAVALAQKNVKLSTEQLRCLAHRLSEPPEDLDALPLDLLLFLNPDAFSGPQACTRFFSRITKANVDLLPRGAPERQRLLPAALACWGVRGSLLSEADVRALGGLACDLPGRFVAESAEVLLPRLVSCPGPLDQDQQEAARAALQGGGPPYGPPSTWSVSTMDALRGLLPVLGQPIIRSIPQGIVAAWRQRSSRDPSWRQPERTILRPRFRREVEKTACPSGKKAREIDESLIFYKKWELEACVDAALLATQMDRVNAIPFTYEQLDVLKHKLDELYPQGYPESVIQHLGYLFLKMSPEDIRKWNVTSLETLKALLEVNKGHEMSPQVATLIDRFVKGRGQLDKDTLDTLTAFYPGYLCSLSPEELSSVPPSSIWAVRPQDLDTCDPRQLDVLYPKARLAFQNMNGSEYFVKIQSFLGGAPTEDLKALSQQNVSMDLATFMKLRTDAVLPLTVAEVQKLLGPHVEGLKAEERHRPVRDWILRQRQDDLDTLGLGLQGGIPNGYLVLDLSMQEALSGTPCLLGPGPVLTVLALLLASTLA

SEQ ID NO: 19866 - protein, 635 aa, Homo sapiens
MGAAGLQGAPGGAEHPGRCGPGAVPRIRGSVVLAPRWRSSPAGGWSDPLFFGGADPEPELYLDPFCPPGFSSQKFPMQHVLCNHPPWIFTCLCAEGNIQPGDPGPGDQEKQQQASEGRPWSDQAEGPEGEGAMPLFGRTKKRTLGAFSRPPQRQPVSSRNGLRGVELEASPAQSGNPEETDKLLKRIEVLGFGTVNCGECGLSFSKMTNLLSHQRIHSGEKPYVCGVCEKGFSLKKSLARHQKAHSGEKPIVCRECGRGFNRKSTLIIHERTHSGEKPYMCSECGRGFSQKSNLIIHQRTHSGEKPYVCRECGKGFSQKSAVVRHQRTHLEEKTIVCSDCGLGFSDRSNLISHQRTHSGEKPYACKECGRCFRQRTTLVNHQRTHSKEKPYVCGVCGHSFSQNSTLISHRRTHTGEKPYVCGVCGRGFSLKSHLNRHQNIHSGEKPIVCKDCGRGFSQQSNLIRHQRTHSGEKPMVCGECGRGFSQKSNLVAHQRTHSGERPYVCRECGRGFSHQAGLIRHKRKHSREKPYMCRQCGLGFGNKSALITHKRAHSEEKPCVCRECGQGFLQKSHLTLHQMTHTGEKPYVCKTCGRGFSLKSHLSRHRKTTSVHHRLPVQPDPEPCAGQPSDSLYSL

SEQ ID NO: 19867 - protein, 503 aa, Homo sapiens
MEAIPCVVGDEEVWTSDVQYQVSPFNHGHKVAKFCYADKSLLNKAIEAALAARKEWDLKPIADRAQIFLKAADMLSGPRRAEILAKTMVGQGKTVIQAEIDAAAELIDFFRFNAKYAVELEGQQPISVPPSTNSTVYRGLEGFVAAISPFNFTAIGGNLAGAPALMGNVVLWKPSDTAMLASYAVYRILREAGLPPNIIQFVPADGPLFGDTVTSSEHLCGINFTGSVPTFKHLWKQVAQNLDRFHTFPRLAGECGGKNFHFVHRSADVESVVSGTLRSAFEYGGQKCSACSRLYVPHSLWPQIKGRLLEEHSRIKVGDPAEDFGTFFSAVIDAKSFARIKKWLEHARSSPSLTILAGGKCDDSVGYFVEPCIVESKDPQEPIMKEEIFGPVLSVYVYPDDKYKETLQLVDSTTSYGLTGAVFSQDKDVVQEATKVLRNAAGNFYINDKSTGSIVGQQPFGGARASGTNDKPGGPHYILRWTSPQVIKETHKPLGDWSYAYMQ

SEQ ID NO: 19868 - protein, 635 aa, Homo sapiens
MESKPSRIPRRISVQPSSSLSARMMSGSRGSSLNDTYHSRDSSFRLDSEYQSTSASASASPFQSAWYSESEITQGARSRSQNQQRDHDSKRPKLSCTNCTTSAGRNVGNGLNTLSDVQDRVPSYSQGARPKENSMSTLQLNTSSTNHQLPSEHQTILSSRDSRNSLRSNFSSRESESSRSNTQPGFSYSSSRDEAPIISNSERVVSSQRPFQESSDNEGRRTTRRLLSRIASSMSSTFFSRRSSQDSLNTRSLNSENSYVSPRILTASQSRSNVPSASEVPDNRASEASQGFRFLRRRWGLSSLSHNHSSESDSENFNQESEGRNTGPWLSSSLRNRCTPLFSRRRREGRDESSRIPTSDTSSRSHIFRRESNEVVHLEAQNDPLGAAANRPQASAASSSATTGGSTSDSAQGGRNTGISGILPGSLFRFAVPPALGSNLTDNVMITVDIIPSGWNSADGKSDKTKSAPSRDPERLQKIKESLLLEDSEEEEGDLCRICQMAAASSSNLLIEPCKCTGSLQYVHQDCMKKWLQAKINSGSSLEAVTTCELCKEKLELNLEDFDIHELHRAHANEQAEYEFISSGLYLVVLLHLCEQSFSDMMGNTNEPSTRVRLQRMIPKKTETITGHLILPNFI

SEQ ID NO: 19869 - protein, 289 aa, Homo sapiens
MVVWVTGASSGIGEELAYQLSKLGVSLVLSARRVHELERVKRRCLENGNLKEKDILVLPLDLTDTGSHEAATKAVLQEFGRIDILVNNGGMSQRSLCMDTSLDVYRKLIELNYLGTVSLTKCVLPHMIERKQGKIVTVNSILGIISVPLSIGYCASKHALRGFFNGLRTELATYPGIIVSNICPGPVQSNIVENSLAGEVTKTIGNNGDQSHKMTTSRCVRLMLISMANDLKEVWISEQPFLLVTYLWQYMPTWAWWITNKMGKKRIENFKSGVDADSSYFKIFKTKHD

SEQ ID NO: 19870 - protein, 575 aa, Homo sapiens
MGITLHLLLHSDRDPIPDVPAVYFVMPTEENIDRMCQDLRNQLYESYYLNFISAISRSKLEDIANAALAASAVTQVAKVFDQYLNFITLEDDMFVLCNQNKELVSYRAINRPDITDTEMETVMDTIVDSLFCFFVTLGAVPIIRCSRGTAAEMVAVKLDKKLRENLRDARNSLFTGDTLGAGQFSFQRPLLVLVDRNIDLATPLHHTWTYQALVHDVLDFHLNRVNLEESSGVENSPAGARPKRKNKKSYDLTPVDKFWQKHKGSPFPEVAESVQQELESYRAQEDEVKRLKSIMGLEGEDEGAISMLSDNTAKLTSAVSSLPELLEKKRLIDLHTNVATAVLEHIKARKLDVYFEYEEKIMSKTTLDKSLLDIISDPDAGTPEDKMRLFLIYYISTQQAPSEADLEQYKKALTDAGCNLNPLQYIKQWKAFTKMASAPASYGSTTTKPMGLLSRVMNTGSQFVMEGVKNLVLKQQNLPVTRILDNLMEMKSNPETDDYRYFDPKMLRGNDSSVPRNKNPFQEAIVFVVGGGNYIEYQNLVDYIKGKQGKHILYGCSELFNATQFIKQLSQLGQK

SEQ ID NO: 19871 - protein, 1187 aa, Homo sapiens
MKNLLTEKCISSHNFHQKVIKQRMEKKVDSRYFKDGAVKKPYSAKTLSNKKSSASFGIRRELPSTSHLVQYRGTHTCTRQGRLRELRIRFYYEQRLLRKVFEEWKEEWWVFQHEWKLCVRADCHYRYYLYNLMFQTWKTYVRQQQEMRNKYIRAEVHDAKQKMRQAWKSWLIYVVVRRTKLQMQTTALEFRQRIILRVWWSTWRQRLGQVRVSRALHASALKHRALSLQVQAWSQWREQLLYVQKEKQKVVSAVKHHQHWQKRRFLKAWLEYLQVRRVKRQQNEMAERFHHVTVLQIYFCDWQQAWERRESLYAHHAQVEKLARKMALRRAFTHWKHYMLLCAEEAAQFEMAEEHHRHSQLLLHRFWNLWRSQIEQKKERELLPLLHAAWDHYRIALLCKCIELWLQYTQKRRYKQLLQARADGHFQQRALPAAFHTWNRLWRWRHQENVLSARATRFHRETLEKQVFSLWRQKMFQHRENRLAERMAILHAERQLLYRSWFMWHQQAAARHQEQEWQTVACAHHRHGRLKKAFCLWRESAQGLRTERTGRVRAAEFHMAQLLRWAWSQWRECLALRGAERQKLMRADLHHQHSVLHRALQAWVTYQGRVRSILREVAARESQHNRQLLRGALRRWKENTMARVDEAKKTFQASTHYRRTICSKVLVQWREAVSVQMYYRQQEDCAIWEAQKVLDRGCLRTWFQRWWDCSRRSAQQRLQLERAVQHHHRQLLLEGLARWKTHHLQCVRKRLLHRQSTQLLAQRLSRTCFRQWRQQLAARRQEQRATVRALWFWAFSLQAKVWATWLAFVLERRRKKARLQWALQAYQGQLLQEGATRLLRFAASMKASRQQLQAQQQVQAAHSLHRAVRRCATLWKQKVLGRGGKPQPLAAIAPSRKVTFEGPLLNRIAAGAGDGTLETKRPQASRPLGALGRLAAEEPHALELNTAHSARKQPRRPHFLLEPAQSQRPQKPQEHGLGMAQPAAPSLTRPFLAEAPTALVPHSPLPGALSSAPGPKQPPTASTGPELLLLPLSSFMPCGAAAPARVSAQRATPRDKPPVPSSLASVPDPHLLLPGDFSATRAGPGLSTAGSLDLEAELEEIQQQLLHYQTTKQNLWSCRRQASSLRRWLELNREEPGPEDQEVEQQVQKELEQVEMQIQLLAEELQAQRQPIGACVARIQALRQALC

SEQ ID NO: 19872 - protein, 630 aa, Homo sapiens
MKLGKVEFCHFLQLIALFLCFSGMSQAELSRSRSKPYFQSGRSRTKRSWVWNQFFVLEEYMGSDPLYVGKLHSDVDKGDGSIKYILSGEGASSIFIIDENTGDIHATKRLDREEQAYYTLRAQALDRLTNKPVEPESEFVIKIQDINDNEPKFLDGPYTAGVPEMSPVGTSVVQVTATDADDPTYGNSARVVYSILQGQPYFSVEPKTGVIKTALPNMDREAKDQYLLVIQAKDMVGQNGGLSGTTSVTVTLTDVNDNPPRFPRRSYQYNVPESLPVASVVARIKAADADIGANAEMEYKIVDGDGLGIFKISVDKETQEGIITIQKELDFEAKTSYTLRIEAANKDADPRFLSLGPFSDTTTVKIIVEDVDEPPVFSSPLYPMEVSEATQVGNIIGTVAAHDPDSSNSPVRYSIDRNTDLERYFNIDANSGVITTAKSLDRETNAIHNITVLAMESQNPSQVGRGYVAITILDINDNAPEFAMDYETTVCENAQPGQVIQKISAVDKDEPSNGHQFYFSLTTDATNNHNFSLKDNKDNTASILTRRNGFRRQEQSVYYLPIFIVDSGSPSLSSTNTLTIRVCDCDADGVAQTCNAEAYVLPAGLSTGALIAILACVLTLLGRYCFQGLL

SEQ ID NO: 19873 - protein, 835 aa, Homo sapiens
MDTSRLGVLLSLPVLLQLATGGSSPRSGVLLRGCPTHCHCEPDGRMLLRVDCSDLGLSELPSNLSVFTSYLDLSMNNISQLLPNPLPSLRFLEELRLAGNALTYIPKGAFTGLYSLKVLMLQNNQLRHVPTEALQNLRSLQSLHLHNNRIHSLGKKCFDGLHSLETLDLNYNNLDEFPTAIRTLSNLKELGFHSNNIRSIPEKAFVGNPSLITIHFYDNPIQFVGRSAFQHLPELRTLTLNGASQITEFPDLTGTANLESLTLTGAQISSLPQTVCNQLPNLQVLDLSYNLLEDLPSFSVCQKLQKIDLRHNEIYEIKVDTFQQLLSLRSLNLAWNKIAIIHPNAFSTLPSLIKLDLSSNLLSSFPITGLHGLTHLKLTGNHALQSLISSENFPELKVIEMPYAYQCCAFGVCENAYKISNQWNKGDNSSMDDLHKKDAGMFQAQDERDLEDFLLDFEEDLKALHSVQCSPSPGPFKPCEHLLDGWLIRIGVWTIAVLALTCNALVTSTVFRSPLYISPIKLLIGVIAAVNMLTGVSSAVLAGVDAFTFGSFARHGAWWENGVGCHVIGFLSIFASESSVFLLTLAALERGFSVKYSAKFETKAPFSSLKVIILLCALLALTMAAVPLLGGSKYGASPLCLPLPFGEPSTMGYMVALILLNSLCFLMMTIAYTKLYCNLDKGDLENIWDCSMVKHIALLLFTNCILNCPVAFLSFSSLINLTFISPEVIKFILLVVVPLPACLNPLLYILFNPHFKEDLVSLRKQTYVWTRSKHPSLMSINSDDVEKQSCDSTQALVTFTSSSITYDLPPSSVPSPAYPVTESCHLSSVAFVPCL

SEQ ID NO: 19874 - protein, 394 aa, Homo sapiens
MVVEVDSMPAASSVKKPFGLRSKMGKWCCRCFPCYRESGKSNVGTSGDHDDSAMKTLRSKMGKWCHHCFPCCRGSGKSNVGASGDHDDSAMKTLRNKMGKWCCHCFPCCRGSGKSKVGAWGDYDDSAFMEPRYHVRGEDLDKLHRAAWWGKVPRKDLIVMLRDTDVNKKDKQKRTALHLASANGNSEVVKLLLDRRCQLNVLDNKKRTALIKVCSSQLYQHEAVQCQEDECALMLLEHGTDPNIPDEYGNTTLHYAIYNEDKLMAKALLLYGADIESKNKHGLTPLLLGVHEQKQQVVKFLIKKKANLNALDRYGRTALILAVCCGSASIVSLLLEQNIDVSSQDLSGQTAREYAVSSHHHVICQLLSDYKEKQMLKISSENSNPENVSRTRNK

SEQ ID NO: 19875 - protein, 132 aa, Homo sapiens
MHDSNNVEKDITPSELPANPGCLHSKEHSIKATLIWRLFFLIMFLTIIVCGMVAALSAIRANCHQEPSVCLQAACPESWIGFQRKCFYFSDDTKNWTSSQRFCDSQDADLAQVESFQELVSYPGSRRVCLFE

SEQ ID NO: 19876 - protein, 1269 aa, Homo sapiens
MAAGKASGESEEASPSLTAEEREALGGLDSRLFGFVRFHEDGARTKALLGKAVRCYESLILKAEGKVESDFFCQLGHFNLLLEDYPKALSAYQRYYSLQSDYWKNAAFLYGLGLVYFHYNAFQWAIKAFQEVLYVDPSFCRAKEIHLRLGLMFKVNTDYESSLKHFQLALVDCNPCTLSNAEIQFHIAHLYETQRKYHSAKEAYEQLLQTENLSAQVKATVLQQLGWMHHTVDLLGDKATKESYAIQYLQKSLEADPNSGQSWYFLGRCYSSIGKVQDAFISYRQSIDKSEASADTWCSIGVLYQQQNQPMDALQAYICAVQLDHGHAAAWMDLGTLYESCNQPQDAIKCYLNATRSKSCSNTSALAARIKYLQACKPHHPNTEPVLGLSQTPISQQSLPLHMIPSSQVDDLSSPAKRKRTSSPTKNTSDNWSGGHAVSHPPVQQQAHSWCLTPQKLQMRPTGVAQVRSTGIPNGPTADSSLPTNSVSGQQPQLALTRVPSVSQPGVRPACPGQPLANGPFSAGHVPCSTSRTLGSTDTILIGNNHITGSGSNGNVPYLQRNALTLPHNRTNLTSSAEEPWKNQLSNSTQGLHKGQSSHSAGPNGERPLSSTGPSQHLQAAGSGIQNQNGHPTLPSNSVTQGAALNHLSSHTATSGGQQGITLTKESKPSGNILTVPETSRHTGETPNSTASVEGLPNHVHQMTADAVCSPSHGDSKSPGLLSSDNPQLSALLMGKANNNVGTGTCDKVNNIHPAVHTKTDNSVASSPSSAISTATPSPKSTEQTTTNSVTSLNSPHSGLHTINGEGMEESQSPMKTDLLLVNHKPSPQIIPSMSVSIYPSSAEVLKACRNLGKNGLSNSSILLDKCPPPRPPSSPYPPLPKDKLNPPTPSIYLENKRDAFFPPLHQFCTNPNNPVTVIRGLAGALKLDLGLFSTKTLVEANNEHMVEVRTQLLQPADENWDPTGTKKIWHCESNRSHTTIAKYAQYQASSFQESLREENEKRSHHKDHSDSESTSSDNSGRRRKGPFKTIKFGTNIDLSDDKKWKLQLHELTKLPAFVRVVSAGNLLSHVGHTILGMNTVQLYMKVPGSRTPGHQENNNFCSVNINIGPGDCEWFVVPEGYWGVLNDFCEKNNLNFLMGSWWPNLEDLYEANVPVYRFIQRPGDLVWINAGTVHWVQAIGWCNNIAWNVGPLTACQYKLAVERYEWNKLQSVKSIVPMVHLSWNMARNIKVLSSKNSEAMSDIEGSSHCCRKRDYMAWADKRRTSSLL

SEQ ID NO: 19877 - protein, 1134 aa, Homo sapiens
MHPQSLAEEEIKTEQEVVEGMDISTRSKDPGSAERTAQKRKFPSPPHSSNGHSPQDTSTSPIKKKKKPGLLNSNNKEQDGRNDFYCWVCHREGQVLCCELCPRVYHAKCLRLTSEPEGDWFCPECEKITVAECIETQSKAMTMLTIEQLSYLLKFAIQKMKQPGTDAFQKPVPLEQHPDYAEYIFHPMDLCTLEKNAKKKMYGCTEAFLADAKWILHNCIIYNGGNHKLTQIAKVVIKICEHEMNEIEVCPECYLAACQKRDNWFCEPCSNPHPLVWAKLKGFPFWPAKALRDKDGQVDARFFGQHDRAWVPINNCYLMSKEIPFSVKKTKSIFNSAMQEMEVYVENIRRKFGVFNYSPFRTPYTPNSQYQMLLDPTNPSAGTAKIDKQEKVKLNFDMTASPKILMSKPVLSGGTGRRISLSDMPRSPMSTNSSVHTGSDVEQDAEKKATSSHFSASEESMDFLDKSTDRSKAEMDLKELSESVQQQSTPVPLISPKRQIRSRFQLNLDKTIESCKAQLGINEISEDVYTAVEHSDSEDSEKSDSSDSEYISDDEQKSKNEPEDTEDKEGCQMDKEPSAVKKKPKPTNPVEIKEELKSTSPASEKADPGAVKDKASPEPEKDFSEKAKPSPHPIKDKLKGKDETDSPTVHLGLDSDSESELVIDLGEDHSGREGRKNKKEPKEPSPKQDVVGKTPPSTTVGSHSPPETPVLTRSSAQTSAAGATATTSTSSTVTVTAPAPAATGSPVKKQRPLLPKETAPAVQRVVWNSSSKFQTSSQKWHMQKMQRQQQQQQQQNQQQQPQSSQGTRYQTRQAVKAVQQKEITQSPSTSTITLVTSTQSSPLVTSSGSMSTLVSSVNADLPIATASADVAADIAKYTSKMMDAIKGTMTEIYNDLSKNTTGSTIAEIRRLRIEIEKLQWLHQQELSEMKHNLELTMAEMRQSLEQERDRLIAEVKKQLELEKQQAVDETKKKQWCANCKKEAIFYCCWNTSYCDYPCQQAHWPEHMKSCTQSATAPQQEADAEVNTETLNKSSQGSSSSTQSAPSETASASKEKETSAEKSKESGSTLDLSGSRETPSSILLGSNQGSDHSRSNKSSWSSSDEKRGSTRSDHNTSTSTKSLLPKESRLDTFWD

SEQ ID NO: 19878 - protein, 869 aa, Homo sapiens
MGKVYRADRKSVQRIKARDIVPGDIVEVAVGDKVPADIRILAIKSTTLRVDQSILTGESVSVIKHTEPVPDPRAVNQDKKNMLFSGTNIAAGKALGIVATTGVGTEIGKIRDQMAATEQDKTPLQQKLDEFGEQLSKVISLICVAVWLINIGHFNDPVHGGSWFRGAIYYFKIAVALAVAAIPEGLPAVITTCLALGTRRMAKKNAIVRSLPSVETLGCTSVICSDKTGTLTTNQMSVCKMFIIDKVDGDICLLNEFSITGSTYAPEGEVLKNDKPVRPGQYDGLVELATICALCNDSSLDFNEAKGVYEKVGEATETALTTLVEKMNVFNTDVRSLSKVERANACNSVIRQLMKKEFTLEFSRDRKSMSVYCSPAKSSRAAVGNKMFVKGAPEGVIDRCNYVRVGTTRVPLTGPVKEKIMAVIKEWGTGRDTLRCLALATRDTPPKREEMVLDDSARFLEYETDLTFVGVVGMLDPPRKEVTGSIQLCRDAGIRVIMITGDNKGTAIAICRRIGIFGENEEVADRAYTGREFDDLPLAEQREACRRACCFARVEPSHKSKIVEYLQSYDEITAMTGDGVNDAPALKKAEIGIAMGSGTAVAKTASEMVLADDNFSTIVAAVEEGRAIYNNMKQFIRYLISSNVGEVVCIFLTAALGLPEALIPVQLLWVNLVTDGLPATALGFNPPDLDIMDRPPRSPKEPLISGWLFFRYMAIGGYVGAATVGAAAWWFLYAEDGPHVNYSQLTHFMQCTEDNTHFEGIDCEVFEAPEPMTMALSVLVTIEMCNALNSLSENQSLLRMPPWVNIWLLGSICLSMSLHFLILYVDPLPMIFKLRALDLTQWLMVLKISLPVIGLDEILKFVARNYLEG

SEQ ID NO: 19879 - protein, 934 aa, Homo sapiens
MLTLEEFRELREQPSDPQAEQELINSIEQVYFSVDSFDIVKYELEKLPPVLNLQELEAYRDKLKQQQAAVSKKVADLILEKQPAYVKELERVTSLQTGLQLAAVICTNGRRHLNIAKEGFTQASLGLLANQRKRQLLIGLLKSLRTIKTLQRTDVRLSEMLEEEDYPGAIQLCLECQKAASTFKHYSCISELNSKLQDTLEQIEEQLDVALSKICKNFDINHYTKVQQAYRLLGKTQTAMDQLHMHFTQAIHNTVFQVVLGYVELCAGNTDTKFQKLQYKDLCTHVTPDSYIPCLADLCKALWEVMLSYYRTMEWHEKHDNEDTASASEGSNMIGTEETNFDRGYIKKKLEHGLTRIWQDVQLKVKTYLLGTDLSIFKYDDFIFVLDIISRLMQVGEEFCGSKSEVLQESIRKQSVNYFKNYHRTRLDELRMFLENETWELCPVKSNFSILQLHEFKFMEQSRSPSVSPSKQPVSTSSKTVTLFEQYCSGGNPFEIQANHKDEETEDVLASNGYESDEQEKSAYQEYDSDSDVPEELKRDYVDEQTGDGPVKSVSRETLKSRKKSDYSLNKVNAPILTNTTLNVIRLVGKYMQMMNILKPIAFDVIHFMSQLFDYYLYAIYTFFGRNDSLESTGLGLSSSRLRTTLNRIQESLIDLEVSADPTATLTAAEERKEKVPSPHLSHLVVLTSGDTLYGLAERVVATESLVFLAEQFEFLQPHLDAVMPAVKKPFLQQFYSQTVSTASELRKPIYWIVAGKALDYEQMLLLMANVKWDVKEIMSQHNIYVDALLKEFEQFNRRLNEVSKRVRIPLPVSNILWEHCIRLANRTIVEGYANVKKCSNEGRALMQLDFQQFLMKLEKLTDIRPIPDKEFVETYIKAYYLTENDMERWIKEHREYSTKQLTNLVNVCLGSHINKKARQKLLAAIDDIDRPKR

SEQ ID NO: 19880 - protein, 764 aa, Homo sapiens
MAGWIQAQQLQGDALRQMQVLYGQHFPIEVRHYLAQWIESQPWDAIDLDNPQDRAQATQLLEGLVQELQKKAEHQVGEDGFLLKIKLGHYATQLQCSSPAGILVDAMSQKHLQINQTFEELRLVTQDTENELKKLQQTQEYFIIQYQESLRIQAQFAQLAQLSPQERLSRETALQQKQVSLEAWLQREAQTLQQYRVELAEKHQKTLQLLRKQQTIILDDELIQWKRRQQLAGNGGPPEGSLDVLQSWCEKLAEIIWQNRQQIRRAEHLCQQLPIPGPVEEMLAEVNATITDIISALVTSTFIIEKQPPQVLKTQTKFAATVRLLVGGKLNVHMNPPQVKATIISEQQAKSLLKNENTRNECSGEILNNCCVMEYHQATGTLSAHFRNMSLKRIKRADRRGAESVTEEKFTVLFESQFSVGSNELVFQVKTLSLPVVVIVHGSQDHNATATVLWDNAFAEPGRVPFAVPDKVLWPQLCEALNMKFKAEVQSNRGLTKENLVFLAQKLFNNSSSHLEDYSGLSVSWSQFNRENLPGWNYTFWQWFDGVMEVLKKHHKPHWNDGAILGFVNKQQAHDLLINKPDGTFLLRFSDSEIGGITIAWKFDSPERNLWNLKPFTTRDFSIRSLADRLGDLSYLIYVFPDRPKDEVFSKYYTPVLAKAVDGYVKPQIKQVVPEFVNASADAGGSSATYMDQAPSPAVCPQAPYNMYPQNPDHVLDQDGEFDLDETMDVARHVEELLRRPMDSLDSRLSPPAGLFTSARGSLS

SEQ ID NO: 19881 - protein, 662 aa, Homo sapiens
MVSKLSQLQTELLAALLESGLSKEALIQALGEPGPYLLAGEGPLDKGESCGGGRGELAELPNGLGETRGSEDETDDDGEDFTPPILKELENLSPEEAAHQKAVVETLLQEDPWRVAKMVKSYLQQHNIPQREVVDTTGLNQSHLSQHLNKGTPMKTQKRAALYTWYVRKQREVAQQFTHAGQGGLIEEPTGDELPTKKGRRNRFKWGPASQQILFQAYERQKNPSKEERETLVEECNRAECIQRGVSPSQAQGLGSNLVTEVRVYNWFANRRKEEAFRHKLAMDTYSGPPPGPGPGPALPAHSSPGLPPPALSPSKVHGVRYGQPATSETAEVPSSSGGPLVTVSTPLHQVSPTGLEPSHSLLSTEAKLVSAAGGPLPPVSTLTALHSLEQTSPGLNQQPQNLIMASLPGVMTIGPGEPASLGPTFTNTGASTLVIGLASTQAQSVPVINSMGSSLTTLQPVQFSQPLHPSYQQPLMPPVQSHVTQSPFMATMAQLQSPHALYSHKPEVAQYTHTGLLPQTMLITDTTNLSALASLTPTKQVRSRPAGPPLACDRAPHPHIPRAQEAALLPQVFTSDTEASSESGLHTPASQATTLHVPSQDPASIQHLQPAHRLSASPTVSSSSLVLYQSSDSSNGQSHLLPSNHSVIETFISTQMASSSQ

SEQ ID NO: 19882 - protein, 430 aa, Homo sapiens
MIVYFPGILATDTHHPQDSALYHLSKQLLQKYHKEVRPVYNWTKATTVYLDLFVHAILDVDAENQILKTSVWYQEVWNDEFLSWNSSMFDEIREISLPLSAIWAPDIIINEFVDIERYPDLPYVYVNSSGTIENYKPIQVVSACSLETYAFPFDVQNCSLTFKSILHTVEDVDLAFLRSPEDIQHDKKAFLNDSEWELLSVSSTYSILQSSAGGFAQIQFNVVMRRHPLVYVVSLLIPSIFLMLVDLGSFYLPPNCRARIVFKTSVLVGYTVFRVNMSNQVPRSVGSTPLIGHFFTICMAFLVLSLAKSIVLVKFLHDEQRGGQEQPFLCLRGDTDADRPRVEPRAQRAVVTESSLYGEHLAQPGTLKEVWSQLQSISNYLQTQDQTDQQEAEWLVLLSRFDRLLFQSYLFMLGIYTITLCSLWALWGGV

SEQ ID NO: 19883 - protein, 163 aa, Homo sapiens
MAVSTVFSTSSLMLALSRHSLLSPLLSVTSFRRFYRGDSPTDSQKDMIEIPLPPWQERTDESIETKRARLLYESRKRGMLENCILLSLFAKEHLQHMTEKQLNLYDRLINEPSNDWDIYYWATGTGEKVLYKKMAHSEVELNRPPGALPHSIMMGKLPLGVVS

SEQ ID NO: 19884 - protein, 871 aa, Homo sapiens
MFTLSQTSRAWFIDRARQAREERLVQKERERAAVVIQAHVRSFLCRSRLQRDIRREIDDFFKADDPESTKRSALCIFKIARKLLFLFRIKEDNERFEKLCRSILSSMDAENEPKVWYVSLACSKDLTLLWIQQIKNILWYCCDFLKQLKPEILQDSRLITLYLTMLVTFTDTSTWKILRGKGESLRPAMNHICANIMGHLNQHGFYSVLQILLTRGLARPRPCLSKGTLTAAFSLALRPVIAAQFSDNLIRPFLIHIMSVPALVTHLSTVTPERLTVLESHDMLRKFIIFLRDQDRCRDVCESLEGCHTLCLMGNLLHLGSLSPRVLEEETDGFVSLLTQTLCYCRKYVSQKKSNLTHWHPVLGWFSQSVDYGLNESMHLITKQLQFLWGVPLIRIFFCDILSKKLLESQEPAHAQPASPQNVLPVKSLLKRAFQKSASVRNILRPVGGKRVDSAEVQKVCNICVLYQTSLTTLTQIRLQILTGLTYLDDLLPKLWAFICELGPHGGLKLFLECLNNDTEESKQLLAMLMLFCDCSRHLITILDDIEVYEEQISFKLEELVTISSFLNSFVFKMIWDGIVENAKGETLELFQSVHGWLMVLYERDCRRRFTPEDHWLRKDLKPSVLFQELDRDRKRAQLILQYIPHVIPHKNRVLLFRTMVTKEKEKLGLVETSSASPHVTHITIRRSRMLEDGYEQLRQLSQHAMKGVIRVKFVNDLGVDEAGIDQDGVFKEFLEEIIKRVFDPALNLFKTTSGDERLYPSPTSYIHENYLQLFEFVGKMLGKAVYEGIVVDVPFASFFLSQLLGHHHSVFYSSVDELPSLDSEFYKNLTSIKRYDGDITDLGLTLSYDEDVMGQLVCHELIPGGKTIPV

SEQ ID NO: 19885 - protein, 1340 aa, Homo sapiens
MKVTVCFGRTRVVVPCGDGHMKVFSLIQQAVTRYRKAIAKDPNYWIQVHRLEHGDGGILDLDDILCDVADDKDRLVAVFDEQDPHHGGDGTSASSTGTQSPEIFGSELGTNNVSAFQPYQATSEIEVTPSVLRANMPLHVRRSSDPALIGLSTSVSDSNFSSEEPSRKNPTRWSTTAGFLKQNTAGSPKTCDRKKDENYRSLPRDTSNWSNQFQRDNARSSLSASHPMVGKWLEKQEQDEDGTEEDNSRVEPVGHADTGLEHIPNFSLDDMVKLVEVPNDGGPLGIHVVPFSARGGRTLGLLVKRLEKGGKAEHENLFRENDCIVRINDGDLRNRRFEQAQHMFRQAMRTPIIWFHVVPAANKEQYEQLSQSEKNNYYSSRFSPDSQYIDNRSVNSAGLHTVQRAPRLNHPPEQIDSHSRLPHSAHPSGKPPSAPASAPQNVFSTTVSSGYNTKKIGKRLNIQLKKGTEGLGFSITSRDVTIGGSAPIYVKNILPRGAAIQDGRLKAGDRLIEVNGVDLVGKSQEEVVSLLRSTKMEGTVSLLVFRQEDAFHPRELKAEDEDIVLTPDGTREFLTFEVPLNDSGSAGLGVSVKGNRSKENHADLGIFVKSIINGGAASKDGRLRVNDQLIAVNGESLLGKTNQDAMETLRRSMSTEGNKRGMIQLIVARRISKCNELKSPGSPPGPELPIETALDDRERRISHSLYSGIEGLDESPSRNAALSRIMGKYQLSPTVNMPQDDTVIIEDDRLPVLPPHLSDQSSSSSHDDVGFVTADAGTWAKAAISDSADCSLSPDVDPVLAFQREGFGRQSMSEKRTKQFSDASQLDFVKTRKSKSMDLGIADETKLNTVDDQKAGSPSRDVGPSLGLKKSSSLESLQTAVAEVTLNGDIPFHRPRPRIIRGRGCNESFRAAIDKSYDKPAVDDDDEGMETLEEDTEESSRSGRESVSTASDQPSHSLERQMNGNQEKGDKTDRKKDKTGKEKKKDRDKEKDKMKAKKGMLKGLGDMFRFGKHRKDDKIEKTGKIKIQESFTSEEERIRMKQEQERIQAKTREFRERQARERDYAEIQDFHRTFGCDDELMYGGVSSYEGSMALNARPQSPREGHMMDALYAQVKKPRNSKPSPVDSNRSTPSNHDRIQRLRQEFQQAKQDEDVEDRRRTYSFEQPWPNARPATQSGRHSVSVEVQMQRQRQEERESSQQAQRQYSSLPRQSRKNASSVSQDSWEQNYSPGEGFQSAKENPRYSSYQGSRNGYLGGHGFNARVMLETQELLRQEQRRKEQQMKKQPPSEGPSNYDSYKKVQDPSYAPPKGPFRQDVPPSPSQVARLNRLQTPEKGRPFYS

SEQ ID NO: 19886 - protein, 1004 aa, Homo sapiens
SFLGIHRLNGPLKCGQPQEVLVDYYIDPADASPDQEISFSYYLIGKGSLVMEGQKHLNSKKKGLKASFSLSLTFTSRLAPDPSLVIYAIFPSGGVVADKIQFSVEMCFDNQVSLGFSPSQQLPGAEVELQLQAAPGSLCALRAVDESVLLLRPDRELSNRSVYGMFPFWYGHYPYQVAEYDQCPVSGPWDFPQPLIDPMPQGHSSQRSIIWRPSFSEGTDLFSFFRDVGLKILSNAKIKKPVDCSHRSPEYSTAMGAGGGHPEAFESSTPLHQAEDSQVRQYFPETWLWDLFPIGNSGKEAVHVTVPDAITEWKAMSFCTSQSRGFGLSPTVGLTAFKPFFVDLTLPYSVVRGESFRLTATIFNYLKDCIRVQTDLAKSHEYQLESWADSQTSSCLCADDAKTHHWNITAVKLGHINFTISTKILDSNEPCGGQKGFVPQKGRSDTLIKPVLVKPEGVLVEKTHSSLLCPKGKVASESVSLELPVDIVPDSTKAYVTVLGDIMGTALQNLDGLVQMPSGCGEQNMVLFAPIIYVLQYLEKAGLLTEEIRSRAVGFLEIGYQKELMYKHSNGSYSAFGERDGNGNTWLTAFVTKCFGQAQKFIFIDPKNIQDALKWMAGNQLPSGCYANVGNLLHTAMKGGVDDEVSLTAYVTAALLEMGKDVDDPMVSQGLRCLKNSATSTTNLYTQALLAYIFSLAGEMDIRNILLKQLDQQAIISGESIYWSQKPTPSSNASPWSEPAAVDVELTAYALLAQLTKPSLTQKEIAKATSIVAWLAKQHNAYGGFSSTQDTVVALQALAKYATTAYMPSEEINLVVKSTENFQRTFNIQSVNRLVFQQDTLPNVPGMYTLEASGQGCVYVQTVLRYNILPPTNMKTFSLSVEIGKARCEQPTSPRSLTLTIHTSYVGSRSSSNMAIVEVKMLSGFSPMEGTNQLLLQQPLVKKVEFGTDTLNIYLDELIKNTQTYTFTISQSVLVTNLKPATIKVYDYYLPDEQATIQYSDPCE

SEQ ID NO: 19887 - protein, 133 aa, Homo sapiens
AIRANCHQEPSVCLQAACPESWIGFQRKCFYFSDDTKNWTSSQRFCDSQDADLAQVESFQELNFLLRYKGPSDHWIGLSREQGQPWKWINGTEWTRQDRVLLCYPGWSAVVPSWLTAALTSLAQVSLPSQPPE

SEQ ID NO: 19888 - protein, 1105 aa, Homo sapiens
MDSLEEPQKKVFKARKTMRVSDRQQLEAVYKVKEELLKTDVKLLNGNHENGDLDPTSPLENMDYIKDKEEVNGIEEICFDPEGSKAEWKETPCILSVNVKNKQDDDLNCEPLSPHNITPEPVSKLPAEPVSGDPAPGDLDAGDPASGVLASGDSTSGDPTSSEPSSSDAASGDATSGDAPSGDVSPGDATSGDATADDLSSGDPTSSDPIPGEPVPVEPISGDCAADDIASSEITSVDLASGAPASTDPASDDLASGDLSSSELASDDLATGELASDELTSESTFDRTFEPKSVPVCEPVPEIDNIEPSSNKDDDFLEKNGADEKLEQIQSKDSLDEKNKADNNIDANEETLETDDTTICSDRPPENEKKVEEDIITELALGEDAISSSMEIDQGEKNEDETSADLVETINENVIEDNKSENILENTDSMETDEIIPILEKLAPSEDELTCFSKTSLLPIDETNPDLEEKMESSFGSPSKQESSESLPKEAFLVLSDEEDISGEKDESEVISQNETCSPEVESNEKDNKPEEEEQVIHEDDERPSEKNEFSRRKRSKSEDMDNVQSKRRRYMEEEYEAEFQVKITAKGDINQKLQKVIQWLLEEKLCALQCAVFDKTLAELKTRVEKIECNKRHKTVLTELQAKIARLTKRFEAAKEDLKKRHEHPPNPPVSPGKTVNDVNSNNNMSYRNAGTVRQMLESKRNVSESAPPSFQTPVNTVSSTNLVTPPAVVSSQPKLQTPVTSGSLTATSVLPAPNTATVVATTQVPSGNPQPTISLQPLPVILHVPVAVSSQPQLLQSHPGTLVTNQPSGNVEFISVQSPPTVSGLTKNPVSLPSLPNPTKPNNVPSVPSPSIQRNPTASAAPLGTTLAVQAVPTAHSIVQATRTSLPTVGPSGLYSPSTNRGPIQMKIPISAFSTSSAAEQNSNTTPRIENQTNKTIDASVSKKAADSTSQCGKATGSDSSGVIDLTMDDEESGASQDPKKLNHTPVSTMSSSQPVSRPLQPIQPAPPLQPSGVPTSGPSQTTIHLLPTAPTTVNVTHRPVTQVTTRLPVPRAPANHQVVYTTLPAPPAQAPLRGTVMQAPAVRQVNPQNSKRFFLYMAPRYM

SEQ ID NO: 19889 - protein, 567 aa, Homo sapiens
MNLHVYISEHEHFTDFNATSALFWEQHDLVYGDWTSGENSDGCYEHFAELDIPQSVQQNGSIYIHVYFTKSGFHPDPRQKALYRRLATVHMSRMINKYKRRRFQKTKNLLTGETEADPEMIKRAEDYGPVEVISHWHPNITINIVDDHTPWVKGSVPPPLDQYVKFDAVSGDYYPIIYFNDYWNLQKDYYPINESLASLPLRVSFCPLSLWRWQLYAAQSTKSPWNFLGDELYEQSDEEQDSVKVALLETNPYLLALTIIVSIVHSVFEFLAFKNDIQFWNSRQSLEGLSVRSVFFGVFQSFVVLLYILDNETNFVVQVSVFIGVLIDLWKITKVMDVRLDREHRVAGIFPRLSFKDKSTYIESSTKVYDDMAFRYLSWILFPLLGCYAVYSLLYLEHKGWYSWVLSMLYGFLLTFGFITMTPQLFINYKLKSVAHLPWRMLTYKALNTFIDDLFAFVIKMPVMYRIGCLRDDVVFFIYLYQRWIYRVDPTRVNEFGMSGEDPTAAAPVAEVPTAAGALTPTPAPTTTTATREEASTSLPTKPTQGASSASEPQEAPPKPAEDKKKD

SEQ ID NO: 19890 - protein, 1054 aa, Homo sapiens
MPGKLKVKIVAGRHLPVMDRASDLTDAFVEVKFGNTTFKTDVYLKSLNPQWNSEWFKFEVDDEDLQDEPLQITVLDHDTYSANDAIGKVYIDIDPLLYSEAATVISGWFPIYDTIHGIRGEINVVVKVDLFNDLNRFRQSSCGVKFFCTTSIPKCYRAVIIHGFVEELVVNEDPEYQWIDRIRTPRASNEARQRLISLMSGELQRKIGLKVLEMRGNAVVGYLQCFDLEGESGLVVRAIGTACTLDKLSSPAAFLPACNSPSKEMKESPLVHPPSHGCRSTHNSPIHTATGSRLTQNFSVSVPTLIYTGMGSGSAGKEGGPFKALLRQQTQSALEQREFPFFTLTAFPPGFLVHVGGVVSARSVKLLDRIHNPAFVGIMGNTRSYKLLDWNSFNSDEPETRDAWWAEIRQEIKSHAKALGCHAVVGYSESTSICEEVCILSASGTAAVLNPRFLQDGTVEGCLEQRLEENLPTRCGFCHIPYDELNMPFPAHLTYCYNCRKQKVPDVLFTTIDLPTDATVIGKGCLIQARLCRLKKKAQAEANATAISNLLPFMEYEVHTQLMNKLKLKGMNALFGLRIQITVGENMLMGLASATGVYLAALPTPGGIQIAGKTPNDGSYEQHISHMQKKINDTIAKNKELYEINPPEISEEIIGSPIPEPRQRSRLLRSQSESSDEVTELDLSHGKKDAFVLEIDDTDAMEDVHSLLTDVPPPSGFYSCNTEIMPGINNWTSEIQMFTSVRVIRLSSLNLTNQALNKNFNDLCENLLKSLYFKLRSMIPCCLCHVNFTVSLPEDELIQVTVTAVAITFDKNQALQTTKTPVEKSLQRASTDNEELLQFPLELCSDSLPSHPFPPAKEHLESASSNSGIPAAQRDRCSSWIELIKLKAQTIRRGSIKTTMTVEKASPVGDGNFRNRSAPPCANSTVGVVKMTPLSFIPGAKITKYLGIINMFFIRETTSLREEGGVSGFLHAFIAEVFAMVRAHVAALGGNAVVSYIMKQCVFMENPNKNQAQCLINVSGDAVVFVRESDLEVVSSQQPTTNCQSSCTEGEVTT

SEQ ID NO: 19891 - protein, 479 aa, Homo sapiens
GNMLRGIGETPIVPLGISYIDDFAKEGHSSLYLGSLNAIGMIGPVIGFALGSLFAKMYVDIGYVDLSTIRITPKDSRWVGAWWLGFLVSGLFSIISSIPFFFLPKNPNKPQKERKISLSLHVLKTNDDRNQTANLTNQGKNVTKNVTGFFQSLKSILTNPLYVIFLLLTLLQVSSFIGSFTYVFKYMEQQYGQSASHANFLLGIITIPTVATGMFLGGFIIKKFKLSLVGIAKFSFLTSMISFLFQLLYFPLICESKSVAGLTLTYDGNNSVASHVDVPLSYCNSECNCDESQWEPVCGNNGITYLSPCLAGCKSSSGIKKHTVFYNCSCVEVTGLQNRNYSAHLGECPRDNTCTRKFFIYVAIQVINSLFSATGGTTFILLTVKIVQPELKALAMGFQSMVIRTLGGILAPIYFGALIDKTCMKWSTNSCGAQGACRIYNSVFFGQKYPASDIKTTRLSGRNKKLLQLYLTSYRSINL

SEQ ID NO: 19892 - protein, 282 aa, Homo sapiens
MSVYLVRQLTSAMLLQRLKMKGIRNPDHSRALIKEKLTADPDSEIATTSLRVSLMCPLGKMRLTIPCRAVTCTHLQCFDAALYLQMNEKKPTWICPVCDKKAAYESLILDGLFMEILNDCSDVDEIKFQEDGSWCPMRPKKEAMKVSSQPCTKIESSSVLSKPCSVTVASEASKKKVDVIDLTIESSSDEEEDPPAKRKCIFMSETQSSPTKGVLMYQPSSVRVPSVTSVDPAAIPPSLTDYSVPFHHTPISSMSSDLPGEQRRNDINNELKLGTSSDTVQQ

SEQ ID NO: 19893 - protein, 789 aa, Homo sapiens
MIASLHSSLDNRFLCLKNIRTFLSTCCEKFGLKRSELFEAFDLFDVQDFGKVIYTLSALSWTPIAQNRGIMPFPTEEESVGDEDIYSGLSDQIDDTVEEDEDLYDCVENEEAEGDEIYEDLMRSEPVSMPPKMTEYDKRCCCLREIQQTEEKYTDTLGSIQQHFLKPLQRFLKPQDIEIIFINIEDLLRVHTHFLKEMKEALGTPGAANLYQVFIKYKERFLVYGRYCSQVESASKHLDRVAAAREDVQMKLEECSQRANNGRFTLRDLLMVPMQRVLKYHLLLQELVKHTQEAMEKENLRLALDAMRDLAQCVNEVKRDNETLRQITNFQLSIENLDQSLAHYGRPKIDGELKITSVERRSKMDRYAFLLDKALLICKRRGDSYDLKDFVNLHSFQVRDDSSGDRDNKKWSHMFLLIEDQGAQGYELFFKTRELKKKWMEQFEMAISNIYPENATANGHDFQMFSFEETTSCKACQMLLRGTFYQGYRCHRCRASAHKECLGRVPPCGRHGQDFPGTMKKDKLHRRAQDKKRNELGLPKMEVFQEYYGLPPPPGAIGPFLRLNPGDIVELTKAEAEQNWWEGRNTSTNEIGWFPCNRVKPYVHGPPQDLSVHLWYAGPMERAGAESILANRSDGTFLVRQRVKDAAEFAISIKYNVEVKHIKIMTAEGLYRITEKKAFRGLTELVEFYQQNSLKDCFKSLDTTLQFPFKEPEKRTISRPAVGSTKYFGTAKARYDFCARDRSELSLKEGDIIKILNKKGQQGWWRGEIYGRVGWFPANYVEEDYSEYC

SEQ ID NO: 19894 - protein, 140 aa, Homo sapiens
MPTVDDILEQVGESGWFQKQAFLILCLLSAAFAPICVGIVFLGFTPDHHCQSPGVAELSQRCGWSPAEELNYTVPGLGPAGEAFLGQCRRYEVDWNQSALSCVDPLASLATNRSHLPLGPCQDGWVYDTPGSSIVTEVWP

SEQ ID NO: 19895 - protein, 479 aa, Homo sapiens
MDSPSLRELQQPLLEGTECETPAQKPGRHELGSPLREIAFAESLRGLQFLSPPLPSVSAGLGEPRPPDVEHPPRQQQQFSSLDDKPQFPGASAEFIDKLEFIQPNVISGIPIYRVMDRQGQIINPSEDPHLPKEKVLKLYKSMTLLNTMDRILYESQRQGRISFYMTNYGEEGTHVGSAAALDNTDLVFGQYREAGVLMYRDYPLELFMAQCYGNISDLGKGRQMPVHYGCKERHFVTISSPLATQIPQAVGAAYAAKRANANRVVICYFGEGAASEGDAHAGFNFAATLECPIIFFCRNNGYAISTPTSEQYRGDGIAARGPGYGIMSIRVDGNDVFAVYNATKEARRRAVAENQPFLIEAMTYRIGHHSTSDDSSAYRSVDEVNYWDKQDHPISRLRHYLLSQGWWDEEQEKAWRKQSRRKVMEAFEQAERKPKPNPNLLFSDVYQEMPAQLRKQQESLARHLQTYGEHYPLDHFDK

SEQ ID NO: 19896 - protein, 271 aa, Homo sapiens
MMLSRAKPAVGRGVQHTDKRKKKGRKIPKLEELLSKRDFTGAITLLEFKRHVGEEEEDTNLWIGYCAFHLGDYKRALEEYENATKEENCNSEVWVNLACTYFFLGMYKQAEAAGFKASKSRLQNRLLFHLAHKFNDEKKLMSFHQNLQDVTEDQLSLASIHYMRSHYQEAIDIYKRILLDNREYLALNVYVALCYYKLDYYDVSQEVLAVYLQQIPDSTIALNLKACNHFRLYNGRAAEAELKSLMDNASSSFEFAKELIRHNLVNNDFPS

SEQ ID NO: 19897 - protein, 2066 aa, Homo sapiens
MCSTPGMPAPGASLALRVSFVDVHPDVIPVQLWGLVGERRGEYLRLSREIQEAAATRGQWALGSASASPGELCLVQVGLLWHRCRVVSRQAQESRVFLLDEGRTITAGAGSLAPGRREFFNLPSEVLGCVLAGLVPAGCGAGSGEPPQHWPADAVDFLSNLQGKEVHGCVLDVLLLHRLVLLEVPDVFQQMRELGLARRVPDSLFRSLLERYLTAATASVGSGVPVLSRVPLKQKQPGLDYFYPQLQLGVTEAVVITQVCHPHRIHCQLRSVSQEIHRLSESMAQVYRGSTGTGDENSTSATWEEREESPDKPGSPCASCGLDGHWYRALLLETFRPQRCAQVLHVDYGRKELVSCSSLRYLLPEYFRMPVVTYPCALYGLWDGGRGWSRSQVGDLKTLILGKAVNAKIEFYCSFEHVYYVSLYGEDGINLNRVFGVQSCCLADRVLQSQATEEEEPETSQSQSPAEEVDEEISLPALRSIRLKMNAFYDAQVEFVKNPSEFWIRLRKHNVTFSKLMRRMCGFYSSASKLDGVVLKPEPDDLCCVKWKENGYYRAIVTKLDDKSVDVFLVDRGNSENVDWYDVRMLLPQFRQLPILAVKCTLADIWPLGKTWSQEAVSFFKKTVLHKELVIHILDKQDHQYVIEILDESRTGEENISKVIAQAGYAKYQEFETKENILVNAHSPGHVSNHFTTESNKIPFAKTGEGEQKAKRENKTTSVSKALSDTTVVTNGSTELVVQEKVKRASVYFPLMQNCLEIKPGSSSKGELEVGSTVEVRVSYVENPGYFWCQLTRNIQGLKTLMSDIQYYCKNTAAPHQRNTLACLAKRTVNRQWSRALISGIQSVEHVNVTFVDYGDREMVSVKNIYSISEEFLKVKAQAFRCSLYNLIQPVGQNPFVWDVKAIQAFNEFIDNAWQKNLELKCTIFALASINEELFNIVDLLTPFQSACHFLVEKRLARPVKLQKPLESSVQLHSYFYSTHDMKIGSEELVYITHIDDPWTFYCQLARNANILEQLSCSITQLSKVLLNLKTSPLNPGTLCLAKYTDGNWYRGIVIEKEPKKVFFVDFGNIYVVTSDDLLPIPSDAYDVLLLPMQAVRCSLSDIPDHIPEEVVVWFQETILDKSLKALVVAKDPDGTLIIELYGDNIQISASINKKLGLLSYKDRIRKKESEVLCSTTETLEEKNENMKLPCTEYLSKSVGYKLPNKEILEESYKPQINSSYKELKLLQSLTKTNLVTQYQDSVGNKNSQVFPLTTEKKEEISAETPLKTARVEATLSERKIGDSCDKDLPLKFCEFPQKTIMPGFKTTVYVSHINDLSDFYVQLIEDEAEISHLSERLNSVKTRPEYYVGPPLQRGDMICAVFPEDNLWYRAVIKEQQPNDLLSVQFIDYGNVSVVHTNKIGRLDLVNAILPGLCIHCSLQGFEVPDNKNSKKMMHYFSQRTSEAAIRCEFVKFQDRWEVILADEHGIIADDMISRYALSEKSQVELSTQVIKSASSKSVNKSDIDTSVFLNWYNPEKKMIRAYATVIDGPEYFWCQFADTEKLQCLEVEVQTAGEQVADRRNCIPCPYIGDPCIVRYREDGHYYRALITNICEDYLVSVRLVDFGNIEDCVDPKALWAIPSELLSVPMQAFPCCLSGFNISEGLCSQEGNDYFYEIITEDVLEITILEIRRDVCDIPLAIVDLKSKGKSINEKMEKYSKTGIKSALPYENIDSEIKQTLGSYNLDVGLKKLSNKAVQNKIYMEQQTDELAEITEKDVNIIGTKPSNFRDPKTDNICEGFENPCKDKIDTEELEGELECHLVDKAEFDDKYLITGFNTLLPHANETKEILELNSLEVPLSPDDESKEFLELESIELQNSLVVDEEKGELSPVPPNVPLSQECVTKGAMELFTLQLPLSCEAEKQPELELPTAQLPLDDKMDPLSLGVSQKAQESMCTEDMRKSSCVESFDDQRRMSLHLHGADCDPKTQNEMNICEEEFVEYKNRDAISALMPLFSEEESSDGSKHNNGLPDHISAQLQNTYTLKAFTVGSKCVVWSSLRNTWSKCEILETAEEGTRKRGLEVMEI

SEQ ID NO: 19898 - protein, 344 aa, Homo sapiens
MQSISFASGGDPDTTDYVAYVAKDPVNQRACHILECHNGMAQDVISTIGQAFELRFKQYLKNPSLNTSCESEEVHIDSHAEEREDHEYYNEIPGKQPPVGGVSDMRIKVQATEQMAYCPIQCEKLCYLPGNSKCSSVYENCLEQSRAIGNVHPRGVQSQRDTSLLKHTCRVDLFDDPCYINTQALQSTPGSAGNQRSAQPLGSPWHCGKAPETVQPGATAQPASSHSLPHIKQQLWSEECYHGKLSRKAAESLLVKDGDFLVRESATSPGQYVLSGLQGGQAKHLLLVDPEGKVRTKDHVFDNVGHLIRYHMDNSLPIISSGSEVSLKQPVRKDNNPALLHSNK

SEQ ID NO: 19899 - protein, 842 aa, Homo sapiens
MDFKVGADGTVFATRELQVPSEQVAFTVTAWDSQTAEKWDAVVRLLVAQTSSPHSGHKPQKGKKVVALDPSPPPKDTLLPWPQHQNANGLRRRKRDWVIPPINVPENSRGPFPQQLVRIRSDKDNDIPIRYSITGVGADQPPMEVFSIDSMSGRMYVTRPMDREEHASYHLRAHAVDMNGNKVENPIDLYIYVIDMNDNRPEFINQVYNGSVDEGSKPGTYVMTVTANDADDSTTANGMVRYRIVTQTPQSPSQNMFTINSETGDIVTVAAGLDREKVQQYTVIVQATDMEGNLNYGLSNTATAIITVTDVNDNPPEFTASTFAGEVPENRVETVVANLTVMDRDQPHSPNWNAVYRIISGDPSGHFSVRTDPVTNEGMVTVVKAVDYELNRAFMLTVMVSNQAPLASGIQMSFQSTAGVTISIMDINEAPYFPSNHKLIRLEEGVPPGTVLTTFSAVDPDRFMQQAVRYSKLSDPASWLHINATNGQITTAAVLDRESLYTKNNVYEATFLAADNGIPPASGTGTLQIYLIDINDNAPELLPKEAQICEKPNLNAINITAADADVDPNIGPYVFELPFVPAAVRKNWTITRLNGDYAQLSLRILYLEAGMYDVPIIVTDSGNPPLSNTSIIKVKVCPCDDNGDCTTIGAVAAAGLGTGAIVAILICILILLTMVLLFVMWMKRREKERHTKQLLIDPEDDVRDNILKYDEEGGGEEDQDYDLSQLQQPEAMGHVPSKAPGVRRVDERPVGAEPQYPIRPMVPHPGDIGDFINEGLRAADNDPTAPPYDSLLVFDYEGSGSTAGSVSSLNSSSSGDQDYDYLNDWGPRFKKLADMYGGGEED

SEQ ID NO: 19900 - protein, 437 aa, Homo sapiens
MLFEGLDLVSALATLAACLVSVTLLLAVSQQLWQLRWAATRDKSCKLPIPKGSMGFPLIGETGHWLLQVFSKIFSHEALESYLPKIQLVIQDTLRAWSSHPEAINVYQEAQKLTFRMAIRVLLGFSIPEEDLGHLFEVYQQFVDNVFSLPVDLPFSGYRRGIQARQILQKGLEKAIREKLQCTQGKDYLDALDLLIESSKEHGKEMTMQELKDGTLELIFAAYATTASASTSLIMQLLKHPTVLEKLRDELRAHGILHSGGCPCEGTLRLDTLSGLRYLDCVIKEVMRLFTPISGGYRTVLQTFELDGFQIPKGWSVMYSIRDTHDTAPVFKDVNVFDPDRFSQARSEDKDGRFHYLPFGGGVRTCLGKHLAKLFLKVLAVELASTSRFELATRTFPRITLVPVLHPVDGLSVKFFGLDSNQNEILPETEAMLSATV

SEQ ID NO: 19901 - protein, 85 aa, Homo sapiens
MLKRFTWTDSKPKASLKIDLRVTSKSKESGLSDVSRPSFCHSSCGHVSEGKRRFTYDHAELERKIACCSPPPDYNSVVLYSTPPI

SEQ ID NO: 19902 - protein, 411 aa, Homo sapiens
SLEGFTRYMDSRECLLFKNECRKVYQDMTHPLNDYFISSSHNTYLVSDQLLGPSDLWGYVSALVKGCRCLEIDCWDGAQNEPVVYHGYTLTSKLLFKTVIQAIHKYAFMTSDYPVVLSLENHCSTAQQEVMADNLQATFGESLLSDMLDDFPDTLPSPEALKFKILVKNKKIGTLKETHERKGSDKRGDNQDKETGVKKLPGVMLFKKKKTRKLKIALALSDLVIYTKAEKFKSFQHSRLYQQFNENNSIGETQARKLSKLRVHEFIFHTRKFITRIYPKATRADSSNFNPQEFWNIGCQMVALNFQTPGLPMDLQNGKFLDNGGSGYILKPHFLRESKSYFNPSNIKEGMPITLTIRLISGIQLPLTHSSSNKGDSLVIIEVFGVPNDQMKQQTRVIKKNGQGNMVIIPA

SEQ ID NO: 19903 - protein, 314 aa, Homo sapiens
MRRQLRSRRAPSFPYSYRYRLDDPDEANQNYLADEEEEAEEEARVTVVPKSEEEEEEEEKEEEEEEEKEEEEGQGQPTGNAWWQKLQIMSEYLWDPERRMFLARTGQSWRVMIRPFAHSLNFNFNVSEPDTWQHYVISLNGFLQGYNDSLQEEMNVDCPPGQYFIQDGNEDEDKKACQFKRSFLKNCSGLEDPTFGYSTGQPCILLKMNRIVGFRPELGDPVKVSCKVQRGDENDIRSISYYPESASFDLRYYPYYGKLTHVNYTSPLVAMHFTDVVKNQAVPVQCQLKGKGVINDVINDRFVGRVIFTLNIET

SEQ ID NO: 19904 - protein, 791 aa, Homo sapiens
MIGPSPNPLILSYLKYAISSQMVSYSSVLTAISKFDDFSRDLCVQALLDIMDMFCDRLSCHGKAEECIGLCRALLSALHWLLRCTAASAERLREGLEAGTPAAGEKQLAMCLQRLEKTLSSTKNRALLHIAKLEEASSWTAIEHSLLKLGEILANLSNPQLRSQAEQCGTLIRSIPTMLSVHAEQMHKTGFPTVHAVILLEGTMNLTGETQSLVEQLTMVKRMQHIPTPLFVLEIWKACFVGLIESPEGTEELKWTAFTFLKIPQVLVKLKKYSHGDKDFTEDVNCAFEFLLKLTPLLDKADQRCNCDCTNFLLQECGKQGLLSEASVNNLMAKRKADREHAPQQKSGENANIQPNIQLILRAEPTVTNILKTMDADHSKSPEGLLGVLGHMLSGKSLDLLLAAAAATGKLKSFARKFINLNEFTTYGSEESTKPASVRALLFDISFLMLCHVAQTYGSEVILSESRTGAEVPFFETWMQTCMPEEGKILNPDHPCFRPDSTKVESLVALLNNSSEMKLVQMKWHEACLSISAAILEILNAWENGVLAFESIQKITDNIKGKVCSLAVCAVAWLVAHVRMLGLDEREKSLQMIRQLAGPLFSENTLQFYNERVVIMNSILERMCADVLQQTATQIKFPSTGVDTMPYWNLLPPKRPIKEVLTDIFAKVLEKGWVDSRSIHIFDTLLHMGGVYWFCNNLIKELLKETRKEHTLRAVELLYSIFCLDMQQVTLVLLGHILPGLLTDSSKWHSLMDPPGTALAKLAVWCALSSYSSHKGQASTRQKKRHREDIE

SEQ ID NO: 19905 - protein, 519 aa, Homo sapiens
MGPRLSVWLLLLPAALLLHEEHSRAAAKGGCAGSGCGKCDCHGVKGQKGERGLPGLQGVIGFPGMQGPEGPQGPPGQKGDTGEPGLPGTKGTRGPPGASGYPGNPGLPGIPGQDGPPGPPGIPGCNGTKGERGPLGPPGLPGFAGNPGPPGLPGMKGDPGEILGHVPGMLLKGERGFPGIPGTPGPPGLPGLQGPVGPPGFTGPPGPPGPPGPPGEKGQMGLSFQGPKGDKGDQGVSGPPGVPGQAQVQEKGDFATKGEKGQKGEPGFQGMPGVGEKGEPGKPGPRGKPGKDGDKGEKGSPGFPGEPGYPGLIGRQGPQGEKGEAGPPGPPGIVIGTGPLGEKGERGYPGTPGPRGEPGPKGFPGLPGQPGPPGLPVPGQAGAPGFPGERGEKGDRGFPGTSLPGPSGRDGLPGPPGSPGPPGQPGYTNGIVECQPGPPGDQGPPGIPGQPGFIGEIGEKGQKGESCLICDIDGYRGPPGPQGPPGEIGFPGQPGAKGDRGLPGRDGVAGVPLLFQIHK

SEQ ID NO: 19906 - protein, 618 aa, Homo sapiens
MEVKAALFGEAAPQVKSERLRGLLDRQRTLQEALSLKLQELRKVCLQEAELTGQLPPECPLEPGERPQLVRRRPPTARAYPPPHPNQAHHSLCPAEELALEALEREVSVQQQIAAAARRLALAPDLSTEQRRRRRQVQADALRRLHELEEQLRDVRARLGLPVLPLPQPLPLSTGSVITTQGVCLGMRLAQLSQEDVVLHSESSSLSESGASHDNEEPHGCFSLAERPSPPKAWDQLRAVSGGSPERRTPWKPPPSDLYGDLKSRRNSVASPTSPTRSLPRSASSFEGRSVPATPVLTRGAGPQLCKPEGLHSRQWSGSQDSQMGFPRADPASDRASLFVARTRRSNSSEALLVDRAAGGGAGSPPAPLAPSASGPPVCKSSEVLYERPQPTPAFSSRTAGPPDPPRAARPSSAAPASRGAPRLPPVCGDFLLDYSLDRGLPRSGGGTGWGELPPAAEVPGPLSRRDGLLTMLPGPPPVYAADSNSPLLRTKDPHTRATRTKPCGLPPEAAEGPEVHPNPLLWMPPPTRIPSAGERSGHKNLALEGLRDWYIRNSGLAAGPQRRPVLPSVGPPHPPFLHARCYEVGQALYGAPSQAPLPHSRSFTAPPVSGRYGGCFY

SEQ ID NO: 19907 - protein, 186 aa, Homo sapiens
MKSAKPQVNHSQHGESQRALSPLQSTLSSAASPSQAYETYIENGLICLKHKIRNIEKKKLKLEDYKDRLKSGEHLNPDQLEAVEKYEEVLHNLEFAKELQKTFSGLSLDLLKAQKKAQRREHMLKLEAEKKKLRTILQVQYVLQNLTQEHVQKDFKGGLNGAVYLPSKELDYLIKFSKLTCPERNE

SEQ ID NO: 19908 - protein, 178 aa, Homo sapiens
MEVRWDRSHRYPAVHVYMDGDHVAGEQMAEYRGRTVLVSDAIDEGRLTLQILSARPSDDGQYRCLFEKDDVYQEASLDLKVVSLGSSPLITVEGQEDGEMQPMCSSDGWFPQPHVPWRDMEGKTIPSSSQALTQGSHGLFHVQTLLRVTNISAVDVTCSISIPFLGEEKIATFSLSGW

SEQ ID NO: 19909 - protein, 116 aa, Homo sapiens
MLAAKEEQLREFQEEMAALKENLLEDDKEPCCLPQWSVPKDTCRLYRGNDQIMTNLEQWAKQQKVANEKLGNQLREQVKYIAKLSGEKESFLLLYTRIKKDSHSQVTHTPSVLGQF

SEQ ID NO: 19910 - protein, 120 aa, Homo sapiens
MKKEGTTLGLTVSGGIDKDGKPRVSNLRQGGIAARSDQLDVGDYIKAVNGINLAKFRHDEIISLLKNVGERVVLEVEYELPPVSVQGSSVIFRTVEVTLHKEGNTFGFVIRGGAHDDRNK

SEQ ID NO: 19911 - protein, 304 aa, Homo sapiens
MNIVFSRDSQVRVMENTVANTEKYFGQFCSLLAAYTRKTARLRDKADQLVKQLIDFANSENPELRATMRGFAEDLAKVQDYRQAQVERLETKVVNPLKLYGAQIKQTRAEIKKFKHVQNHEIKQLEKLEKLRQKSPSDQQMISQAETRVQRAAVDSSRTTLQLEETVDGFQRQKLKDLQKFFCDFVTIEMVFHAKAVEVYSSAFQTLEKYDLERDLLDFRAKMQGVYGHYDTRLLANTSPPPSVLQSLASQGTLQVQLSRANEDPEHPHANHGRFSLCEWVVKGQPAHCVCGQGGHLMLPGHSL

SEQ ID NO: 19912 - protein, 406 aa, Homo sapiens
MQRMIQQFAAEYTSKNSSTQDPSQPNSTKNQSLPKASPVTTSPTAATTQNPVLSKLLMADQDSPLDLTVRKSQSEPSEQDGVLDLSTKKSPCAGSTSLSHSPGCSSTQGNGRPGRPSQYRPDGLRSGDGVPPRSLQDGTREGFGHSTSLKVPLARSLQISEELLSRNQLSTAASLGPSGLQNHGQHLILSREASWAKPHYEFNLSRMKFRGNGALSNISDLPFLAENSAFPKMALQAKQDGKKDVSHSSPVDLKIPQVRGMDLSWESRTGDQYSYSSLVMGSQTESALSKKLRAILPKQSRKSMLDAGPDSWGSDAEQSTSGQPYPTSDQEGDPGSKQPRKKRGRYRQYNSEILEEAISVVMSGKMSVSKAQSIYGIPHSTLEYKVKERLGTLKNPPKKKMKLMSG

SEQ ID NO: 19913 - protein, 321 aa, Homo sapiens
MSADNSSTICVCRSVRQELGIAIGFLVPPVLVPNIEDRDELAYHISIMFYIIGGVATLLLILVIIVFKEKPKYPPSRAQSLSYALTSPDASYLGSIARLFKNLNFVLLVITYGLNAGAFYALSTLLNRMVIWHYPGEEVNAGRIGLTIVIAGMLGAVISGIWLDRSKTYKETTLVVYIMTLVGMVVYTFTLNLGHLWVVFITAGTMGFFMTGYLPLGFEFAVELTYPESEGISSGLLNISAQVFGIIFTISQGQIIDNYGTKPGNIFLCVFLTLGAALTAFIKADLRRQKANKETLENKLQEEEEESNTSKVPTAVSEDHL

SEQ ID NO: 19914 - protein, 980 aa, Homo sapiens
MMSDASDMLAAALEQMDGIIAGSKALEYSNGIFDCQSPTSPFMGSLRALHLVEDLRGLLEMMETDEKEGLRCQIPDSTAETLVEWLQSQMTNGHLPGNGDVYQERLARLENDKESLVLQVSVLTDQVEAQGEKIRDLEFCLEEHREKVNATEEMLQQELLSRTSLETQKLDLMAEISNLKLKLTAVEKDRLDYEDKFRDTEGLIQEINDLRLKVSEMDSERLQYEKKLKSTKDELASLKEQLEEKESEVKRLQEKLVCKMKGEGVEIVDRDIEVQKMKKAVESLMAANEEKDRKIEDLRQCLNRYKKMQDTVVLAQGKDGEYEELLNSSSISSLLDAQGFSDLEKSPSPTPVMGSPSCDPFNTSVPEEFHTTILQVSIPSLLPATVSMETSEKSKLTPKPETSFEENDGNIILGATVDTQLCDKLLTSSLQKSSSLGNLKKETSDGEKETIQKTSEDRAPAESRPFGTLPPRPPGQDTSMDDNPFGTRKVRSSFGRGFFKIKSNKRTASAPNLAETEKETAEHLDLAGASSRPKDSQRNSPFQIPPPSPDSKKKSRGIMKLFGKLRRSQSTTFNPDDMSEPEFKRGGTRATAGPRLGWSRDLGQSNSDLDMPFAKWTKEQVCNWLMEQGLGSYLNSGKHWIASGQTLLQASQQDLEKELGIKHSLHRKKLQLALQALGSEEETNHGKLDFNWVTRWLDDIGLPQYKTQFDEGRVDGRMLHYMTVDDLLSLKVVSVLHHLSIKRAIQVLRINNFEPNCLRRRPSDENTIAPSEVQKWTNHRVMEWLRSVDLAEYAPNLRGSGVHGGLMVLEPRFNVETMAQLLNIPPNKTLLRRHLATHFNLLIGAEAQHQKRDAMELPDYVLLTATAKVKPKKLAFSNFGNLRKKKQEDGEEYVCPMELGQASGSASKKGFKPGLDMRLYEEDDLDRLEQMEDSEGTVRQIGAFSEGINNLTHMLKEDDMFKDFAARSPSASITDEDSNV

SEQ ID NO: 19915 - protein, 398 aa, Homo sapiens
MASPLRSAAALARQDCSNGCSAECTGEGGSKEVVGTFKAKDLIVTPATILKEKPDPNNLVFGTVFTDHMLTVEWSSEFGWEKPHIKPLQNLSLHPGSSALHYAVELFEGLKAFRGVDNKIRLFQPNLNMDRMYRSAVRATLPVFDKEELLECIQQLVKLDQEWVPYSTSASLYIRPTFIGTEPSLGVKKPTKALLFVLLSPVGPYFSSGTFNPVSLWANPKYVRAWKGGTGDCKMGGNYGSSLFAQCEAVDNGCQQVLWLYGEDHQITEVGTMNLFLYWINEDGEEELATPPLDGIILPGVTRRCILDLAHQWGEFKVSERYLTMDDLTTALEGNRVREMFGSGTACVVCPVSDILYKGETIHIPTMENGPKLASRILSKLTDIQYGREESDWTIVLS

SEQ ID NO: 19916 - protein, 136 aa, Homo sapiens
MRKGVLKDPEIADLFYKDDPEELFIGLHEIGHGSFGAVYFATNAHTSEVVAIKKMSYSGKQTHEKWQDILKEVKFLRQLKHPNTIEYKGCYLKEHTAWLVMEYCLGSASDLLEVHKKPLQEVEIAAITHGALHGLA

SEQ ID NO: 19917 - protein, 564 aa, Homo sapiens
MADLMQETFLHHATDGVGVDEKLSLRRVAVVEDFFDIIYSMHVETGPNGEQIRKHAGQKRTYKAISESYAFLPREAVTRFLMSCSECQKRMHLNPDGTDHKDNGKPPTLVTSMIDYNMPITMAYMKHMKLQLLNSQQDEDESSIESDEFDMSDSTRMSAVNSDLSSNLEERMQSPQNLHGQQDDDSAAESFNGNETLGHSSIASGGTHSREMGDSNSDGKTGLEQDEQPLNLSDSPLSAQLTSEYRIDDHNSNGKNKYKNLLISDLKMEREARENGSKSPAHSYSSYDSGKNESVDRGAEDLSLNRGDEDEDDHEDHDDSEKVNETDGVEAERLKAFNMFVRLFVDENLDRMVPISKQPKEKIQAIIDSCRRQFPEYQERARKRIRTYLKSCRRMKRSGFEMSRPIPSHLTSAVAESILASACESESRNAAKRMRLERQQDESAPADKQCKPEATQATYSTSAVPGSQDVLYINGNGTYSYHSYRGLGGGLLNLNDASSSGPTDLSMKRQLATSSGSSSSSNSRPQLSPTEINAVRQLVAGYRESAAFLLRSADELENLILQQN

SEQ ID NO: 19918 - protein, 1564 aa, Homo sapiens
MGAMTQLLAGVFLAFLALATEGGVLKKVIRHKRQSGVNATLPEENQPVVFNHVYNIKLPVGSQCSVDLESASGEKDLAPPSEPSESFQEHTVDGENQIVFTHRINIPRRACGCAAAPDVKELLSRLEELENLVSSLREQCTAGAGCCLQPATGRLDTRPFCSGRGNFSTEGCGCVCEPGWKGPNCSEPECPGNCHLRGRCIDGQCICDDGFTGEDCSQLACPSDCNDQGKCVNGVCICFEGYAGADCSREICPVPCSEEHGTCVDGLCVCHDGFAGDDCNKPLCLNNCYNRGRCVENECVCDEGFTGEDCSELICPNDCFDRGRCINGTCYCEEGFTGEDCGKPTCPHACHTQGRCEEGQCVCDEGFAGVDCSEKRCPADCHNRGRCVDGRCECDDGFTGADCGELKCPNGCSGHGRCVNGQCVCDEGYTGEDCSQLRCPNDCHSRGRCVEGKCVCEQGFKGYDCSDMSCPNDCHQHGRCVNGMCVCDDGYTGEDCRDRQCPRDCSNRGLCVDGQCVCEDGFTGPDCAELSCPNDCHGQGRCVNGQCVCHEGFMGKDCKEQRCPSDCHGQGRCVDGQCICHEGFTGLDCGQHSCPSDCNNLGQCVSGRCICNEGYSGEDCSEVSPPKDLVVTEVTEETVNLAWDNEMRVTEYLVVYTPTHEGGLEMQFRVPGDQTSTIIQELEPGVEYFIRVFAILENKKSIPVSARVATYLPAPEGLKFKSIKETSVEVEWDPLDIAFETWEIIFRNMNKEDEGEITKSLRRPETSYRQTGLAPGQEYEISLHIVKNNTRGPGLKRVTTTRLDAPSQIEVKDVTDTTALITWFKPLAEIDGIELTYGIKDVPGDRTTIDLTEDENQYSIGNLKPDTEYEVSLISRRGDMSSNPAKETFTTGLDAPRNLRRVSQTDNSITLEWRNGKAAIDSYRIKYAPISGGDHAEVDVPKSQQATTKTTLTGLRPGTEYGIGVSAVKEDKESNPATINAATELDTPKDLQVSETAETSLTLLWKTPLAKFDRYRLNYSLPTGQWVGVQLPRNTTSYVLRGLEPGQEYNVLLTAEKGRHKSKPARVKASTAMGSPKEVIFSDITENSATVSWRAPTAQVESFRITYVPITGGTPSMVTVDGTKTQTRLVKLIPGVEYLVSIIAMKGFEESEPVSGSFTTALDGPSGLVTANITDSEALARWQPAIATVDSYVISYTGEKVPEITRTVSGNTVEYALTDLEPATEYTLRIFAEKGPQKSSTITAKFTTDLDSPRDLTATEVQSETALLTWRPPRASVTGYLLVYESVDGTVKEVIVGPDTTSYSLADLSPSTHYTAKIQALNGPLRSNMIQTIFTTIGLLYPFPKDCSQAMLNGDTTSGLYTIYLNGDKAEALEVFCDMTSDGGGWIVFLRRKNGRENFYQNWKAYAAGFGDRREEFWLGLDNLNKITAQGQYELRVDLRDHGETAFAVYDKFSVGDAKTRYKLKVEGYSGTAGDSMAYHNGRSFSTFDKDTDSAITNCALSYKGAFWYRNCHRVNLMGRYGDNNHSQGVNWFHWKGHEHSIQFAEMKLRPSNFRNLEGRRKRA

SEQ ID NO: 19919 - protein, 2433 aa, Homo sapiens
MPAILVASKMKSGLPKPVHSAAPILHVPPARAGPQPCYLKLGSKVEVSKTTYPSQIPLKSQVLQGLQEPAGEGLPLRKSGSVENGFDTQIYTDWANHYLAKSGHKRLIRDLQQDVTDGVLLAQIIQVVANEKIEDINGCPKNRSQMIENIDACLNFLAAKGINIQGLSAEEIRNGNLKAILGLFFSLSRYKQQQQQPQKQHLSSPLPPAVSQVAGAPSQCQAGTPQQQVPVTPQAPCQPHQPAPHQQSKAQAEMQSRLPGPTARVSAAGSEAKTRGGSTTANNRRSQSFNNYDKSKPVTSPPPPPSSHEKEPLASSASSHPGMSDNAPASLESGSSSTPTNCSTSSAIPQPGAATKPWRSKSLSVKHSATVSMLSVKPPGPEAPRPTPEAMKPAPNNQKSMLEKLKLFNSKGGSKAGEGPGSRDTSCERLETLPSFEESEELEAASRMLTTVGPASSSPKIALKGIAQRTFSRALTNKKSSLKGNEKEKEKQQREKDKEKSKDLAKRASVTERLDLKEEPKEDPSGAAVPEMPKKSSKIASFIPKGGKLNSAKKEPMAPSHSGIPKPGMKSMPGKSPSAPAPSKEGERSRSGKLSSGLPQQKPQLDGRHSSSSSSLASSEGKGPGGTTLNHSISSQTVSGSVGTTQTTGSNTVSVQLPQPQQQYNHPNTATVAPFLYRSQTDTEGNVTAESSSTGVSVEPSHFTKTGQPALEELTGEDPEARRLRTVKNIADLRQNLEETMSSLRGTQVTHSTLETTFDTNVTTEMSGRSILSLTGRPTPLSWRLGQSSPRLQAGDAPSMGNGYPPRANASRFINTESGRYVYSAPLRRQLASRGSSVCHVDVSDKAGDEMDLEGISMDAPGYMSDGDVLSKNIRTDDITSGYMTDGGLGLYTRRLNRLPDGMAVVRETLQRNTSLGLGDADSWDDSSSVSSGISDTIDNLSTDDINTSSSISSYANTPASSRKNLDVQTDAEKHSQVERNSLWSGDDVKKSDGGSDSGIKMEPGSKWRRNPSDVSDESDKSTSGKKNPVISQTGSWRRGMTAQVGITMPRTKPSAPAGALKTPGTGKTDDAKVSEKGRLSPKASQVKRSPSDAGRSSGDESKKPLPSSSRTPTANANSFGFKKQSGSAAGLAMITASGVTVTSRSATLGKIPKSSALVSRSAGRKSSMDGAQNQDDGYLALSSRTNLQYRSLPRPSKSNSRNGAGNRSSTSSIDSNISSKSAGLPVPKLREPSKTALGSSLPGLVNQTDKEKGISSDNESVASCNSVKVNPAAQPVSSPAQTSLQPGAKYPDVASPTLRRLFGGKPTKQVPIATAENMKNSVVISNPHATMTQQGNLDSPSGSGVLSSGSSSPLYSKNVDLNQSPLASSPSSAHSAPSNSLTWGTNASSSSAVSKDGLGFQSVSSLHTSCESIDISLSSGGVPSHNSSTGLIASSKDDSLTPFVRTNSVKTTLSESPLSSPAASPKFCRSTLPRKQDSDPHLDRNTLPKKGLRYTPTSQLRTQEDAKEWLRSHSAGGLQDTAANSPFSSGSSVTSPSGTRFNFSQLASPTTVTQMSLSNPTMLRTHSLSNADGQYDPYTDSRFRNSSMSLDEKSRTMSRSGSFRDGFEEVHGSSLSLVSSTSSVYSTPEEKCQSEIRKLRRELDASQEKVSALTTQLTANAHLVAAFEQSLGNMTIRLQSLTMTAEQKDSELNELRKTIELLKKQNAAAQAAINGVINTPELNCKGNGTAQSADLRIRRQHSSDSVSSINSATSHSSVGSNIESDSKKKKRKNWVNIQLRSSFKQAFGKKKSPKSASSHSDIEEMTDSSLPSSPKLPHNGSTGSTPLLRNSHSNSLISECMDSEAETVMQLRNELRDKEMKLTDIRLEALSSAHQLDQLREAMNRMQSEIEKLKAENDRLKSESQGSGCSRAPSQVSISASPRQSMGLSQHSLNLTESTSLDMLLDDTGECSARKEGGRHVKIVVSFQEEMKWKEDSRPHLFLIGCIGVSGKTKWDVLDGVVRRLFKEYIIHVDPVSQLGLNSDSVLGYSIGEIKRSNTSETPELLPCGYLVGENTTISVTVKGLAENSLDSLVFESLIPKPILQRYVSLLIEHRRIILSGPSGTGKTYLANRLSEYIVLREGRELTDGVIATFNVDHKSSKELRQYLSNLADQCNSENNAVDMPLVIILDNLHHVSSLGEIFNGLLNCKYHKCPYIIGTMNQATSSTPNLQLHHNFRWVLCANHTEPVKGFLGRFLRRKLMETEISGRVRNMELVKIIDWIPKVWHHLNRFLEAHSSSDVTIGPRLFLSCPIDVDGSRVWFTDLWNYSIIPYLLEAVREGLQLYGRRAPWEDPAKWVMDTYPWAASPQQHEWPPLLQLRPEDVGFDGYSMPREGSTSKQMPPSDAEGDPLMNMLMRLQEAANYSSPQSYDSDSNSNSHHDDILDSSLESTL

SEQ ID NO: 19920 - protein, 412 aa, Homo sapiens
MSIYPKSTGNKGFEDGDDAISKLHDQEEYGAALIRNNMQHIMGPVTAIKLLGEENKENTPRNVLNIIPASMNYAKAHSKDKKKPQRDSQAQKSPVKSKSTHRIQHNIDYLKHLSKVKKIPSDFEGSGYTDLQERGDNDISPFSGDGQPFKDIPGKGEATGPDLEGKDIQTGFAGPSEAESTHLDTKKPGYNEIPEREENGGNTIGTRDETAKEADAVDVSLVEGSNDIMGSTNFKELPGREGNRVDAGSQNAHQGKVEFHYPPAPSKEKRKEGSSDAAESTNYNEIPKNGKGSTRKGVDHSNRNQATLNEKQRFPSKGKSQGLPIPSRGLDNEIKNEMDSFNGPSHENIITHGRKYHYVPHRQNNSTRNKGMPQGKGSWGRQPHSNRRFSSRRRDDSSESSDSGSSSESDGD

SEQ ID NO: 19921 - protein, 894 aa, Homo sapiens
MNQIEPGVQYNYVYDEDEYMIQEEEWDRDLLLDPAWEKQQRKTFTAWCNSHLRKAGTQIENIEEDFRNGLKLMLLLEVISGERLPKPDRGKMRFHKIANVNKALDYIASKGVKLVSIGAEEIVDGNVKMTLGMIWTIILRFAIQDISVEETSAKEGLLLWCQRKTAPYRNVNIQNFHTSWKDGLGLCALIHRHRPDLIDYSKLNKDDPIGNINLAMEIAEKHLDIPKMLDAEDLVYTARPDERAIMTYVSCYYHAFAGAQKAETAANRICKVLAVNQENERLMEEYERLASELLEWIRRTIPWLENRTPEKTMQAMQKKLEDFRDYRRKHKPPKVQEKCQLEINFNTLQTKLRISNRPAFMPSEGKMVSDIAGAWQRLEQAEKGYEEWLLNEIRRLERLEHLAEKFRQKASTHETWAYGKEQILLQKDYESASLTEVRALLRKHEAFESDLAAHQDRVEQIAAIAQELNELDYHDAVNVNDRCQKICDQWDRLGTLTQKRREALERMEKLLETIDQLHLEFAKRAAPFNNWMEGAMEDLQDMFIVHSIEEIQSLITAHEQFKATLPEADGERQSIMAIQNEVEKVIQSYNIRISSSNPYSTVTMDELRTKWDKVKQLVPIRDQSLQEELARQHANERLRRQFAAQANAIGPWIQNKMEEIARSSIQITGALEDQMNQLKQYEHNIINYKNNIDKLEGDHQLIQEALVFDNKHTNYTMEHIRVGWELLLTTIARTINEVETQILTRDAKGITQEQMNEFRASFNHFDRRKNGLMDHEDFRACLISMGYDLGEAEFARIMTLVDPNGQGTVTFQSFIDFMTRETADTDTAEQVIASFRILASDKPYILAEELRRELPPDQAQYCIKRMPAYSGPGSVPGALDYAAFSSALYGESDL

SEQ ID NO: 19922 - protein, 409 aa, Homo sapiens
MARLTESEARRQQQQLLQPRPSPVGSSGPEPPGGQPDGMKDLDAIKLFVGQIPRHLDEKDLKPLFEQFGRIYELTVLKDPYTGMHKGCAFLTYCARDSAIKAQTALHEQKTLPGMARPIQVKPADSESRGGRDRKLFVGMLNKQQSEEDVLRLFQPFGVIDECTVLRGPDGSSKGCAFVKFSSHTEAQAAIHALHGSQTMPGASSSLVVKFADTDKERTLRRMQQMVGQLGILTPSLTLPFSPYSAYAQALMQQQTTVLSTSGSYLSPGVAFSPCHIQQIGAVSLNGLPATPIAPASGVVPFPGGHPALETVYANGLVPYPAQSPTVAETLHPAFSGVQQYTAMYPTAAITPIAHSVPQPPPLLQQQQREGVWRHGADADVPTLRQYHFLQGVYGSSYQPEQVFRLREL

SEQ ID NO: 19923 - protein, 636 aa, Homo sapiens
MMKEVLSTGQGNTEVIHTGTLQRHESHHIGDFCFQEIEKEIHDIEFQCQEDERNGLEAPMTKIKKLTGSTDQHDHRHAGNKPIKDQLGSSFYSHLPELHIFQIKGEIGNQLEKSTNDAPSVSTFQRISCRPQTQISNNYGNNPLNSSLLPQKQEVHMREKSFQCNKSGKAFNCSSLLRKHQIPHLGDKQYKCDVCGKLFNHEQYLACHDRCHTVEKPYKCKECGKTFSQESSLTCHRRLHTGVKRYNCNECGKIFGQNSALLIDKAIDTGENPYKCNECDKAFNQQSQLSHHRIHTGEKPYKCEECDKVFSRKSTIETHKRIHTGEKPYRCKVCDTAFTWHSQLARHRRIHTAKKTYKCNECGKTFSHKSSLVCHHRLHGGEKSYKCKVCDKAFVWSSQLAKHTRIDCGEKPYKCNECGKTFGQNSDLLIHKSIHTGEQPYKCDECEKVFSRKSSLETHKIGHTGEKPYKCKVCDKAFACHSYLAKHTRIHSGEKPYKCNECSKTFSHRSYLVCHHRVHSGEKPYKCNECSKTFSRRSSLHCHRRLHSGEKPYKCNECGNTFRHCSSLIYHRRLHTGEKSYKCTICDKAFVRNSLLSRHTRIHTAEKPYKCNECGKAFNQQSHLSRHHRIHTGEKP

SEQ ID NO: 19924 - protein, 174 aa, Homo sapiens
MTATRAATASGSAPRIVNISVLPSPAHAFRALCTAEGEPPPALAWSGPALGNSLAAVRSPREGHGHLVTAELPALTHDGRYTCTAANSLGRSEASVYLFRFHGASGASTVALLLGALGFKALLLLGVLAARAARRRPEHLDTPDTPPRSQAQESNYENLSQMNPRSPPATMCSP

SEQ ID NO: 19925 - protein, 753 aa, Homo sapiens
MSVMSSKRPASPYGEADGEVAMVTSRQKVEEEESDGLPAFHLPLHVSFPNKPHSEEFQPVSLLTQETCGHRTPTSQHNTMEVDGNKVMSSFAPHNSSTSPQKAEEGGRQSGESLSSTALGTPERRKGSLADVVDTLKQRKMEELIKNEPEETPSIEKLLSKDWKDKLLAMGSGNFGEIKGTPESLAEKERQLMGMINQLTSLREQLLAAHDEQKKLAASQIEKQRQQMELAKQQQEQIARQQQQLLQQQHKINLLQQQIQVQGQLPPLMIPVFPPDQRTLAAAAQQGFLLPPGFSYKAGCSDPYPVQLIPTTMAAAAAATPGLGPLQLQQLYAAQLAAMQVSPGGKLPGIPQGNLGAAVSPTSIHTDKSTNSPPPKSKDEVAQPLNLSAKPKTSDGKSPTSPTSPHMPALRINSGAGPLKASVPAALASPSARVSTIGYLNDHDAVTKAIQEARQMKEQLRREQQVLDGKVAVVNSLGLNNCRTEKEKTTLESLTQQLAVKQNEEGKFSHAMMDFNLSGDSDGSAGVSESRIYRESRGRGSNEPHIKRPMNAFMVWAKDERRKILQAFPDMHNSNISKILGSRWKAMTNLEKQPYYEEQARLSKQHLEKYPDYKYKPRPKRTCLVDGKKLRIGEYKAIMRNRRQEMRQYFNVGQQAQIPIATAGVVYPGAIAMAGMPSPHLPSEHSSVSSSPEPGMPVIQSTYGVKGEEPHIKEEIQAEDINGEIYDEYDEEEDDPDVDYGSDSENHIAGQAN

SEQ ID NO: 19926 - protein, 240 aa, Homo sapiens
MLHALVRIGREEGLKALYSGIAPAMLRQASYGTIKIGTYQSLKRLFIERPEDETLPINVICGILSGVISSTIANPTDVLKIRMQAQSNTIQGGMIGNFMNIYQQEGTRGLWKGVSLTAQRAAIVVGVELPVYDITKKHLILSGLMGDTVYTHFLSSFTCGLAGALASNPVDVVRTRMMNQRVLRDGRCSGYTGTLDCLLQTWKNEGFFALYKGFWPNWLRLGPWNIIFFVTYEQLKKLDL

SEQ ID NO: 19927 - protein, 262 aa, Homo sapiens
MEKLAASTEPQGPRPVLGRESVQVPDDQDFRSFRSECEAECRMECCDVPAETLYDVLHDIEYRKKWDSNVIETFDIARLTVNADVGYYSWRCPKPLKNRDVITLRSWLPMGADYIIMNYSVKHPKYPPRKDLVRAVSIQTGYLIQSTGPKSCVITYLAQVDPKGSLPKWVVNKSSQFLAPKAMKKMYKACLKYPEWKQKHLPHFKPWLHPEQSPLPSLALSELSVQHADSLENIDESAVAESREERMGGAGGEGSDDDTSLT

SEQ ID NO: 19928 - protein, 580 aa, Homo sapiens
MMNFSNIMNYMKLLGQYCPGGELFDYIISQDRLSEEETRVVFRQIVSAVAYVHSQGYAHRDLKPENLLFDEYHKLKLIDFGLCAKPKGNKDYHLQTCCGSLAYAAPELIQGKSYLGSEADVWSMGILLYVLMCGFLPFDDDNVMALYKKIMRGKYDVPKWLSPSSILLLQQMLQVDPKKRISMKNLLNHPWIMQDYNYPVEWQSKNPFIHLDDDCVTELSVHHRNNRQTMEDLISLWQYDHLTATYLLLLAKKARGKPVRLRLSSFSCGQASATPFTDIKSNNWSLEDVTASDKNYVAGLIDYDWCEDDLSTGAATPRTSQFTKYWTESNGVESKSLTPALCRTPANKLKNKENVYTPKSAVKNEEYFMFPEPKTPVNKNQHKREILTTPNRYTTPSKARNQCLKETPIKIPVNSTGTDKLMTGVISPERRCRSVELDLNQAHMEETPKRKGAKVFGSLERGLDKVITVLTRSKRKGSARDGPRRLKLHYNVTTTRLVNPDQLLNEIMSILPKKHVDFVQKGYTLKCQTQSDFGKVTMQFELEVCQLQKPDVVGIRRQRLKGDAWVYKRLVEDILSSCKV

SEQ ID NO: 19929 - protein, 1238 aa, Homo sapiens
MTIWQMQKQAQRGSPARTHSMMSLSVRPQRRLLSARVNRSQSFAGVLGSHERGPRSFPVFSPPGPPRKPPALSRVSRMFSVAHPAAKVPQPERLDLVYTALKRGLTAYLEVHQQEQEKLQGQIRESKRNSRLGFLYDLDKQVKSIERFLRRLEFHASKIDELYEAYCVQRRLRDGAYNMVRAYTTGSPGSREARDSLAEATRGHREYTESMCLLESELEAQLGEFHLRMKGLAGFARLCVGDQYEICMKYGRQRWKLRGRIEGSGKQVWDSEETIFLPLLTEFLSIKVTELKGLANHVVVGSVSCETKDLFAALPQVVAVDINDLGTIKLSLEVTWSPFDKDDQPSAASSVNKASTVTKRFSTYSQSPPDTPSLREQAFYNMLRRQEELENGTAWSLSSESSDDSSSPQLSGTARHSPAPRPLVQQPEPLPIQVAFRRPETPSSGPLDEEGAVAPVLANGHAPYSRTLSHISEASVDAALAEASVEAVGPESLAWGPSPPTHPAPTHGEHPSPVPPALDPGHSATSSTLGTTGSVPTSTDPAPSAHLDSVHKSTDSGPSELPGPTHTTTGSTYSAITTTHSAPSPLTHTTTGSTHKPIISTLTTTGPTLNIIGPVQTTTSPTHTMPSPTHTTASPTHTSTSPTHTPTSPTHKTSMSPPTTTSPTPSGMGLVQTATSPTHPTTSPTHPTTSPILINVSPSTSLELATLSSPSKHSDPTLPGTDSLPCSPPVSNSYTQADPMAPRTPHPSPAHSSRKPLTSPAPDPSESTVQSLSPTPSPPTPAPQHSDLCLAMAVQTPVPTAAGGSGDRSLEEALGALMAALDDYRGQFPELQGLEQEVTRLESLLMRQGLTRSRASSLSITVEHALESFSFLNEDEDEDNDVPGDRPPSSPEAGAEDSIDSPSARPLSTGCPALDAALVRHLYHCSRLLLKLGTFGPLRCQEAWALERLLREARVLEAVCEFSRRWEIPASSAQEVVQFSASRPGFLTFWDQCTERLSCFLCPVERVLLTFCNQYGARLSLRQPGLAEAVCVKFLEDALGQKLPRRPQPGPGEQLTVFQFWSFVETLDSPTMEAYVTETAEEVLLVRNLNSDDQAVVLKALRLAPEGRLRRDGLRALSSLLVHGNNKVMAAVSTQLRSLSLGPTFRERALLCFLDQLEDEDVQTRVAGCLALGCIKAPEGIEPLVYLCQTDTEAVREAARQSLQQCGEEGQSAHRRLEESLDALPRIFGPGSMASTAF

SEQ ID NO: 19930 - protein, 158 aa, Homo sapiens
MAVFKTTLWRLISGTLGIICLSLMSTLGILLKNYSDCCSCQEKWVGYRCNCYFISSEQKTWNESRHLCASQKSSLLQLQNTDELDFMSSSQQFYWIGLSYSEEHTAWLWENGSALSQYLFPSFETFNTKNCIAYNPNGNALDESCEDKNRYICKQQLI

SEQ ID NO: 19931 - protein, 1083 aa, Homo sapiens
MVFSGNKGLHREDTLDEYFEYDAEEFLVSLALLITEGRTPECSVKGRTESFHCPPAQSCYPVTTKHECSDKLAQCRQARRTRSEVTLLWKNNLPIMVEMMLLPDCCYSDDGPTTEGIDLNDPAIKQDALLLERWILEPVPRQNGDRFIEEKTLLLAVRSFVFFSQLSAWLSVSHGAIPRNILYRISAADVDLQWNFSQTPIEHVFPVPNVSHNVALKVSVQSLPRQSNYPVLTCSIHTNIGLYEKRIQQHKLKTHQHHNPNEAEQCGTNSSQRLCSKQTWTMAPESVLHAKSGPSPEYTAAVKNIKLYPGTGSKSDHGTSQANILGFSGIGDIKSQETSVRTLKSFSMVDSSISNRQSFWQSAGETNPLIGSLIQERQEIIARIAQHLIHCDPSTSHVSGRPFNTQESSSLHSKLFRVSQENENVGKGKEAFSMTFGSPEFSSPEDTNEGKIRLKPETPRSETCISNDFYSHMPVGETNPLIGSLLQERQDVIARIAQHLEHIDPTASHIPRQSFNMHDSSSVASKVFRSSYEDKNLLKKNKDESSVSISHTKCSLLGDISDGKNLVPNKCFTSFKNNSKEKCSLKHQTRNQCQNNPSEIIQSTYQETQNKSSSLSTSSILSQHKENNLDLTSRFKEQEMSNGIDKQYSNCTTIDKQICTNKYKEKIINENYNPKFFGNLQSDDSKKNDSKIKVTVLEMSEYLNKYESMSSNKDSKRPKTCEQNTQLNSIENYLNKDNEGFKCKKSDQLKNEQDKQEDPTNEKSQNYSQRRSIKDCLSTCEQPKNTEVLRTTLKHSNVWRKHNFHSLDGTSTRAFHPQTGLPLLSSPVPQRKTQSGCFDLDSSLLHLKSFSSRSPRPCLNIEDDPDIHEKPFLSSSAPPITSLSLLGNFEESVLNYRFDPLGIVDGFTAEVGASGAFCPTHLTLPVEVSFYSVSDDNAPSPYMGVITLESLGKRGYRVPPSGTIQVTLFNPNKTVVKMFVVIYDLRDMPANHQTFLRQRTFSVPVKQEVKRSVNKENIRHTEERLLRYLIHLRFQSSKSGKIYLHRDVRLLFSRKSMEVDSGAAYELKSYTESPTNPQFSPRC

SEQ ID NO: 19932 - protein, 489 aa, Homo sapiens
MTNYSFHCNVCHHSGNTYFLRKQANLKEMCLSALANLTWQSRTQDEHPKTMFSKDKDIIPFIDKYWECMTTRQRPGKMTWPNNIVKTMSKERDVFLVKEHPDPGSKDPEEDYPKFGLLDQDLSNIGPAYDNQKQSSAVSTSGNLNGGIAAGSSGKGRGAKRKQQDGGTTGTTKKARSDPLFSAQRLPPHGYPLEHPFNKDGYRYILAEPDPHAPDPEKLELDCWAGKPIPGDLYRACLYERVLLALHDRAPQLKISDDRLTVVGEKGYSMVRASHGVRKGAWYFEITVDEMPPDTAARLGWSQPLGNLQAPLGYDKFSYSWRSKKGTKFHQSIGKHYSSGYGQGDVLGFYINLPEDTETAKSLPDTYKDKALIKFKSYLYFEEKDFVDKAEKSLKQTPHSEIIFYKNGVNQGVAYKDIFEGVYFPAISLYKSCTVSINFGPCFKYPPKDLTYRPMSDMGWGAVVEHTLADVLYHVETEVDGRRSPPWEP

SEQ ID NO: 19933 - protein, 764 aa, Homo sapiens
MADSSEGPRAGPGEVAELPGDESGTPGGEAFPLSSLANLFEGEDGSLSPSPADASRPAGPGDGRPNLRMKFQGAFRKGVPNPIDLLESTLYESSVVPGPKKAPMDSLFDYGTYRHHSSDNKRWRKKIIEKQPQSPKAPAPQPPPILKVFNRPILFDIVSRGSTADLDGLLPFLLTHKKRLTDEEFREPSTGKTCLPKALLNLSNGRNDTIPVLLDIAERTGNMREFINSPFRDIYYRGELPLSLAACTNQPHIVNYLTENPHKKADMRRQDSRGNTVLHALVAIADNTRENTKFVTKMYDLLLLKCARLFPDSNLEAVLNNDGLSPLMMAAKTGKIGNRHEMLAVEPINELLRDKWRKFGAVSFYINVVSYLCAMVIFTLTAYYQPLEGTPPYPYRTTVDYLRLAGEVITLFTGVLFFFTNIKDLFMKKCPGVNSLFIDGSFQLLYFIYSVLVIVSAALYLAGIEAYLAVMVFALVLGWMNALYFTRGLKLTGTYSIMIQKILFKDLFRFLLVYLLFMIGYASALVSLLNPCANMKVCNEDQTNCTVPTYPSCRDSETFSTFLLDLFKLTIGMGDLEMLSSTKYPVVFIILLVTYIILTFVLLLNMLIALMGETVGQVSKESKHIWKLQWATTILDIERSFPVFLRKAFRSGEMVTVGKSSDGTPDRRWCFRVDEVNWSHWNQNLGIINEDPGKNETYQYYGFSHTVGRLRRDRWSSVVPRVVELNKNSNPDEVVVPLDSMGNPRCDGHQQGYPRKWRTDDAPL

SEQ ID NO: 19934 - protein, 834 aa, Homo sapiens
MALVLGSLLLLGLCGNSFSGGQPSSTDAPKAWNYELPATNYETQDSHKAGPIGILFELVHIFLYVVQPRDFPEDTLRKFLQKAYESKIDYDKPETVILGLKIVYYEAGIILCCVLGLLFIILMPLVGYFFCMCRCCNKCGGEMHQRQKENGPFLRKCFAISLLVICIIISIGIFYGFVANHQVRTRIKRSRKLADSNFKDLRTLLNETPEQIKYILAQYNTTKDKAFTDLNSINSVLGGGILDRLRPNIIPVLDEIKSMATAIKETKEALENMNSTLKSLHQQSTQLSSSLTSVKTSLRSSLNDPLCLVHPSSETCNSIRLSLSQLNSNPELRQLPPVDAELDNVNNVLRTDLDGLVQQGYQSLNDIPDRVQRQTTTVVAGIKRVLNSIGSDIDNVTQRLPIQDILSAFSVYVNNTESYIHRNLPTLEEYDSYWWLGGLVICSLLTLIVIFYYLGLLCGVCGYDRHATPTTRGCVSNTGGVFLMVGVGLSFLFCWILMIIVVLTFVFGANVEKLICEPYTSKELFRVLDTPYLLNEDWEYYLSGKLFNKSKMKLTFEQVYSDCKKNRGTYGTLHLQNSFNISEHLNINEHTGSISSELESLKVNLNIFLLGAAGRKNLQDFAACGIDRMNYDSYLAQTGKSPAGVNLLSFAYDLEAKANSLPPGNLRNSLKRDAQTIKTIHQQRVLPIEQSLSTLYQSVKILQRTGNGLLERVTRILASLDFAQNFITNNTSSVIIEETKKYGRTIIGYFEHYLQWIEFSISEKVASCKPVATALDTAVDVFLCSYIIDPLNLFWFGIGKATVFLLPALIFAVKLAKYYRRMDSEDVYDDPSQH

SEQ ID NO: 19935 - protein, 408 aa, Homo sapiens
MPQLNGGGGDDLGANDELISFKDEGEQEEKSSENSSAERDLADVKSSLVNESETNQNSSSDSEAERRPPPRSESFRDKSRESLEEAAKRQDGGLFKGPPYPGYPFIMIPDLTSPYLPNGSLSPTARTSNKVPVVQHPHHVHPLTPLITYSNEHFTPGNPPPHLPADVDPKTGIPRPPHPPDISPYYPLSPGTVGQIPHPLGWLVPQQGQPVYPITTGGFRHPYPTALTVNASMSRFPPHMVPPHHTLHTTGIPHPAIVTPTVKQESSQSDVGSLHSSKHQDSKKEEEKKKPHIKKPLNAFMLYMKEMRAKVVAECTLKESAAINQILGRRWHALSREEQAKYYELARKERQLHMQLYPGWSARDNYGKKKKRKRDKQPGETNGEKKSAFATYKVKAAASAHPLQMEAY

SEQ ID NO: 19936 - protein, 258 aa, Homo sapiens
MPACCSCSDVFQYETNKVTRIQSMNYGTIKWFFHVIIFSYVCFALVSDKLYQRKEPVISSVHTKVKGIAEVKEEIVENGVKKLVHSVFDTADYTFPLQGNSFFVMTNFLKTEGQEQRLCPEYPTRRTLCSSDRGCKKGWMDPQSKGIQTGRCVVYEGNQKTCEVSAWCPIEAVEEAPRPALLNSAENFTVLIKNNIDFPGHNYTTRNILPGLNITCTFHKTQNPQCPIFRLGDIFRETGDNFSDVAIQIRQVLQGKQC

SEQ ID NO: 19937 - protein, 865 aa, Homo sapiens
MPTLFKGVWGVVEHSRALGRFCPACLPSGPHLHTQPALGTAEMTLLSSQSSSLVAPSGSVSAENPEQRMLEKRAKVIEELLQTERDYIRDLEMCIERIMVPMQQAQVPNIDFEGLFGNMQMVIKVSKQLLAALEISDAVGPVFLGHRDELEGTYKIYCQNHDEAIALLEIYEKDEKIQKHLQDSLADLKSLYNEWGCTNYINLGSFLIKPVQRVMRYPLLLMELLNSTPESHPDKVPLTNAVLAVKEINVNINEYKRRKDLVLKYRKGDEDSLMEKISKLNIHSIIKKSNRVSSHLKHLTGFAPQIKDEVFEETEKNFRMQERLIKSFIRDLSLYLQHIRESACVKVVAAVSMWDVCMERGHRDLEQFERVHRYISDQLFTNFKERTERLVISPLNQLLSMFTGPHKLVQKRFDKLLDFYNCTERAEKLKDKKTLEELQSARNNYEALNAQLLDELPKFHQYAQGLFTNCVHGYAEAHCDFVHQALEQLKPLLSLLKVAGREGNLIAIFHEEHSRVLQQLQVFTFFPESLPATKKPFERKTIDRQSARKPLLGLPSYMLQSEELRASLLARYPPEKLFQAERNFNAAQDLDVSLLEGDLVGVIKKKDPMGSQNRWLIDNGVTKGFVYSSFLKPYNPRRSHSDASVGSHSSTESEHGSSSPRFPRQNSGSTLTFNPSSMAVSFTSGSCQKQPQDASPPPKECDQGTLSASLNPSNSESSPSRCPSDPDSTSQPRSGDSADVARDVKQPTATPRSYRNFRHPEIVGYSVPGRNGQSQDLVKGCARTAQAPEDRSTEPDGSEAEGNQVYFAVYTFKARNPNELSVSANQKLKILEFKDVTGNTEWWLAEVNGKKGYVPSNYIRKTEYT

SEQ ID NO: 19938 - protein, 359 aa, Homo sapiens
MSEVSDTSEETQILRDTFAIESFRTFQSHFTKYRTPVYQTPYTDERALLTLMKPTTSPSSLTTLLRTSQISPLEWYQKSRFPPIDKPWILSSVSDTKKPKVMVPPSSPQELEEKRYFVDVEAQKKNLILLNQAIKTCGLPSQLHTMARTLIIEILHMDTVQLGYLFRKYIAYRLIQHARNNIMKRLKAIQNTGKGYEARNLHMMLSRLDDYGKKVMQVWTEKQKSLGQKRNQCLKKMIHVFNQLKKIHELNLSQPIPLIIEEKQIPASTTFVQKPFLKLLMEEDRTSDICKKFRQQEDQTEAIWNVDLSTSSYPIAEKTSMHSLWAQLGGYPDIPRLLQLEVQSTFRKSLASLQSRSSG

SEQ ID NO: 19939 - protein, 1678 aa, Homo sapiens
MHPGLWLLLVTLCLTEELAAAGEKSYGKPCGGQDCSGSCQCFPEKGARGRPGPIGIQGPTGPQGFTGSTGLSGLKGERGFPGLLGPYGPKGDKGPMGVPGFLGINGIPGHPGQPGPRGPPGLDGCNGTQGAVGFPGPDGYPGLLGPPGLPGQKGSKGDPVLAPGSFKGMKGDPGLPGLDGITGPQGAPGFPGAVGPAGPPGLQGPPGPPGPLGPDGNMGLGFQGEKGVKGDVGLPGPAGPPPSTGELEFMGFPKGKKGSKGEPGPKGFPGISGPPGFPGLGTTGEKGEKGEKGIPGLPGPRGPMGSEGVQGPPGQQGKKGTLGFPGLNGFQGIEGQKGDIGLPGPDVFIDIDGAVISGNPGDPGVPGLPGLKGDEGIQGLRGPSGVPGLPALSGVPGALGPQGFPGLKGDQGNPGRTTIGAAGLPGRDGLPGPPGPPGPPSPEFETETLHNKESGFPGLRGEQGPKGNLGLKGIKGDSGFCACDGGVPNTGPPGEPGPPGPWGLIGLPGLKGARGDRGSGGAQGPAGAPGLVGPLGPSGPKGKKGEPILSTIQGMPGDRGDSGSQGFRGVIGEPGKDGVPGLPGLPGLPGDGGQGFPGEKGLPGLPGEKGHPGPPGLPGNGLPGLPGPRGLPGDKGKDGLPGQQGLPGSKGITLPCIIPGSYGPSGFPGTPGFPGPKGSRGLPGTPGQPGSSGSKGEPGSPGLVHLPELPGFPGPRGEKGLPGFPGLPGKDGLPGMIGSPGLPGSKGATGDIFGAENGAPGEQGLQGLTGHKGFLGDSGLPGLKGVHGKPGLLGPKGERGSPGTPGQVGQPGTPGSSGPYGIKGKSGLPGAPGFPGISGHPGKKGTRGKKGPPGSIVKKGLPGLKGLPGNPGLVGLKGSPGSPGVAGLPALSGPKGEKGSVGFVGFPGIPGLPGIPGTRGLKGIPGSTGKMGPSGRAGTPGEKGDRGNPGPVGIPSPRRPMSNLWLKGDKGSQGSAGSNGFPGPRGDKGEAGRPGPPGLPGAPGLPGIIKGVSGKPGPPGFMGIRGLPGLKGSSGITGFPGMPGESGSQGIRGSPGLPGASGLPGLKGDNGQTVEISGSPGPKGQPGESGFKGTKGRDGLIGNIGFPGNKGEDGKVGVSGDVGLPGAPGFPGVAGMRGEPGLPGSSGHQGAIGPLGSPGLIGPKGFPGFPGLHGLNGLPGTKGTHGTPGPSITGVPGPAGLPGPKGEKGYPGIGIGAPGKPGLRGQKGDRGFPGLQGPAGLPGAPGISLPSLIAGQPGDPGRPGLDGERGRPGPAGPPGPPGPSSNQGDTGDPGFPGIPGFSGLPGELGLKGMRGEPGFMGTPGKVGPPGDPGFPGMKGKAGPRGSSGLQGDPGQTPTAEAVQVPPGPLGLPGIDGIPGLTGDPGAQGPVGLQGSKGLPGIPGKDGPSGLPGPPGALGDPGLPGLQGPPGFEGAPGQQGPFGMPGMPGQSMRVGYTLVKHSQSEQVPPCPIGMSQLWVGYSLLFVEGQEKAHNQDLGFAGSCLPRFSTMPFIYCNINEVCHYARRNDKSYWLSTTAPIPMMPVSQTQIPQYISRCSVCEAPSQAIAVHSQDITIPQCPLGWRSLWIGYSFLMHTAAGAEGGGQSLVSPGSCLEDFRATPFIECSGARGTCHYFANKYSFWLTTVEERQQFGELPVSETLKAGQLHTRVSRCQVCMKSL

SEQ ID NO: 19940 - protein, 639 aa, Homo sapiens
MQSLTKGNDLHWLACALYVACRKSVPTVSKGTVEGNYVSLTRILKCSEQSLIEFFNKMKKWEDMANLPPHFRERTERLERNFTVSAVIFKKYEPIFQDIFKYPQEEQPRQQRGRKQRRQPCTVSEIFHFCWVLFIYAKGNFPMISDDLVNSYHLLLCALDLVYGNALQCSNRKELVNPNFKGLSEDFHAKDSKPSSDPPCIIEKLCSLHDGLVLEAKGIKEHFWKPYIRKLYEKKLLKGKEENLTGFLEPGNFGESFKAINKAYEEYVLSVGNLDERIFLGEDAEEEIGTLSRCLNAGSGTETAERVQMKNILQQHFDKSKALRISTPLTGVRYIKENSPCVTPVSTATHSLSRLHTMLTGLRNAPSEKLEQILRTCSRDPTQAIANRLKEMFEIYSQHFQPDEDFSNCAKEIASKHFRFAEMLYYKVLESVIEQEQKRLGDMDLSGILEQDAFHRSLLACCLEVVTFSYKPPGNFPFITEIFDVPLYHFYKVIEVFIRAEDGLCREVVKHLNQIEEQILDHLAWKPESPLWEKIRDNENRVPTCEEVMPPQNLERADEICIAGSPLTPRRVTEVRADTGGLGRSITSPTTLYDRYSSPPASTTRRRLFVENDSPSDGGTPGRMPPQPLVNAVPVQNVS

SEQ ID NO: 19941 - protein, 799 aa, Homo sapiens
MLHDARDRQKFFSDVQYLRDMQHKVDSEYQACLRRQEYRRDPNEKKRDQFWGQETSFERSRFSSRSSSKQSSSEEDALTEPRSSIKISAFKCDSKLPAIDQTSVKQKHKSTMTVRKAEKVDPSEPSPDQAPMVLLRKRKPNLRRFTVSPESHSPRASGDRSRQKQQWPAKVPVPRGADQVVQQEGLMCNTKLKRPNQERRNLVPSSQPMTENAPDRAKKGDPSAPSQSELHPALSQAFQGKNSPQVLSEFSGPPLTPTTVGGPRKASFRFRDEDFYSILSLNSRRESDDTEEETQSEECLWVGVRSPCSPSHHKRSRFGGTSTPQAKNKNFEENAENCRGHSSRRSEPSHGSLRISNAMEPATERPSAGQRLSQDPGLPDRESATEKDRGGSENAKKSPLSWDTKSEPRQEVGVNAENVWSDCISVEHRPGTHDSEGYWKDYLNSSQNSLDYFISGRPISPRSSVNSSYNPPASFMHSALRDDIPVDLSMSSTSVHSSDSEGNSGFHVCQPLSPIRNRTPFASAENHNYFPVNSAHEFAVREAEDTTLTSQPQGAPLYTDLLLNPQGNLSLVDSSSSSPSRMNSEGHLHVSGSLQENTPFTFFAVSHFPNQNDNGSRMAASGFTDEKETSKIKADPEKLKKLQESLLEEDSEEEGDLCRICQIAGGSPSNPLLEPCGCVGSLQFVHQECLKKWLKVKITSGADLGAVKTCEMCKQGLLVDLGDFNMIEFYQKHQQSQAQNELMNSGLYLVLLLHLYEQRFAELMRLNHNQVERERLSRNYPQPRTEENESRFWGPVLPF

SEQ ID NO: 19942 - protein, 184 aa, Homo sapiens
NRALRLVDGGGACAGRVEMLEHGEWGSVCDDTWDLEDAHVVCRQLGCGWAVQALPGLHFTPGRGPIHRDQVNCSGAEAYLWDCPGLPGQHYCGHKEDAGAVCSASRSLHNLSTPEVPASVQTVTIESSVTVKIENKESRELMLLIPSIVLGILLLGSLIFIAFILLRIKGKYALPVMVNHQHLP

SEQ ID NO: 19943 - protein, 178 aa, Homo sapiens
MVNVPDIFSHDTQGLLRKKLIEASFQKVILDGYGSCGPQNLNLRKEWESEGKCEGHNGYYDGHTKCKTTTYNKNLTVTGGQKHEKTQFMSVAFSKPCVSVSKCQHQFLKLTFSFKGNLDNPNSDLVHVSNNHLNQLKYRTGVNVQSNISEKERFKNEEVISKYDQFDGSLLKVCFTNK

SEQ ID NO: 19944 - protein, 969 aa, Homo sapiens
MASKRKSTTPCMIPVKTVVLQDASMEAQPAETLPEGPQQDLPPEASAASSEAAQNPSSTDGSTLANGHRSTLDGYLYSCKYCDFRSHDMTQFVGHMNSEHTDFNKDPTFVCSGCSFLAKTPEGLSLHNATCHSGEASFVWNVAKPDNHVVVEQSIPESTSTPDLAGEPSAEGADGQAEIIITKTPIMKIMKGKAEAKKIHTLKENVPSQPVGEALPKLSTGEMEVREGDHSFINGAVPVSQASASSAKNPHAANGPLIGTVPVLPAGIAQFLSLQQQPPVHAQHHVHQPLPTAKALPKVMIPLSSIPTYNAAMDSNSFLKNSFHKFPYPTKAELCYLTVVTKYPEEQLKIWFTAQRLKQGISWSPEEIEDARKKMFNTVIQSVPQPTITVLNTPLVASAGNVQHLIQAALPGHVVGQPEGTGGGLLVTQPLMANGLQATSSPLPLTVTSVPKQPGVAPINTVCSNTTSAVKVVNAAQSLLTACPSITSQAFLDASIYKNKKSHEQLSALKGSFCRNQFPGQSEVEHLTKVTGLSTREVRKWFSDRRYHCRNLKGSRAMIPGDHSSIIIDSVPEVSFSPSSKVPEVTCIPTTATLATHPSAKRQSWHQTPDFTPTKYKERAPEQLRALESSFAQNPLPLDEELDRLRSETKMTRREIDSWFSERRKKVNAEETKKAEENASQEEEEAAEDEGGEEDLASELRVSGENGSLEMPSSHILAERKVSPIKINLKNLRVTEANGRNEIPGLGACDPEDDESNKLAEQLPGKVSCKKTAQQRHLLRQLFVQTQWPSNQDYDSIMAQTGLPRPEVVRWFGDSRYALKNGQLKWYEDYKRGNFPPGLLVIAPGNRELLQDYYMTHKMLYEEDLQNLCDKTQMSSQQKQTEFDLINVKDWPVWETACHVEEPNPTLCCHMPFPCPAAGHLGELPESSQTAQSLPLPSACPPPSKQQARWGSHQFFLPQCRTFPLPSNG

SEQ ID NO: 19945 - protein, 813 aa, Homo sapiens
MAKPLTDQEKRRQISIRGIVGVENVAELKKSFNRHLHFTLVKDRNVATTRDYYFALAHTVRDHLVGRWIRTQQHYYDKCPKLGLDIEELEEIEEDAGLGNGGLGRLAACFLDSMATLGLAAYGYGIRYEYGIFNQKIRDGWQVEEADDWLRYGNPWEKSRPEFMLPVHFYGKVEHTNTGTKWIDTQVVLALPYDTPVPGYMNNTVNTMRLWSARAPNDFNLRDFNVGDYIQAVLDRNLAENISRVLYPNDNFFEGKELRLKQEYFVVAATLQDIIRRFKASKFGSTRGAGTVFDAFPDQVAIQLNDTHPALAIPELMRIFVDIEKLPWSKAWELTQKTFAYTNHTVLPEALERWPVDLVEKLLPRHLEIIYEINQKHLDRIVALFPKDVDRLRRMSLIEEEGSKRINMAHLCIVGSHAVNGVAKIHSDIVKTKVFKDFSELEPDKFQNKTNGITPRRWLLLCNPGLAELIAEKIGEDYVKDLSQLTKLHSFLGDDVFLRELAKVKQENKLKFSQFLETEYKVKINPSSMFDVQVKRIHEYKRQLLNCLHVITMYNRIKKDPKKLFVPRTVIIGGKAAPGYHMAKMIIKLITSVADVVNNDPMVGSKLKVIFLENYRVSLAEKVIPATDLSEQISTAGTEASGTGNMKFMLNGALTIGTMDGANVEMAEEAGEENLFIFGMRIDDVAALDKKGYEAKEYYEALPELKLVIDQIDNGFFSPKQPDLFKDIINMLFYHDRFKVFADYEAYVKCQDKVSQLYMNPKAWNTMVLKNIAASGKFSSDRTIKEYAQNIWNVEPSDLKISLSNESNKVNGN

SEQ ID NO: 19946 - protein, 1190 aa, Homo sapiens
MKQPIMADGPRCKRRKQANPRRKNVVNYDNVVDTGSETDEEDKLHIAEDDGIANPLDQETSPASVPNHESSPHVSQALLPREEEEDEIREGGVEHPWHNNEILQASVDGPVKNANCTSDFEEYFAKRKLEERDGHAVSIEEYLQRSDTAIIYPEAPEELSRLGTPEANGQEENDLPPGTPDAFAQLLTCPYCDRGYKRLTSLKEHIKYRHEKNEENFSCPLCSYTFAYRTQLERHMVTHKPGTDQHQMLTQGAGNRKFKCTECGKAFKYKHHLKEHLRIHSGEKPYECPNCKKRFSHSGSYSSHISSKKCIGLISVNGRMRNNIKTGSSPNSVSSSPTNSAITQLRNKLENGKPLSMSEQTGLLKIKTEPLDFNDYKVLMATHGFSGTSPFMNGGLGATSPLGVHPSAQSPMQHLGVGMEAPLLGFPTMNSNLSEVQKVLQIVDNTVSRQKMDCKAEEISKLKGYHMKDPCSQPEEQGVTSPNIPPVGLPVVSHNGATKSIIDYTLEKVNEAKACLQSLTTDSRRQISNIKKEKLRTLIDLVTDDKMIENHNISTPFSCQFCKESFPGPIPLHQHERYLCKMNEEIKAVLQPHENIVPNKAGVFVDNKALLLSSVLSEKGMTSPINPYKDHMSVLKAYYAMNMEPNSDELLKISIAVGLPQEFVKEWFEQRKVYQYSNSRSPSLERSSKPLAPNSNPPTKDSLLPRSPVKPMDSITSPSIAELHNSVTNCDPPLRLTKPSHFTNIKPVEKLDHSRSNTPSPLNLSSTSSKNSHSSSYTPNSFSSEELQAEPLDLSLPKQMKEPKSIIATKNKTKASSISLDHNSVSSSSENSDEPLNLTFIKKEFSNSNNLDNKSTNPVFSMNPFSAKPLYTALPPQSAFPPATFMPPVQTSIPGLRPYPGLDQMSFLPHMAYTYPTGAATFADMQQRRKYQRKQGFQGELLDGAQDYMSGLDDMTDSDSCLSRKKIKKTESGMYACDLCDKTFQKSSSLLRHKYEHTGKRPHQCQICKKAFKHKHHLIEHSRLHSGEKPYQCDKCGKRFSHSGSYSQHMNHRYSYCKREAEEREAAEREAREKGHLEPTELLMNRAYLQSITPQGYSDSEERESMPRDGESEKEHEKEGEDGYGKLGRQDGDEEFEEEEEESENKSMDTDPETIRDEEETGDHSMDDSSEDGKMETKSDHEEDNMEDGM

SEQ ID NO: 19947 - protein, 363 aa, Homo sapiens
MTGRKRKWGETGTGSGAAPAAALRWSNMSDALANAVCQRCQARFSPAERIVNSNGELYHEHCFVCAQCFRPFPEGLFYEFEGRKYCEHDFQMLFAPCCGSCGEFIIGRVIKAMNNNWHPGCFRCELCDVELADLGFVKNAGRHLCRPCHNREKAKGLGKYICQRCHLVIDEQPLMFRSDAYHPDHFNCTHCGKELTAEARELKGELYCLPCHDKMGVPICGACRRPIEGRVVNALGKQWHVEHFVCAKCEKPFLGHRHYEKKGLAYCETHYNQLFGDVCYNCSHVIEGDVVSALNKAWCVSCFSCSTCNSKLTLKNKFVEFDMKPVCKRCYEKFPLELKKRLKKLSELTSRKAQPKATDLNSA

SEQ ID NO: 19948 - protein, 756 aa, Homo sapiens
MVAPVLETSHVFCCPNRVRGVLNWSSGPRGLLAFGTSCSVVLYDPLKRVVVTNLNGHTARVNCIQWICKQDGSPSTELVSGGSDNQVIHWEIEDNQLLKAVHLQGHEGPVYAVHAVYQRRTSDPALCTLIVSAAADSAVRLWSKKGPEVPILACGNDDCRIHIFAQQNDQFQKVLSLCGHEDWIRGVEWAAFGRDLFLASCSQDCLIRIWKLYIKSTSLETQDDDNIRLKENTFTIENESVKIAFAVTLETVLAGHENWVNAVHWQPVFYKDGVLQQPVRLLSASMDKTMILWAPDEESGVWLEQREWTPEIVISGHFDGVQDLVWDPEGEFIITVGTDQTTRLFAPWKRKDQSQVTWHEIARPQIHGYDLKCLAMINRFQFVSGADEKVLRVFSAPRNFVENFCAITGQSLNHVLCNQDSDLPEGATVPALGLSNKAVFQGDIASQPSDEEELLTSTGFEYQQVAFQPSILTEPPTEDHLLQNTLWPEVQKLYGHGYEIFCVTCNSSKTLLASACKAAKKEHAAIILWNTTSWKQVQNLVFHSLTVTQMAFSPNEKFLLAVSRDRTWSLWKKQDTISPEFEPVFSLFAFTNKITSVHSRIIWSCDWSPDSKYFFTGSRDKKVVVWGECDSTDDCIEHNIGPCSSVLDVGGAVTAVSVCPVLHPSQRYVVAVGLECGKICLYTWKKTDQVPEINDWTHCVETSQSQSHTLAIRKLCWKNCSGKTEQKEAEGAEWLHFASCGEDHTVKIHRVNKCAL

SEQ ID NO: 19949 - protein, 1068 aa, Homo sapiens
MPPGVDCPMEFWTKEENQSVVVDFLLPTGVYLNFPVSRNANLSTIKQLLWHRAQYEPLFHMLSGPEAYVFTCINQTAEQQELEDEQRRLCDVQPFLPVLRLVAREGDRVKKLINSQISLLIGKGLHEFDSLCDPEVNDFRAKMCQFCEEAAARRQQLGWEAWLQYSFPLQLEPSAQTWGPGTLRLPNRALLVNVKFEGSEESFTFQVSTKDVPLALMACALRKKATVFRQPLVEQPEDYTLQVNGRHEYLYGSYPLCQFQVQKPRAKPPPIPAKKPSSVSLWSLEQPFRIELIQGSKVNADERMKLVVQAGLFHGNEMLCKTVSSSEVSVCSEPVWKQRLEFDINICDLPRMARLCFALYAVIEKAKKARSTKKKSKKADCPIAWANLMLFDYKDQLKTGERCLYMWPSVPDEKGELLNPTGTVRSNPNTDSAAALLICLPEVAPHPVYYPALEKLPGGMLLASREWRPELLWMRLHAEDSAPSRMIGVAMPGLGVLPGLVQAPGDAECSRLLQILELGRHSECVHVTEEEQLQLREILERRGSGELYEHEKDLVWKLRHEVQEHFPEALARLLLVTKWNKHEDVAQDALPAVSWPELPVLSALELLDFSFPDCHVGSFAIKSLRKLTDDELFQYLLQLVQVLKYESYLDCELTKFLLDRALANRKIGHFLFWHLRSEMHVPSVALRFGLILEAYCRGSTHHMKVLMKQGEALSKLKALNDFVKLSSQKTPKPQTKELMHLCMRQEAYLEALSHLQSPLDPSTLLAEVCVEQCTFMDSKMKPLWIMYSNEEAGSGGSVGIIFKNGDDLRQDMLTLQMIQLMDVLWKQEGLDLRMTPYGCLPTGDRTGLIEVVLRSDTIANIQLNKSNMAATAAFNKDALLNWLKSKNPGEALDRAIEEFTLSCAGYCVATYVLGIGDRHSDNIMIRESGQLFHIDFGHFLGNFKTKFGINRERVPFILTYDFVHVIQQGKTNNSEKFERFRGYCERAYTILRRHGLLFLHLFALMRAAGLPELSCSKDIQYLKDSLALGKTEEEALKHFRVKFNEALRESWKTKVNWLAHNVSKDNRQ

SEQ ID NO: 19950 - protein, 203 aa, Homo sapiens
MGWKAESLESATMFLENWKRLQMRLGYFWDLTGIEEEEEHSRPEYETKVREKMLKESNQSAVQKLETNTTECGDEDDEDKLTWKDRFPGYLMNFASILFMIALTFSIVFGVIVYRITTAAALSLNKATRSNVRVTVTATAVIINLVVILILDEIYGAVAKWLTKIEVPKTEQTFEERLILKAFLLKFVNAYSPIFYVAFFKGR

SEQ ID NO: 19951 - protein, 1022 aa, Homo sapiens
MKDEAGERDREVSSLNSKLLSLQLDIKNLHDVCKRQRKTLQDNQLCMEEAMNSSHDKKQAQALAFEESEVEFGSSKQCHLRQLQQLKKKLLVLQQELEFHTEELQTSYYSLRQYQSILEKQTSDLVLLHHHCKLKEDEVILYEEEMGNHNENTGEKLHLAQEQLALAGDKIASLERSLNLYRDKYQSSLSNIELLECQVKMLQGELGGIMGQEPENKGDHSKVRIYTSPCMIQEHQETQKRLSEVWQKVSQQDDLIQELRNKLACSNALVLEREKALIKLQADFASCTATHRYPPSSSEECEDIKKILKHLQEQKDSQCLHVEEYQNLVKDLRVELEAVSEQKRNIMKDMMKLELDLHGLREETSAHIERKDKDITILQCRLQELQLEFTETQKLTLKKDKFLQEKDEMLQELEKKLTQVQNSLLKKEKELEKQQCMATELEMTVKEAKQDKSKEAECKALQAEVQKLKNSLEEAKQQERLAGEAPAAQQAAQCKEEAALAGCHLEDTQRKLQKGLLLDKQKADTIQELQRELQMLQKESSMAEKEQTSNRKRVEELSLELSEALRKLENSDKEKRQLQKTVAEQDMKMNDMLDRIKHQHREQGSIKCKLEEDLQEATKLLEDKREQLKKSKEHEKLMEGELEALRQEFKKKDKTLKENSRKLEEENENLRAELQCCSTQLESSLNKYNTSQQVIQDLNKEIALQKESLMSLQAQLDKALQKEKHYLQTTITKEAYDALSRKSAACQDDLTQALEKLNHVTSETKSLQQSLTQTQEKKAQLEEEIIAYEERMKKLNTELRKLRGFHQESELEVHAFDKKLEEMSCQVLQWQKQHQNDLKMLAAKEEQLREFQEEMAALKENLLEDDKEPCCLPQWSVPKDTCRLYRGNDQIMTNLEQWAKQQKVANEKLGNQLREQVKYIAKLSGEKDHLHSVMVHLQQENKKLKKEIEEKKMKAENTRLCTKALGPSRTESTQREKVCGTLGWKGLPQDMGQRMDLTKYIGMPHCPGTSAICQKNKCDFFL

SEQ ID NO: 19952 - protein, 712 aa, Homo sapiens
CFRPECDYWESRGAAVAEGSHRGAPWNIAGLVLRTWGSHRGAPGRTLRYQMPRGCHLGTPSWSRRNTPRTGQLERGPQQGRTGHVRPGRSAGGSLLQQESVQQGCSPVGSCPCQQYARSQQPQETAKNDAQSRSWAGLNAGVSLKNTKISSSEWPLRLLSEGADVNAKHRLGWTALMVAAINRNNSVVQVLLAAGADPNLGDDFSSVYKTAKEQGIHSLEDGGQDGASRHITNQWTSALEFRRWLGLPAGVLITREDDFNNRLNNRASFKGCTALHYAVLADDYRTVKELLDGGANPLQRNEMGHTPLDYAREGEVMKLLRTSEAKYQEKQRKREAEERRRFPLEQRLKEHIIGQESAIATVGAAIRRKENGWYDEEHPLVFLFLGSSGIGKTELAKQTAKYMHKDAKKGFIRLDMSEFQERHEVAKFIGSPPGYVGHEEGGQLTKKLKQCPNAVVLFDEVDKAHPDVLTIMLQLFDEGRLTDGKGKTIDCKDAIFIMTSNVASDEIAQHALQLRQEALEMSRNRIAENLGDVQISDKITISKNFKENVIRPILKAHFRRDEFLGRINEIVYFLPFCHSELIQLVNKELNFWAKRAKQRHNITLLWDREVADVLVDGYNVHYGARSIKHEVERRVVNQLAAAYEQDLLPGGCTLRITVEDSDKQLLKSPELPSPQAEKRLPKLRLEIIDKDSKTRRLDIRAPLHPEKVCNTI

SEQ ID NO: 19953 - protein, 936 aa, Homo sapiens
MRPRSGGRPGATGRRRRRLRRRPRGLRCSRLPPPPPLPLLLGLLLAAAGPGAARAKETAFVEVVLFESSPSGDYTTYTTGLTGRFSRAGATLSAEGEIVQMHPLGLCNNNDEEDLYEYGWVGVVKLEQPELDPKPCLTVLGKAKRAVQRGATAVIFDVSENPEAIDQLNQGSEDPLKRPVVYVKGADAIKLMNIVNKQKVARARIQHRPPRQPTEYFDMGIFLAFFVVVSLVCLILLVKIKLKQRRSQNSMNRLAVQALEKMETRKFNSKSKGRREGSCGALDTLSSSSTSDCAICLEKYIDGEELRVIPCTHRFHRKCVDPWLLQHHTCPHCRHNIIEQKGNPSAVCVETSNLSRGRQQRVTLPVHYPGRVHRTNAIPAYPTRTSMDSHGNPVTLLTMDRHGEQSLYSPQTPAYIRSYPPLHLDHSLAAHRCGLEHRAYSPAHPFRRPKLSGRSFSKAACFSQYETMYQHYYFQGLSYPEQEGQSPPSLAPRGPARAFPPSGSGSLLFPTVVHVAPPSHLESGSTSSFSCYHGHRSVCSGYLADCPGSDSSSSSSSGQCHCSSSDSVVDCTEVSNQGVYGSCSTFRSSLSSDYDPFIYRSRSPCRASEAGGSGSSGRGPALCFEGSPPPEELPAVHSHGAGRGEPWPGPASPSGDQVSTCSLEMNYSSNSSLEHRGPNSSTSEVGLEASPGAAPDLRRTWKGGHELPSCACCCEPQPSPAGPSAGAAGSSTLFLGPHLYEGSGPAGGEPQSGSSQGLYGLHPDHLPRTDGVKYEGLPCCFYEEKQVARGGGGGSGCYTEDYSVSVQYTLTEEPPPGCYPGARDLSQRIPIIPEDVDCDLGLPSDCQGTHSLGSWGGTRGPDTPRPHRGLGATREEERALCCQARALLRPGCPPEEAGAVRANFPSALQDTQESSTTATEAAGPRSHSADSSSPGA

SEQ ID NO: 19954 - protein, 1056 aa, Homo sapiens
SELLFDLYLSPESDHDTVFQYLEKNADQVLLIFDGLDEALQPMGPDGPGPVLTLFSHLCNGTLLPGCRVMATSRPGKLPACLPAEAAMVHMLGFDGPRVEEYVNHFFSAQPSREGALVELQTNGRLRSLCAVPALCQVACLCLHHLLPDHAPGQSVALLPNMTQLYMQMVLALSPPGHLPTSSLLDLGEVALRGLETGKVIFYAKDIAPPLIAFGATHSLLTSFCVCTGPGHQQTGYAFTHLSLQEFLAALHLMASPKVNKDTLTQYVTLHSRWVQRTKARLGLSDHLPTFLAGLASCTCRPFLSHLAQGNEDCVGAKQAAVVQVLKKLATRKLTGPKVVELCHCVDETQEPELASLTAQSLPYQLPFHNFPLTCTDLATLTNILEHREAPIHLDFDGCPLEPHCPEALVGCGQIENLSFKSRKCGDAFAEALSRSLPTMGRLQMLGLAGSKITARGISHLVKALPLCPQLKEVSFRDNQLSDQVVLNIVEVLPHLPRLRKLDLSSNSICVSTLLCLARVAVTCPTVRMLQAREADLIFLLSPPTETTAELQRAPDLQESDGQRKGAQSRSLTLRLQKCQLQVHDAEALIALLQEGPHLEEVDLSGNQLEDEGCRLMAEAASQLHIARKLDLSNNGLSVAGVHCVLRAVSACWTLAELHISLQHKTVIFMFAQEPEEQKGPQERAAFLDSLMLQMPSELPLSSRRMRLTHCGLQEKHLEQLCKALGGSCHLGHLHLDFSGNALGDEGAARLAQLLPGLGALQSLNLSENGLSLDAVLGLVRCFSTLQWLFRLDISFESQHILLRGDKTSRDMWATGSLPDFPAAAKFLGFRQRCIPRSLCLSECPLEPPSLTRLCATLKDCPGPLELQLSCEFLSDQSLETLLDCLPQLPQLSLLQLSQTGLSPKSPFLLANTLSLCPRVKKVDLRSLHHATLHFRSNEEEEGVCCGRFTGCSLSQEHVESLCWLLSKCKDLSQVDLSANLLGDSGLRCLLECLPQVPISGLLDLSHNSISQESALYLLETLPSCPRVREASVKCLGSWHVWAPCFPRPFSLQPGL

SEQ ID NO: 19955 - protein, 94 aa, Homo sapiens
MAMTAGTTTTFPMSNHTRERVTVAKLTLENFYSNLILQHEERETRQKKLEVAMEEEGLADEEKKLRRSQHARKETEFLRLKRTRLGLDDFESLK

SEQ ID NO: 19956 - protein, 870 aa, Homo sapiens
MSVPNVLAKALYDNVAESPDELSFRKGDIMTVLEQDTQGLDGWWLCSLHGRQGIVPGNRLKILVGMYDKKPAGPGPGPPATPAQPQPGLHAPAPPASQYTPMLPNTYQPQPDSVYLVPTPSKAQQGLYQVPGPSPQFQSPPAKQTSTFSKQTPHHPFPSPATDLYQVPPGPGGPAQDIYQVPPSAGMGHDIYQVPPSMDTRSWEGTKPPAKVVVPTRVGQGYVYEAAQPEQDEYDIPRHLLAPGPQDIYDVPPVRGLLPSQYGQEVYDTPPMAVKGPNGRDPLLEVYDVPPSVEKGLPPSNHHAVYDVPPSVSKDVPDGPLLREETYDVPPAFAKAKPFDPARTPLVLAAPPPDSPPAEDVYDVPPPAPDLYDVPPGLRRPGPGTLYDVPRERVLPPEVADGGVVDSGVYAVPPPAEREAPAEGKRLSASSTGSTRSSQSASSLEVAGPGREPLELEVAVEALARLQQGVSATVAHLLDLAGSAGATGSWRSPSEPQEPLVQDLQAAVAAVQSAVHELLEFARSAVGNAAHTSDRALHAKLSRQLQKMEDVHQTLVAHGQALDAGRGGSGATLEDLDRLVACSRAVPEDAKQLASFLHGNASLLFRRTKATAPGPEGGGTLHPNPTDKTSSIQSRPLPSPPKFTSQDSPDGQYENSEGGWMEDYDYVHLQGKEEFEKTQKELLEKGSITRQGKSQLELQQLKQFERLEQEVSRPIDHDLANWTPAQPLAPGRTGGLGPSDRQLLLFYLEQCEANLTTLTNAVDAFFTAVATNQPPKIFVAHSKFVILSAHKLVFIGDTLSRQAKAADVRSQVTHYSNLLCDLLRGIVATTKAAALQYPSPSAAQDMVERVKELGHSTQQFRRVLGQLAAA

SEQ ID NO: 19957 - protein, 623 aa, Homo sapiens
MNKNVVFVIDISGSMRGQKVKQTKEALLKILGDMQPGDYFDLVLFGTRVQSWKGSLVQASEANLQAAQDFVRGFSLDEATNLNGGLLRGIEILNQVQESLPELSNHASILIMLTDGDPTEGVTDRSQILKNVRNAIRGRFPLYNLGFGHNVDFNFLEVMSMENNGRAQRIYEDHDATQQLQGFYSQVAKPLLVDVDLQYPQDAVLALTQNHHKQYYEGSEIVVAGRIADNKQSSFKADVQAHGEGQEFSITCLVDEEEMKKLLRERGHMLENHVERLWAYLTIQELLAKRMKVDREERANLSSQALQMSLDYGFVTPLTSMSIRGMADQDGLKPTIDKPSEDSPPLEMLGPRRTFVLSALQPSPTHSSSNTQRLPDRVTGVDTDPHFIIHVPQKEDTLCFNINEEPGVILSLVQDPNTGFSVNGQLIGNKARSPGQHDGTYFGRLGIANPATDFQLEVTPQNITLNPGFGGPVFSWRDQAVLRQDGVVVTINKKRNLVVSVDDGGTFEVVLHRVWKGSSVHQDFLGFYVLDSHRMSARTHGLLGQFFHPIGFEVSDIHPGSDPTKPDATMVVRNRRLTVTRGLQKDYSKDPWHGAEVSCWFIHNNGAGLIDGAYTDYIVPDIF

SEQ ID NO: 19958 - protein, 583 aa, Homo sapiens
MAYSWQTDPNPNESHEKQYEHQEFLFVNQPHSSSQVSLGFDQIVDEISGKIPHYESEIDENTFFVPTAPKWDSTGHSLNEAHQISLNEFTSKSRELSWHQVSKAPAIGFSPSVLPKPQNTNKECSWGSPIGKHHGADDSRFSILAPSFTSLDKINLEKELENENHNYHIGFESSIPPTNSSFSSDFMPKEENKRSGHVNIVEPSLMLLKGSLQPGMWESTWQKNIESIGCSIQLVEVPQSSNTSLASFCNKVKKIRERYHAADVNFNSGKIWSTTTAFPYQLFSKTKFNIHIFIDNSTQPLHFMPCANYLVKDLIAEILHFCTNDQLLPKDHILSVCGSEEFLQNDHCLGSHKMFQKDKSVIQLHLQKSREAPGKLSRKHEEDHSQFYLNQLLEFMHIWKVSRQCLLTLIRKYDFHLKYLLKTQENVYNIIEEVKKICSVLGCVETKQITDAVNELSLILQRKGENFYQSSETSAKGLIEKVTTELSTSIYQLINVYCNSFYADFQPVNVPRCTSYLNPGLPSHLSFTVYAAHNIPETWVHSYKAFSFTCWLTYAGKKLCQVRNYRNIPDKKLFFFLVNWNET

SEQ ID NO: 19959 - protein, 688 aa, Homo sapiens
MLFNSVLRQPQLGVLRNAPNMEHVLAVANEEGFVRLYNTESQSFRKKCFKEWMAHWNAVFDLAWVPGELKLVTAAGDQTAKFWDVKAGELIGTCKGHQCSLKSVAFSKFEKAVFCTGGRDGNIMVWDTRCNKKDGFYRQVNQISGAHNTSDKQTPSKPKKKQNSKGLAPSVDFQQSVTVVLFQDENTLVSAGAVDGIIKVWDLRKNYTAYRQEPIASKSFLYPGSSTRKLGYSSLILDSTGSTLFANCTDDNIYMFNMTGLKTSPVAIFNGHQNSTFYVKSSLSPDDQFLVSGSSDEAAYIWKVSTPWQPPTVLLGHSQEVTSVCWCPSDFTKIATCSDDNTLKIWRLNRGLEEKPGGDKLSTVGWASQKKKESRPGLVTVTSSQSTPAKAPRAKCNPSNSSPSSAACAPSCAGDLPLPSNTPTFSIKTSPAKARSPINRRGSVSSVSPKPPSSFKMSIRNWVTRTPSSSPPITPPASETKIMSPRKALIPVSQKSSQAEACSESRNRVKRRLDSSCLESVKQKCVKSCNCVTELDGQVENLHLDLCCLAGNQEDLSKDSLGPTKSSKIEGAGTSISEPPSPISPYASESCGTLPLPLRPCGEGSEMVGKENSSPENKNWLLAMAAKRKAENPSPRSPSSQTPNSRRQSGKKLPSPVTITPSSMRKICTYFHRKSQEDFCGPEHSTEL

SEQ ID NO: 19960 - protein, 134 aa, Homo sapiens
MFGFHKPKMYRSIEGCCICRAKSSSSRFTDSKRYEKDFQSCFGLHETRSGDICNACVLLVKRWKKLPAGSKKNWNHVVDARAGPSLKTTLKPKKVKTLSGNRIKSNQISKLQKEFKRHNSDAHSTTSSASPAQS

SEQ ID NO: 19961 - protein, 534 aa, Homo sapiens
MIPDLTSPYLPNGSLSPTARTYLQMKWPLLDVQAGSLQSRQALKDARSPSPAHIVQSPLPCCTQGHDCQHFYPPSDFTVSTQVFRDMKRSHSLQKVGEPWCIESNKVPVVQHPHHVHPLTPLITYSNEHFTPGNPPPHLPADVDPKTGIPRPPHPPDISPYYPLSPGTVGQIPHPLGWQGQPVYPITTGGFRHPYPTALTVNASMSRFPPHMVPPHHTLHTTGIPHPAIVTPTVKQESSQSDVGSLHSSKHQDSKKEEEKKKPHIKKPLNAFMLYMKEMRAKVVAECTLKESAAINQILGRRWHALSREEQAKYYELARKERQLHMQLYPGWSARDNYGKKKKRKRDKQPGETNEHSECFLNPCLSLPPITDANTPKKCRALFGLDRQTLWCKPCRRKKKCVRYIQGEGSCLSPPSSDGSLLDSPPPSPNLLGSPPRDAKSQTEQTQPLSLSLKPDPLAHLSMMPPPPALLLAEATHKASALCPNGALDLPPAALQPAAPSSSIAQPSTSSLHSHSSLAGTQPQPLSLVTKSLE

SEQ ID NO: 19962 - protein, 589 aa, Homo sapiens
MADALLADLESTTSHISKRPVFLSEETPYSYPTGNHTYQEIAVPPPVPPPPSSEALNGTILDPLDQWQPSSSRFIHQQPQSSSPVYGSSAKTSSVSNPQDSVGSPCSRVGEEEHVYSFPNKQKSAEPSPTVMSTSLGSNLSELDRLLLELNAVQHNPPGFPADEANSSPPLPGALSPLYGVPETNSPLGGKAGPLTKEKPKRNGGRGLEDVRPSVESLLDELESSVPSPVPAITVNQGEMSSPQRVTSTQQQTRISASSATRELDELMASLSDFKIQGLEQRADGERCWAAGWPRDGGRSSPGGQDEGGFMAQGKTGSSSPPGGPPKPGSQLDSMLGSLQSDLNKLGVATVAKGVCGACKKPIAGQVVTAMGKTWHPEHFVCTHCQEEIGSRNFFERDGQPYCEKDYHNLFSPRCYYCNGPILDKVVTALDRTWHPEHFFCAQCGAFFGPEGFHEKDGKAYCRKDYFDMFAPKCGGCARAILENYISALNTLWHPECFVCRECFTPFVNGSFFEHDGQPYCEVHYHERRGSLCSGCQKPITGRCITAMAKKFHPEHFVCAFCLKQLNKGTFKEQNDKPYCQNCFLKLFC

SEQ ID NO: 19963 - protein, 527 aa, Homo sapiens
MLDVGKWPIFSLCSEEELQLIRQACVFGSAGNEVLYTTVNDEIFVLGTNCCGCLGLGDVQSTIEPRRLDSLNGKKIACLSYGSGPHIVLATTEGEVFTWGHNAYSQLGNGTTNHGLVPCHISTNLSNKQVIEVACGSYHSLVLTSDGEVFAWGYNNSGQVGSGSTVNQPIPRRVTGCLQNKVVVTIACGQMCCMAVVDTGEVYVWGYNGNGQLGLGNSGNQPTPCRVAALQGIRVQRVACGYAHTLVLTDEGQVYAWGANSYGQLGTGNKSNQSYPTPVTVEKDRIIEIAACHSTHTSAAKTQGGHVYMWGQCRGQSVILPHLTHFSCTDDVFACFATPAVTWRLLSVEPDDHLTVAESLKREFDNPDTADLKFLVDGKYIYAHKVLLKIRCEHFRSSLEDNEDDIVEMSEFSYPVYRAFLEYLYTDSISLSPEEAVGLLDLATFYRENRLKKLCQQTIKQGICEENAIALLSAAVKYDAQDLEEFCFRFCINHLTVVTQTSGFAEMDHDLLKNFISKASRVGAFKN

SEQ ID NO: 19964 - protein, 466 aa, Homo sapiens
MEVRWFRSQFSPAVFVYKGGRERTEEQMEEYRGRTTFVSKDISRGSVALVIHNITAQENGTYRCYFQEGRSYDEAILHLVVAGLGSKPLISMRGHEDGGIRLECISRGWYPKPLTVWRDPYGGVAPALKEVSMPDADGLFMVTTAVIIRDKSVRNMSCSINNTLLGQKKESVIFIPESFMPSVSPCAVALPIIVVILMIPIAVCIYWINKLQKEKKILSGEKEFERETREIALKELEKERVQKEEELQVKEKLQEELRWRRTFLHAVDVVLDPDTAHPDLFLSEDRRSVRRCPFRHLGESVPDNPERFDSQPCVLGRESFASGKHYWEVEVENVIEWTVGVCRDSVERKGEVLLIPQNGFWTLEMHKGQYRAVSSPDRILPLKESLCRVGVFLDYEAGDVSFYNMRDRSHIYTCPRSAFSVPVRPFFRLGCEDSPIFICPALTGANGVTVPEEGLTLHRVGTHQSL

SEQ ID NO: 19965 - protein, 211 aa, Homo sapiens
MAAAVRMNIQMLLEAADYLERREREAEHGYASMLPYNNKDRDALKRRNKSKKNNSSSRRAHLRLCLEKLKGLVPLGPESSRHTTLSLLTKAKLHIKKLEDCDRKAVHQIDQLQREQRHLKRQLEKLGIERIRMDSIGSTVSSERSDSDREEIDVDVESTDYLTGDLDWSSSSVSDSDERGSMQSLGSDEGYSSTSIKRIKLQDSHKACLGL

SEQ ID NO: 19966 - protein, 278 aa, Homo sapiens
MVSKLSQLQTELLAALLESGLSKEALIQALGEPGPYLLAGEGPLDKGESCGGGRGELAELPNGLGETRGSEDETDDDGEDFTPPILKELENLSPEEAAHQKAVVETLLQEDPWRVAKMVKSYLQQHNIPQREVVDTTGLNQSHLSQHLNKGTPMKTQKRAALYTWYVRKQREVAQRRNASREGCPHHRHRGWAPTSSRRCVSTTGLPTGAKKKPSGTSWPWTRTAGPPQGQARDLRCPLTAPLACLHLPSPPVRSTVCAMDSLRPVRLQKYPQAAAVP

SEQ ID NO: 19967 - protein, 1034 aa, Homo sapiens
MRDFGFGVLQTAPLRSSSPGPLFCGEAYGPYAVGSVNPLPSATPFGPLSPPPLPVTGFLEAASPFSVPLGGGAGSPAAAASSSSPFLAHQQTMQDELLLGLTQQPARPLSGAAATEKLPDHHPGGGTIAGVTHLLPSQDFKPSLHHPSSSSASSCCCCRTSSPQDFSKRQQQQLSSQKRKEFSPPHLPHPPDSKPPPPPPPLHCPGRFSPPPPPAGPLLQPAQLAQRQQQQPPQQFSLLHQQHLSPQDFAPRQRPADLPPLPQLPPSPPAAPRRRHGGAGSPRKTPAAGEGSAAESPNAGLASSTPVNPAPGSMESPNHPLLNSPSNLLPGGALGAGAFSSLQSPDLPHPGGGGGGGGGGPPGGGGGGGSASPPPLPGFGTPWSVQTASPPPQPQQPPPTQPQQQPPPPQQPPQPQPQPPGSSATTPGGGSGGSLSAMPPPSPDSENGFYPGLPSSMNPAFFPSFSPVSPHGCTGLSVPTSGGGGGGFGGPFSATAVPPPPPPAMNIPQQQPPPPAAPQQPQSRRSPVSPQLQQQHQAAAAAFLQQRNSYNHHQPLLKQSPWSNHQSSGWGTGSMSWGAMHGRDHRRTGNMGIPGTMNQISPLKKPFSGNVIAPPKFTRSTPSLTPKSWIEDNVFRTDNNSNTLLPLQVRSSLQLPAWGSDSLQDSWCTAAGTSRIDQDRSRMYDSLNMHSLENSLIDIMRAEHDPLKGRLSYPHPGTDNLLMLNARSYGRRRGRSSLFPIDDGLLDDGHSDQVGVLNSPTCYSAHQNGERIERFSRKVFVGGLPPDIDEDEITASFRRFGPLVVDWPHKAESKSYFPPKGYAFLLFQEESSVQALIDACIEEDGKLYLCVSSPTIKDKPVQIRPWNLSDSDFVMDGSQPLDPRKTIFVGGVPRPLRAVELAMIMDRLYGGVCYAGIDTDPELKYPKGAGRVAFSNQQSYIAAISARFVQLQHGDIDKRVEVKPYVLDDQMCDECQGARCGGKFAPFFCANVTCLQYYCEFCWANIHSRAGREFHKPLVKEGADRPRQIHFRWN

SEQ ID NO: 19968 - protein, 695 aa, Homo sapiens
MPGGGPQGAPAAAGGGGVSHRAGSRDCLPPAACFRRRRLARRPGYMRSSTGPGIGFLSPAVGTLFRFPGGVSGEESHHSESRARQCGLDSRGLLVRSPVSKSAAAPTVTSVRGTSAHFGIQLRGGTRLPDRLSWPCGPGSAGWQQEFAAMDSSETLDASWEAACSDGARRVRAAGSLPSAELSSNSCSPGCGPEVPPTPPGSHSAFTSSFSFIRLSLGSAGERGEAEGCPPSREAESHCQSPQEMGAKAASLDGPHEDPRCLSRPFSLLATRVSADLAQAARNSSRPERDMHSLPDMDPGSSSSLDPSLAGCGGDGSSGSGDAHSWDTLLRKWEPVLRDCLLRNRRQMEVISLRLKLQKLQEDAVENDDYDKAETLQQRLEDLEQEKISLHFQLPSRQPALSSFLGHLAAQVQAALRRGATQQASGDDTHTPLRMEPRLLEPTAQDSLHVSITRRDWLLQEKQQLQKEIEALQARMFVLEAKDQQLRREIEEQEQQLQWQGCDLTPLVGQLSLGQLQEVSKALQDTLASAGQIPFHAEPPETIRSLQERIKSLNLSLKEITTKVCMSEKFCSTLRKKVNDIETQLPALLEAKMHAISGNHFWTAKDLTEEIRSLTSEREGLEGLLSKLLVLSSRNVKKLGSVKEDYNRLRREVEHQETAYAASVHCLGKCGKLTWKLVDCLSRAYSSRKPGEACL

SEQ ID NO: 19969 - protein, 1226 aa, Homo sapiens
MGEQKVSRQFKQCHRTTSWAKSKLFSRLSSMFLQQLGKNIKFGQRSPNAIPMNKANSGEASLEEDLFLTSPMEIVTQQDIVLSDAENKSSDTPSSLSPLNLPGAGSEMEEKVAPVKPSRPKRHFSSAGTIESVNLDAIPLAIARLDNSAAKHKLAVKPKKQRVSKKHRRLAQDPQHEQGGLESRPCLDQNGHPGEDKPTWHEEEPNPLDSEEERRRQEDYWRELEAKCKRQKAEAAEKRRLEEQRLQALERRLWEENRRQELLEEEGEGQEPPLEAERAPREEQQRSLEAPGWEDAERREREERERLEAEEERRRLQAQAQAEERRRLEEDARLEERRRQEEEEGRCAEELKRQEEEEAEGWEELEQQEAEVQGPPEALEETGEGRRGAEEEDLGEEEEEGQAHLEDWRGQLSELLNDFEERLEDQERLKPEGQREHSEEPGICEEQNPEAERRREQQGRSGDFQGADRPGPEEKREEGDTEPLLKQEGPVEAAQPPVERKEAAALEQGRKVEELRWQEVDERQTMPRPYTFQVSSGGKQILFPKVNLSPVTPAKDTGLTAAPQEPKAPKASPVQHALPSSLSVPHTAILVTGAQLCGPAVNLSQIKDTACKSLLGLEEKKHAEAPAGENPPRGPGDARAGSGKAKPRQESPSSASALAEWASIRSRILKNAESDPRSSERDQLRPGDESTPRGRCDSRGNQRKTPPVNAKFSIMPAWQKFSDGGTETSKQSTEAESIRKRPMLGPSEETAPQPPPAGVRELGKGPEKSEMHREPADTTEGCKFAKDLPSFLVPSLPYPPQKVVAHTEFTTSSDSETANGIAKPDPVMPGGEEKASPFGIKLRRTNYSLRFNCDQQAEQKKKKRHSSTGDSADAGPPAAGSARGEKEMEGVALKHGPSLPQERKQAPSTRRDSAEPSSSRSVPVAHPGPPPASSQTPAPEHDKAANKMPLAQKPALAPKPTSQTPPASPLSKLSRPYLVELLSRRAGRPDPEPSEPSKEDQESSDRRPPSPPGPEERKGQKRDEEEEATERKPASPPLPATQQEKPSQTPEAGRKEKPMLQSRHSLDGSKLTEKVETAQPLWITLALQKQKGFREQQATREERKQAREAKQAEKLSKENVSVSVQPGSSSVSRAGSLHKSTALPEEKRPETAVSRLERREQLKKANTLPTSVTVEISDSAPPAPLVKEVTKRFSTPDAAPVSTEPAWLALAKRKAKAWSDCPQIIK

SEQ ID NO: 19970 - protein, 684 aa, Homo sapiens
MVENERLRQEMRRCEAELQELRTKPAGPCPGCEHSQESAQLRDKLSQLQLEMAESKGMLSELNLEVQQKTDRLAEVELRLKDCLAEKAQEEERLSRRLRDSHETIASLRAQSPPVKYVIKTVEVESSKTKQALSESQARNQHLQEQVAMQRQVLKEMEQQLQSSHQLTARLRAQIAMYESELERAHGQMLEEMQSLEEDKNRAIEEAFARAQVEMKAVHENLAGVRTNLLTLQPALRTLTNDYNGLKRQVRGFPLLLQEALRSVKAEIGQAIEEVNSNNQELLRKYRRELQLRKKCHNELVRLKGNIRVIARVRPVTKEDGEGPEATNAVTFDADDDSIIHLLHKGKPVSFELDKVFSPQASQQDEVQALVTSCIDGFNVCIFAYGQTGAGKTYTMEGTAENPGINQRALQLLFSEVQEKASDWEYTITVSAAEIYNEVLRDLLGKEPQEKLEIRLCPDGSGQLYVPGLTEFQVQSVDDINKVFEFGHTNRTTEFTNLNEHSSRSHALLIVTVRGVDCSTGLRTTGKLNLVDLAGSERVGKSGAEGSRLREAQHINKSLSALGDVIAALRSRQGHVPFRNSKLTYLLQDSLSGDSKTLMVVQVSPVEKNTSETLYSLKFAERVRSVELGPGLRRAELGSWSSQEHLEWEPACQTPQPSARAHSAPSSGTSSRPGSIRRKLQPSA

SEQ ID NO: 19971 - protein, 1113 aa, Homo sapiens
MAQQANVGELLAMLDSPMLGVRDDVTAVFKENLNSDRGPMLVNTLVDYYLETSSQPALHILTTLQEPHDKMDTDVVVLTTGVLVLITMLPMIPQSGKQHLLDFFDIFGRLSSWCLKKPGHVAEVYLVHLHASVYALFHRLYGMYPCNFVSFLRSHYSMKENLETFEEVVKPMMEHVRIHPELVTGSKDHELDPRRWKRLETHDVVIECAKISLDPTEASYEDGYSVSHQISARFPHRSADVTTSPYADTQNSYGCATSTPYSTSRLMLLNMPGQLPQTLSSPSTRLITEPPQATLWSPSMVCGMTTPPTSPGNVPPDLSHPYSKVFGTTAGGKGTPLGTPATSPPPAPLCHSDDYVHISLPQATVTPPRKEERMDSARPCLHRQHHLLNDRGSEEPPGSKGSVTLSDLPGFLGDLASEEDSIEKDKEEAAISRELSEITTAEAEPVVPRGGFDSPFYRDSLPGSQRKTHSAASSSQGASVNPEPLHSSLDKLGPDTPKQAFTPIDLPCGSADESPAGDRECQTSLETSIFTPSPCKIPPPTRVGFGSGQPPPYDHLFEVALPKTAHHFVIRKTEELLKKAKGNTEEDGVPSTSPMEVLDRLIQQGADAHSKELNKLPLPSKSVDWTHFGGSPPSDEIRTLRDQLLLLHNQLLYERFKRQQHALRNRRLLRKVIKAAALEEHNAAMKDQLKLQEKDIQMWKVSLQKEQARYNQLQEQRDTMVTKLHSQIRQLQHDREEFYNQSQELQTKLEDCRNMIAELRIELKKANNKVCHTELLLSQVSQKLSNSESVQQQMEFLNRQLLVLGEVNELYLEQLQNKHSDTTKEVEMMKAAYRKELEKNRSHVLQQTQRLDTSQKRILELESHLAKKDHLLLEQKKYLEDVKLQARGQLQAAESRYEAQKRITQVFELEILDLYGRLEKDGLLKKLEEEKAEAAEAAEERLDCCNDGCSDSMVGHNEEASGHNGETKTPRPSSARGSSGSRGGGGSSSSSSELSTPEKPPHQRAGPFSSRWETTMGEASASIPTTVGSLPSSKSFLGMKARELFRNKSESQCDEDGMTSSLSESLKTELGKDLGVEAKIPLNLDGPHPSPPTPDSVGQLHIMDYNETHHEHS

SEQ ID NO: 19972 - protein, 611 aa, Homo sapiens
MYRDPEAASPGAPSRDVLLVSAIITVSLSVTVVLCGLCHWCQRKLGKRYKNSLETVGTPDSGRGRSEKKAINDLDRDFWNNNESTVQQKWSSYPPKEFILNISPYAPYGDPRLSLNFEDSTLSTATTLESIPSSTGEPKCQRPRTLMRQQSLQQPLSQHQRGRQPSQPTTSQSLGQLQAHMASAPGPNPRAYGRGQARQGTSAGSKYRAAGGRSRSNPGSWDHVVGQIRNRGLDMKSFLEGRMVVLSLVLGLSEQDDFANIPDLQNPGTQQNQNAQGDKRLPAGGKAVNTAPVPGQTPHDESDRRTEPRSSVSDLVNSLTSEMLMLSPGSEEDEAHEGCSRENLGRIQFSVGYNFQESTLTVKIMKAQELPAKDFSGTSDPFVKIYLLPDKKHKLETKVKRKNLNPHWNETFLFEGFPYEKVVQRILYLQVLDYDRFSRNDPIGEVSIPLNKVDLTQMQTFWKDLKPCSDGSGSRGELLLSLCYNPSANSIIVNIIKARNLKAMDIGGTSDPYVKVWLMYKDKRVEKKKTVTMKRNLNPIFNESFAFDIPTEKLRETTIIITVMDKDKLSRNDVIGKIYLSWKSGPGEVKHWKDMIARPRQPVAQWHQLKA

SEQ ID NO: 19973 - protein, 1506 aa, Homo sapiens
MASGAGGVGGGGGGKIRTRRCHQGPIKPYQQGRQQHQGILSRVTESVKNIVPGWLQRYFNKNEDVCSCSTDTSEVPRWPENKEDHLVYADEESSNITDGRITPEPAVSNTEEPSTTSTASNYPDVLTRPSLHRSHLNFSMLESPALHCQPSTSSAFPIGSSGFSLVKEIKDSTSQHDDDNISTTSGFSSRASDKDITVSKNTSLPPLWSPEAERSHSLSQHTATSSKKPAFNLSAFGTLSPSLGNSSILKTSQLGDSPFYPGKTTYGGAAAAVRQSKLRNTPYQAPVRRQMKAKQLSAQSYGVTSSTARRILQSLEKMSSPLADAKRIPSIVSSPLNSPLDRSGIDITDFQAKREKVDSQYPPVQRLMTPKPVSIATNRSVYFKPSLTPSGEFRKTNQRIDNKCSTGYEKNMTPGQNREQRESGFSYPNFSLPAANGLSSGVGGGGGKMRRERTRFVASKPLEEERQGLTVLPKLISSSCAQAIIPSWPLKVLRLQEMEVPVLPKISLPITSSSLPTFNFSSPEITTSSPSPINSSQALTNKVQMTSPSSTGSPMFKFSSPIVKSTEANVLPPSSIGFTFSVPVAKTAELSGSSSTLEPIISSSAHHVTTVNSTNCKKTPPEDCEGPFRPAEILKEGSVLDILKSPGFASPKIDSVAAQPTATSPVVYTRPAISSFSSSGIGFGESLKAGSSWQCDTCLLQNKVTDNKCIACQAAKLSPRDTAKQTGIETPNKSGKTTLSASGTGFGDKFKPVIGTWDCDTCLVQNKPEAIKCVACETPKPGTCVKRALTLTVVSESAETMTASSSSCTVTTGTLGFGDKFKRPIGSWECSVCCVSNNAEDNKCVSCMSEKPGSSVPASSSSTVPVSLPSGGSLGLEKFKKPEGSWDCELCLVQNKADSTKCLACESAKPGTKSGFKGFDTSSSSSNSAASSSFKFGVSSSSSGPSQTLTSTGNFKFGDQGGFKIGVSSDSGSINPMSEGFKFSKPIGDFKFGVSSESKPEEVKKDSKNDNFKFGLSSGLSNPVSLTPFQFGVSNLGQEEKKEELPKSSSAGFSFGTGVINSTPAPANTIVTSENKSSFNLGTIETKSASVAPFTCKTSEAKKEEMPATKGGFSFGNVEPASLPSASVFVLGRTEEKQQEPVTSTSLVFGKKADNEEPKCQPVFSFGNSEQTKDENSSKSTFSFSMTKPSEKESEQPAKATFAFGAQTSTTADQGAAKPVFSFLNNSSSSSSTPATSAGGGIFGSSTSSSNPPVATFVFGQSSNPVSSSAFGNTAESSTSQSLLFSQDSKLATTSSTGTAVTPFVFGPGASSNNTTTSGFGFGATTTSSSAGSSFVFGTGPSAPSASPAFGANQTPTFGQSQGASQPNPPGFGSISSSTALFPTGSQPAPPTFGTVSSSSQPPVFGQQPSQSAFGSGTTPNSSSAFQFGSSTTNFNFTNNSPSGVFTFGANSSTPAASAQPSGSGGFPFNQSPAAFTVGSNGKNVFSSSGTSFSGRKIKTAVRRRK

SEQ ID NO: 19974 - protein, 590 aa, Homo sapiens
MAFPHRPDAPELPDFSMLKRLARDQLIYLLEQQHEVDKLYKVENKPALSSNEQLCFLVRPRIKNMRYIASLVNADKLAGRTRKYKVIFSPQKFYACEMVLEEEGIYGDVSCDEWAFSLLPLDVDLLSMELPEFFRDYFLEGDQRWINTVAQALHLLSTLYGPFPNCYGIGRCAKMAYELWRNLEEEEDGETKGRRPEIGHIFLLDRDVDFVTALCSQVVYEGLVDDTFRIKCGSVDFGPEVTSSDKSLKVLLNAEDKVFNEIRNEHFSNVFGFLSQKARNLQAQYDRRRGMDIKQMKNFVSQELKGLKQEHRLLSLHIGACESIMKKKTKQDFQELIKTEHALLEGFNIRESTSYIEEHIDRQVSPIESLRLMCLLSITENGLIPKDYRSLKTQYLQSYGPEHLLTFSNLRRAGLLTEQAPGDTLTAVESKVSKLVTDKAAGKITDAFSSLAKRSNFRAISKKLNLIPRVDGEYDLKVPRDMAYVFGGAYVPLSCRIIEQVLERRSWQGLDEVVRLLNCSDFAFTDMTKEDKASSESLRLILVVFLGGCTFSEISALRFLGREKGYRFIFLTTAVTNSARLMEAMSEVKA

SEQ ID NO: 19975 - protein, 317 aa, Homo sapiens
MAGRMSTSNHTQFHPSSFLLLGIPGLEDVHIWIGVPFFFVYLVALLGNTALLFVIQTEQSLHEPMYYFLAMLDSIDLGLSTATIPKMLGIFWFNTKEISFGGCLSHMFFIHFFTAMESIVLVAMAFDRYIAICKPLRYTMILTSKIISLIAGIAVLRSLYMVVPLVFLLLRLPFCGHRIIPHTYCEHMGIARLACASIKVNIRFGLGNISLLLLDVILIILSYVRILYAVFCLPSWEARLKALNTCGSHIGVILAFFTPAFFSFLTHRFGHNIPQYIHIILANLYVVVPPALNPVIYGVRTKQIRERVLRIFLKTNH

SEQ ID NO: 19976 - protein, 446 aa, Homo sapiens
MASCDLDRNSLCKKEEDTRSASPTIEAQGTSPAHDNIAFQDSTSKDKTILNLEAKEEPETIEEHKKEHASGDSVVSPLPVTTVKSVNLRQSENTSANEKEVEAEFLRLSLGFKCDWFTLEKRVKLEERSRDLAEENLKKEITNCLKLLESLTPLCEDDNQAQEIIKKLEKSIKFLSQCAARVASRAEMLGAINQESRVSKAVEVMIQHVENLKRMYAKEHAELEELKQVLLQNERSFNPLEDDDDCQIKKRSASLNSKPSSLRRVTIASLPRNIGNAGMVAGMENNDRFSRRSSSWRILGSKQSEHRPSLPRFISTYSWADAEEEKCELKTKDDSEPSGEETVERTRKPSLSEKKNNPSKWDVSSVYDTIASWATNLKSSIRKANKALWLSIAFIVLFAALMSFLTGQLFQKSVDAAPTQQEDSWTSLEHILWPFTRLRHNGPPPV

SEQ ID NO: 19977 - protein, 61 aa, Homo sapiens
MRKGVLKDPEIADLFYKDDPEELFIGLHEIGHGSFGAVYFATNAHTSEVVAIKKMSYSGKQ

SEQ ID NO: 19978 - protein, 1109 aa, Homo sapiens
MSLDFRRHFVNLSPFTITVVLLLSACFVTSSLGGTDKELRLVDGENKCSGRVEVKVQEEWGTVCNNGWSMEAVSVICNQLGCPTAIKAPGWANSSAGSGRIWMDHVSCRGNESALWDCKHDGWGKHSNCTHQQDAGVTCSDGSNLEMRLTRGGNMCSGRIEIKFQGRWGTVCDDNFNIDHASVICRQLECGSAVSFSGSSNFGEGSGPIWFDDLICNGNESALWNCKHQGWGKHNCDHAEDAGVICSKGADLSLRLVDGVTECSGRLEVRFQGEWGTICDDGWDSYDAAVACKQLGCPTAVTAIGRVNASKGFGHIWLDSVSCQGHEPAIWQCKHHEWGKHYCNHNEDAGVTCSDGSDLELRLRGGGSRCAGTVEVEIQRLLGKVCDRGWGLKEADVVCRQLGCGSALKTSYQVYSKIQATNTWLFLSSCNGNETSLWDCKNWQWGGLTCDHYEEAKITCSAHREPRLVGGDIPCSGRVEVKHGDTWGSICDSDFSLEAASVLCRELQCGTVVSILGGAHFGEGNGQIWAEEFQCEGHESHLSLCPVAPRPEGTCSHSRDVGVVCSRYTEIRLVNGKTPCEGRVELKTLGAWGSLCNSHWDIEDAHVLCQQLKCGVALSTPGGARFGKGNGQIWRHMFHCTGTEQHMGDCPVTALGASLCPSEQVASVICSGNQSQTLSSCNSSSLGPTRPTIPEESAVACIESGQLRLVNGGGRCAGRVEIYHEGSWGTICDDSWDLSDAHVVCRQLGCGEAINATGSAHFGEGTGPIWLDEMKCNGKESRIWQCHSHGWGQQNCRHKEDAGVICSEFMSLRLTSEASREACAGRLEVFYNGAWGTVGKSSMSETTVGVVCRQLGCADKGKINPASLDKAMSIPMWVDNVQCPKGPDTLWQCPSSPWEKRLASPSEETWITCDNKIRLQEGPTSCSGRVEIWHGGSWGTVCDDSWDLDDAQVVCQQLGCGPALKAFKEAEFGQGTGPIWLNEVKCKGNESSLWDCPARRWGHSECGHKEDAAVNCTDISVQKTPQKATTGRSSRQSSFIAVGILGVVLLAIFVALFFLTKKRRQRQRLAVSSRGENLVHQIQYREMNSCLNADDLDLMNSSGGHSEPH

SEQ ID NO: 19979 - protein, 1022 aa, Homo sapiens
MEGALTARDKVGVQDFVLLDAYTSESAFVDNLRKRFSENLIYTYIGTLLVSVNPYQELGIYTVSQMELYQGVNFFELPPHVYAIADNAYRMMCAELNNHFILISGESGAGKTEASKKILEYFAVTCPMTQSLQIARDRLLFSNPVLEAFGNARTLRNDNSSRFGKYMDIQFDFQGIPVGGHIISYLIEKSRVVYQNEGERNFHIFYQLLAGGEEERLSYLGLERDPQLYKYLSQGHCAKESSISDKNDWKTVSNAFSVIDFTEADLENLFGIIASVLHLGNIGFEEDDQGCATIPDTHEIKWIAKLLGVHPSVLLEALTHRKIEAKTEEVICPLTLELSVYARDAMAKAVYGRTFTWLVNKINSSLVNKDFTRKTVIGLLDIYGFEVFDKNGFEQFCINYCNEKLQQLLIERTLKAEQAEYEMEGIEWEPIKYFNNKIICDLVEERHKGIISILDEECIRPGPATDLSFLEKLEEKVGKHAHFETRKLAGPKGRKRIGWMEFRLLHYAGEVTYCTKGFLEKNNDLLYRHLKEVLCKSKNIILRECFLLAELENRRRPPTVGTQFKNSLSSLLETLISKEPSYIRCIKPNDRKEPSKFDDFLIRHQIKYLGLMEHLRVRRAGFAYRRKYEHFLQRYKSLCPDTWPHWHGPPAEGVERLIKYIGYKPEEYKLGKTKIFIRFPRTLFATEDAFEFSKHQLVARIQATYKRCLGRREYVKKRQAAIKLEAHWRGALARKAIQRRKWAVRIIRKFIKGFISRNKPLCPDNEEFIVFVRKNYILNLRYHLPKTVLDKSWLRPPGILENASDLLRKMCVRNLVQKYCRGITAERKAMMQQKVVTSEIFRGRKDGYTESLNQPFVNSRIDEGDINPKVLQLISHEKIQYGVPVIKYDRKGFKARQRQLILTQKAAYVVELAKIKQKIEYSALKGVSTSNLSDGILVIHVSPEDSKQKGDAVLQCGHVFEAVTKLVMLVKKENIVNVVQGSLQFFISPGKEGTIVFDTGLEEQVYKNKNGQLTVVSVRRKS

SEQ ID NO: 19980 - protein, 216 aa, Homo sapiens
MVGHLHLQGMEDSLKEQGREGLLDSPDSGLPPSPSPSPPFYSLAPGILDARAGGAGASSEPPGPSEARAPPSQLPNPPASEMRPRMLPVFFGESIKVNPEPTHEIRCNSEVKYASEKHFQDKVFYAPVPTVTAYSETIVAAPNCTWRNYRSQLTLEPRPRALRFRSTTIIFPKHARSTFRTTLHCSLGRPSRWFTASVQLQLCQDPAPSLLGPATL

SEQ ID NO: 19981 - protein, 303 aa, Homo sapiens
MADKSKFIEYIDEALEKSKETALSHLFFTYQGIPYPITMCTSETFQALDTFEARHDDIVLASYPKCGSNWILHIVSELIYAVSKKKYKYPEFPVLECGDSEKYQRMKGFPSPRILATHLHYDKLPGSIFENKAKILVIFRNPKDTAVSFLHFHNDVPDIPSYGSWDEFFRQFMKGQVSWGRYFDFAINWNKHLDGDNVKFILYEDLKENLAAGIKQIAEFLGFFLTGEQIQTISVQSTFQAMRAKSQDTHGAVGPFLFRKGEVGDWKNLFSEIQNQEMDEKFKECLAGTSLGAKLKYESYCQG

SEQ ID NO: 19982 - protein, 770 aa, Homo sapiens
HVSTIINICLKYLTYDPNYNYDDEDEDENAMDADGGDDDDQGSDDEYSDDDDMSWKVRRAAAKCLDAVVSTRHEMLPEFYKTVSPALISRFKEREENVKADVFHAYLSLLKQTRPVQSWLCDPDAMEQGETPLTMLQSQVPNIVKALHKQMKEKSVKTRQCCFNMLTTVKALTLIAGSPLKIDLRPVLGEGVPILASFLRKNQRALKLGTLSALDILIKNYSDSLTAAMIDAVLDELPPLISESDMHVSQMAISFLTTLAKVYPSSLSKISGSILNELIGLVRSPLLQGGALSAMLDFFQALVVTGTNNLGYMDLLRMLTGPVYSQSTALTHKQSYYSIAKCVAALTRACPKEGPAVVGQFIQDVKNSRSTDSIRLLALLSLGEVGHHIDLSGQLELKSVILEAFSSPSEEVKSAASYALGSISVGNLPEYLPFVLQEITSQPKRQYLLLHSLKEIISSASVVGLKPYVENIWALLLKHCECAEEGTRNVVAECLGKLTLIDPETLLPRLKGYLISGSSYARSSVVTAVKFTISDHPQPIDPLLKNCIGDFLKTLEDPDLNVRRVALVTFNSAAHNKPSLIRDLLDTVLPHLYNETKVRKELIREVEMGPFKHTVDDGLDIRKAAFECMYTLLDSCLDRLDIFEFLNHVEDGLKDHYDIKMLTFLMLVRLSTLCPSAVLQRLDRLVEPLRATCTTKVKANSVKQEFEKQDELKRSAMRAVAALLTIPEAEKSPLMSEFQSQISSNPELAAIFESIQKDSSSTNLESMDTS

SEQ ID NO: 19983 - protein, 1216 aa, Homo sapiens
MDLEGDRNGGAKKKNFFKLNNKSEKDKKEKKPTVSVFSMFRYSNWLDKLYMVVGTLAAIIHGAGLPLMMLVFGEMTDIFANAGNLEDLMSNITNRSDINDTGFFMNLEEDMTSDVSKINEGIGDKIGMFFQSMATFFTGFIVGFTRGWKLTLVILAISPVLGLSAAVWAKILSSFTDKELLAYAKAGAVAEEVLAAIRTVIAFGGQKKELERYNKNLEEAKRIGIKKAITANISIGAAFLLIYASYALAFWYGTTLVLSGEYSIGQVLTVFFSVLIGAFSVGQASPSIEAFANARGAAYEIFKIIDNKPSIDSYSKSGHKPDNIKGNLEFRNVHFSYPSRKEVKILKGLNLKVQSGQTVALVGNSGCGKSTTVQLMQRLYDPTEGMVSVDGQDIRTINVRFLREIIGVVSQEPVLFATTIAENIRYGRENVTMDEIEKAVKEANAYDFIMKLPHKFDTLVGERGAQLSGGQKQRIAIARALVRNPKILLLDEATSALDTESEAVVQVALDKARKGRTTIVIAHRLSTVRNADVIAGFDDGVIVEKGNHDELMKEKGIYFKLVTMQTAGNEVELENAADESKSEIDALEMSSNDSRSSLIRKRSTRRSVRGSQAQDRKLSTKEALDESIPPVSFWRIMKLNLTEWPYFVVGVFCAIINGGLQPAFAIIFSKIIGVFTRIDDPETKRQNSNLFSLLFLALGIISFITFFLQGFTFGKAGEILTKRLRYMVFRSMLRQDVSWFDDPKNTTGALTTRLANDAAQVKGAIGSRLAVITQNIANLGTGIIISFIYGWQLTLLLLAIVPIIAIAGVVEMKMLSGQALKDKKELEGSGKIATEAIENFRTVVSLTQEQKFEHMYAQSLQVPYRNSLRKAHIFGITFSFTQAMMYFSYAGCFRFGAYLVAHKLMSFEDVLLVFSAVVFGAMAVGQVSSFAPDYAKAKISAAHIIMIIEKTPLIDSYSTEGLMPNTLEGNVTFGEVVFNYPTRPDIPVLQGLSLEVKKGQTLALVGSSGCGKSTVVQLLERFYDPLAGKVLLDGKEIKRLNVQWLRAHLGIVSQEPILFDCSIAENIAYGDNSRVVSQEEIVRAAKEANIHAFIESLPNKYSTKVGDKGTQLSGGQKQRIAIARALVRQPHILLLDEATSALDTESEKVVQEALDKAREGRTCIVIAHRLSTIQNADLIVVFQNGRVKEHGTHQQLLAQKGIYFSMVSVQAGTKRQ

SEQ ID NO: 19984 - protein, 634 aa, Homo sapiens
MGENKDKPYLLYFNIFSCILSSNIISVAENGLQCPTPQVCVSSCPEDPWTVGKNEFSQTVGEVFYTKNRNFCLPGVPWNMTVITSLQQELCPSFLLPSAPALGRCFPWTNVTPPALPGITNDTTIQQGISGLIDSLNARDISVKIFEDFAQSWYWILVALGVALVLSLLFILLLRLVAGPLVLVLILGVLGVLAYGIYYCWEEYRVLRDKGASISQLGFTTNLSAYQSVQETWLAALIVLAVLEAILLLMLIFLRQRIRIAIALLKEASKAVGQMMSTMFYPLVTFVLLLICIAYWAMTALYLATSGQPQYVLWASNISSPGCEKVPINTSCNPTAHLVNSSCPGLMCVFQGYSSKGLIQRSVFNLQIYGVLGLFWTLNWVLALGQCVLAGAFASFYWAFHKPQDIPTFPLISAFIRTLRYHTGSLAFGALILTLVQIARVILEYIDHKLRGVQNPVARCIMCCFKCCLWCLEKFIKFLNRNAYIMIAIYGKNFCVSAKNAFMLLMRNIVRVVVLDKVTDLLLFFGKLLVVGGVGVLSFFFFSGRIPGLGKDFKSPHLNYYWLPIMTSILGAYVIASGFFSVFGMCVDTLFLCFLEDLERNNGSLDRPYYMSKSLLKILGKKNEAPPDNKKRKK

SEQ ID NO: 19985 - protein, 684 aa, Homo sapiens
MKVKTPLRALKSLWDYDFLIYDGVIDNTAPDFLAFKEHFSLAWGGIFSLLEHVEKFLRNYAIPEVKIKGNNLVALLPEFELTNKLTRYDLLSVLEDPAHVQMLINLPGQRYKGQDGNSEAAMKIQATWKCYKARKFFLFYRQQKWASGVIAIAWLLYCHKTRLKKILKESRQRHLENFRIRAKHLAANWNRIRTSRRTIIHIPSLGYSQPVREHIADFNTQQNMQLGRLCDILDANVNVIYICSHHMNDELVLYYKKILSLHAAVKSGNLEDRSDLQDRFKIITPEAVNIFPMIEQLSQLITDHLQIQRWLFKMDSEFRGNGTAFCDIPSYLKCYKWVLKESSRYGLEDWRKKWAQEPALVKISEELAGILAQHAQPVNEKRFPTWRKFLQTFLSQGGVIEAFPPADNVTNLTVDMLIEPNGKISVLSTGDQLHAESPFISSGTTVPQTSVDPQVLTYLCLQIGKACRMRDVVGYFSIDLVTFIDPSTLEQQVWATGLNLAYSDQLALTQLTLYLTNGHLDCSLSTLEVPRFVPKERKKTKCMSALSMPMLATSRYAVMTTQLRHSNLSLVFHYVFLQICRAHGIGYDVEERQGTVFILYEHLKRHKLGMLTIGEDLQGVLMTFARHLFIIHQEISAPNMQGETNFKTTIADIETILRVTKENKMRFEEEQQSKDDKNLSKPKK

SEQ ID NO: 19986 - protein, 1115 aa, Homo sapiens
MPSSLMLEVPALADFNRAWTELTDWLSLLDQVIKSQRVMVGDLEDINEMIIKQKATMQDLEQRRPQLEELITAAQNLKNKTSNQEARTIITDRIERIQNQWDEVQEHLQNRRQQLNEMLKDSTQWLEAKEEAEQVLGQARAKLESWKEGPYTVDAIQKKITETKQLAKDLRQWQTNVDVANDLALKLLRDYSADDTRKVHMITENINASWRSIHKRVSEREAALEETHRLLQQFPLDLEKFLAWLTEAETTANVLQDATRKERLLEDSKGVKELMKQWQDLQGEIEAHTDVYHNLDENSQKILRSLEGSDDAVLLQRRLDNMNFKWSELRKKSLNIRSHLEASSDQWKRLHLSLQELLVWLQLKDDELSRQAPIGGDFPAVQKQNDVHRAFKRELKTKEPVIMSTLETVRIFLTEQPLEGLEKLYQEPRELPPEERAQNVTRLLRKQAEEVNTEWEKLNLHSADWQRKIDETLERLRELQEATDELDLKLRQAEVIKGSWQPVGDLLIDSLQDHLEKVKALRGEIAPLKENVSHVNDLARQLTTLGIQLSPYNLSTLEDLNTRWKLLQVAVEDRVRQLHEAHRDFGPASQHFLSTSVQGPWERAISPNKVPYYINHETQTTCWDHPKMTELYQSLADLNNVRFSAYRTAMKLRRLQKALCLDLLSLSAACDALDQHNLKQNDQPMDILQIINCLTTIYDRLEQEHNNLVNVPLCVDMCLNWLLNVYDTGRTGRIRVLSFKTGIISLCKAHLEDKYRYLFKQVASSTGFCDQRRLGLLLHDSIQIPRQLGEVASFGGSNIEPSVRSCFQFANNKPEIEAALFLDWMRLEPQSMVWLPVLHRVAAAETAKHQAKCNICKECPIIGFRYRSLKHFNYDICQSCFFSGRVAKGHKMHYPMVEYCTPTTSGEDVRDFAKVLKNKFRTKRYFAKHPRMGYLPVQTVLEGDNMETNLQAEYDRLKQQHEHKGLSPLPSPPEMMPTSPQSPRDAELIAEAKLLRQHKGRLEARMQILEDHNKQLESQLHRLRQLLEQPQAEAKVNGTTVSSPSTSLQRSDSSQPMLLRVVGSQTSDSMGEEDLLSPPQDTSTGLEEVMEQLNNSFPSSRGRNTPGKPMREDTM

SEQ ID NO: 19987 - protein, 311 aa, Homo sapiens
MGPRNQTAVSEFLLMKVTEDPELKLIPFSLFLSMYLVTILGNLLILLAVISDSHLHTPMYFLLFNLSFTDICLTTTTVPKILVNIQAQNQSITYTGCLTQICLVLVFAGLESCFLAVMAYDRYVAICHPLRYTVLMNVHFWGLLILLSMFMSTMDALVQSLMVLQLSFCKNVEIPLFFCEVVQVIKLACSDTLINNILIYFASSVFGAIPLSGIIFSYSQIVTSVLRMPSARGKYKAFSTCGCHLSVFSLFYGTAFGVYISSAVAESSRITAVASVMYTVVPQMMNPFIYSLRNKEMKKALRKLIGRLFPF

SEQ ID NO: 19988 - protein, 84 aa, Homo sapiens
MLKLEAEKKKLRTILQVQYVLQNLTQEHVQKDFKGGLNGAVYLPSKELDYLIKFSKLTCPERNESLSVEDQMEQSSLYFWDLLE

SEQ ID NO: 19989 - protein, 584 aa, Homo sapiens
MQKFFGLPQTGDLDQNTIETMRKPRCGNPDVANYNFFPRKPKWDKNQITYRIIGYTPDLDPETVDDAFARAFQVWSDVTPLRFSRIHDGEADIMINFGRWEHGDGYPFDGKDGLLAHAFAPGTGVGGDSHFDDDELWTLGEGQVVRVKYGNADGEYCKFPFLFNGKEYNSCTDTGRSDGFLWCSTTYNFEKDGKYGFCPHEALFTMGGNAEGQPCKFPFRFQGTSYDSCTTEGRTDGYRWCGTTEDYDRDKKYGFCPETAMSTVGGNSEGAPCVFPFTFLGNKYESCTSAGRSDGKMWCATTANYDDDRKWGFCPDQGYSLFLVAAHEFGHAMGLEHSQDPGALMAPIYTYTKNFRLSQDDIKGIQELYGASPDIDLGTGPTPTLGPVTPEICKQDIVFDGIAQIRGEIFFFKDRFIWRTVTPRDKPMGPLLVATFWPELPEKIDAVYEAPQEEKAVFFAGNEYWIYSASTLERGYPKPLTSLGLPPDVQRVDAAFNWSKNKKTYIFAGDKFWRYNEVKKKMDPGFPKLIADAWNAIPDNLDAVVDLQGGGHSYFFKGAYYLKLENQSLKSVKFGSIKSDWLGC

SEQ ID NO: 19990 - protein, 730 aa, Homo sapiens
MDTSSKENIQLFCKTSVQPVGRPSFKTEYPSSEEKQPCCGELKVFLCALSFVYFAKALAEGYLKSTITQIERRFDIPSSLVGVIDGSFEIGNLLVITFVSYFGAKLHRPKIIGAGCVIMGVGTLLIAMPQFFMEQYKYERYSPSSNSTLSISPCLLESSSQLPVSVMEKSKSKISNECEVDTSSSMWIYVFLGNLLRGIGETPIQPLGIAYLDDFASEDNAAFYIGCVQTVAIIGPIFGFLLGSLCAKLYVDIGFVNLDHITITPKDPQWVGAWWLGYLIAGIISLLAAVPFWYLPKSLPRSQSREDSNSSSEKSKFIIDDHTDYQTPQGENAKIMEMARDFLPSLKNLFGNPVYFLYLCTSTVQFNSLFGMVTYKPKYIEQQYGQSSSRANFVIGLINIPAVALGIFSGGIVMKKFRISVCGAAKLYLGSSVFGYLLFLSLFALGCENSDVAGLTVSYQGTKPVSYHERALFSDCNSRCKCSETKWEPMCGENGITYVSACLAGCQTSNRSGKNIIFYNCTCVGIAASKSGNSSGIVGRCQKDNGCPQMFLYFLVISVITSYTLSLGGIPGYILLLRCIKPQLKSFALGIYTLAIRVLAGIPAPVYFGVLIDTSCLKWGFKRCGSRGSCRLYDSNVFRYQIKSIPASHCYSIPDLHNATDTNKFSCHFTACKTYISGTNCDTGHSVNSPKHCSTFHFKEKLCFKTQKFYNQERKNNGVYKIPKGKLHYK

SEQ ID NO: 19991 - protein, 2008 aa, Homo sapiens
MLEAIDKNRALHAAERLQTKLRERGDVANEDKLSLLKSVLQSPLFSQILSLQTSVQQLKDQVNIATSATSNIEYAHVPHLSPAVIPTLQNESFLLSPNNGNLEALTGPGIPHINGKPACDEFDQLIKNMAQGRHVEVFELLKPPSGGLGFSVVGLRSENRGELGIFVQEIQEGSVAHRDGRLKETDQILAINGQALDQTITHQQAISILQKAKDTVQLVIARGSLPQLVSPIVSRSPSAASTISAHSNPVHWQHMETIELVNDGSGLGFGIIGGKATGVIVKTILPGGVADQHGRLCSGDHILKIGDTDLAGMSSEQVAQVLRQCGNRVKLMIARGAIEERTAPTALGITLSSSPTSTPELRVDASTQKGEESETFDVELTKNVQGLGITIAGYIGDKKLEPSGIFVKSITKSSAVEHDGRIQIGDQIIAVDGTNLQGFTNQQAVEVLRHTGQTVLLTLMRRGMKQEAELMSREDVTKDADLSPVNASIIKENYEKDEDFLSSTRNTNILPTEEEGYPLLSAEIEEIEDAQKQEAALLTKWQRIMGINYEIVVAHVSKFSENSGLGISLEATVGHHFIRSVLPEGPVGHSGKLFSGDELLEVNGITLLGENHQDVVNILKELPIEVTMVCCRRTVPPTTQSELDSLDLCDIELTEKPHVDLGEFIGSSETEDPVLAMTDAGQSTEEVQAPLAMWEAGIQHIELEKGSKGLGFSILDYQDPIDPASTVIIIRSLVPGGIAEKDGRLLPGDRLMFVNDVNLENSSLEEAVEALKGAPSGTVRIGVAKPLPLSPEEGYVSAKEDSFLYPPHSCEEAGLADKPLFRADLALVGTNDADLVDESTFESPYSPENDSIYSTQASILSLHGSSCGDGLNYGSSLPSSPPKDVIENSCDPVLDLHMSLEELYTQNLLQRQDENTPSVDISMGPASGFTINDYTPANAIEQQYECENTIVWTESHLPSEVISSAELPSVLPDSAGKGSEYLLEQSSLACNAECVMLQNVSKESFERTINIAKGNSSLGMTVSANKDGLGMIVRSIIHGGAISRDGRIAIGDCILSINEESTISVTNAQARAMLRRHSLIGPDIKITYVPAEHLEEFKISLGQQSGRVMALDIFSSYTGRDIPELPEREEGEGEESELQNTAYSNWNQPRRVELWREPSKSLGISIVGGRGMGSRLSNGEVMRGIFIKHVLEDSPAGKNGTLKPGDRIVEVDGMDLRDASHEQAVEAIRKAGNPVVFMVQSIINRPRAPSQSESEPEKAPLCSVPPPPPSAFAEMGSDHTQSSASKISQDVDKEDEFGYSWKNIRERYGTLTGELHMIELEKGHSGLGLSLAGNKDRSRMSVFIVGIDPNGAAGKDGRLQIADELLEINGQILYGRSHQNASSIIKCAPSKVKIIFIRNKDAVNQMAVCPGNAVEPLPSNSENLQNKETEPTVTTSDAAVDLSSFKNVQHLELPKDQGGLGIAISEEDTLSGVIIKSLTEHGVAATDGRLKVGDQILAVDDEIVVGYPIEKFISLLKTAKMTVKLTIHAENPDSQAVPSAAGAASGEKKNSSQSLMVPQSGSPEPESIRNTSRSSTPAIFASDPATCPIIPGCETTIEISKGRTGLGLSIVGGSDTLLGAIIIHEVYEEGAACKDGRLWAGDQILEVNGIDLRKATHDEAINVLRQTPQRVRLTLYRDEAPYKEEEVCDTLTIELQKKPGKGLGLSIVGKRNDTGVFVSDIVKGGIADADGRLMQGDQILMVNGEDVRNATQEAVAALLKVSEGSLSSFTFPLSGSSTSESLESSSKKNALASEIQGLRTVEMKKGPTDSLGISIAGGVGSPLGDVPIFIAMMHPTGVAAQTQKLRVGDRIVTICGTSTEGMTHTQAVNLLKNASGSIEMQVVAGGDVSVVTGHQQEPASSSLSFTGLTSSSIFQDDLGPPQCKSITLERGPDGLGFSIVGGYGSPHGDLPIYVKTVFAKGAASEDGRLKRGDQIIAVNGQSLEGVTHEEAVAILKRTKGTVTLMVLS

SEQ ID NO: 19992 - protein, 483 aa, Homo sapiens
MSFSDSSATFLLNEGSADSYTSRPSLDSDVSLEEDRESARREVESQAQQQLERAKHKPVAFAVRTNVSYCGVLDEECPVQGSGVNFEAKDFLHIKEKYSNDWWIGRLVKEGGDIAFIPSPQRLESIRLKQEQKARRSGNPSSLSDIGNRRSPPPSLAKQKQKQAEHVPPYDVVPSMRPVVLVGPSLKGYEVTDMMQKALFDFLKHRFDGRISITRVTADLSLAKRSVLNNPGKRTIIERSSARSSIAEVQSEIERIFELAKSLQLVVLDADTINHPAQLAKTSLAPIIVFVKVSSPKVLQRLIRSRGKSQMKHLTVQMMAYDKLVQCPPESFDVILDENQLEDACEHLAEYLEVYWRATHHPAPGPGLLGPPSAIPGLQNQQLLGERGEEHSPLERDSLMPSDEASESSRQAWTGSSQRSSRHLEEDYADAYQDLYQPHRQHTSGLPSANGHDPQDRLLAQDSEHNHSDRNWQRNRPWPKDSY

SEQ ID NO: 19993 - protein, 597 aa, Homo sapiens
MGHLPTGIHGARRLLPLLWLFVLFKNATAFHVTVQDDNNIVVSLEASDVISPASVYVVKITGESKNYFFEFEEFNSTLPPPVIFKASYHGLYYIITLVVVNGNVVTKPSRSITVLTKPLPVTSVSIYDYKPSPETGVLFEIHYPEKYNVFTRVNISYWEGKDFRTMLYKDFFKGKTVFNHWLPGMCYSNITFQLVSEATFNKSTLVEYSGVSHEPKQHRTAPYPPQNISVRIVNLNKNNWEEQSGNFPEESFMRSQDTIGKEKLFHFTEETPEIPSGNISSGWPDFNSSDYETTSQPYWWDSASAAPESEDEFVSVLPMEYENNSTLSETEKSTSGSFSFFPVQMILTWLPPKPPTAFDGFHIHIEREENFTEYLMVDEEAHEFVAELKEPGKYKLSVTTFSSSGSCETRKSQSAKSLSFYISPSGEWIEELTEKPQHVSVHVLSSTTALMSWTSSQENYNSTIVSVVSLTCQKQKESQRLEKQYCTQVNSSKPIIENLVPGAQYQVVIYLRKGPLIGPPSDPVTFAIVPTGIKDLMLYPLGPTAVVLSWTRPYLGVFRKYVVEMFYFNPATMTSEWTTYYEIAATVSLTASVVIFP

SEQ ID NO: 19994 - protein, 482 aa, Homo sapiens
MALRRLGAALLLLPLLAAVEETLMDSTTATAELGWMVHPPSGWEEVSGYDENMNTIRTYQVCNVFESSQNNWLRTKFIRRRGAHRIHVEMKFSVRDCSSIPSVPGSCKETFNLYYYEADFDSATKTFPNWMENPWVKVDTIAADESFSQVDLGGRVMKINTEVRSFGPVSRSGFYLAFQDYGGCMSLIAVRVFYRKCPRIIQNGAIFQETLSGAESTSLVAARGSCIANAEEVDVPIKLYCNGDGEWLVPIGRCMCKAGFEAVENGTVCRGCPSGTFKANQGDEACTHCPINSRTTSEGATNCVCRNGYYRADLDPLDMPCTTIPSAPQAVISSVNETSLMLEWTPPRDSGGREDLVYNIICKSCGSGRGACTRCGDNVQYAPRQLGLTEPRIYISDLLAHTQYTFEIQAVNGVTDQSPFSPQFASVNITTNQAAPSAVSIMHQVSRTVDSITLSWSQPDQPNGVILDYELQYYEKMKTQRS

SEQ ID NO: 19995 - protein, 116 aa, Homo sapiens
MSAPAQPPAEGTEGTAPGGGPPGPPPNMTSNRRLQQTQAQVEEVVDIIRVNVDKVLERDQKLSELDDRADALQAGASQFESSAAKLKRKYWWKNCKMMIMLGAICAIIVVVIVRRG

SEQ ID NO: 19996 - protein, 478 aa, Homo sapiens
MYRDPEAASPGAPSRDVLLVSAIITVSLSVTVVLCGLCHWCQRKLGKRYKNSLETVGTPDSGRGRSEKKAINGTLLSGAKVAAAAGLAVEREGRLGEKPAPVPPPGEDALRSGGAAPSEPGSGGKAGRGRWRTVQSHLAAGKLNLSKLPAGGKAVNTAPVPGQTPHDESDRRTEPRSSVSDLVNSLTSEMLMLSPGSEEDEAHEGCSRENLGRIQFSVGYNFQESTLTVKIMKAQELPAKDFSGTSDPFVKIYLLPDKKHKLETKVKRKNLNPHWNETFLFEGFPYEKVVQRILYLQVLDYDRFSRNDPIGEVSIPLNKVDLTQMQTFWKDLKPCSDGSGSRGELLLSLCYNPSANSIIVNIIKARNLKAMDIGGTSDPYVKVWLMYKDKRVEKKKTVTMKRNLNPIFNESFAFDIPTEKLRETTIIITVMDKDKLSRNDVIGKIYLSWKSGPGEVKHWKDMIARPRQPVAQWHQLKA

SEQ ID NO: 19997 - protein, 1006 aa, Homo sapiens
VMLQNVSKESFERTINIAKGNSSLGMTVSANKDGLGMIVRSIIHGGAISRDGRIAIGDCILSINEESTISVTNAQARAMLRRHSLIGPDIKITYVPAEHLEEFKISLGQQSGRVMALDIFSSYTGRDIPELPEREEGEGEESELQNTAYSNWNQPRRVELWREPSKSLGISIVGGRGMGSRLSNGEVMRGIFIKHVLEDSPAGKNGTLKPGDRIVEAPSQSESEPEKAPLCSVPPPPPSAFAEMGSDHTQSSASKISQDVDKEDEFGYSWKNIRERYGTLTGELHMIELEKGHSGLGLSLAGNKDRSRMSVFIVGIDPNGAAGKDGRLQIADELLEINGQILYGRSHQNASSIIKCAPSKVKIIFIRNKDAVNQMAVCPGNAVEPLPSNSENLQNKETEPTVTTSDAAVDLSSFKNVQHLELPKDQGGLGIAISEEDTLSGVIIKSLTEHGVAATDGRLKVGDQILAVDDEIVVGYPIEKFISLLKTAKMTVKLTIHAENPDSQAVPSAAGAASGEKKNSSQSLMVPQSGSPEPESIRNTSRSSTPAIFASDPATCPIIPGCETTIEISKGRTGLGLSIVGGSDTLLGAIIIHEVYEEGAACKDGRLWAGDQILEVNGIDLRKATHDEAINVLRQTPQRVRLTLYRDEAPYKEEEVCDTLTIELQKKPGKGLGLSIVGKRNDTGVFVSDIVKGGIADADGRLMQGDQILMVNGEDVRNATQEAVAALLKCSLGTVTLEVGRIKAGPFHSERRPSQSSQVSEGSLSSFTFPLSGSSTSESLESSSKKNALASEIQGLRTVEMKKGPTDSLGISIAGGVGSPLGDVPIFIAMMHPTGVAAQTQKLRVGDRIVTICGTSTEGMTHTQAVNLLKNASGSIEMQVVAGGDVSVVTGHQQEPASSSLSFTGLTSSSIFQDDLGPPQCKSITLERGPDGLGFSIVGGYGSPHGDLPIYVKTVFAKGAASEDGRLKRGDQIIAVNGQSLEGVTHEEAVAILKRTKGTVTLMVLS

SEQ ID NO: 19998 - protein, 784 aa, Homo sapiens
MRQVCCSALPPPPLEKGRCSSYSDSSSSSSERSSSSSSSSSESGSSSRSSSNNSSISRPAAPPEPRPQQQPQPRSPAARRAAARSRAAAAGGMRRDPAPGFSMLLFGVSLACYSPSLKSVQDQAYKAPVVVEGKVQGLVPAGGSSSNSTREPPASGRVALVKVLDKWPLRSGGLQREQVISVGSCVPLERNQRYIFFLEPTEQPLVFKTAFAPLDTNGKNLKKEVGKILCTDCATRPKLKKMKSQTGQVGEKQSLKCEAAAGNPQPSYRWFKDGKELNRSRDIRIKYGNGRKNSRLQFNKVKVEDAGEYVCEAENILGKDTVRGRLYVNSEAEELYQKRVLTITGICVALLVVGIVCVVAYCKTKKQRKQMHNHLRQNMCPAHQNRSLANGPSHPRLDPEEIQMADYISKNVPATDHVIRRETETTFSGSHSCSPSHHCSTATPTSSHRHESHTWSLERSESLTSDSQSGIMLSSVGTSKCNSPACVEARARRAAAYNLEERRRATAPPYHDSVDSLRDSPHSERYVSALTTPARLSPVDFHYSLATQVPTFEITSPNSAHAVSLPPAAPISYRLAEQQPLLRHPAPPGPGPGPGPGPGPGADMQRSYDSYYYPAAGPGPRRGTCALGGSLGSLPASPFRIPEDDEYETTQECAPPPPPRPRARGASRRTSAGPRRWRRSRLNGLAAQRARAARDSLSLSSGSGGGSASASDDDADDADGALAAESTPFLGLRGAHDALRSDSPPLCPAADSRTYYSLDSHSTRASSRHSRGPPPRAKQDSAPL

SEQ ID NO: 19999 - protein, 808 aa, Homo sapiens
MPEPGKKPVSAFSKKPRSVEVAAGSPAVFEAETERAGVKVRWQRGGSDISASNKYGLATEGTRHTLTVREVGPADQGSYAVIAGSSKVKFDLKVIEAEKAEPMLAPAPAPAEATGAPGEAPAPAAELGESAPSPKGSSSAALNGPTPGAPDDPIGLFVMRPQDGEVTVGGSITFSARVAGASLLKPPVVKWFKGKWVDLSSKVGQHLQLHDSYDRASKVYLFELHITDAQPAFTGSYRCEVSTKDKFDCSNFNLTVHEAMGTGDLDLLSAFRRTSLAGGGRRISDSHEDTGILDFSSLLKKRDSFRTPRDSKLEAPAEEDVWEILRQAPPSEYERIAFQYGVTDLRGMLKRLKGMRRDEKKSTAFQKKLEPAYQVSKGHKIRLTVELADHDAEVKWLKNGQEIQMSGSKYIFESIGAKRTLTISQCSLADDAAYQCVVGGEKCSTELFVKEPPVLITRPLEDQLVMVGQRVEFECEVSEEGAQVKWLKDGVELTREETFKYRFKKDGQRHHLIINEAMLEDAGHYALCTSGGQALAELIVQEKKLEVYQSIADLMVGAKDQAVFKCEVSDENVRGVWLKNGKELVPDSRIKVSHIGRVHKLTIDDVTPADEADYSFVPEGFACNLSAKLHFMEVKIDFVPRQEPPKIHLDCPGRIPDTIVVVAGNKLRLDVPISGDPAPTVIWQKAITQGNKAPARPAPDAPEDTGDSDEWVFDKKLLCETEGRVRVETTKDRSIFTVEGAEKEDEGVYTVTVKNPVGEDQVNLTVKVIDVPDAPAAPKISNVGEDSCTVQWEPPAYDGGQPILGAES

SEQ ID NO: 20000 - protein, 516 aa, Homo sapiens
ELVQREAEASRRCMELEKYVEELAAVRQTLQTDLETSIRRIADLQAALEEVASSDSDTERDNVSILSSQPEGSLQSWLSCTLSLATDTMRTPSRQSATSSRILSPRINEEAGDTERTQSALALSRARSTNVHSKTSGDKPVSPHFVRRQKYCHFGDGEVLAVQRKSTERLEPASSPLASRSTNTSPLSREKLPSPSAALSEFVEGLRRKRAQRGQGSTLGLEDWPTLPIYQTTGASTLRRGRAGSDEGNLSLRVGAKSPLEIEGAAGGLLRSTSLKCISSDGVGGTTLLPEKSKTQFSSCESLLESRPSMGRKLSSPTTPRDMLLSPTLRPRRRCLESSVDDAGCPDLGKEPLVFQNRQFAHLMEEPLGSDPFSWKLPSLDYERKTKVDFDDFLPAIRKPQTPTSLAGSAKGGQDGSQRSSIHFETEEANRSFLSGIKTILKKSPEPKEDPAHLSDSSSSSGSIVSFKSADSIKSRPGIPRLAGDGGERTSPERREPGTGRKDDDVASIMKKYLQK

SEQ ID NO: 20001 - protein, 719 aa, Homo sapiens
MSVRFRVGREENAQWWLLYLLVPALFCRAGGSIPIPQKLFGEVTSPLFPKPYPNNFETTTVITVPTGYRVKLVFQQFDLEPSEGCFYDYVKISADKKSLGRFCGQLGSPLGNPPGKKEFMSQGNKMLLTFHTDFSNEENGTIMFYKGFLAYYQAVDLDECASRSKSGEEDPQPQCQHLCHNYVGGYFCSCRPGYELQEDRHSCQAECSSELYTEASGYISSLEYPRSYPPDLRCNYSIRVERGLTLHLKFLEPFDIDDHQQVHCPYDQLQIYANGKNIGEFCGKQRPPDLDTSSNAVDLLFFTDESGDSRGWKLRYTTEIIKCPQPKTLDEFTIIQNLQPQYQFRDYFIATCKQGYQLIEGNQVLHSFTAVCQDDGTWHRAMPRCKIKDCGQPRNLPNGDFRYTTTMGVNTYKARIQYYCHEPYYKMQTRAGSRESEQGVYTCTAQGIWKNEQKGEKIPRCLPVCGKPVNPVEQRQRIIGGQKAKMGNFPWQVFTNIHGRGGGALLGDRWILTAAHTLYPKEHEAQSNASLDVFLGHTNVEELMKLGNHPIRRVSVHPDYRQDESYNFEGDIALLELENSVTLGPNLLPICLPDNDTFYDLGLMGYVSGFGVMEEKIAHDLRFVRLPVANPQACENWLRGKNRMDVFSQNMFCAGHPSLKQDACQGDSGGVFAVRDPNTDRWVATGIVSWGIGCSRGYGFYTKVLNYVDWIKKEMEEED

SEQ ID NO: 20002 - protein, 182 aa, Homo sapiens
DTVVLSLFPCTPEPVNPEPDASVSSPQAGSSLKHSTTLTNRQRGNEVSALPATLDCDNLVNKPDERGFTPLIWASAFGEIETVRFLLEWGADPHILAKERESALSLASTGGYTDIVGLLLERDVDINIYDWNGGTPLLYAVRGNHVKCVEALLETLQPRSSVETKIAEPEALTSPPKPTLAT

SEQ ID NO: 20003 - protein, 744 aa, Homo sapiens
MAEISNLKLKLTAVEKDRLDYEDKFRDTEGLIQEINDLRLKVSEMDSERLQYEKKLKSTKSLMAKLSSMKIKVGQMQYEKQRMEQKWESLKDELASLKEQLEEKESEVKRLQEKLVCKMKGEGVEIVDRDIEVQKMKKAVESLMAANEEKDRKIEDLRQCLNRYKKMQDTVVLAQGKKGKDGEYEELLNSSSISSLLDAQGFSDLEKSPSPTPVMGSPSCDPFNTSVPEEFHTTILQVSIPSLLPATVSMETSEKSKLTPKPETSFEENDGNIILGATVDTQLCDKLLTSSLQKSSSLGNLKKETSDGEKETIQKTSEDRAPAESRPFGTLPPRPPGQDTSMDDNPFGTRKVRSSFGRGFFKIKSNKRTASAPNLAETEKETAEHLDLAGASSRPKDSQRNSPFQIPPPSPDSKKKSRGIMKLFGKLRRSQSTTFNPDDMSEPEFKRGGTRATAGPRLGWSRDLGQSNSDLDMPFAKWTKEQVCNWLMEQGLGSYLNSGKHWIASGQTLLQASQQDLEKELGIKHSLHRKKLQLALQALGSEEETNHGKLDFNWVTRWLDDIGLPQYKTQFDEGRVDGRMLHYMTVDDLLSLKVVSVLHHLSIKRAIQVLRINNFEPNCLRRRPSDENTIAPSEVQKWTNHRVMEWLRSVDLAEYAPNLRGSGVHGGLMVLEPRFNVETMAQLLNIPPNKTLLRRHLATHFNLLIGAEAQHQKRDAMELPDYVLLTATAKVKPKKLAFSNFGNL

SEQ ID NO: 20004 - protein, 502 aa, Homo sapiens [sequence omitted]

SEQ ID NO: 20005 - protein, 191 aa, Homo sapiens
MSSSGGAPGASASSAPPAQEEGMTWWYRWLCRLSGVLGAVSCAISGLFNCITIHPLNIAAGVWMMMAVVPIVISLTLTTLLGNAIAFATGVLYGLSALGKKAQTEAGSFAAQHPREPGPFSEGTRQAFATPAVVSGEIRMPAGAMRSPMPGSSSRGSRRMRRSSRRPWRGSCEGLGAPPSLSPLLALCGSK

SEQ ID NO: 20006 - protein, 343 aa, Homo sapiens
MPRPRLLAALCGALLCAPSLLVALECVEPLGLENGNIANSQIAASSVRVTFLGLQHWVPELARLNRAGMVNAWTPSSNDDNPWIQVNLLRRMWVTGVVTQGASRLASHEYLKAFKVAYSLNGHEFDFIHDVNKKHKEFVGNWNKNAVHVNLFETPVEAQYVRLYPTSCHTACTLRFELLGCELNGCANPLGLKNNSIPDKQITASSSYKTWGLHLFSWNPSYARLDKQGNFNAWVAGSYGNDQWLQVDLGSSKEVTGIITQGARNFGSVQFVASYKVAYSNDSANWTEYQDPRTGSSKIFPGNWDNHSHKKNLFETPILARYVRILPVAWHNRIALRLELLGC

SEQ ID NO: 20007 - protein, 86 aa, Homo sapiens
MGTGPAQTPRSTRAGPEPSPAPPGPGDTGDSDVTQEGSGPAGIRGAPPAWAASAREKISKMRTGTQHSPGRSRPTTVPTTGSSRRR

SEQ ID NO: 20008 - protein, 432 aa, Homo sapiens
MLALPLPPCWSGAPPGEEGESAAGPWCFQHPVSLQAGSRCTTVWKRLPRVRDGCTGRPGPGPACCAEPPAAPVSPDLNLLPGRNPPACNGFFRRSIQKNMVYTCHRDKNCIINKVTRNRCQYCRLQKCFEVGMSKEAVRNDRNKKKKEVKEEGSPDSYELSPQLEELITKVSKAHQETFPSLCQLGKYTTNSSADHRVQLDLGLWDKFSELATKCIIKIVEFAKRLPGFTGLSIADQITLLKAACLDILMLRICTRYTPEQDTMTFSDGLTLNRTQMHNAGFGPLTDLVFAFAGQLLPLEMDDTETGLLSAICLICGDRMDLEEPEKVDKLQEPLLEALRLYARRRRPSQPYMFPRMLMKITDLRGISTKGAERAITLKMEIPGPMPPLIREMLENPEMFEDDSSQPGPHPNASSEDEVPGGQGKGGLKSPA

SEQ ID NO: 20009 - protein, 837 aa, Homo sapiens
MADSSEGPRAGPGEVAELPGDESGTPGDGRPNLRMKFQGAFRKGVPNPIDLLESTLYESSVVPGPKKAPMDSLFDYGTYRHHSSDNKRWRKKIIEKQPQSPKAPAPQPPPILKVFNRPILFDIVSRGSTADLDGLLPFLLTHKKRLTDEEFREPSTGKTCLPKALLNLSNGRNDTIPVLLDIAERTGNMREFINSPFRDIYYRGQTALHIAIERRCKHYVELLVAQGADVHAQARGRFFQPKDEGGYFYFGELPLSLAACTNQPHIVNYLTENPHKKADMRRQDSRGNTVLHALVAIADNTRENTKFVTKMYDLLLLKCARLFPDSNLEAVLNNDGLSPLMMAAKTGKIGIFQHIIRREVTDEDTRHLSRKFKDWAYGPVYSSLYDLSSLDTCGEEASVLEILVYNSKIENRHEMLAVEPINELLRDKWRKFGAVSFYINVVSYLCAMVIFTLTAYYQPLEGTPPYPYRTTVDYLRLAGEVITLFTGVLFFFTNIKDLFMKKCPGVNSLFIDGSFQLLYFIYSVLVIVSAALYLAGIEAYLAVMVFALVLGWMNALYFTRGLKLTGTYSIMIQKILFKDLFRFLLVYLLFMIGYASALVSLLNPCANMKVCNEDQTNCTVPTYPSCRDSETFSTFLLDLFKLTIGMGDLEMLSSTKYPVVFIILLVTYIILTFVLLLNMLIALMGETVGQVSKESKHIWKLQWATTILDIERSFPVFLRKAFRSGEMVTVGKSSDGTPDRRWCFRVDEVNWSHWNQNLGIINEDPGKNETYQYYGFSHTVGRLRRDRWSSVVPRVVELNKNSNPDEVVVPLDSMGNPRCDGHQQGYPRKWRTDDAPL

SEQ ID NO: 20010 - protein, 508 aa, Homo sapiens
MMSEHDLADVVQIAVEDLSPDHPVVLENHVVTDEDEPALKRQRLEINCQDPSIKSFLYSINQTICLRLDSIEAKLQALEATCKSLEEKLDLVTNKQHSPIQVPMVAGSPLGATQTCNKVRCVVPQTTVILNNDRQNAIVAKMEDPLSNRAPDSLENVISNAVPGRRQNTIVVKVPGQEDSHHEDGESGSEASDSVSSCGQAGSQSIGSNVTLITLNSEEDYPNGTWLGDENNPEMRVRCAIIPSDMLHISTNCRTAEKMALTLLDYLFHREVQAVSNLSGQGKHGKKQLDPLTIYGIRCHLFYKFGITESDWYRIKQSIDSKCRTAWRRKQRGQSLAVKSFSRRTPNSSSYCPSEPMMSTPPPASELPQPQPQPQALHYALANAQQVQIHQIGEDGQVQVIPQGHLHIAQVPQGEQVQITQDSEGNLQIHHVGQDGQVLQGAQLIAVASSDPAAAGVDGSPLQGSDIQVQYVQLAPVSDHTAGAQTAEALQPTLQPEMQLEHGAIQIQ

SEQ ID NO: 20011 - protein, 305 aa, Homo sapiens [sequence omitted]

SEQ ID NO: 20012 - protein, 242 aa, Homo sapiens
MSLGIMEEEDLAEYFRLQYGERLLQMLQKLPNVEGASESPSIWLLEKKKETEIMHQTMVQKKKMFQRRMETLNLRWEELGVKEAQLKAHIQKSEQFIQENDQKRIRAMKKANKERELKCQHMQELTKRKQEMVALRLEHQRLSAKLKDYYIFNKYLEKVVENSEESRWAHIQNTAAKKTLLLGTIKMATLNLFQIVSKHLKEVTEVALEDTHKQLDMIQQFIQDRSDIWAEVKKKEQQRVRI

SEQ ID NO: 20013 - protein, 692 aa, Homo sapiens
MSISALGGRTKGKPLPPGEEERNNVLKQMKVRTTLKGDKSWITKQDESEGRTIELPSGRSRATSFSSAGEVPKPRPPSTRAPTGYIIRGVFTKPIDSSSQPQQQFPKANGTPKSAASLVRTANAGPPRPSSSGYKMTTEDYKKLAPYNIRRSSTSGDTEEEEEEEVVPFSSDEQKRRSEAASGVLRRTAPREHSYVLSAAKKSTGPTQETQAPFIAKRVEVVEEDGPSEKSQDPPALARSTPGSNSADGGRTKASRAIWIECLPSMPSPAGSQELRSSPGNKDKEAPCSRELQRDLAGEEAFRAPNTDAARSSAQLSDGNVGSGATGSRPEGLAAVDIGSERGRLCAAASFASFLEDQDGHSANSQSCKPRPAAISSSATSVSAVPADRKSNSTAAQEDAKADPKGALADYEGKDVATRVGEAWQERPGAPRGGQGDPAVPAQQPADPSTPERQSSPSGSEQLVRRESCGSSVLTDFEGKDVATKVGEAWQDRPGAPRGGQGDPAVPTQQPADPSTPEQQNSPSGSEQFVRRESCTSRVRSPSSCMVTVTVTATSEQPHIYIPAPASELDSSSTTKGILFVKEYVNASEVSSGKPVSARYSNVSSIEDSFAMEKKPPCGSTPYSERTTGGICTYCNREIRDCPKITLEHLGICCHEYCFKCGICSKPMGDLLDQIFIHRDTIHCGKCYEKLF

SEQ ID NO: 20014 - protein, 956 aa, Homo sapiens [sequence omitted]

SEQ ID NO: 20015 - protein, 541 aa, Homo sapiens
MVADPPRDSKGLAAAEPTANGGLALASIEDQGAAAGGYCGSRDQVRRCLRANLLVLLTVVAVVAGVALGLGVSGAGGALALGPERLSAFVFPGELLLRLLRMIILPLVVCSLIGGAASLDPGALGRLGAWALLFFLVTTLLASALGVGLALALQPGAASAAINASVGAAGSAENAPSKEVLDSFLDLARNIFPSNLVSAAFRSYSTTYEERNITGTRVKVPVGQEVEGMNILGLVVFAIVFGVALRKLGPEGELLIRFFNSFNEATMVLVSWIMWYAPVGIMFLVAGKIVEMEDVGLLFARLGKYILCCLLGHAIHGLLVLPLIYFLFTRKNPYRFLWGIVTPLATAFGTSSSSATLPLMMKCVEENNGVAKHISRFILPIGATVNMDGAALFQCVAAVFIAQLSQQSLDFVKIITILVTATASSVGAAGIPAGGVLTLAIILEAVNLPVDHISLILAVDWLVDRSCTVLNVEGDALGAGLLQNYVDRTESRSTEPELIQVKSELPLDPLPVPTEEGNPLLKHYRGPAGDATVASEKESVM

SEQ ID NO: 20016 - protein, 427 aa, Homo sapiens
MEYTIDVFFRQKWKDERLKFKGPMNILRLNNLMASKIWTPDTFFHNGKKSVAHNMTMPNKLLRIQDDGTLLYTMRLTVQAECPMHLEDFPMDAHSCPLKFGSYAYTTSEVTYIWTYNASDSVQVAPDGSRLNQYDLLGQSIGKETIKSSTGEYTVMTAHFHLKRKIGYFVIQTYLPCIMTVILSQVSFWLNRESVPARTVFGVTTVLTMTTLSISARNSLPKVAYATAMDWFIAVCYAFVFSALIEFATVNYFTKRGWAWDGKSVVNDKSPSIKAEGITLTYNSVKAILQGAKLIWSKYIAFSWPSLFQEKTLEYLEKWMDCLTFKQSSKKEKASVMIQNNAYAVAVANYAPNLSKDPVLSTISKSATTPEPNKKPENKPAEAKKTFNSVSKIDRMSRIVFPVLFGTFNLVYWATYLNREPVLGVSP

SEQ ID NO: 20017 - protein, 1087 aa, Homo sapiens
MEGKTGNTTDDEEEEEVEEEEEDDDEDSGAEIEDDDEEGFDDEDEFDDEHDDDLDTEDNELEELEERAEARKKTTEKQQLQSLFLLWSKLTDRLWFKSTYSKMSSTLLVETRNLYGVVGAESRSAPVQHLAGWQAEEQQGETDTVLSAAALCVGVGSFADPDDLPGLAHFLEHMVFMGSLKYPDENGFDAFLKKHGGSDNASTDCERTVFQFDVQRKYFKEALDRWAQFFIHPLMIRDAIDREVEAVDSEYQLARPSDANRKEMLFGSLARPGHPMGKFFWGNAETLKHEPRKNNIDTHARLREFWMRYYSSHYMTLVVQSKETLDTLEKWVTEIFSQIPNNGLPRPNFGHLTDPFDTPAFNKLYRVVPIRKIHALTITWALPPQQQHYRVKPLHYISWLVGHEGKGSILSFLRKKCWALALFGGNGETGFEQNSTYSVFSISITLTDEGYEHFYEVAYTVFQYLKMLQKLGPEKRIFEEIRKIEDNEFHYQEQTDPVEYVENMCENMQLYPLQDILTGDQLLFEYKPEVIGEALNQLVPQKANLVLLSGANEGKCDLKEKWFGTQYSIEDIENSWAELWNSNFELNPDLHLPAENKYIATDFTLKAFDCPETEYPVKIVNTPQGCLWYKKDNKFKIPKAYIRFHLISPLIQKSAANVVLFDIFVNILTHNLAEPAYEADVAQLEYKLVAGEHGLIIRVKGFNHKLPLLFQLIIDYLAEFNSTPAVFTMITEQLKKTYFNILIKPETLAKDVRLLILEYARWSMIDKYQALMDGLSLESLLSFVKEFKSQLFVEGLVQGNVTSTESMDFLKYVVDKLNFKPLEQEMPVQFQVVELPSGHHLCKVKALNKGDANSEVTVYYQSGTRSLREYTLMELLVMHMEEPCFDFLRTKQTLGYHVYPTCRNTSGILGFSVTVGTQATKYNSEVVDKKIEEFLSSFEEKIENLTEEAFNTQVTALIKLKECEDTHLGEEVDRNWNEVVTQQYLFDRLAHEIEALKSFSKSDLVNWFKAHRGPGSKMLSVHVVGYGKYELEEDGTPSSEDSNSSCEVMQLTYLPTSPLLADCIIPITDIRAFTTTLNLLPYHKIVK

SEQ ID NO: 20018 - protein, 906 aa, Homo sapiens
MEKLLRLCCWYSWLLLFYYNFQVRGVYSRSQDHPGFQVLASASHYWPLENVDGIHELQDTTGASRTHKLTVLPSRNATFVYSNDSAYSNLSATVDIVEGKVNKGIYLKEEKGVTLLYYGRYNSSCISKPEQCGPEGVTFSFFWKTQGEQSRPIPSAYGGQVISNGFKVCSSGGRGSVELYTRDNSMTWEASFSPPGPYWTHVLFTWKSKEGLKVYVNGTLSTSDPSGKVSRDYGESNVNLVIGSEQDQAKCYENGAFDEFIIWERALTPDEIAMYFTAAIGKHALLSSTLPSLFMTSTASPVMPTDAYHPIITNLTEERKTFQSPGVILSYLQNVSLSLPSKSLSEQTALNLTKTFLKAVGEILLLPGWIALSEDSAVVLSLIDTIDTVMGHVSSNLHGSTPQVTVEGSSAMAEFSVAKILPKTVNSSHYRFPAHGQSFIQIPHEAFHRHAWSTVVGLLYHSMHYYLNNIWPAHTKIAEAMHHQDCLLFATSHLISLEVSPPPTLSQNLSGSPLITVHLKHRLTRKQHSEATNSSNRVFVYCAFLDFSSGEGVWSNHGCALTRGNLTYSVCRCTHLTNFAILMQVVPLELARGHQVALSSISYVGCSLSVLCLVATLVTFAVLSSVSTIRNQRYHIHANLSFAVLVAQVLLLISFRLEPGTTPCQVMAVLLHYFFLSAFAWMLVEGLHLYSMVIKVFGSEDSKHRYYYGMGWGFPLLICIISLSFAMDSYGTSNNCWLSLASGAIWAFVAPALFVIVVNIGILIAVTRVISQISADNYKIHGDPSAFKLTAKAVAVLLPILGTSWVFGVLAVNGCAVVFQYMFATLNSLQGLFIFLFHCLLNSEVRAAFKHKTKVWSLTSSSARTSNAKPFHSDLMNGTRPGMASTKLSPWDKSSHSAHRVDLSAV

SEQ ID NO: 20019 - protein, 2689 aa, Homo sapiens
MVPPVWTLLLLVGAALFRKEKPPDQKLVVRSSRDNYVLTQCDFEDDAKPLCDWSQVSADDEDWVRASGPSPTGSTGAPGGYPNGEGSYLHMESNSFHRGGVARLLSPDLWEQGPLCVHFAHHMFGLSWGAQLRLLLLSGEEGRRPDVLWKHWNTQRPSWMLTTVTVPAGFTLPTRLMFEGTRGSTAYLDIALDALSIRRGSCNRVCMMQTCSFDIPNDLCDWTWIPTASGAKWTQKKGSSGKPGVGPDGDFSSPGSGCYMLLDPKNARPGQKAVLLSPVSLSSGCLSFSFHYILRGQSPGAALHIYASVLGSIRKHTLFSGQPGPNWQAVSVNYTAVGRIQFAVVGVFGKTPEPAVAVDATSIAPCGEGFPQCDFEDNAHPFCDWVQTSGDGGHWALGHKNGPVHGMGPAGGFPNAGGHYIYLEADEFSQAGQSVRLVSRPFCAPGDICVEFAYHMYGLGEGTMLELLLGSPAGSPPIPLWKRVGSQRPYWQNTSVTVPSGHQQPMQLIFKGIQGSNTASVVAMGFILINPGTCPVKVLPELPPVSPVSSTGPSETTGLTENPTISTKKPTVSIEKPSVTTEKPTVPKEKPTIPTEKPTISTEKPTIPSEKPNMPSEKPTIPSEKPTILTEKPTIPSEKPTIPSEKPTISTEKPTVPTEEPTTPTEETTTSMEEPVIPTEKPSIPTEKPSIPTEKPTISMEETIISTEKPTISPEKPTIPTEKPTIPTEKSTISPEKPTTPTEKPTIPTEKPTISPEKPTTPTEKPTISPEKLTIPTEKPTIPTEKPTIPTEKPTISTEEPTTPTEETTISTEKPSIPMEKPTLPTEETTTSVEETTISTEKLTIPMEKPTISTEKPTIPTEKPTISPEKLTIPTEKLTIPTEKPTIPIEETTISTEKLTIPTEKPTISPEKPTISTEKPTIPTEKPTIPTEETTISTEKLTIPTEKPTISPEKLTIPTEKPTISTEKPTIPTEKLTIPTEKPTIPTEKPTIPTEKLTALRPPHPSPTATGLAALVMSPHAPSTPMTSVILGTTTTSRSSTERCPPNARYESCACPASCKSPRPSCGPLCREGCVCNPGFLFSDNHCIQASSCNCFYNNDYYEPGAEWFSPNCTEHCRCWPGSRVECQISQCGTHTVCQLKNGQYGCHPYAGTATCLVYGDPHYVTFDGRHFGFMGKCTYILAQPCGNSTDPFFRVTAKNEEQGQEGVSCLSKVYVTLPESTVTLLKGRRTLVGGQQVTLPAIPSKGVFLGASGRFVELQTEFGLRVRWDGDQQLYVTVSSTYSGKLCGLCGNYDGNSDNDHLKLDGSPAGDKEELGNSWQTDQDEDQECQKYQVVNSPSCDSSLQSSMSGPGFCGRLVDTHGPFETCLLHVKAASFFDSCMLDMCGFQGLQHLLCTHMSTMTTTCQDAGHAVKPWREPHFCPMACPPNSKYSLCAKPCPDTCHSGFSGMFCSDRCVEACECNPGFVLSGLECIPRSQCGCLHPAGSYFKVGERWYKPGCKELCVCESNNRIRCQPWRCRAQEFCGQQDGIYGCHAQGAATCTASGDPHYLTFDGALHHFMGTCTYVLTRPCWSRSQDSYFVVSATNENRGGILEVSYIKAVHVTVFDLSISLLRGCKVMLNGHRVALPVWLAQGRVTIRLSSNLVLLYTNFGLQVRYDGSHLVEVTVPSSYGGQLCGLCGNYNNNSLDDNLRPDRKLAGDSMQLGAAWKLPESSEPGCFLVGGKPSSCQENSMADAWNKNCAILINPQGPFSQCHQVVPPQSSFASCVHGQCGTKGDTTALCRSLQAYASLCAQAGQAPAWRNRTFCPMRCPPGSSYSPCSSPCPDTCSSINNPRDCPKALPCAESCECQKGHILSGTSCVPLGQCGCTDPAGSYHPVGERWYTENTCTRLCTCSVHNNITCFQSTCKPNQICWALDGLLHCRASGVGVCQLPGESHYVSFDGSNHSIPDACTLVLVKVCHPAMALPFFKISAKHEKEEGGTEAFRLHEVYIDIYDAQVTLQKGHRVLINSKQVTLPAISQIPGVSVKSSSIYSIVNIKIGVQVKFDGNHLLEIEIPTTYYGKVCGMCGNFNDEEEDELMMPSDEVANSDSEFVNSWKDKDIDPSCQSLLVDEQQIPAEQQENPSGNCRAADLRRAREKCEAALRAPVWAQCASRIDLTPFLVDCANTLCEFGGLYQALCQALQAFGATCQSQGLKPPLWRNSSFCPLECPAYSSYTNCLPSCSPSCWDLDGRCEGAKVPSACAEGCICQPGYVLSEDKCVPRSQCGCKDAHGGSIPLGKSWVSSGCTEKCVCTGGAIQCGDFRCPSGSHCQLTSDNSNSNCVSDKSEQCSVYGDPRYLTFDGFSYRLQGRMTYVLIKTVDVLPEGVEPLLVEGRNKMDPPRSSIFLQEVITTVYGYKVQLQAGLELVVNNQKMAVPYRPNEHLRVTLWGQRLYLVTDFELVVSFGGRKNAVISLPSMYEGLVSGLCGNYDKNRKNDMMLPSGALTQNLNTFGNSWEVKTEDALLRFPRAIPAEEEGQGAELGLRTGLQVSECSPEQLASNSTQACRVLADPQGPFAACHQTVAPEPFQEHCVLDLCSAQDPREQEELRCQVLSGYAILCQEAGAALAGWRDRTLCAMECPAGTIYQSCMTPCPASCANLADPGDCEGPCVEGCASIPGYAYSGTQSLPWLTVAAPAMASTTSWAAAF

SEQ ID NO: 20020 - protein, 491 aa, Homo sapiens
MCNTNMSVPTDGAVTTSQIPASEQETLVRPKPLLLKLLKSVGAQKDTYTMKEVLFYLGQYIMTKRLYDEKQQHIVYCSNDLLGDLFGVPSFSVKEHRKIYTMIYRNLVVVNQQESSDSGTSVSENRCHLEGGSDQKDLVQELQEEKPSSSHLVSRPSTSSRRRAISETEENSDELSGERQRKRHKSDSISLSFDESLALCVIREICCERSSSSESTGTPSNPDLDAGVSEHSGDWLDQDSVSDQFSVEFEVESLDSEDYSLSEEGQELSDEDDEVYQVTVYQAGESDTDSFEEDPEISLADYWKCTSCNEMNPPLPSHCNRCWALRENWLPEDKGKDKGEISEKAKLENSTQAEEGFDVPDCKKTIVNDSRESCVEENDDKITQASQSQESEDYSQPSTSSSIIYSSQEDVKEFEREETQDKEESVESSLPLNAIEPCVICQGRPKNGCIVHGKTGHLMACFTCAKKLKKRNKPCPVCRQPIQMIVLTYFP

SEQ ID NO: 20021 - protein, 1133 aa, Homo sapiens
MRFVLSGNLHGGSVVASYPFDDSPEHKATGIYSKTSDDEVFKYLAKAYASNHPIMKTGEPHCPGDEDETFKDGITNGAHWYDVEGGMQDYNYVWANCFEITLELSCCKYPPASQLRQEWENNRESLITLIEKVHIGVKGFVKDSITGSGLENATISVAGINHNITTGRFGDFYRLLVPGTYNLTVVLTGYMPLTVTNVVVKEGPATEVDFSLRPTVTSVIPDTTEAVSTASTVAIPNILSGTSSSYQPIQPKDFHHHHFPDMEIFLRRFANEYPNITRLYSLGKSVESRELYVMEISDNPGVHEPGEPEFKYIGNMHGNEVVGRELLLNLIEYLCKNFGTDPEVTDLVHNTRIHLMPSMNPDGYEKSQEGDSISVIGRNNSNNFDLNRNFPDQFVQITDPTQPETIAVMSWMKSYPFVLSANLHGGSLVVNYPFDDDEQGLATYSKSPDDAVFQQIALSYSKENSQMFQGRPCKNMYPNEYFPHGITNGASWYNVPGGMQDWNYLQTNCFEVTIELGCVKYPLEKELPNFWEQNRRSLIQFMKQVHQGVRGFVLDATDGRGILNATISVAEINHPVTTYKTGDYWRLLVPGTYKITASARGYNPVTKNVTVKSEGAIQVNFTLVRSSTDSNNESKKGKGASSSTNDASDPTTKEFETLIKDLSAENGLESLMLRSSSNLALALYRYHSYKDLSEFLRGLVMNYPHITNLTNLGQSTEYRHIWSLEISNKPNVSEPEEPKIRFVAGIHGNAPVGTELLLALAEFLCLNYKKNPAVTQLVDRTRIVIVPSLNPDGRERAQEKDCTSKIGQTNARGKDLDTDFTNNASQPETKAIIENLIQKQDFSLSVALDGGSMLVTYPYDKPVQTVENKETLKHLASLYANNHPSMHMGQPSCPNKSDENIPGGVMRGAEWHSHLGSMKDYSVTYGHCPEITVYTSCCYFPSAARLPSLWADNKRSLLSMLVEVHKGVHGFVKDKTGKPISKAVIVLNEGIKVQTKEGGYFHVLLAPGVHNIIAIADGYQQQHSQVFVHHDAASSVVIVFDTDNRIFGLPRELVVTVSGATMSALILTACIIWCICSIKSNRHKDGFHRLRQHHDEYEDEIRMMSTGSKKSLLSHEFQDETDTEEETLYSSKH

SEQ ID NO: 20022 - protein, 963 aa, Homo sapiens
MKPDRDTLDEYFEYDAEEFLVSLALLITEGRTPECSVKGRTESFHCPPAQSCYPVTTKHECSDKLAQCRQARRTRSEVTLLWKNNLPIMVEMMLLPDCCYSDDGPTTEGIDLNDPAIKQDALLLERWILEPVPRQNGDRFIEEKTLLLAVRSFVFFSQLSAWLSVSHGAIPRNILYRISAADVDLQWNFSQTPIEHVFPVPNVSHNVALKVSVQSLPRQSNYPVLTCSIHTNIGLYEKRIQQHKLKTHQHHNPNEAEQCGTNSSQRLCSKQTWTMAPESVLHAKSGPSPEYTAAVKNIKLYPGTGSKSDHGTSQANILGFSGIGDIKSQETSVRTLKSFSMVDSSISNRQSFWQSAGETNPLIGSLIQERQEIIARIAQHLIHCDPSTSHVSGRPFNTQESSSLHSKLFRVSQENENVGKGKEAFSMTFGSPEFSSPEDTNEGKIRLKPETPRSETCISNDFYSHMPVGETNPLIGSLLQERQDVIARIAQHLEHIDPTASHIPRQSFNMHDSSSVASKVFRSSYEDKNLLKKNKDESSVSISHTKCSLLGDISDGKNLVPNKCFTSFKNNSKEKCSLKHQTRNQCQNNPSEIIQSTYQETQNKSSSLSTSSILSQHKENNLDLTSRFKEQEMSNGIDKQYSNCTTIDKQICTNKYKEKIINENYNPKFFGNLQSDDSKKNDSKIKVTVLEMSEYLNKYESMSSNKDSKRPKTCEQNTQLNSIENYLNKDNEGFKCKKSDQLKNEQDKQEDPTNEKSQNYSQRRSIKDCLSTCEQPKNTEVLRTTLKHSNVWRKHNFHSLDGTSTRAFHPQTGLPLLSSPVPQRKTQSGCFDLDSSLLHLKSFSSRSPRPCLNIEDDPDIHEKPFLSSSAPPITSLSLLGNFEESVLNYRFDPLGIVDGFTAEVGASGAFCPTHLTLPVEVSFYSVSDDNAPSPYMGVITLESLGKRGYRVPPSGTIQVVCVL

SEQ ID NO: 20023 - protein, 523 aa, Homo sapiens
MKKFKRRLSLTLRGSQTIDESLSELAEQMTIEENSSKDNEPIVKNGRPPTSHSMHSFLHQYTGSFKKPPLRRPHSVIGGSLGSFMAMPRNGSRLDIVHENLKMGSDGESDQASGTSSDEVQSPTGVCLRNRIHRRISMEDLNKRLSLPADIRIPDGYLEKLQINSPPFDQPMSRRSRRASLSEIGFGKMETYIKLEKLGEGTYATVYKGRSKLTENLVALKEIRLEHEEGAPCTAIREVSLLKDLKHANIVTLHDIVHTDKSLTLVFEYLDKDLKQYMDDCGNIMSMHNVKLFLYQILRGLAYCHRRKVLHRDLKPQNLLINEKGELKLADFGLARAKSVPTKTYSNEVVTLWYRPPDVLLGSSEYSTQIDMWGVGCIFFEMASGRPLFPGSTVEDELHLIFRLLGTPSQETWPGISSNEEFKNYNFPKYKPQPLINHAPRLDSEGIELITKFLQYESKKRVSAEEAMKHVYFRSLGPRIHALPESVSIFSLKEIQLQKDPGFRNSSYPETGVFVINHFTCRS

SEQ ID NO: 20024 - protein, 2642 aa, Homo sapiens
MSGGAAEKQSSTPGSLFLSPPAPAPKNGSSSDSSVGEKLGAAAADAVTGRTEEYRRRRHTMDKDSRGAAATTTTTEHRFFRRSVICDSNATALELPGLPLSLPQPSIPAAVPQSAPPEPHREETVTATATSQVAQQPPAAAAPGEQAVAGPAPSTVPSSTSKDRPVSQPSLVGSKEEPPPARSGSGGGSAKEPQEERSQQQDDIEELETKAVGMSNDGRFLKFDIEIGRGSFKTVYKGLDTETTVEVAWCELQDRKLTKSERQRFKEEAEMLKGLQHPNIVRFYDSWESTVKGKKCIVLVTELMTSGTLKTYLKRFKVMKIKVLRSWCRQILKGLQFLHTRTPPIIHRDLKCDNIFITGPTGSVKIGDLGLATLKRASFAKSVIGTPEFMAPEMYEEKYDESVDVYAFGMCMLEMATSEYPYSECQNAAQIYRRVTSGVKPASFDKVAIPEVKEIIEGCIRQNKDERYSIKDLLNHAFFQEETGVRVELAEEDDGEKIAIKLWLRIEDIKKLKGKYKDNEAIEFSFDLERDVPEDVAQEMVESGYVCEGDHKTMAKAIKDRVSLIKRKREQRQLVREEQEKKKQEESSLKQQVEQSSASQTGIKQLPSASTGIPTASTTSASVSTQVEPEEPEADQHQQLQYQQPSISVLSDGTVDSGQGSSVFTESRVSSQQTVSYGSQHEQAHSTGTVPGHIPSTVQAQSQPHGVYPPSSVPQSMAHPCGGTPTYPESQIFFPTIHERPVSFSPPPTCPPKVAISQRRKSTSFLEAQTHHFQPLLRTVGQSLLPPGGSPTNWTPEAVVMLGTTASRVTGESCEIQVHPMFEPSQVYSDYRPGLVLPEEAHYFIPQEAVYVAGVHYQARVAEQYEGIPYNSSVLSSPMKQIPEQKPVQGGPTSSSVFEFPSGQAFLVGHLQNLRLDSGLGPGSPLSSISAPISTDATRLKFHPVFVPHSAPAVLTHNNESRSNCVFEFHVHTPSSSSGEGGGILPQRVYRNRQVAVDLNQEELPPQSVGLHGYLQPVTEEKHNYHAPELTVSVVEPIGQNWPIGSPEYSSDSSQITSSDPSDFQSPPPTGGAAAPFGSDVSMPFIHLPQTVLQESPLFFCFPQGTTSQQVLTASFSSGGSALHPQAQGQSQGQPSSSSLTGVSSSQPIQHPQQQQGIQQTAPPQQTVQYSLSQTSTSSEATTAQPVSQPQAPQVLPQVSAGKQGFPPRLPPQYPGDSNIAPSSNVASVCIHSTVLSPPMPTEVLATPGYFPTVVQPYVESNLLVPMGGVGGQVQVSQPGGSLAQAPTTSSQQAVLESTQGVSQVAPAEPVAVAQTQATQPTTLASSVDSAHSDVASGMSDGNENVPSSSGRHEGRTTKRHYRKSVRSRSRHEKTSRPKLRILNVSNKGDRVVECQLETHNRKMVTFKFDLDGDNPEEIATIMVNNDFILAIERESFVDQVREIIEKADEMLSEDVSVEPEGDQGLESLQGKDDYGFSGSQKLEGEFKQPIPASSMPQQIGIPTSSLTQVVHSAGRRFIVSPVPESRLRESKVFPSEITDTVAASTAQSPGMNLSHSASSLSLQQAFSELRRAQMTEGPNTAPPNFSHTGPTFPVVPPFLSSIAGVPTTAAATAPVPATSSPPNDISTSVIQSEVTVPTEEGIAGVATSTGVVTSGGLPIPPVSESPVLSSVVSSITIPAVVSISTTSPSLQVPTSTSEIVVSSTALYPSVTVSATSASAGGSTATPGPKPPAVVSQQAAGSTTVGATLTSVSTTTSFPSTASQLCIQLSSSTSTPTLAETVVVSAHSLDKTSHSSTTGLAFSLSAPSSSSSPGAGVSSYISQPGGLHPLVIPSVIASTPILPQAAGPTSTPLLPQVPSIPPLVQPVANVPAVQQTLIHSQPQPALLPNQPHTHCPEVDSDTQPKAPGIDDIKTLEEKLRSLFSEHSSSGAQHASVSLETSLVIESTVTPGIPTTAVAPSKLLTSTTSTCLPPTNLPLGTVALPVTPVVTPGQVSTPVSTTTSGVKPGTAPSKPPLTKAPVLPVGTELPAGTLPSEQLPPFPGPSLTQSQQPLEDLDAQLRRTLSPEMITVTSAVGPVSMAAPTAITEAGTQPQKGVSQVKEGPVLATSSGAGVFKMGRFQVSVAADGAQKEGKNKSEDAKSVHFESSTSESSVLSSSSPESTLVKPEPNGITIPGISSDVPESAHKTTASEAKSDTGQPTKVGRFQVTTTANKVGRFSVSKTEDKITDTKKEGPVASPPFMDLEQAVLPAVIPKKEKPELSEPSHLNGPSSDPEAAFLSRDVDDGSGSPHSPHQLSSKSLPSQNLSQSLSNSFNSSYMSSDNESDIEDEDLKLELRRLRDKHLKEIQDLQSRQKHEIESLYTKLGKVPPAVIIPPAAPLSGRRRRPTKSKGSKSSRSSSLGNKSPQLSGNLSGQSAASVLHPQQTLHPPGNIPESGQNQLLQPLKPSPSSDNLYSAFTSDGAISVPSLSAPGQGTSSTNTVGATVNSQAAQAQPPAMTSSRKGTFTDDLHKLVDNWARDAMNLSGRRGSKGHMNYEGPGMARKFSAPGQLCISMTSNLGGSAPISAASATSLGHFTKSMCPPQQYGFPATPFGAQWSGTGGPAPQPLGQFQPVGTASLQNFNISNLQKSISNPPGSNLRTT

SEQ ID NO: 20025 - protein, 621 aa, Homo sapiens
MQRVYGAQNEMCLATQQLSKQLLAYEKQNFALGKGDEEVISTLHYFSKVVDELNLLHTELAKQLADTMVLPIIQFREKDLTEVSTLKDLFGLASNEHDLSMAKYSRLPKKKENEKVKTEVGKEVAAARRKQHLSSLQYYCALNALQYRKQMAMMEPMIGFAHGQINFFKKGAEMFSKRMDSFLSSVADMVQSIQVELEAEAEKMRVSQQELLSVDESVYTPDSDVAAPQINRNLIQKAGYLNLRNKTGLVTTTWERLYFFTQGGNLMCQPRGAVAGGLIQDLDNCSVMAVDCEDRRYCFQITTPNGKSGIILQAESRKENEEWICAINNISRQIYLTDNPEAVAIKLNQTALQAVTPITSFGKKQESSCPSQNLKNSEMENENDKIVPKATASLPEAEELIAPGTPIQFDIVLPATEFLDQNRGSRRTNPFGETEDESFPEAEDSLLQQMFIVRFLGSMAVKTDSTTEVIYEAMRQVLAARAIHNIFRMTESHLMVTSQSLRLIDPQTQVSRANFELTSVTQFAAHQENKRLVGFVIRVPESTGEESLSTYIFESNSEGEKICYAINLGKEIIEVQKDPEALAQLMLSIPLTNDGKYVLLNDQPDDDDGNPNEHRGAESEA

SEQ ID NO: 20026 - protein, 331 aa, Homo sapiens
MEQALAGASSGRELGRPKELQPKKLHLCPLCGKNFSNNSNLIRHQRIHAAERLCMGVDCTEIFGGNPRFLSLHRAHLGEEAHKCLECGKCFSQNTHLTRHQRTHTGEKPYQCNICGKCFSCNSNLHRHQRTHTGEKPYKCPECGEIFAHSSNLLRHQRIHTGERPYKCPECGKSFSRSSHLVIHERTHERERLYPFSECGEAVSDSTPFLTNHGAHKAEKKLFECLTCGKSFRQGMHLTRHQRTHTGEKPYKCTLCGENFSHRSNLIRHQRIHTGEKPYTCHECGDSFSHSSNRIRHLRTHTGERPYKCSECGESFSRSSRLMSHQRTHTG

SEQ ID NO: 20027 - protein, 465 aa, Homo sapiens [sequence omitted]

SEQ ID NO: 20028 - protein, 172 aa, Homo sapiens
MQRRLVQQWSVAVFLLSYAVPSCGRSVEGLSRRLKRAVSEHQLLHDKGKSIQDLRRRFFLHHLIAEIHTAEIRATSEVSPNSKPSPNTKNHPVRFGSDDEGRYLTQETNKVETYKEQPLKTPGKKKKGKPGKRKEQEKKKRRTRSAWLDSGVTGSGLEGDHLSDTSTTSLEL

SEQ ID NO: 20029 - protein, 832 aa, Homo sapiens
MESLTLKGYALPLQLVNNQTMTTWMEIFRTIIDRTVPPETLHIDEDDRPELVWWKCKKWALHIVARLFERYGSPGNVTKEYFEFSEFFLKTYAVGIQQVLLKILDQYRQKEYVAPRVLQQAFNYLNQGVVHSITWKQMKPHIQNISEDVIFSVMCYKDEDEELWQEDPYEYIRMKFDIFEDYASPTTAAQTLLYTAAKKRKEVLPKMMAFCYQILTDPNFDPRKKDGALHVIGSLAEILLKKSLFKDQMELFLQNHVFPLLLSNLGYLRARSCWVLHAFSSLKFHNELNLRNAVELAKKSLIEDKEMPVKVEAALALQSLISNQIQAKEYMKPHVRPIMQELLHIVRETENDDVTNVIQKMICEYSQEVASIAVDMTQHLAEIFGKVLQSDEYEEVEDKTVMAMGILHTIDTILTVVEDHKEITQQLENICLRIIDLVLQKHVIEFYEEILSLAYSLTCHSISPQMWQLLGILYEVFQQDCFEYFTDMMPLLHNYVTIDTDTLLSNAKHLEILFTMCRKVLCGDAGEDAECHAAKLLEVIILQCKGRGIDQCIPLFVQLVLERLTRGVKTSELRTMCLQVAIAALYYNPDLLLHTLERIQLPHNPGPITVQFINQWMNDTDCFLGHHDRKMCIIGLSILLELQNRPPAVDAVVGQIVPSILFLFLGLKQVCATRQLVNREDRSKAEKADMEENEEISSDEEETNVTAQAMQSNNGRGEDEEEEDDDWDEEVLEETALEGFSTPLDLDNSVDEYQFFTQALITVQSRDAAWYQLLMAPLSEDQRTALQEVYTLAEHRRTVAEAKKKIEQQGGFTFENKGVLSAFNFGTVPSNN

SEQ ID NO: 20030 - protein, 621 aa, Homo sapiens
MLKTAFHRSQTLSYRNGYAIVRRPTVGIGGDRLQFNQLSQAELDELASKAPVLTYGQPKQAPPADFIPAHVAFDKKVLKFDAYFQEDVPMSTEEQYRIRQVNIYYYLEDDSMSVIEPVVENSGILQGKLIKRQRLAKNDRGDHYHWKDLNRGINITIYGKTFRVVDCDQFTQVFLESQGIELNPPEKMALDPYTELRKQPLRKYVTPSDFDQLKQFLTFDKQVLRFYAIWDDTDSMYGECRTYIIHYYLMDDTVEIREVHERNDGRDPFPLLMNRQRVPKVLVENAKNFPQCVLEISDQEVLEWYTAKDFIVGKSLTILGRTFFIYDCDPFTRRYYKEKFGITDLPRIDVSKREPPPVKQELPPYNGFGLVEDSAQNCFALIPKAPKKDVIKMLVNDNKVLRYLAVLESPIPEDKDRRFVFSYFLATDMISIFEPPVRNSGIIGGKYLGRTKVVKPYSTVDNPVYYGPSDFFIGAVIEVFGHRFIILDTDEYVLKYMESNAAQYSPEALASIQNHVRKREAPAPEAESKQTEKDPGVQELEALIDTIQKQLKDHSCKDNIREAFQIYDKEASGYVDRDMFFKICESLNVPVDDSLVKELIRMCSHGEGKINYYNFVRAFSN

SEQ ID NO: 20031 - protein, 1558 aa, Homo sapiens
MGLCGLLERCWLHHDPDGVLTLNAENTNYAYQVPNFHKCEICLLSFPKESQFQRHMRDHERNDKPHRCDQCPQTFNVEFNLTLHKCTHSGEDPTCPVCNKKFSRVASLKAHIMLHEKEENLICSECGDEFTLQSQLAVHMEEHRQELAGTRQHACKACKKEFETSSELKEHMKTHYKIRVSSTRSYNRNIDRSGFTYSCPHCGKTFQKPSQLTRHIRIHTGERPFKCSECGKAFNQKGALQTHMIKHTGEKPHACAFCPAAFSQKGNLQSHVQRVHSEVKNGPTYNCTECSCVFKSLGSLNTHISKMHMGGPQNSTSSTETAHVLTATLFQTLPLQQTEAQATSASSQPSSQAVSDVIQQLLELSEPAPVESGQSPQPGQQLSITVGINQDILQQALENSGLSSIPAAAHPNDSCHAKTSAPHAQNPDVSSVSNEQTDPTDAEQEKEQESPEKLDKKEKKMIKKKSPFLPGSIREENGVRWHVCPYCAKEFRKPSDLVRHIRIHTHEKPFKCPQCFRAFAVKSTLTAHIKTHTGIKAFKCQYCMKSFSTSGSLKVHIRLHTGVRPFACPHCDKKFRTSGHRKTHIASHFKHTELRKMRHQRKPAKVRVGKTNIPVPDIPLQEPILITDLGLIQPIPKNQFFQSYFNNNFVNEADRPYKCFYCHRAYKKSCHLKQHIRSHTGEKPFKCSQCGRGFVSAGVLKAHIRTHTGLKSFKCLICNGAFTTGGSLRRHMGIHNDLRPYMCPYCQKTFKTSLNCKKHMKTHRYELAQQLQQHQQAASIDDSTVDQQSMQASTQMQVEIESDELPQTAEVVAANPEAMLDLEPQHVVGTEEAGLGQQLADQPLEADEDGFVAPQDPLRGHVDQFEEQSPAQQSFEPAGLPQGFTVTDTYHQQPQFPPVQQLQDSSTLESQALSTSFHQQSLLQAPSSDGMNVTTRLIQESSQEELDLQAQGSQFLEDNEDQSRRSYRCDYCNKGFKKSSHLKQHVRSHTGEKPYKCKLCGRGFVSSGVLKSHEKTHTGVKAFSCSVCNASFTTNGSLTRHMATHMSMKPYKCPFCEEGFRTTVHCKKHMKRHQTVPSAVSATGETEGGDICMEEEEEHSDRNASRKSRPEVITFTEEETAQLAKIRPQESATVSEKVLVQSAAEKDRISELRDKQAELQDEPKHANCCTYCPKSFKKPSDLVRHVRIHTGEKPYKCDECGKSFTVKSTLDCHVKTHTGQKLFSCHVCSNAFSTKGSLKVHMRLHTGAKPFKCPHCELRFRTSGRRKTHMQFHYKPDPKKARKPMTRSSSEGLQPVNLLNSSSTDPNVFIMNNSVLTGQFDQNLLQPGLVGQAILPASVSAGGDLTVSLTDGSLATLEGIQLQLAANLVGPNVQISGIDAASINNITLQIDPSILQQTLQQGNLLAQQLTGEPGLAPQNSSLQTSDSTVPASVVIQPISGLSLQPTVTSANLTIGPLSEQDSVLTTNSSGTQDLTQVMTSQGLVSPSGGPHEITLTINNSSLSQVLAQAAGPTATSSSGSPQEITLTISGSRSVQHSVGPQECGSVEALYLENSSDKT

SEQ ID NO: 20032 - protein, 612 aa, Homo sapiens
MGVGTLLIAMPQFFMEQYKYERYSPSSNSTLSISPCLLESSSQLPVSVMEKSKSKISNECEVDTSSSMWIYVFLGNLLRGIGETPIQPLGIAYLDDFASEDNAAFYIGCVQTVAIIGPIFGFLLGSLCAKLYVDIGFVNLDHITITPKDPQWVGAWWLGYLIAGIISLLAAVPFWYLPKSLPRSQSREDSNSSSEKSKFIIDDHTDYQTPQGENAKIMEMARDFLPSLKNLFGNPVYFLYLCTSTVQFNSLFGMVTYKPKYIEQQYGQSSSRANFVIGLINIPAVALGIFSGGIVMKKFRISVCGAAKLYLGSSVFGYLLFLSLFALGCENSDVAGLTVSYQGTKPVSYHERALFSDCNSRCKCSETKWEPMCGENGITYVSACLAGCQTSNRSGKNIIFYNCTCVGIAASKSGNSSGIVGRCQKDNGCPQMFLYFLVISVITSYTLSLGGIPGYILLLRCIKPQLKSFALGIYTLAIRVLAGIPAPVYFGVLIDTSCLKWGFKRCGSRGSCRLYDSNVFRYQIKSIPASHCYSIPDLHNATDTNKFSCHFTACKTYISGTNCDTGHSVNSPKHCSTFHFKEKLCFKTQKFYNQERKNNGVYKIPKGKLHYK

SEQ ID NO: 20033 - protein, 737 aa, Homo sapiens
MEQFRHLPMPFHWKQEELKFKTGLRRLQHRVGEIHLLREALQKGAEAGQVSLHSLIETPANGTGPSEALAMLLQETTGELEAAKALVLKRIQIWKRQQQLAGNGAPFEESLAPLQERCESLVDIYSQLQQEVGAAGGELEPKTRASLTGRLDEVLRTLVTSCFLVEKQPPQVLKTQTKFQAGVRFLLGLRFLGAPAKPPLVRADMVTEKQARELSVPQGPGAGAESTGEIINNTVPLENSIPGNCCSALFKNLLLKKIKRCERKGTESVTEEKCAVLFSASFTLGPGKLPIQLQALSLPLVVIVHGNQDNNAKATILWDNAFSEMDRVPFVVAERVPWEKMCETLNLKFMAEVGTNRGLLPEHFLFLAQKIFNDNSLSMEAFQHRSVSWSQFNKEILLGRGFTFWQWFDGVLDLTKRCLRSYWSDRLIIGFISKQYVTSLLLNEPDGTFLLRFSDSEIGGITIAHVIRGQDGSPQIENIQPFSAKDLSIRSLGDRIRDLAQLKNLYPKKPKDEAFRSHYKPEQMGKDGRGYVPATIKMTVERDQPLPTPELQMPTMVPSYDLGMAPDSSMSMQLGPDMVPQVYPPHSHSIPPYQGLSPEESVNVLSAFQEPHLQMPPSLGQMSLPFDQPHPQGLLPCQPQEHAVSSPDPLLCSDVTMVEDSCLSQPVTAFPQGTWIGEDIFPPLLPPTEQDLTKLLLEGQGESGGGSLGAQPLLQPSHYGQSGISMSHMDLRANPSW

SEQ ID NO: 20034 - protein, 913 aa, Homo sapiens
MSRMTKKRKRQHDFQKVKLKVGKKKPKLQNATPTNFKTKTIHLPEQLKEDGTLPTNNRKLNIKDLLSQMHHYNAGVKQSALLGLKDLLSQYPFIIDAHLSNILSEVTAVFTDKDANVRLAAVQLLQFLAPKIRAEQISPFFPLVSAHLSSAMTHITEGIQEDSLKVLDILLEQYPALITGRSSILLKNFVELISHQQLSKGLINRDRSQSWILSVNPNRRLTSQQWRLKVLVRLSKFLQALADGSSRLRESEGLQEQKENPHATSNSIFINWKEHANDQQHIQVYENGGSQPNVSSQFRLRYLVGGLSGVDEGLSSTENLKGFIEIIIPLLIECWVEAVPPQLATPVGNGIEREPLQVMQQVLNIISLLWKLSKQQDETHKLESWLRKNYLIDFKHHFMSRFPYVLKEITKHKRKEPNKSIKHCTVLSNNIDHLLLNLTLSDIMVSLANASTLQKDCSWIEMIRKFVTETLEDGSRLNSKQLNRLLGVSWRLMQIQPNREDTETLIKAVYTLYQQRGLILPVRTLLLKFFSKIYQTEELRSCRFRYRSKVLSRWLAGLPLQLAHLGSRNPELSTQLIDIIHTAAARANKELLKSLQATALRIYDPQEGAVVVLPADSQQRLVQLVYFLPSLPADLLSRLSRCCIMGRLSSSLAAMLIGILHMRSSFSGWKYSAKDWLMSDVDYFSFLFSTLTGFSKEELTWLQSLRGVPHVIQTQLSPVLLYLTDLDQFLHHWDVTEAVFHSLLVIPARSQNFDILQSAISKHLVGLTVIPDSTAGCVFGVICKLLDHTCVVSETLLPFLASCCYSLLYFLLTIEKGEAEHLRKRLMLQSLRVNRVGPEELPVVGQLLRLLLQHAPLRTHMLTNAILVQQIIKNITTLKSGSVQEQWLTDLHYCFNVYITGHPQGPSALATVY

SEQ ID NO: 20035 - protein, 469 aa, Homo sapiens
MALLPRALSAGAGPSWRRAARAFRGFLLLLPEPAALTRALSRAMACRQEPQPQGPPPAAGAVASYDYLVIGGGSGGLASARRAAELGARAAVVESHKLGGTCVNVGCVPKKVMWNTAVHSEFMHDHADYGFPSCEGKFNWRVIKEKRDAYVSRLNAIYQNNLTKSHIEIIRGHAAFTSDPKPTIEVSGKKYTAPHILIATGGMPSTPHESQIPGASLGITSDGFFQLEELPGRSVIVGAGYIAVEMAGILSALGSKTSLMIRHDKVLRSFDSMISTNCTEELENAGVEVLKFSQGIQTDDKGHIIVDEFQNTNVKGIYAVGDVCGKALLTPVAIAAGRKLAHRLFEYKEDSKLDYNNIPTVVFSHPPIGTVGLTEDEAIHKYGIENVKTYSTSFTPMYHAVTKRKTKCVMKMVCANKEEKVVGIHMQGLGCDEMLQGFAVAVKMGATKADFDNTVAIHPTSSEELVTLR

SEQ ID NO: 20036 - protein, 447 aa, Homo sapiens
MYRDPEAASPGAPSRDVLLVSAIITVSLSVTVVLCGLCHWCQRKLGKRYKNSLETVGTPDSGRGRSEKKAINDLDRDFWNNNESTVQQKWSSYPPKEFILNISPYAPYGDPRLSLKLPAGGKAVNTAPVPGQTPHDESDRRTEPRSSVSDLVNSLTSEMLMLSPGSEEDEAHEGCSRENLGRIQFSVGYNFQESTLTVKIMKAQELPAKDFSGTSDPFVKIYLLPDKKHKLETKVKRKNLNPHWNETFLFEGFPYEKVVQRILYLQVLDYDRFSRNDPIGEVSIPLNKVDLTQMQTFWKDLKPCSDGSGSRGELLLSLCYNPSANSIIVNIIKARNLKAMDIGGTSDPYVKVWLMYKDKRVEKKKTVTMKRNLNPIFNESFAFDIPTEKLRETTIIITVMDKDKLSRNDVIGKIYLSWKSGPGEVKHWKDMIARPRQPVAQWHQLKA

SEQ ID NO: 20037 - protein, 363 aa, Homo sapiens
MASLAAANAEFCFNLFREMDDNQGNGNVFFSSLSLFAALALVRLGAQDDSLSQIDKSGLQSQLKRVFSDINASHKDYDLSIVNGLFAEKVYGFHKDYIECAEKLYDAKVERVDFTNHLEDTRRNINKWVENETHGKIKNVIGEGGISSSAVMVLVNAVYFKGKWQSAFTKSETINCHFKSPKCSGKAVAMMHQERKFNLSVIEDPSMKILELRYNGGINMYVLLPENDLSEIENKLTFQNLMEWTNPRRMTSKYVEVFFPQFKIEKNYEMKQYLRALGLKDIFDESKADLSGIASGGRLYISRMMHKSYIEVTEEGTEATAATGSNIVEKQLPQSTLFRADHPFLFVIRKDDIILFSGKVSCP

SEQ ID NO: 20038 - protein, 183 aa, Homo sapiens
MAVFNQKSVSDMIKEFRKNWRALCNSERTTLCGADSMLLALQLSMAENNKQVQLLARKIIFSYLNLLVNSKNDLAVAYILNIPDRGLGREAFTDLKHAAREKQMSIFLVATSFIRTIELGGKGYAPPPSDPLRTHVKGLSNFINFIDKLDEILGEIPNPRGCKSICWKINNWNEFWKCSSGQK

SEQ ID NO: 20039 - protein, 194 aa, Homo sapiens
MSFHKEDGVNSLCQKALHIVTELCFAGQVEWEKCSGIFPRDRGSQGGSSTDISVSLLAVVVSFCGLALLVVSLFVFWKLCWPCWKSKPVTSNITTLPQSISSAPTEVFETEEKKEIKENEKPAVKAIEPAIKISHTSPDIPAEVQTALKEHLIKHARVQRQITEPTSSTRGWGKKKKKRILSTCNFVTMPRHPS

SEQ ID NO: 20040 - protein, 2211 aa, Homo sapiens
MMPQKKRRRKKDIDFLALYEAELLNYASEDDEGELEHEYYKARVYEVVTATGDVRGAGTDANVFITLFGENGLSPKLQLTSKSKSAFEKGNVDVFRVRTNNVGLIYKVRIEHDNTGLNASWYLDHVIVTDMKRPHLRYYFNCNNWLSKVEGDRQWCRDLLASFNPMDMPRGNKYEVKVYTGDVIGAGTDADVFINIFGEYGDTGERRLENEKDNFEKGAEDRFILDAPDLGQLMKINVGHNNKGGSAGWFLSQIVIEDIGNKRKYDFPLNRWLALDEDDGKIQRDILVGGAETTAITYIVTVFTGDVRGAGTKSKIYLVMYGARGNKNSGKIFLEGGVFDRGRTDIFHIELAVLLSPLSRVSVGHGNVGVNRGWFCEKVVILCPFTGIQQTFPCSNWLDEKKADGLIERQLYEMVSLRKKRLKKFPWSLWVWTTDLKKAGTNSPIFIQIYGQKGRTDEILLNPNNKWFKPGIIEKFRIELPDLGRFYKIRVWHDKRSSGSGWHLERMTLMNTLNKDKYNFNCNRWLDANEDDNEIVREMTAEGPTVRRIMGMARYHVTVCTGELEGAGTDANVYLCLFGDVGDTGERLLYNCRNNTDLFEKGNADEFTIESVTMRNVRRVRIRHDGKGSGSGWYLDRVLVREEGQPESDNVEFPCLRWLDKDKDDGQLVRELLPSDSSATLKNFRYHISLKTGDVSGASTDSRVYIKLYGDKSDTIKQVLLVSDNNLKDYFERGRVDEFTLETLNIGNINRLVIGHDSTGMHASWFLGSVQIRVPRQGKQYTFPANRWLDKNQADGRLEVELYPSEVVEIQKLVHYEVEIWTGDVGGAGTSARVYMQIYGEKGKTEVLFLSSRSKVFERASKDTFQLEAADVGEVYKLRLGHTGEGFGPSWFVDTVWLRHLVVREVDLTPEEEARKKKEKDKLRQLLKKERLKAKLQRKKKKRKGSDEEDEGEEEESSSSEESSSEEEEMEEEEEEEEFGPGMQEVIEQHKFEAHRWLARGKEDNELVVELVPAGKPGPERNTYEVQVVTGNVPKAGTDANVYLTIYGEEYGDTGERPLKKSDKSNKFEQGQTDTFTIYAIDLGALTKIRIRHDNTGNRAGWFLDRIDITDMNNEITYYFPCQRWLAVEEDDGQLSRELLPVDESYVLPQSEEGRGGGDNNPLDNLALEQKDKSTTFSVTIKTGVKKNAGTDANVFITLFGTQDDTGMTLLKSSKTNSDKFERDSIEIFTVETLDLGDLWKVRLGHDNTGKAPGWFVDWVEVDAPSLGKCMTFPCGRWLAKNEDDGSIIRDLFHAELQTRLYTPFVPYEITLYTSDVFAAGTDANIFIIIYGCDAVCTQQKYLCTNKREQKQFFERKSASRFIVELEDVGEIIEKIRIGHNNTGMNPGWHCSHVDIRRLLPDKDGAETLTFPCDRWLATSEDDKKTIRELVPYDIFTEKYMKDGSLRQVYKEVEEPLDIVLYSVQIFTGNIPGAGTDAKVYITIYGDLGDTGERYLGKSENRTNKFERGTADTFIIEAADLGVIYKIKLRHDNSKWCADWYVEKVEIWNDTNEDEFLFLCGRWLSLKKEDGRLERLFYEKEYTGDRSSNCSSPADFWEIALSSKMADVDISTVTGPMADYVQEGPIIPYYVSVTTGKHKDAATDSRAFIFLIGEDDERSKRIWLDYPRGKRGFSRGSVEEFYVAGLDVGIIKKIEVLYEMTVWTGDVVGGGTDSNIFMTLYGINGSTEEMQLDKKKARFEREQNDTFIMEILDIAPFTKMRIRIDGLGSRPEWFLERILLKNMNTGDLTMFYYGDWLSQRKGKKTLVCEMCAVIDEEEMMEWTSYTVAVKTSDILGAGTDANVFIIIFGENGDSGTLALKQSANWNKFERNNTDTFNFPDMLSLGHLCKLRVWHDNKGIFPGWHLSYVDVKDNSRDETFHFQCDCWLSKSEGDGQTVRDFACANNKICDELEETTYEIVIETGNGGETRENVWLILEGRKNRSKEFLMENSSRQRAFRKGTTDTFEFDSIYLGDIASLCVGHLAREDRFIPKRELAWHVKTITITEMEYGNVYFFNCDCLIPLKRKRKYFKVFEVTKTTESFASKVQSLVPVKYEVIVTTGYEPGAGTDANVFVTIFGANGDTGKRELKQKMRNLFERGSTDRFFLETLELGELRKVRLEHDSSGYCSGWLVEKVEVTNTSTGVATIFNCGRWLDKKRGDGLTWRDLFPSV

SEQ ID NO: 20041 - protein, 298 aa, Homo sapiens
MSQEGDYGRWTISSSDESEEEKPKPDKPSTSSLLCARQGAANEPRYTCSEAQKAAHKRKISPVKFSNTDSVLPPKRQKSGSQEDLGWCLSSSDDELQPEMPQKQAEKVVIKKEKDISAPNDGTAQRTENHGAPACHRLKEEEDEYETSGEGQDIWDMLDKGNPFQFYLTRVSGVKPKYNSGALHIKDILSPLFGTLVSSAQFNYCFDVDWLVKQYPPEFRKKPILLVHGDKREAKAHLHAQAKPYENISLCQAKLDIAFGTHHTKMMLLLYEEGLRVVIHTSNLIHADWHQKTQGTHL

SEQ ID NO: 20042 - protein, 4678 aa, Homo sapiens
MMMCAATASPAAASSGLGGDGFYPAATFSSSPAPGALFMPVPDGSVAAAGLGLGLPAADSRGHYQLLLSGRALADRYRRIYTAALNDRDQGGGSAGHPASRNKKILNKKKLKRKQKSKSKVKTRSKSENLENTVIIPDIKLHSNPSAFNIYCNVRHCVLEWQKKEISLAAASKNSVQSGESDSDEEEESKEPPIKLPKIIEVGLCEVFELIKETRFSHPSLCLRSLQALLNVLQGQQPEGLQSEPPEVLESLFQLLLEITVRSTGMNDSTGQSLTALSCACLFSLVASWGETGRTLQAISAILTNNGSHACQTIQVPTILNSLQRSVQAVLVGKIQIQDWFSNGIKKAALMHKWPLKEISVDEDDQCLLQNDGFFLYLLCKDGLYKIGSGYSGTVRGHIYNSTSRIRNRKEKKSWLGYAQGYLLYRDVNNHSMTAIRISPETLEQDGTVMLPDCHTEGQNILFTDGEYINQIAASRDDGFVVRIFATSTEPVLQQELQLKLARKCLHACGISLFDLEKDLHIISTGFDEESAILGAGREFALMKTANGKIYYTGKYQSLGIKQGGPSAGKWVELPITKSPKIVHFSVGHDGSHALLVAEDGSIFFTGSASKGEDGESTKSRRQSKPYKPKKIIKMEGKIVVYTACNNGSSSVISKDGELYMFGKDAIYSDSSSLVTDLKGHFVTQVAMGKAHTCVLMKNGEVWTFGVNNKGQCGRDTGAMNQGGKGFGVENMATAMDEDLEEELDEKDEKSMMCPPGMHKWKLEQCMVCTVCGDCTGYGASCVSSGRPDRVPGGICGCGSGESGCAVCGCCKACARELDGQEARQRGILDAVKEMIPLDLLLAVPVPGVNIEEHLQLRQEEKRQRVIRRHRLEEGRGPLVFAGPIFMNHREQALARLRSHPAQLKHKRDKHKDGSGERGEKDASKITTYPPGSVRFDCELRAVQVSCGFHHSVVLMENGDVYTFGYGQHGQLGHGDVNSRGCPTLVQALPGPSTQVTAGSNHTAVLLMDGQVFTFGSFSKGQLGRPILDVPYWNAKPAPMPNIGSKYGRKATWIGASGDQTFLRIDEALINSHVLATSEIFASKHIIGLVPASISEPPPFKCLLINKVDGSCKTFNDSEQEDLQGFGVCLDPVYDVIWRFRPNTRELWCYNAVVADARLPSAADMQSRCSILSPELALPTGSRALTTRSHAALHILGCLDTLAAMQDLKMGVASTEEETQAVMKVYSKEDYSVVNRFESHGGGWGYSAHSVEAIRFSADTDILLGGLGLFGGRGEYTAKIKLFELGPDGGDHETDGDLLAETDVLAYDCAAREKYAMMFDEPVLLQAGWWYVAWARVSGPSSDCGSHGQASITTDDGVVFQFKSSKKSNNGTDVNAGQIPQLLYRLPTSDGSASKGKQQTSEPVHILKRSFARTVSVECFESLLSILHWSWTTLVLGVEELRGLKGFQFTATLLDLERLRFVGTCCLRLLRVYTCEIYPVSATGKAVVEETSKLAECIGKTRTLLRKILSEGVDHCMVKLDNDPQGYLSQPLSLLEAVLQECHNTFTACFHSFYPTPALQWACLCDLLNCLDQDIQEANFKTSSSRLLAAVMSALCHTSVKLTSIFPIAYDGEVLLRSIVKQVSTENDSTLVHRFPLLVAHMEKLSQSEENISGMTSFREVLEKMLVIVVLPVRNSLRRENELFSSHLVSNTCGLLASIVSELTASALGSEVDGLNSLHSVKASANRFTKTSQGRSWNTGNGSPDAICFSVDKPGIVVVGFSVYGGGGIHEYELEVLVDDSEHAGDSTHSHRWTSLELVKGTYTTDDSPSDIAEIRLDKVVPLKENVKYAVRLRNYGSRTANGDGGMTTVQCPDGVTFTFSTCSLSSNGTNQTRGQIPQILYYRSEFDGDLQSQLLSKANEEDKNCSRALSVVSTVVRASKDLLHRALAVDADDIPELLSSSSLFSMLLPLIIAYIGPVAAAIPKVAVEVFGLVQQLLPSVAILNQKYAPPAFNPNQSTDSTTGNQPEQGLSACTTSSHYAVIESEHPYKPACVMHYKVTFPECVRWMTIEFDPQCGTAQSEDVLRLLIPVRTVQNSGYGPKLTSVHENLNSWIELKKFSGSSGWPTMVLVLPGNEALFSLETASDYVKDDKASFYGFKCFAIGYEFSPGPDEGVIQLEKELANLGGVCAAALMKKDLALPIGNELEEDLEILEEAALQVCKTHSGILGKGLALSHSPTILEALEGNLPLQIQSNEQSFLDDFIACVPGSSGGRLARWLQPDSYADPQKTSLILNKDDIRCGWPTTITVQTKDQYGDVVHVPNMKVEVKAVPVSQKKMSLQQDQAKKPQRIPGSPAVTAASSNTDMTYGGLASPKLDVSYEPMIVKEARYIAITMMKVYENYSFEELRFASPTPKRPSENMLIRVNNDGTYCANWTPGAIGLYTLHVTIDGIEIDAGLEVKVKDPPKGMIPPGTQLVKPKSEPQPNKVRKFVAKDSAGLRIRSHPSLQSEQIGIVKVNGTITFIDEIHNDDGVWLRLNDETIKKYVPNMNGYTEAWCLSFNQHLGKSLLVPVDESKTNTDDFFKDINSCCPQEATMQEQDMPFLRGGPGMYKVVKTGPSGHNIRSCPNLRGIPIGMLVLGNKVKAVGEVTNSEGTWVQLDQNSMVEFCESDEGEAWSLARDRGGNQYLRHEDEQALLDQNSQTPPPSPFSVQAFNKGASCSAQGFDYGLGNSKGDRGNISTSSKPASTSGKSELSSKHSRSLKPDGRMSRTTADQKKPRGTESLSASESLILKSDAAKLRSDSHSRSLSPNHNTLQTLKSDGRMPSSSRAESPGPGSRLSSPKPKTLPANRSSPSGASSPRSSSPHDKNLPQKSTAPVKTKLDPPRERSKSDSYTLDPDTLRKKKMPLTEPLRGRSTSPKPKSVPKDSTDSPGSENRAPSPHVVQENLHSEVVEVCTSSTLKTNSLTDSTCDDSSEFKSVDEGSNKVHFSIGKAPLKDEQEMRASPKISRKCANRHTRPKKEKSSFLFKGDGSKPLEPAKQAMSPSVAECARAVFASFLWHEGIVHDAMACSSFLKFHPELSKEHAPIRSSLNSQQPTEEKETKLKNRHSLEISSALNMFNIAPHGPDISKMGSINKNKVLSMLKEPPLHEKCEDGKTETTFEMSMHNTMKSKSPLPLTLQHLVAFWEDISLATIKAASQNMIFPSPGSCAVLKKKECEKENKKSKKEKKKKEKAEVRPRGNLFGEMAQLAVGGPEKDTICELCGESHPYPVTYHMRQAHPGCGRYAGGQGYNSIGHFCGGWAGNCGDGGIGGSTWYLVCDRCREKYLREKQAAAREKVKQSRRKPMQVKTPRALPTMEAHQVIKANALFLLSLSSAAEPSILCYHPAKPFQSQLPSVKEGISEDLPVKMPCLYLQTLARHHHENFVGYQDDNLFQDEMRYLRSTSVPAPYISVTPDASPNVFEEPESNMKSMPPSLETSPITDTDLAKRTVFQRSYSVVASEYDKQHSILPARVKAIPRRRVNSGDTEVGSSLLRHPSPELSRLISAHSSLSKGERNFQWPVLAFVIQHHDLEGLEIAMKQALRKSACRVFAMEAFNWLLCNVIQTTSLHDILWHFVASLTPAPVEPEEEEDEENKTSKENSEQEKDTRVCEHPLSDIVIAGEAAHPLPHTFHRLLQTISDLMMSLPSGSSLQQMALRCWSLKFKQSDHQFLHQSNVFHHINNILSKSDDGDSEESFSISIQSGFEAMSQELCIVMCLKDLTSIVDIKTSSRPAMIGSLTDGSTETFWESGDEDKNKTKNITINCVKGINARYVSVHVDNSRDLGNKVTSMTFLTGKAVEDLCRIKQVDLDSRHIGWVTSELPGGDNHIIKIELKGPENTLRVRQVKVLGWKDGESTKIAGQISASVAQQRNCEAETLRVFRLITSQVFGKLISGDAEPTPEQEEKALLSSPEGEEKVYNATSDADLKEHMVGIIFSRSKLTNLQKQVCAHIVQAIRMEATRVREEWEHAISSKENANSQPNDEDASSDAYCFELLSMVLALSGSNVGRQYLAQQLTLLQDLFSLLHTASPRVQRQVTSLLRRVLPEVTPSRLASIIGVKSLPPADISDIIHSTEKGDWNKLGILDMFLGCIAKALTVQLKAKGTTITGTAGTTVGKGVTTVTLPMIFNSSYLRRGESHWWMKGSTPTQISEIIIKLIKDMAAGHLSEAWSRVTKNAIAETIIALTKMEEEFRSPVRCIATTRLWLALASLCVLDQDHVDRLSSGRWMGKDGQQKQMPMCDNHDDGETAAIILCNVCGNLCTDCDRFLHLHRRTKTHQRQVFKEEEEAIKVDLHEGCGRTKLFWLMALADSKTMKAMVEFREHTGKPTTSSSEACRFCGSRSGTELSAVGSVCSDADCQEYAKIACSKTHPCGHPCGGVKNEEHCLPCLHGCDKSATSLKQDADDMCMICFTEALSAAPAIQLDCSHIFHLQCCRRVLENRWLGPRITFGFISCPICKNKINHIVLKDLLDPIKELYEDVRRKALMRLEYEGLHKSEAITTPGVRFYNDPAGYAMNRYAYYVCYKCRKAYFGGEARCDAEAGRGDDYDPRELICGACSDVSRAQMCPKHGTDFLEYKCRYCCSVAVFFCFGTTHFCNACHDDFQRMTSIPKEELPHCPAGPKGKQLEGTECPLHVVHPPTGEEFALGCGVCRNAHTF

SEQ ID NO: 20043 - protein, 460 aa, Homo sapiens
MDWSLAFLLVISLLVTYASLLLVLALLLRLCRQPLHLHSLHKVLLLLIMLLVAAGLVGLDIQWQQEWHSLRVSLQATAPFLHIGAAAGIALLAWPVADTFYRIHRRGPKILLLLLFFGVVLVIYLAPLCISSPCIMEPRDLPPKPGLVGHRGAPMLAPENTLMSLRKTAECGATVFETDVMVSSDGVPFLMHDEHLSRTTNVASVFPTRITAHSSDFSWTELKRLNAGSWFLERRPFWGAKPLAGPDQKEAESQTVPALEELLEEAAALNLSIMFDLRRPPQNHTYYDTFVIQTLETVLNARVPQAMVFWLPDEDRANVQRRAPGMRQIYGRQGGNRTERPQFLNLPYQDLPLLDIKALHKDNVSVNLFVVNKPWLFSLLWCAGVDSVTTNDCQLLQQMRYPIWLITPQTYLIIWVITNCVSTMLLLWTFLLQRRFVKKRGKTGLETAVLLTRINNFMME

SEQ ID NO: 20044 - protein, 169 aa, Homo sapiens
MKTPRCSLPDLPVLTQARRRRQAPAPTKWNKRNLSWRVRTFPRDSPLGHDTVRALMYYALKVWSDIAPLNFHEVAGSAADIQIDFSKADHNDGYPFDGPGGTVAHAFFPGHHHTAGDTHFDDDEAWTFRSSDAHGMDLFAVAVHEFGHAIGLSHVAAAHSIMRPYYQGP

SEQ ID NO: 20045 - protein, 272 aa, Homo sapiens
MSGAGVAAGTRPPSSPTPGSRRRRQRPSVGVQSLRPQSPQLRQSDPQKRNLDLEKSLQFLQQQHSEMLAKLHEEIEHLKRENKDLHYKLIMNQTSQKKDGPSGNHLSRASAPLGARWVCINGVWVEPGGPSPARLKEGSSRTHRPGGKRGRLAGGSADTVRSPADSLSMSSFQSVKSISNSGKARPQPGSFNKQDSKADVSQKADLEEEPLLHNSKLDKVPGVQGQASCGTSSPSWKGARGPRQPRRKLAFPGTKKPRISPRSPPRASPRNA

SEQ ID NO: 20046 - protein, 1016 aa, Homo sapiens
MVTRLLQQQNLPQTGEQELESLVLKLSVLKDFLSGIQKKALKALQDMSSTAPPAPQPSTRKAKTIPVQAFEVKLDVTLGDLTKIGKSQKFTLSVDVEGGRLVLLRRQRDSQEDWTTFTHDRIRQLIKSQRVQNKLGVVFEKEKDRTQRKDFIFVSARKREAFCQLLQLMKNKHSKQDEPDMISVFIGTWNMGSVPPPKNVTSWFTSKGLGKTLDEVTVTIPHDIYVFGTQENSVGDREWLDLLRGGLKELTDLDYRPIAMQSLWNIKVAVLVKPEHENRISHVSTSSVKTGIANTLGNKGAVGVSFMFNGTSFGFVNCHLTSGNEKTARRNQNYLDILRLLSLGDRQLNAFDISLRFTHLFWFGDLNYRLDMDIQEILNYISRKEFEPLLRVDQLNLEREKHKVFLRFSEEEISFPPTYRYERGSRDTYAWHKQKPTGVRTNVPSWCDRILWKSYPETHIICNSYGCTDDIVTSDHSPVFGTFEVGVTSQFISKKGLSKTSDQAYIEFESIEAIVKTASRTKFFIEFYSTCLEEYKKSFENDAQSSDNINFLKVQWSSRQLPTLKPILADIEYLQDQHLLLTVKSMDGYESYGECVVALKSMIGSTAQQFLTFLSHRGEETGNIRGSMKVRVPTERLGTRERLYEWISIDKDEAGAKSKAPSVSRGSQEPRSGSRKPAFTEASCPLSRLFEEPEKPPPTGRPPAPPRAAPREEPLTPRLKPEGAPEPEGVAAPPPKNSFNNPAYYVLEGVPHQLLPPEPPSPARAPVPSATKNKVAITVPAPQLGHHRHPRVGEGSSSDEESGGTLPPPDFPPPPLPDSAIFLPPSLDPLPGPVVRGRGGAEARGPPPPKAHPRPPLPPGPSPASTFLGEVASGDDRSCSVLQMAKTLSEVDYAPAGPARSALLPGPLELQPPRGLPSDYGRPLSFPPPRIRESIQEDLAEEAPCLQGGRASGLGEAGMSAWLRAIGLERYEEGLVHNGWDDLEFLSDITEEDLEEAGVQDPAHKRLLLDTLQLSK

SEQ ID NO: 20047 - protein, 714 aa, Homo sapiens
MSIALGNTYRRSLSDSETVSVLQASLCEEKKEKSSKPKDPPPFEGMEIDEVANINDMDEYIELLYEDIPDKVRGSALILQLARNPDNLEELLLNETALGALARVLREDWKQSVELATNIIYIFFCFSSFSQFHGLITHYKIGALCMNIIDHELKRHELWQEELSKKKKAVDEDPENQTLRKDYEKTFKKYQGLVVKQEQLLRVALYLLLNLAEDTRTELKMRNKNIVHMLVKALDRDNFELLILVVSFLKKLSIFMENKNDMVEMDIVEKLVKMIPCEHEDLLNITLRLLLNLSFDTGLRNKMVQVGLLPKLTALLGNDNYKQIAMCVLYHISMDDRFKSMFAYTDCIPQLMKMLFECSDERIDLELISFCINLAANKRNVQLICEGNGLKMLMKRALKFKDPLLMKMIRNISQHDGPTKNLFIDYVGDLAAQISNDEEEEFVIECLGTLANLTIPDLDWELVLKEYKLVPYLKDKLKPGAAEDDLVLEVVIMIGTVSMDDSCAALLAKSGIIPALIELLNAQQEDDEFVCQIIYVFYQMVFHQATRDVIIKETQAPAYLIDLMHDKNNEIRKVCDNTLDIIAEYDEEWAKKIQSEKFRWHNSQWLEMVESRQMDESEQYLYGDDRIEPYIHEGDILERPDLFYNSDGLIASEGAISPDFFNDYHLQNGDVVGQHSFPGSLGMDGFGQPVGILGRPATAYGFRPDEPYYYGYGS

SEQ ID NO: 20048 - protein, 66 aa, Homo sapiens
MAILLSYSERDPVPGGCNLEFDLDIDPNIYLEYNFFETTIKFAPANLGYARGVDPPPCDAGTDQDS

SEQ ID NO: 20049 - protein, 849 aa, Homo sapiens
MALIMEPVSKWSPSQVVDWMKGLDDCLQQYIKNFEREKISGDQLLRITHQELEDLGVSRIGHQELILEAVDLLCALNYGLETENLKTLSHKLNASAKNLQNFITGRRRSGHYDGRTSRKLPNDFLTSVVDLIGAAKSLLAWLDRSPFAAVTDYSVTRNNVIQLCLELTTIVQQDCTVYETENKILHVCKTLSGVCDHIISLSSDPLVSQSAHLEVIQLANIKPSEGLGMYIKSTYDGLHVITGTTENSPADRCKKIHAGDEVIQVNHQTVPLIPRSPTSSVATPSSTISTPTKRDSSALQDLYIPPPPAEPYIPRDEKGNLPCEDLRGHMVGKPVHKGSESPNSFLDQEYRKRFNIVEEDTVLYCYEYEKGRSSSQGRRESTPTYGKLRPISMPVEYNWVGDYEDPNKMKRDSRRENSLLRYMSNEKIAQEEYMFQRNSKKDTGKKSKKKGDKSNSPTHYSLLPSLQMDALRQDIMGTPVPETTLYHTFQQSSLQHKSKKKNKGPIAGKSKRRISCKDLGRGDCEGWLWKKKDAKSYFSQKWKKYWFVLKDASLYWYINEEDEKAEGFISLPEFKIDRASECRKKYAFKACHPKIKSFYFAAEHLDDMNRWLNRINMLTAGYAERERIKQEQDYWSESDKEEADTPSTPKQDSPPPPYDTYPRPPSMSCASPYVEAKHSRLSSTETSQSQSSHEEFRQEVTGSSAVSPIRKTASQRRSWQDLIETPLTSSGLHYLQTLPLEDSVFSDSAAISPEHRRQSTLPTQKCHLQDHYGPYPLAESERMQVLNGNGGKPRSFTLPRDSGFNHCCLNAPVSACDPQDDVQPPEVEEEEEEEEEEGEAAGENIGEKS

SEQ ID NO: 20050 - protein, 729 aa, Homo sapiens
MLYGTQAVPVRLKILLDRLFSVLKQEEVLHILHGLGWTLRDYVRGYILQDAAGKVLDRWAIMSREEEIITLQQFLRFGETKSIVELMAIQEKEGQAVAVPSSKTDSDIRTFIESNNRTRSPSLLAHLENSNPSSIHHFENIPNSLAFLLPFQYINPVSAPLLGLPPNGLLLEQPGLRLREPSLSTQNEYNESSESEVSPTPYKNDQTPNRNALTSITNVEPKTEPACVSPIQNSAPVSDLTKTEHPKSSFRIHRMRRMGSASRKGRVFCNACGKTFYDKGTLKIHYNAVHLKIKHRCTIEGCNMVFSSLRSRNRHSANPNPRLHMPMLRNNRDKDLIRATSGAATPVIASTKSNLALTSPGRPPMGFTTPPLDPVLQNPLPSQLVFSGLKTVQPVPPFYRSLLTPGEMVSPPTSLPTSPIIPTSGTIEQHPPPPSEPVVPAVMMATHEPSADLAPKKKPRKSSMPVKIEKEIIDTADEFDDEDDDPNDGGAVVNDMSHDNHCHSQEEMSPGMSVKDFSKHNRTRCISRTEIRRADSMTSEDQEPERDYENESESSEPKLGEESMEGDEHIHSEVSEKVLMNSERPDENHSEPSHQDVIKVKEEFTDPTYDMFYMSQYGLYNGGGASMAALHESFTSSLNYGSPQKFSPEGDLCSSPDPKICYVCKKSFKSSYSVKLHYRNVHLKEMHVCTVAGCNAAFPSRRSRDRNRNLRMERTIGPGHRDSLHLLPT

SEQ ID NO: 20051 - protein, 452 aa, Homo sapiens
LSPTMRPGTGAERGGLMVSEMESHPPSQGPGDGERRLSGSSLCSGSWVSADGFLRRRPSMGHPGMHYAPMGMHPMGQRANMPPVPHGMMPQMMPPMGGPPMGQMPGMMSSVMPGMMMSHMSQASMQPALPPGVNSMDVAAGTASGAKSMWTEHKSPDGRTYYYNTETKQSTWEKPDDLKTPAEQLLSKCPWKEYKSDSGKPYYYNSQTKESRWAKPKELEDLEGYQNTIVAGSLITKSNLHAMIKAEESSKQEECTTTSTAPVPTTEIPTTMSTMAAAEAAAAVVAAAAAAAAAAAAANANASTSASNTVSGTVPVVPEPEVTSIVATVVDNENTVTISTEEQAQLTSTPAIQDQSVEVSSNTGEETSKQETVADFTPKKEEEESQPAKKTYTWNTKEEAKQAFKELLKEKRVPSNASWEQAMKMIINDPRYSALAKLSEKKQAFNAYKVQT

SEQ ID NO: 20052 - protein, 537 aa, Homo sapiens
MTKKTRDLRRQLRKAVMDHISDSFLETNVPLLVLIEAAKSGNEKEVKEYAQVFREHANKLVEVANLACSISNNEEGVKLVRMAATQIDSLCPQVINAALTLAARPQSKVAQDNMDVFKDQWEKQVRVLTEAVDDITSVDDFLSVSENHILEDVNKCVIALQEGDVDTLDRTAGAIRGRAARVIHIINAEMENYEAGVYTEKVLEATKLLSETVMPRFAEQVEVAIEALSANVPQPFEENEFIDASRLVYDGVRDIRKAVLMIRTPEELEDDSDFEQEDYDVRSRTSVQTEDDQLIAGQSARAIMAQLPQEEKAKIAEQVEIFHQEKSKLDAEVAKWDDSGNDIIVLAKQMCMIMMEMTDFTRGKGPLKNTSDVINAAKKIAEAGSRMDKLARAVADQCPDSACKQDLLAYLQRIALYCHQLNICSKVKAEVQNLGGELIVSGLDSATSLIQAAKNLMNAVVLTVKASYVASTKYQKVYGTAAVNSPVVSWKMKAPEKKPLVKREKPEEFQTRVRRGSQKKHISPVQALSEFKAMDSF

SEQ ID NO: 20053 - protein, 2358 aa, Homo sapiens
MQGPYSLNGYRVRVYRQDSATQWFTGIITHHDLFTRTMIVMNDQVLEPQNVDPSMVQMTFLDDVVHSLLKGENIGITSRRRSRANQNVNAVHSHYTRAQANSPRPAMNSQAAVPKQNTHQQQQQRSIRPNKRKGSDSSIPDEEKMKEEKYDYISRGENPKGKNKHLMNKRRKPEEDEKKLNMKRLRTDNVSDFSESSDSENSNKRIIDNSSEQKPENELKNKNTSKINGEEGKPHNNEKAGEETLKNSQPPWDQIQEDKKHEEAEKRKSVDTQLQEDMIIHSSEQSTVSDHNSNDLLPQECNMDKTHTMELLPKEKFVSRPPTPKCVIDITNDTNLEKVAQENSSTFGLQTLQKMDPNVSDSKHSIANAKFLETAKKDSDQSWVSDVVKVDLTQSSVTNASSGNDHLNMEKEKYVSYISPLSAVSVMEDKLHKRSPPPETIKSKLNTSVDTHKIKSSPSPEVVKPKITHSPDSVKSKATYVNSQATGERRLANKIEHELSRCSFHPIPTRSSTLETTKSPLIIDKNEHFTVYRDPALIGSETGANHISPFLSQHPFPLHSSSHRTCLNPGTHHPALTPAPHLLAGSSSQTPLPTINTHPLTSGPHHAVHHPHLLPTVLPGVPTASLLGGHPRLESAHASSLSHLALAHQQQQQLLQHQSPHLLGQAHPSASYNQLGLYPIIWQYPNGTHAYSGLGLPSSKWVHPENAVNAEASLRRNSPSPWLHQPTPVTSADGIGLLSHIPVRPSSAEPHRPLKITAHSSPPLTKTLVDHHKEELERKAFMEPLRSVASTSAKNDLDLNRSQTGKDCHLHRHFVDPVLNQLQRPPQETGERLNKYKEEHRRILQESIDVAPFTTKIKGLEGERENYSRVASSSSSPKSHIIKQDMDVERSVSDLYKMKHSVPQSLPQSNYFTTLSNSVVNEPPRSYPSKEVSNIYGDKQSNALAAAAANPQTLTSFITSLSKPPPLIKHQPESEGLVGKIPEHLPHQIASHSVTTFRNDCRSPTHLTVSSTNTLRSMPALHRAPVFHPPIHHSLERKEGSYSSLSPPTLTPVMPVNAGGKVQESQKPPTLIPEPKDSQANFKSSSEQSLTEMWRPNNNLSKEKTEWHVEKSSGKLQAAMASVIVRPSSSTKTDSMPAMQLASKDRVSERSSAGAHKTDCLKLAEAGETGRIILPNVNSDSVHTKSEKNFQAVSQGSVPSSVMSAVNTMCNTKTDVITSAADTTSVSSWGGSEVISSLSNTILASTSSECVSSKSVSQPVAQKQECKVSTTAPVTLASSKTGSVVQPSSGFSGTTDFIHLKKHKAALAAAQYKSSNASETEPNAIKNQTLSASLPLDSTVICSTINKANSVGNGQASQTSQPNYHTKLKKAWLTRHSEEDKNTNKMENSGNSVSEIIKPCSVNLIASTSSDIQNSVDSKIIVDKYVKDDKVNRRKAKRTYESGSESGDSDESESKSEQRTKRQPKPTYKKKQNDLQKRKGEIEEDLKPNGVLSRSAKERSKLKLQSNSNTGIPRSVLKDWRKVKKLKQTGESFLQDDSCCEIGPNLQKCRECRLIRSKKGEEPAHSPVFCRFYYFRRLSFSKNGVVRIDGFSSPDQYDDEAMSLWTHENFEDDELDIETSKYILDIIGDKFCQLVTSEKTALSWVKKDAKIAWKRAVRGVREMCDACEATLFNIHWVCQKCGFVVCLDCYKAKERKSSRDKELYAWMKCVKGQPHDHKHLMPTQIIPGSVLTDLLDAMHTLREKYGIKSHCHCTNKQNLQVGNFPTMNGVSQVLQNVLNHSNKISLCMPESQQQNTPPKSEKNGGSSPESDVGTDNKLTPPESQSPLHWLADLAEQKAREEKKENKELTLENQIKEEREQDNSESPNGRTSPLVSQNNEQGSTLRDLLTTTAGKLRVGSTDAGIAFAPVYSMGAPSSKSGRTMPNILDDIIASVVENKIPPSKTSKINVKPELKEEPEESIISAVDENNKLYSDIPHSWICEKHILWLKDYKNSSNWKLFKECWKQGQPAVVSGVHKKMNISLWKAESISLDFGDHQADLLNCKDSIISNANVKEFWDGFEEVSKRQKNKSGETVVLKLKDWPSGEDFKTMMPARYEDLLKSLPLPEYCNPEGKFNLASHLPGFFVRPDLGPRLCSAYGVVAAKDHDIGTTNLHIEVSDVVNILVYVGIAKGNGILSKAGILKKFEEEDLDDILRKRLKDSSEIPGALWHIYAGKDVDKIREFLQKISKEQGLEVLPEHDPIRDQSWYVNKKLRQRLLEEYGVRTCTLIQFLGDAIVLPAGALHQVQNFHSCIQVTEDFVSPEHLVESFHLTQELRLLKEEINYDDKLQVKNILYHAVKEMVRALKIHEDEVEDMEEN

SEQ ID NO: 20054 - protein, 1026 aa, Homo sapiens
MGSGGSDSYRIATSQDKKDDKDSPKKNKGKERRDLDDLKKEVAMTEHKMSVEEVCRKYNTDCVQGLTHSKAQEILARDGPNALTPPPTTPEWVKFCRQLFGGFSILLWIGAILCFLAYGIQAGTEDDPSGDNLYLGIVLAAVVIITGCFSYYQEAKSSKIMESFKNMVPQQALVIREGEKMQVNAEEVVVGDLVEIKGGDRVPADLRIISAHGCKVDNSSLTGESEPQTRSPDCTHDNPLETRNITFFSTNCVEGTARGVVVATGDRTVMGRIATLASGLEVGKTPIAIEIEHFIQLITGVAVFLGVSFFILSLILGYTWLEAVIFLIGIIVANVPEGLLATVTVCLTLTAKRMARKNCLVKNLEAVETLGSTSTICSDKTGTLTQNRMTVAHMWFDNQIHEADTTEDQSGTSFDKSSHTWVALSHIAGLCNRAVFKGGQDNIPVLKRDVAGDASESALLKCIELSSGSVKLMRERNKKVAEIPFNSTNKYQLSIHETEDPNDNRYLLVMKGAPERILDRCSTILLQGKEQPLDEEMKEAFQNAYLELGGLGERVLGFCHYYLPEEQFPKGFAFDCDDVNFTTDNLCFVGLMSMIDPPRAAVPDAVGKCRSAGIKVIMVTGDHPITAKAIAKGVGIISEGNETVEDIAARLNIPVSQVNPRDAKACVIHGTDLKDFTSEQIDEILQNHTEIVFARTSPQQKLIIVEGCQRQGAIVAVTGDGVNDSPALKKADIGVAMGIAGSDVSKQAADMILLDDNFASIVTGVEEGRLIFDNLKKSIAYTLTSNIPEITPFLLFIMANIPLPLGTITILCIDLGTDMVPAISLAYEAAESDIMKRQPRNPRTDKLVNERLISMAYGQIGMIQALGGFFSYFVILAENGFLPGNLVGIRLNWDDRTVNDLEDSYGQQWTYEQRKVVEFTCHTAFFVSIVVVQWADLIICKTRRNSVFQQGMKNKILIFGLFEETALAAFLSYCPGMDVALRMYPLKPSWWFCAFPYSFLIFVYDEIRKLILRRNPGGWVEKETYY

SEQ ID NO: 20055 - protein, 446 aa, Homo sapiens
MGKRYMHHPQIQMISTVNLLVIHLLSHQPVCSLALSLCKSYPPHSVSPTDINTSLPPMSSFHRGSTSSSPYVAASHTPPINGSDSILGTRGNAAGSSQTGDALGKALASIYSPDHTSSSFPSNPSTPVGSPSPLTGTSQWPRPGGQAPSSPSYENSLHSLQSRMEDRLDRLDDAIHVLRNHAVGPSTSLPAGHSDIHSLLGPSHNAPIGSLNSNYGGSSLVASSRSASMVGTHREDSVSLNGNHSVLSSTVTTSSTDLNHKTQENYRGGLQSQSGTVVTTEIKTENKEKDENLHEPPSSDDMKSDDESSQKDIKVSSRGRTSSTNEDEDLNPEQKIEREKERRMANNARERLRVRDINEAFKELGRMCQLHLKSEKPQTKLLILHQAVAVILSLEQQVRERNLNPKAACLKRREEEKVSAVSAEPPTTLPGTHPGLSETTNPMGHM

SEQ ID NO: 20056 - protein, 929 aa, Homo sapiens
MALDIFSSYTGRDIPELPEREEGEGEESELQNTAYSNWNQPRRVELWREPSKSLGISIVGGRGMGSRLSNGEVMRGIFIKHVLEDSPAGKNGTLKPGDRIVEVDGMDLRDASHEQAVEAIRKAGNPVVFMVQSIINRPRAPSQSESEPEKAPLCSVPPPPPSAFAEMGSDHTQSSASKISQDVDKEDEFGYSWKNIRERYGTLTGELHMIELEKGHSGLGLSLAGNKDRSRMSVFIVGIDPNGAAGKDGRLQIADELLEINGQILYGRSHQNASSIIKCAPSKVKIIFIRNKDAVNQMAVCPGNAVEPLPSNSENLQNKETEPTVTTSDAAVDLSSFKNVQHLELPKDQGGLGIAISEEDTLSGVIIKSLTEHGVAATDGRLKVGDQILAVDDEIVVGYPIEKFISLLKTAKMTVKLTIHAENPDSQAVPSAAGAASGEKKNSSQSLMVPQSGSPEPESIRNTSRSSTPAIFASDPATCPIIPGCETTIEISKGRTGLGLSIVGGSDTLLGAIIIHEVYEEGAACKDGRLWAGDQILEVNGIDLRKATHDEAINVLRQTPQRVRLTLYRDEAPYKEEEVCDTLTIELQKKPGKGLGLSIVGKRNDTGVFVSDIVKGGIADADGRLMQGDQILMVNGEDVRNATQEAVAALLKCSLGTVTLEVGRIKAGPFHSERRPSQSSQVSEGSLSSFTFPLSGSSTSESLESSSKKNALASEIQGLRTVEMKKGPTDSLGISIAGGVGSPLGDVPIFIAMMHPTGVAAQTQKLRVGDRIVTICGTSTEGMTHTQAVNLLKNASGSIEMQVVAGGDVSVVTGHQQEPASSSLSFTGLTSSSIFQDDLGPPQCKSITLERGPDGLGFSIVGGYGSPHGDLPIYVKTVFAKGAASEDGRLKRGDQIIAVNGQSLEGVTHEEAVAILKRTKGTVTLMVLS

SEQ ID NO: 20057 - protein, 1829 aa, Homo sapiens
MKSPALQPLSMAGLQLMTPASSPMGPFFGLPWQQEAIHDNIYTPRKYQVELLEAALDHNTIVCLNTGSGKTFIAVLLTKELSYQIRGDFSRNGKRTVFLVNSANQVAQQVSAVRTHSDLKVGEYSNLEVNASWTKERWNQEFTKHQVLIMTCYVALNVLKNGYLSLSDINLLVFDECHLAILDHPYREIMKLCENCPSCPRILGLTASILNGKCDPEELEEKIQKLEKILKSNAETATDLVVLDRYTSQPCEIVVDCGPFTDRSGLYERLLMELEEALNFINDCNISVHSKERDSTLISKQILSDCRAVLVVLGPWCADKVAGMMVRELQKYIKHEQEELHRKFLLFTDTFLRKIHALCEEHFSPASLDLKFVTPKVIKLLEILRKYKPYERQQFESVEWYNNRNQDNYVSWSDSEDDDEDEEIEEKEKPETNFPSPFTNILCGIIFVERRYTAVVLNRLIKEAGKQDPELAYISSNFITGHGIGKNQPRNKQMEAEFRKQEEVLRKFRAHETNLLIATSIVEEGVDIPKCNLVVRFDLPTEYRSYVQSKGRARAPISNYIMLADTDKIKSFEEDLKTYKAIEKILRNKCSKSVDTGETDIDPVMDDDDVFPPYVLRPDDGGPRVTINTAIGHINRYCARLPSDPFTHLAPKCRTRELPDGTFYSTLYLPINSPLRASIVGPPMSCVRLAERVVALICCEKLHKIGELDDHLMPVGKETVKYEEELDLHDEEETSVPGRPGSTKRRQCYPKAIPECLRDSYPRPDQPCYLYVIGMVLTTPLPDELNFRRRKLYPPEDTTRCFGILTAKPIPQIPHFPVYTRSGEVTISIELKKSGFMLSLQMLELITRLHQYIFSHILRLEKPALEFKPTDADSAYCVLPLNVVNDSSTLDIDFKFMEDIEKSEARIGIPSTKYTKETPFVFKLEDYQDAVIIPRYRNFDQPHRFYVADVYTDLTPLSKFPSPEYETFAEYYKTKYNLDLTNLNQPLLDVDHTSSRLNLLTPRHLNQKGKALPLSSAEKRKAKWESLQNKQILVPELCAIHPIPASLWRKAVCLPSILYRLHCLLTAEELRAQTASDAGVGVRSLPADFRYPNLDFGWKKSIDSKSFISISNSSSAENDNYCKHSTIVPENAAHQGANRTSSLENHDQMSVNCRTLLSESPGKLHVEVSADLTAINGLSYNQNLANGSYDLANRDFCQGNQLNYYKQEIPVQPTTSYSIQNLYSYENQPQPSDECTLLSNKYLDGNANKSTSDGSPVMAVMPGTTDTIQVLKGRMDSEQSPSIGYSSRTLGPNPGLILQALTLSNASDGFNLERLEMLGDSFLKHAITTYLFCTYPDAHEGRLSYMRSKKVSNCNLYRLGKKKGLPSRMVVSIFDPPVNWLPPGYVVNQDKSNTDKWEKDEMTKDCMLANGKLDEDYEEEDEEEESLMWRAPKEEADYEDDFLEYDQEHIRFIDNMLMGSGAFVKKISLSPFSTTDSAYEWKMPKKSSLGSMPFSSDFEDFDYSSWDAMCYLDPSKAVEEDDFVVGFWNPSEENCGVDTGKQSISYDLHTEQCIADKSIADCVEALLGCYLTSCGERAAQLFLCSLGLKVLPVIKRTDREKALCPTRENFNSQQKNLSVSCAAASVASSRSSVLKDSEYGCLKIPPRCMFDHPDADKTLNHLISGFENFEKKINYRFKNKAYLLQAFTHASYHYNTITDCYQRLEFLGDAILDYLITKHLYEDPRQHSPGVLTDLRSALVNNTIFASLAVKYDYHKYFKAVSPELFHVIDDFVQFQLEKNEMQGMDSEKSFLQMYPVPLCENCLKWNQKLPNLARLRELTTGRSESLWK

SEQ ID NO: 20058 - protein, 1450 aa, Homo sapiens
MALVTVQRSPTPSTTSSPCASSSHLEDSESAALLCCECEESEIFTDSNEADSGEEECRSQPRSISESFLTVKGAALFLPRGNGSSTPRISHRRNKHAGDLQQHLQAMFILLRPEDNIRLAVRLESTYQNRTRYMVVVSTNGRQDTEESIVLGMDFSSNDSSTCTMGLVLPLWSDTLIHLDGDGGFSVSTDNRVHIFKPVSVQAMWSALQSLHKACEVARAHNYYPGSLFLTWVSYYESHINSDQSSVNEWNAMQDVQSHRPDSPALFTDIPTERERTERLIKTKLREIMMQKDLENITSKEIRTELEMQMVCNLREFKEFIDNEMIVILGQMDSPTQIFEHVFLGSEWNASNLEDLQNRGVRYILNVTREIDNFFPGVFEYHNIRVYDEEATDLLAYWNDTYKFISKAKKHGSKCLVHCKMGVSRSASTVIAYAMKEYGWNLDRAYDYVKERRTVTKPNPSFMRQLEEYQGILLASKQRHNKLWRSHSDSDLSDHHEPICKPGLELNKKDITTSADQIAEVKTMESHPPIPPVFVEHMVPQDANQKGLCTKERMICLEFTSREFHAGQIEDELNLNDINGCSSGCCLNESKFPLDNCHASKALIQPGHVPEMANKFPDLTVEDLETDALKADMNVHLLPMEELTSPLKDPPMSPDPESPSPQPSCQTEISDFSTDRIDFFSALEKFVELSQETRSRSFSHSRMEELGGGRNESCRLSVVEVAPSKVTADDQRSSSLSNTPHASEESSMDEEQSKAISELVSPDIFMQSHSENAISVKEIVTEIESISQGVGQIQLKGDILPNPCHTPKKNSIHELLLERAQTPENKPGHMEQDEDSCTAQPELAKDSGMCNPEGCLTTHSSIADLEEGEPAEGEQELQGSGMHPGAKWYPGSVRRATLEFEERLRQEQEHHGAAPTCTSLSTRKNSKNDSSVADLAPKGKSDEAPPEHSFVLKEPEMSKGKGKYSGSEAGSLSHSEQNATVPAPRVLEFDHLPDPQEGPGSDTGTQQEGVLKDLRTVIPYQESETQAVPLPLPKRVEIIEYTHIVTSPNHTGPGSEIATSEKSGEQGLRKVNMEKSVTVLCTLDENLNRTLDPNQVSLHPQVLPLPHSSSPEHNRPTDHPTSILSSPEDRGSSLSTALETAAPFVSHTTHLLSASLDYLHPQTMVHLEGFTEQSSTTDEPSAEQVSWEESQESPLSSGSEVPYKDSQLSSADLSLISKLGDNTGELQEKMDPLPVACRLPHSSSSENIKSLSHSPGVVKERAKEIESRVVFQAGLTKPSQMRRSASLAKLGYLDLCKDCLPEREPASCESPHLKLLQPFLRTDSGMHAMEDQESLENPGAPHNPEPTKSFVEQLTTTECIVQSKPVERPLVQYAKEFGSSQQYLLPRAGLELTSSEGGLPVLQTQGLQCACPAPGLAVAPRQQHGRTHPLRRLKKANDKKRTTNPFYNTM

SEQ ID NO: 20059 - protein, 537 aa, Homo sapiens
MEGLLSVALQGAELEGNWKHEGQVEDLQENQESCPEPEAVACKGDPAGDSMQERDEFSRIPRTISSPAATQASVPDDSSSRRCSAPGESPKERHPDSRQRERGGGPKKPWKCGDCGKAFSYCSAFILHQRIHTGEKPFACPECGKAFSQSVHLTLHQRTHTGEKPYACHECGKAFSQGSYLASHWRTHTGEKPHRCADCGKAFTRVTHLTQHRRVHTGERPYACAQCAKAFRNRSSLIEHQRIHTGEKPYECSACAKAFRFSSALIRHQRIHTEEKPYRCGQCAKAFAQIAHLTQHRRVHTGEKPYTCQDCGALFSQSASLAEHRRIHTGEKPYACGQCAKAFTQVSHLTQHQRTHTGERPYPCHDCGKRFSNRSHLLQHRLVHTGERPYRCLQCGAAFSHVSSLIEHQKIHTGERPYKCGECGKAFSQGSSLALHQRTHTGERPYTCPECGKAFSNRSYLIQHHIVHTGEKPYECSGCGKAFSFSSALIRHQRTHADSSGRLCPAPTPDSTPGLSQGGETCQQGCPGRNPRGPAED

SEQ ID NO: 20060 - protein, 879 aa, Homo sapiens
MNLCWNEIKKKSHNLRARLEAFSDHSGKLQLPLQEIIDWLSQKDEELSAQLPLQGDVALVQQEKETHAAFMEEVKSRGPYIYSVLESAQAFLSQHPFEELEEPHSESKDTSPKQRIQNLSRFVWKQATVASELWEKLTARCVDQHRHIERTLEQLLEIQGAMEELSTTLSQAEGVRATWEPIGDLFIDSLPEHIQAIKLFKEEFSPMKDGVKLVNDLAHQLAISDVHLSMENSQALEQINVRWKQLQASVSERLKQLQDAHRDFGPGSQHFLSSSVQVPWERAISPNKVPYYINHQAQTTCWDHPKMTELYQTLADLNNIKFSAYRTAMKLRRVQKALRLDLVTLTTALEIFNEHDLQASEHVMDVVEVIHCLTALYERLEEERGILVNVPLCVDMSLNWLLNVFDSGRSGKMRALSFKTGIACLCGTEVKEKLQYLFSQVANSGSQCDQRHLGVLLHEAIQVPRQLGEVAAFGGSNVEPSVRSCFRFSTGKPVIEASQFLEWVNLEPQSMVWLAVLHRVTIAEQVKHQTKCSICRQCPIKGFRYRSLKQFNVDICQTCFLTGRASKGNKLHYPIMEYYTPTTSSENMRDFATTLKNKFRSKHYFSKHPQRGYLPVQSVLEADYSETPASSPMWPHADTHSRIEHFASRLAEMESQNCSFFNDSLSPDDSIDEDQYLLRHSSPITDREPAFGQQAPCSVATESKGELQKILAHLEDENRILQGELRRLKWQHEEAAEAPSLADGSTEAATDHRNEELLAEARILRQHKSRLETRMQILEDHNKQLESQLQRLRELLLQPPTESDGSGSAGSSLASSPQQSEGSHPREKGQTTPDTEAADDVGSKSQDVSLCLEDIMEKLRHAFPSVRSSDVTANTLLAS

SEQ ID NO: 20061 - protein, 648 aa, Homo sapiens
LESIFIGGDIRSQLPEEAKKFDNIDKVFKRIMGETLKDPVIKRCCEAPNRLSDLQNVSEGLEKCQKSLNDYLDSKRNAFPRFFFISDDELLSILGSSDPLCVQEHMIKMYDNIASLRFNDGDSGEKLVSAMISAEGEVMEFRKILRAEGRVEDWMTAVLNEMRRTNRLITKEAIFRYCEDRSRVDWMLLYQGMVVLAASQVWWTWEVEDVFHKAQKGEKQAMKNYGRKMHRQIDELVTRITMPLSKNDRKKYNTVLIIDVHARDIVDSFIRGSILEAREFDWESQLRFYWDREPDELNIRQCTGTFGYGYEYMGLNGRLVITPLTDRIYLTLTQALSMYLGGAPAGPAGTGKTETTKDLAKALGLLCVVTNCGEGMDYRAVGKIFSGLAQCGAWGCFDEFNRIDASVLSVISSQIQTIRNALIHQLTTFQFEGQEISLDSRMGIFITMNPGYAGRTELPESVKALFRPVVVIVPDLQQICEIMLFSEGFLEAKTLAKKMTVLYKLAREQLSKQYHYDFGLRALKSVLVMAGELKRGSSDLREDVVLMRALRDMNLPKFVFEDVPLFLGLISDLFPGLDCPRVRYPDFNDAVEQVLEENGYAVLPIQVDKVVQMFETMLTRHTTMVVGPTRGGKSVVINTLCQAQTNLS

SEQ ID NO: 20062 - protein, 797 aa, Homo sapiens [sequence omitted]

SEQ ID NO: 20063 - protein, 702 aa, Homo sapiens
QKCQLQVHDAEALIALLQEGPHLEEVDLSGNQLEDEGCRLMAEAASQLHIARKLDLSNNGLSVAGVHCVLRAVSACWTLAELHISLQHKTVIFMFAQEPEEQKGPQERAAFLDSLMLQMPSELPLSSRRMRLTHCGLQEKHLEQLCKALGGSCHLGHLHLDFSGNALGDEGAARLAQLLPGLGALQSLNLSENGLSLDAVLGLVRCFSTLQWLFRLDISFESQHILLRGDKTSRDMWATGSLPDFPAAAKFLGFRQRCIPRSLCLSECPLEPPSLTRLCATLKDCPGPLELQLSCEFLSDQSLETLLDCLPQLPQLSLLQLSQTGLSPKSPFLLANTLSLCPRVKKVDLRSLHHATLHFRSNEEEEGVCCGRFTGCSLSQEHVESLCWLLSKCKDLSQVDLSANLLGDSGLRCLLECLPQVPISGLLDLSHNSISQESALYLLETLPSCPRVREASVNLGSEQSFRIHFSREDQAGKTLRLSECSFRPEHVSRLATGLSKSLQLTELTLTQCCLGQKQLAILLSLVGRPAGLFSLRVQEPWADRARVLSLLEVCAQASGSVTEISISETQQQLCVQLEFPRQEENPEAVALRLAHCDLGAHHSLLVGQLMETCARLQQLSLSQVNLCEDDDASSLLLQSLLLSLSELKTFRIQSSQDPGRLLPDLLPFDPHQADLQLCEHRGPRPPGIWSGPLPPLGGAGLV

SEQ ID NO: 20064 - protein, 700 aa, Homo sapiens
MELEVPDEAESAEAGAVPSEAAWAAESGAAAGLAQKKAAPTEVLSMTAQPGPGHGKKLGHRGVDASGETTYKKTTSSTLKGAIQLGIGYTVGHLSSKPERDVLMQDFYVVESIFFPSEGSNLTPAHHFQDFRFKTYAPVAFRYFRELFGIRPDDYLYSLCNEPLIELSNPGASGSLFYVTSDDEFIIKTVMHKEAEFLQKLLPGYYMNLNQNPRTLLPKFYGLYCVQSGGKNIRVVVMNNILPRVVKMHLKFDLKGSTYKRRASKKEKEKSFPTYKDLDFMQDMPEGLLLDADTFSALVKTLQRDCLVLESFKIMDYSLLLGVHNIDQHERERQAQGAQSTSDEKRPVGQKALYSTAMESIQGGAARGEAIESDDTMGGIPAVNGRGERLLLHIGIIDILQSYRFIKKLEHTWKALVHDGDTVSVHRPSFYAERFFKFMSNTVFRKNSSLKSSPSKKGRGGALLAVKPLGPTAAFSASQIPSEREEAQYDLRGARSYPTLEDEGRPDLLPCTPPSFEEATTASIATTLSSTSLSIPERSPSETSEQPRYRRRTQSSGQDGRPQEEPPAEEDLQQITVQVEPACSVEIVVPKEEDAGVEASPAGASAAVEVETASQASDEEGAPASQASDEEDAPATDIYFWRLWGPHAPTWPWRREGRAACLCPYPPHVVTPFPGTGLCASWSPDGTGGLGAMSCCVSVS

SEQ ID NO: 20065 - protein, 406 aa, Homo sapiens
MSGCPFLGNNFGYTFKKLPVEGSEEDKSQTGVNRASKGGLIYGNYLHLEKVLNAQELQSETKGNKIHDEHLFIITHQAYELWFKQILWELDSVREIFQNGHVRDERNMLKVVSRMHRVSVILKLLVQQFSILETMTALDFNDFREYLSPASGFQSLQFRLLENKIGVLQNMRVPYNRRHYRDNFKGEENELLLKSEQEKTLLELVEAWLERTPGLEPHGFNFWGKLEKNITRGLEEEFIRIQAKEESEEKEEQVAEFQKQKEVLLSLFDEKRHEHLLSKGERRLSYRALQGALMIYFYREEPRFQVPFQLLTSLMDIDSLMTKWRYNHVCMVHRMLGSKAGTGGSSGYHYLRSTVSDRYKVFVDLFNLSTYLIPRHWIPKMNPTIHKFLYTAEYCDSSYFSSDESD

SEQ ID NO: 20066 - protein, 316 aa, Homo sapiens
MKEAGVDHRQWRGPILSTCKQCPVVYPSPVCGSDGHTYSFQCKLEYQACVLGKQISVKCEGHCPCPSDKPTSTSRNVKRACSDLEFREVANRLRDWFKALHESGSQNKKTKTLLRPERSRFDTSILPICKDSLGWMFNRLDTNYDLLLDQSELRSIYLDKNEQCTKAFFNSCDTYKDSLISNNEWCYCFQRQQDPPCQTELSNIQKRQGVKKLLGQYIPLCDEDGYYKPTQCHGSVGQCWCVDRYGNEVMGSRINGVADCAIDFEISGDFASGDFHEWTDDEDDEDDIMNDEDEIEDDDEDEGDDDDGGDDHDVYI

SEQ ID NO: 20067 - protein, 947 aa, Homo sapiens
METQELRGALALLLLCFFTSASQDLQVIDLLTVGESRQMVAVAEKIRTALLTAGDIYLLSTFRLPPKQGGVLFGLYSRQDNTRWLEASVVGKINKVLVRYQREDGKVHAVNLQQAGLADGRTHTVLLRLRGPSRPSPALHLYVDCKLGDQHAGLPALAPIPPAEVDGLEIRTGQKAYLRMQGFVESMKIILGGSMARVGALSECPFQGDESIHSAGEQTKALVTQLTLFNQILVELRDDIRDQVKEMSLIRNTIMECQVCGFHEQRSHCSPNPCFRGVDCMEVYEYPGYRCGPCPPGLQGNGTHCSDINECAHADPCFPGSSCINTMPGFHCEACPRGYKGTQVSGVGIDYARASKQVCNDIDECNDGNNGGCDPNSICTNTVGSFKCGPCRLGFLGNQSQGCLPARTCHSPAHSPCHIHAHCLFERNGAVSCQCNVGWAGNGNVCGTDTDIDGYPDQALPCMDNNKHCKQDNCLLTPNSGQEDADNDGVGDQCDDDADGDGIKNVEDNCRLFPNKDQQNSDTDSFGDACDNCPNVPNNDQKDTDGNGEGDACDNDVDGDGIPNGLDNCPKVPNPLQTDRDEDGVGDACDSCPEMSNPTQTDADSDLVGDVCDTNEDSDGDGHQDTKDNCPQLPNSSQLDSDNDGLGDECDGDDDNDGIPDYVPPGPDNCRLVPNPNQKDSDGNGVGDVCEDDFDNDAVVDPLDVCPESAEVTLTDFRAYQTVVLDPEGDAQIDPNWVVLNQGMEIVQTMNSDPGLAVGYTAFNGVDFEGTFHVNTVTDDDYAGFLFSYQDSGRFYVVMWKQTEQTYWQATPFRAVAQPGLQLKAVTSVSGPGEHLRNALWHTGHTPDQVRLLWTDPRNVGWRDKTSYRWQLLHRPQVGYIRVKLYEGPQLVADSGVIIDTSMRGGRLGVFCFSQENIIWSNLQYRCNDTVPEDFEPFRRQLLQGRV

SEQ ID NO: 20068 - protein, 1114 aa, Homo sapiens
MQLSFTQLTIDYYPYHKAGDSCNHWMYFSDATKTKNGWANELLHEFECNVEMLKQAVKDHNVGSPPKSPTHASPQHTQTEKDYPLKGTCRTPSVLSQQSKAKLMSSSVVVRLADFNIYQVSTAEQCRSSPKSMICCNKKSLYLPQEMSAVYIEFTEYYYPDGKDFPIPSPNLYSQLNALQFTVDERSILWLNQFLLDLKQSLNQFMAVYKLNDNSKSDEHVDVRVDGLMLKFVIPSEVKSECHQDQPRAISIQSSEMIATNTRHCPNCRHSDLEALFQDFKDCDFFSKTYTSFPKSCDNFNLLHPIFQRHAHEQDTKMHEIYKGNITPQLNKNTLKTSAATDVWAVYFSQFWIDYEGMKSGKGRPISFVDSFPLSIWICQPTRYAESQKEPQTCNQVSLNTSQSESSDLAGRLKRKKLLKEYYSTESEPLTNGGQKPSSSDTFFRFSPSSSEADIHLLVHVHKHVSMQINHYQYLLLLFLHESLILLSENLRKDVEAVTGSPASQTSICIGILLRSAELALLLHPVDQANTLKSPVSESVSPVVPDYLPTENGDFLSSKRKQISRDINRIRSVTVNHMSDNRSMSVDLSHIPLKDPLLFKSASDTNLQKGISFMDYLSDKHLGKISEDESSGLVYKSGSGEIGSETSDKKDSFYTDSSSILNYREDSNILSFDSDGNQNILSSTLTSKGNETIESIFKAEDLLPEAASLSENLDISKEETPPVRTLKSQSSLSGKPKERCPPNLAPLCVSYKNMKRSSSQMSLDTISLDSMILEEQLLESDGSDSHMFLEKGNKKNSTTNYRGTAESVNAGANLQNYGETSPDAISTNSEGAQENHDDLMSVVVFKITGVNGEIDIRGEDTEICLQVNQVTPDQLGNISLRHYLCNRPVGSDQKAVIHSKSSPEISLRFESGPGAVIHSLLAEKNGFLQCHIENFSTEFLTSSLMNIQHFLEDETVATVMPMKIQVSNTKINLKDDSPRSSTVSLEPAPVTVHIDHLVVERSDDGSFHIRDSHMLNTGNDLKENVKSDSVLLTSGKYDLKKQRSVTQATQTSPGVPWPSQSANFPEFSFDFTREQLMEENESLKQELAKAKMALAEAHLEKDALLHHIKKMTVE

SEQ ID NO: 20069 - protein, 962 aa, Homo sapiens
MNFLRGVMGGQSAGPQHTEAETIQKLCDRVASSTLLDDRRNAVRALKSLSKKYRLEVGIQAMEHLIHVLQTDRSDSEIIGYALDTLYNIISNEEEEEVEENSTRQSEDLGSQFTEIFIKQQENVTLLLSLLEEFDFHVRWPGVKLLTSLLKQLGPQVQQIILVSPMGVSRLMDLLADSREVIRNDGVLLLQALTRSNGAIQKIVAFENAFERLLDIISEEGNSDGGIVVEDCLILLQNLLKNNNSNQNFFKEGSYIQRMKPWFEVGDENSGWSAQKVTNLHLMLQLVRVLVSPTNPPGATSSCQKAMFQCGLLQQLCTILMATGVPADILTETINTVSEVIRGCQVNQDYFASVNAPSNPPRPAIVVLLMSMVNERQPFVLRCAVLYCFQCFLYKNQKGQGEIVSTLLPSTIDATGNSVSAGQLLCGGLFSTDSLSNWCAAVALAHALQENATQKEQLLRVQLATSIGNPPVSLLQQCTNILSQGSKIQTRVGLLMLLCTWLSNCPIAVTHFLHNSANVPFLTGQIAENLGEEEQLVQGLCALLLGISIYFNDNSLESYMKEKLKQLIEKRIGKENFIEKLGFISKHELYSRASQKPQPNFPSPEYMIFDHEFTKLVKELEGVITKAIYKSSEEDKKEEEVKKTLEQHDNIVTHYKNMIREQDLQLEELRQQVSTLKCQNEQLQTAVTQQVSQIQQHKDQYNLLKIQLGKDNQHQGSYSEGAQMNGIQPEEIGRLREEIEELKRNQELLQSQLTEKDSMIENMKSSQTSGTNEQSSAIVSARDSEQVAELKQELATLKSQLNSQSVEITKLQTEKQELLQKTEAFAKSVEVQGETETIIATKTTDVEGRLSALLQETKELKNEIKALSEERTAIKEQLDSSNSTIAILQTEKDKLELEITDSKKEQDDLLVLLADQDQKILSLKNKLKDLGHPVEEEDELESGDQEDEDDESEDPGKDLDHI

SEQ ID NO: 20070 - protein, 758 aa, Homo sapiens
MVPGKEFQHYTCTMSLKPRVVDFDETWNKLLTTIKAVVMLEYVERATWNDRFSDIYALCVAYPEPLGERLYTETKIFLENHVRHLHKRVLESEEQVLVMYHRYWEEYSKGADYMDCLYRYLNTQFIKKNKLTEADLQYGYGGVDMNEPLMEIGELALDMWRKLMVEPLQAILIRMLLREIKNDRGGEDPNQKVIHGVINSFVHVEQYKKKFPLKFYQEIFESPFLTETGEYYKQEASNLLQESNCSQYMEKVLGRLKDEEIRCRKYLHPSSYTKVIHECQQRMVADHLQFLHAECHNIIRQEKKNDMANMYVLLRAVSTGLPHMIQELQNHIHDEGLRATSNLTQENMPTLFVESVLEVHGKFVQLINTVLNGDQHFMSALDKALTSVVNYREPKSVCKAPELLAKYCDNLLKKSAKGMTENEVEDRLTSFITVFKYIDDKDVFQKFYARMLAKRLIHGLSMSMDSEEAMINKLKQACGYEFTSKLHRMYTDMSVSADLNNKFNNFIKNQDTVIDLGISFQIYVLQAGAWPLTQAPSSTFAIPQELEKSVQMFELFYSQHFSGRKLTWLHYLCTGEVKMNYLGKPYVAMVTTYQMAVLLAFNNSETVSYKELQDSTQMNEKELTKTIKSLLDVKMINHDSEKEDIDAESSFSLNMNFSSKRTKFKITTSMQKDTPQEMEQTRSAVDEDRKMYLQAAIVRIMKARKVLRHNALIQEVISQSRARFNPSISMIKKCIEVLIDKQYIERSQASADEYSYVA

SEQ ID NO: 20071 - protein, 851 aa, Homo sapiens
MTLHATRGAALLSWVNSLHVADPVEAVLQLQDCSIFIKIIDRIHGTEEGQQILKQPVSERLDFVCSFLQKNRKHPSSPECLVSAQKVLEGSELELAKMTMLLLYHSTMSSKSPRDWEQFEYKIQAELAVILKFVLDHEDGLNLNEDLENFLQKAPVPSTCSSTFPEELSPPSHQAKREIRFLELQKVASSSSGNNFLSGSPASPMGDILQTPQFQMRRLKKQLADERSNRDELELELAENRKLLTEKDAQIAMMQQRIDRLALLNEKQAASPLEPKELEELRDKNESLTMRLHETLKQCQDLKTEKSQMDRKINQLSEENGDLSFKLREFASHLQQLQDALNELTEEHSKATQEWLEKQAQLEKELSAALQDKKCLEEKNEILQGKLSQLEEHLSQLQDNPPQEKGEVLGDVLQLETLKQEAATLAANNTQLQARVEMLETERGQQEAKLLAERGHFEEEKQQLSSLITDLQSSISNLSQAKEELEQASQAHGARLTAQVASLTSELTTLNATIQQQDQELAGLKQQAKEKQAQLAQTLQQQEQASQGLRHQVEQLSSSLKQKEQQLKEVAEKQEATRQDHAQQLATAAEEREASLRERDAALKQLEALEKEKAAKLEILQQQLQVANEARDSAQTSVTQAQREKAELSRKVEELQACVETARQEQHEAQAQVAELELQLRSEQQKATEKERVAQEKDQLQEQLQALKESLKVTKGSLEEEKRRAADALEEQQRCISELKAETRSLVEQHKRERKELEEERAGRKGLEARLQQLGEAHQAETEVLRRELAEAMAAQHTAESECEQLVKEVAAWRERYEDSQQEEAQYGAMFQEQLMTLKEECEKARQELQE

SEQ ID NO: 20072 - protein, 401 aa, Homo sapiens
MVSGQLRFGVKTEDHKLVFLQQGPLLLVAMSRTSQSAAQLRGELLAVHAQIVSTLTRASVARIFAHKQNYDLRRLLAGSERTLDRLLDSMEQDPGALLLGAVRCVPLARPLRDALGALLRRCTAPGLALSVLAVGGRLITAAQERNVLAECRLDPADLQLLLDWVGAPAFAAGEAWAPVCLPRFNPDGFFYAYVARLDAMPVCLLLLGTQREAFHAMAACRRLVEDGMHALGAMRALGEAASFSNASSASAPAYSVQAVGAPGLRHFLYKPLDIPDHHRQLPQFTSPELEAPYSREEERQRLSDLYHRLHARLHSTSRPLRLIYHVAEKETLLAWVTSKFELYTCLSPLVTKAGAILVVTKLLRWVKKEEDRLFIRYPPKYSTPPATSTDQAAHNGLFTGL

SEQ ID NO: 20073 - protein, 1309 aa, Homo sapiens
MGTHHHAQLIFVFLVEMRFHHVDQAGLELLTSSNSPASASRSAEITVVSQHAQPGFLYQWLEADRHGKSQGAANTTSGENFDQSPLRRTFKSKVLAHYPQNIEWNPFDQDAVNMLCMPKGLSFRTQTDNKDPQFHSFIITREDGSRTYGFVLTFYEEVTSKQICTAMQTLYQMHNAEHYSSVYASSSCSMDSLASSLDEGDTTSLLKLQRYNSYDISRDTLYVSKSICLITPLPFMQACKKFLIQLYKAVTSQQPPPLPLESYIHNILYEVPLPPPGRSLKFYGVYEPVICQRPGPSELPLSDYPLREAFELLGLENLVQVFTCVLLEMQILLYSQDYQRLMTVAEGITTLLFPFQWQHVYVPILPASLLHFLDAPVPYLMGLQSKEGTDRSKLELPQEANLCFVDIDNHFIELPEEFPQFPNKVDFIQELSEVLVQFGIPPEGSLHCSESTSKLKNMVLKDLVNDKKNGNVCTNNISMYELLKGNETIARLQALAKRTGVAVEKMDLSASLGEKDKDLKLHCEEAELRDYQLNVQLREVFANRFTQMFADYEAFVIQTAQDMESWLTNREQMQNFDKASFLSDQPEPYLPFLSRFIETQMFATFIDNKIMSQWEEKDPLLRVFDTRIDKIRLYNVRAPTLRTSIYQKCSTLKEAAQSIEQRLMKMDHTAIHPHLLDMKIGQGKYEQGFFPKLQSDVLATGPTSNNRWVSRSATAQRRKERLRQHSEHVGLDNDLREKYMQEARSLGKNLRQPKLSDLSPAVIAQTNCKFVEGLLKECRMKTKRMLVEKMGHEAVELGHGEANITGLEENTLIASLCDLLERIWSHGLQVKQGKSALWSHLIQFQDREEKQEHLAESPVALGPERRKSDSGVMLPTLRVSLIQDMRHIQNMSEIKTDVGRARAWIRLSLEKKLLSQHLKQLLSNQPLTKKLYKRYAFLRCEEEREQFLYHLLSLNAVDYFCFTSVFTTIMIPYRSVIIPIKKLSNAIITSNPWICVSGELGDTGVMQIPKNLLEMTFECQNLGKLTTVQIGHDNSGLLAKWLVDCVMVRNEITGHTYRFPCGRWLGKGIDDGSLERILIGELMTSASDEDLVKQCRTPPQQKSPTTARRLSITSLTGKNNKPNAGQIQEGIGEAVNNIVKHFHKPEKERGSLTVLLCGENGLVAALEQVFHHGFKSARIFHKNVFIWDFIEKVVAYFETTDQILDNEDDVLIQKSSCKTFCHYVNAINTAPRNIGKDGKFQILVCLGTRDRLLPQWIPLLAECPAITRMYEESALLRDRMTVNSLIRILQTIQDFTIVLEGSLIKGVDV

SEQ ID NO: 20074 - protein, 1057 aa, Homo sapiens
MADGPRCKRRKQANPRRNNGKEGQEILGPEAQADEAGCTVKDDECESDAENEQNHDPNVEEFLQQQDTAVIFPEAPEEDQRQGTPEASGHDENGTPDAFSQLLTCPYCDRGYKRFTSLKEHIKYRHEKNEDNFSCSLCSYTFAYRTQLERHMTSHKSGRDQRHVTQSGCNRKFKCTECGKAFKYKHHLKEHLRIHSGEKPYECPNCKKRFSHSGSYSSHISSKKCISLIPVNGRPRTGLKTSQCSSPSLSASPGSPTRPQIRQKIENKPLQEQLSVNQIKTEPVDYEFKPIVVASGINCSTPLQNGVFTGGGPLQATSSPQGMVQAVVLPTVGLVSPISINLSDIQNVLKVAVDGNVIRQVLENNQANLASKEQETINASPIQQGGHSVISAISLPLVDQDGTTKIIINYSLEQPSQLQVVPQNLKKENPVATNSCKSEKLPEDLTVKSEKDKSFEGGVNDSTCLLCDDCPGDINALPELKHYDLKQPTQPPPLPAAEAEKPESSVSSATGDGNLSPSQPPLKNLLSLLKAYYALNAQPSAEELSKIADSVNLPLDVVKKWFEKMQAGQISVQSSEPSSPEPGKVNIPAKNNDQPQSANANEPQDSTVNLQSPLKMTNSPVLPVGSTTNGSRSSTPSPSPLNLSSSRNTQGYLYTAEGAQEEPQVEPLDLSLPKQQGELLERSTITSVYQNSVYSVQEEPLNLSCAKKEPQKDSCVTDSEPVVNVIPPSANPINIAIPTVTAQLPTIVAIADQNSVPCLRALAANKQTILIPQVAYTYSTTVSPAVQEPPLKVIQPNGNQDERQDTSSEGVSNVEDQNDSDSTPPKKKMRKTENGMYACDLCDKIFQKSSSLLRHKYEHTGKRPHECGICKKAFKHKHHLIEHMRLHSGEKPYQCDKCGKRFSHSGSYSQHMNHRYSYCKREAEERDSTEQEEAGPEILSNEHVGARASPSQGDSDERESLTREEDEDSEKEEEEEDKEMEELQEEKECEKPQGDEEEEEEEEEVEEEEVEEAENEGEEAKTEGLMKDDRAESQASSLGQKVGESSEQVSEEKTNEA

SEQ ID NO: 20075 - protein, 1160 aa, Homo sapiens
MVVTLGPGPDCLILEASRQPQLVPKPERMASDGASALPGPDMSMKPSAAPSPSPALPFLPPTSDPPDHPPREPPPQPIMPSVFSPDNPLMLSAFPSSLLVTGDGGPCLSGAGAGKVIVKVKTEGGSAEPSQTQNFILTQTALNSTAPGTPCGGLEGPAPPFVTASNVKTILPSKAVGVSQEGPPGLPPQPPPPVAQLVPIVPLEKAWPGPHGTTGEGGPVATLSKPSLGDRSKISKDVYENFRQWQRYKALARRHLSQSPDTEALSCFLIPVLRSLARLKPTMTLEEGLPLAVQEWEHTSNFDRMIFYEMAERFMEFEAEEMQIQNTQLMNGSQGLSPATPLKLDPLGPLASEVCQQPVYIPKKAASKTRAPRRRQRKAQRPPAPEAPKEIPPEAVKEYVDIMEWLVGTHLATGESDGKQEEEGQQQEEEGMYPDPGLLSYINELCSQKVFVSKVEAVIHPQFLADLLSPEKQRDPLALIEELEQEEGLTLAQLVQKRLMALEEEEDAEAPPSFSGAQLDSSPSGSVEDEDGDGRLRPSPGLQGAGGAACLGKVSSSGKRAREVHGGQEQALDSPRGMHRDGNTLPSPSSWDLQPELAAPQGTPGPLGVERRGSGKVINQVSLHQDGHLGGAGPPGHCLVADRTSEALPLCWQGGFQPESTPSLDAGLAELAPLQGQGLEKQVLGLQKGQQTGGRGVLPQGKEPLAVPWEGSSGAMWGDDRGTPMAQSYDQNPSPRAAGERDDVCLSPGVWLSSEMDAVGLELPVQIEEVIESFQVEKCVTEYQEGCQGLGSRGNISLGPGETLVPGDTESSVIPCGGTVAAAALEKRNYCSLPGPLRANSPPLRSKENQEQSCETVGHPSDLWAEGCFPLLESGDSTLGSSKETLPPTCQGNLLIMGTEDASSLPEASQEAGSRGNSFSPLLETIEPVNILDVKDDCGLQLRVSEDTCPLNVHSYDPQGEGRVDPDLSKPKNLAPLQESQESYTTGTPKATSSHQGLGSTLPRRGTRNAIVPRETSVSKTHRSADRAKGKEKKKKEAEEEDEELSNFAYLLASKLSLSPREHPLSPHHASGGQGSQRASHLLPAGAKGPSKLPYPVAKSGKRALAGGPAPTEKTPHSGAQLGVPREKPLALGVVRPSQPRKRRCDSFVTGRRKKRRRSQ

SEQ ID NO: 20076 - protein, 537 aa, Homo sapiens
MPEYLRKRFGGQRIQVYLSLLSLLLYIFTKISADIFSGAIFINLALGLNLYLAIFLLLAITALYTITGGLAAVIYTDTLQTVIMLVGSLILTGFAFHEVGGYDAFMEKYMKAIPTIVSDGNTTFQEKCYTPRADSFHIFRDPLTGDLPWPGFIFGMSILTLWYWCTDQVIVQRCLSAKNMSHVKGGCILCGYLKLMPMFIMVMPGMISRILYTEKIACVVPSECEKYCGTKVGCTNIAYPTLVVELMPNGLRGLMLSVMLASLMSSLTSIFNSASTLFTMDIYAKVRKRASEKELMIAGRLFILVLIGISIAWVPIVQSAQSGQLFDYIQSITSYLGPPIAAVFLLAIFWKRVNEPGAFWGLILGLLIGISRMITEFAYGTGSCMEPSNCPTIICGVHYLYFAIILFAISFITIVVISLLTKPIPDVHLYRLCWSLRNSKEERIDLDAEEENIQEGPKETIEIETQVPEKKKGIFRRAYDLFCGLEQHGAPKMTEEEEKAMKMKMTDTSEKPLWRTVLNVNGIILVTVAVFCHAYFA

SEQ ID NO: 20077 - protein, 950 aa, Homo sapiens
MESAGGFKLGMEPLSGGGVCEKKKLLKMTSRRLEESMGAVQMGLVNMFKGFQSKVLPPLSPKVVTEEEVNRMLTPSEFLKEMSLTTEQRLAKTRLMCRPQIIELLDMGETTHQKFSGIDLDQALFQPFPSEIIFQNYTPCEVYEVPLILRNNDKIPRLVKVVEESSPYFKVISPKDIGHKVAPGVPSIFRILFTPEENKDYAHTLTCVTEREKFIVPIKARGARAILDFPDKLNFSTCPVKYSTQKILLVRNIGNKNAVFHIKTCRPFSIEPAIGTLNVGESMQLEVEFEPQSVGDHSGRLIVCYDTGEKVFVSLYGAAIDMNIRLDKNSLTIEKTYISLANQRTITIHNRSNIIAHFLWKVFATQQEEDREKYRACDDLIKEEKDETDEFFEECITDPLLREHLSVLSRTFANQRRLVQGDSKLFFNNVFTVEPLEGDVWPNSSAEITVYFNPLEAKLYQQTIYCDILGREIRLPLRIKGEGMGPKIHFNFELLDIGKVFTGSAHCYEAILYNKGSIDALFNMTPPTSALGACFVFSPKEGIIEPSGVQAIQISFSSTILGNFEEEFLVNVNGSPEPVKLTIRGCVIGPTFHFNVPALHFGDVSFGFPHTLICSLNNTSLIPMTYKLRIPGDGLGHKSISYCEQHVDYKRPSWTKEEISSMKPKEFTISPDCGTIRPQGFAAIRVTLCSNTVQKYELALVVDVEGIGEEVLALLITARCVVPALHLVNTEVDFGHCFLKYPYEKTLQLANQDDLPGFYEVQPQVCEEVPTVLFSSPTPSGVISPSSTIHIPLVLETQVTGEHRSTVYISIFGSQDPPLVCHLKSAGEGPVIYVHPNQVDFGNIYVLKDSSRILNLCNQSFIPAFFQAHMAHKKSLWTIEPNEGMVPPETDVQLALTANLNDTLTFKDCVILDIENSSTYRIPVQASGTGSTIVSDKPFAPELNLGAHFR

SEQ ID NO: 20078 - protein, 607 aa, Homo sapiens
MPQLNGGGGDDLGANDELISFKDEGEQEEKSSENSSAERDLADVKSSLVNESETNQNSSSDSEAERRPPPRSESFRDKSRESLEEAAKRQDGGLFKGPPYPGYPFIMIPDLTSPYLPNGSLSPTARTLHFQSGSTHYSAYKTIEHQIAVQYLQMKWPLLDVQAGSLQSRQALKDARSPSPAHIVSNKVPVVQHPHHVHPLTPLITYSNEHFTPGNPPPHLPADVDPKTGIPRPPHPPDISPYYPLSPGTVGQIPHPLGWLVPQQGQPVYPITTGGFRHPYPTALTVNASMSSFLSSRFPPHMVPPHHTLHTTGIPHPAIVTPTVKQESSQSDVGSLHSSKHQDSKKEEEKKKPHIKKPLNAFMLYMKEMRAKVVAECTLKESAAINQILGRRWHALSREEQAKYYELARKERQLHMQLYPGWSARDNYGKKKKRKRDKQPGETNDANTPKKCRALFGLDRQTLWCKPCRRKKKCVRYIQGEGSCLSPPSSDGSLLDSPPPSPNLLGSPPRDAKSQTEQTQPLSLSLKPDPLAHLSMMPPPPALLLAEATHKASALCPNGALDLPPAALQPAAPSSSIAQPSTSSLHSHSSLAGTQPQPLSLVTKSLE

SEQ ID NO: 20079 - protein, 920 aa, Homo sapiens
MHEATSAETKRSKRKRCEVWGENPNPNDWRRVDGWPVGLKNVGNTCWFSAVIQSLFQLPEFRRLVLSYSLPQNVLENCRSHTEKRNIMFMQELQYLFALMMGSNRKFVDPSAALDLLKGAFRSSEEQQQDVSEFTHKLLDWLEDAFQLAVNVNSPRNKSENPMVQLFYGTFLTEGVREGKPFCNNETFGQYPLQVNGYRNLDECLEGAMVEGDVELLPSDHSVKYGQERWFTKLPPVLTFELSRFEFNQSLGQPEKIHNKLEFPQIIYMDRYMYRSKELIRNKRECIRKLKEEIKILQQKLERYVKYGSGPARFPLPDMLKYVIEFASTKPASESCPPESDTHMTLPLSSVHCSVSDQTSKESTSTESSSQDVESTFSSPEDSLPKSKPLTSSRSSMEMPSQPAPRTVTDEEINFVKTCLQRWRSEIEQDIQDLKTCIASTTQTIEQMYCDPLLRQVPYRLHAVLVHEGQANAGHYWAYIYNQPRQSWLKYNDISVTESSWEEVERDSYGGLRNVSAYCLMYINDKLPYFNAEAAPTESDQMSEVEALSVELKHYIQEDNWRFEQEVEEWEEEQSCKIPQMESSTNSSSQDYSTSQEPSVASSHGVRCLSSEHAVIVKEQTAQAIANTARAYEKSGVEAALSEAFHEEYSRLYQLAKETPTSHSDPRLQHVLVYFFQNEAPKRVVERTLLEQFADKNLSYDERSISIMKVAQAKLKEIGPDDMNMEEYKKWHEDYSLFRKVSVYLLTGLELYQKGKYQEALSYLVYAYQSNAALLMKGPRRGVKESVIALYRRKCLLELNAKAASLFETNDDHSVTEGINVMNELIIPCIHLIINNDISKDDLDAIEVMRNHWCSYLGQDIAENLQLCLGEFLPRLLDPSAEIIVLKEPPTIRPNSPYDLCSRFAAVMESIQGVSTVTVK

SEQ ID NO: 20080 - protein, 617 aa, Homo sapiens
MSVPGTPGAMEPAGEEERPPPAAEGEDDEEEVAAAAQTSGPAHGRSASSLEDADDQEEEMEAMVIGGGCCKEQELTYELQQGYRILGEFLQEKHRGLTAPFLQPLGGVATAEEEVAEGPRSGGRGGRAFPQQPGQGMCLLQMEEKFASGQYGGITEFVADFRLMLETCYRLHGVDHWISKQGQKLEMMLEQKLALLSRLREQERKEAEEASQKEIEEWERKLLAQAAPTCMETMWEIPAIGHFLCLAQQILNLPEIVFYELERCLLMPQCNAFLSKIMTSLLSPPHRRPTLHRRPTLPYRTWEAALRQKVQQWYTAVGQTENPDNCAEKLGLCPQFFKVLGEVNPLEEKPFHELPFYQKVWLLKGLCDFVYETQKEVQDAVLGQPIHECREVILGYDYLENAYVHFPQFCGADVRIYKQRPFQAPEFPIPPIKIQRVPRIKLEKLKCDYVSTSNGEHRCSRDSLPSSFKKEQENNFDPACCPAKMILDNHDISVEMGVKSNYEIRIRRPCEIKKTDCCKENLEKPRSPGEVTGFGEPLSPGEIRFIENQEKYGEASRIKIEPSPLKENTLKSCQIHVNGSHSDHPEINCHKVVRDILLEQSLQSHKKLKLTKMRAKK

SEQ ID NO: 20081 - protein, 356 aa, Homo sapiens
MLPRWELALYLLASLGFHFYSFYEVYKVSREHEEELDQEFELETDTLFGGLKKDATDFEWSFWMEWGKQWLVWLLLGHMVVSQMATLLARKMQQQEHDSLKASLCVLALGLGRLLCWWWLAELMAHLMYMHAIYSSIPLLETVSCWTLGGLALAQVLFFYVKYLVLFGVPALLMRLDGLTPPALPRCVSTMFSFTGMWRYFDVGLHNFLIRYVYIPVGGSQHGLLGTLFSTAMTFAFVSYWHGGYDYLWCWAALNWLGVTVENGVRRLVETPCIQDSLARYFSPQARRRFHAALASCSTSMLILSNLVFLGGNEVGKTYWNRIFIQGWPWVTLSVLGFLYCYSHVGIAWAQTYATD

SEQ ID NO: 20082 - protein, 256 aa, Homo sapiens
MDWKLEGSTQKVESPVLQGQEGILEETGEDGLPEGFQLLQIDAEGECQEGEILATGSTAWCSKNVQRKQRHWEKIVAAKKSKRKQEKERRKANRAENPGICPQHSKRFLRALTKDKLLEAKHSGPRLCIDLSMTHYMSKKLDITEEDCFSLFPLETLVYLTPDSEHALEDVDLNKVYILGGLVDESIQKKVTFQKAREYSVKTARLPIQEYMVRNQNGKNYHSEILAINQETHNWPEALKKGVSSGKGYILRNSVE

SEQ ID NO: 20083 - protein, 347 aa, Homo sapiens
MRACISLVLAVLCGLAWADLYSAPTSCQGRCYEAFDKHHQCHCNARCQEFGNCCKDFESLCSDHEVSHSSDAITKEEIQSISEKIYRADTNKAQKEDIVLNSQNCISPSETRNQVDRCPKPLFTYVNEKLFSKPTYAAFINLLNNYQRATGHGEHFSAQELAEQDAFLREIMKTAVMKELYSFLHHQNRYGSEQEFVDDLKNMWFGLYSRGNEEGDSSGFEHVFSGEVKKGKVTGFHNWIRFYLEEKEGLVDYYSHIYDGPWDSYPDVLAMQFNWDGYYKEVGSAFIGSSPEFEFALYSLCFIARPGKVCQLSLGGYPLAVRTYTWDKSTYGNGKKYIATAYIVSST

SEQ ID NO: 20084 - protein, 1442 aa, Homo sapiens
MREAAAALVPPPAFAVTPAAAMEEPPPPPPPPPPPPEPETESEPECCLAARQEGTLGDSACKSPESDLEDFSDETNTENLYGTSPPSTPRQMKRMSTKHQRNNVGRPASRSNLKEKMNAPNQPPHKDTGKTVENVEEYSYKQEKKIRAALRTTERDRKKNVQCSFMLDSVGGSLPKKSIPDVDLNKPYLSLGCSNAKLPVSVPMPIARPARQTSRTDCPADRLKFFETLRLLLKLTSVSKKKDREQRGQENTSGFWLNRSNELIWLELQAWHAGRTINDQDFFLYTARQAIPDIINEILTFKVDYGSFAFVRDRAGFNGTSVEGQCKATPGTKIVGYSTHHEHLQRQRVSFEQVKRIMELLEYIEALYPSLQALQKDYEKYAAKDFQDRVQALCLWLNITKDLNQKLRIMGTVLGIKNLSDIGWPVFEIPSPRPSKGNEPEYEGDDTEGELKELESSTDESEEEQISDPRVPEIRQPIDNSFDIQSRDCISKKLERLESEDDSLGWGAPDWSTEAGFSRHCLTSIYRPFVDKALKQMGLRKLILRLHKLMDGSLQRARIALVKNDRPVEFSEFPDPMWGSDYVQLSRTPPSSEEKCSAVSWEELKAMDLPSFEPAFLVLCRVLLNVIHECLKLRLEQRPAGEPSLLSIKQLVRECKEVLKGGLLMKQYYQFMLQEVLEDLEKPDCNIDAFEEDLHKMLMVYFDYMRSWIQMLQQLPQASHSLKNLLEEEWNFTKEITHYIRGGEAQAGKLFCDIAGMLLKSTGSFLEFGLQESCAEFWTSADDSSASDEIRRSVIEISRALKELFHEARERASKALGFAKMLRKDLEIAAEFRLSAPVRDLLDVLKSKQYVKVQIPGLENLQMFVPDTLAEEKSIILQLLNAAAGKDCSKDSDDVLIDAYLLLTKHGDRARDSEDSWGTWEAQPVKVVPQVETVDTLRSMQVDNLLLVVMQSAHLTIQRKAFQQSIEGLMTLCQEQTSSQPVIAKALQQLKNDALELCNRISNAIDRVDHMFTSEFDAEVDESESVTLQQYYREAMIQGYNFGFEYHKEVVRLMSGEFRQKIGDKYISFARKWMNYVLTKCESGRGTRPRWATQGFDFLQAIEPAFISALPEDDFLSLQALMNECIGHVIGKPHSPVTGLYLAIHRNSPRPMKVPRCHSDPPNPHLIIPTPEGFSTRSMPSDARSHGSPAAAAAAAAAAVAASRPSPSGGDSVLPKSISSAHDTRGSSVPENDRLASIAAELQFRSLSRHSSPTEERDEPAYPRGDSSGSTRRSWELRTLISQSKDTASKLGPIEAIQKSVRLFEEKRYREMRRKNIIGQVCDTPKSYDNVMHVGLRKVTFKWQRGNKIGEGQYGKVYTCISVDTGELMAMKEIRFQPNDHKTIKETADELKIFEGIKHPNLVRYFGVELHRSTVTLPNSQEISMSYIISAFSLKLEEFLLK

SEQ ID NO: 20085 - protein, 577 aa, Homo sapiens
MRQDAPKPTPAACRCSGLARRVLTIAFALLILGLMTWAYAAGVPLASDRYGLLAFGLYGAFLSAHLVAQSLFAYLEHRRVAAAARGPLDAATARSVALTISAYQEDPAYLRQCLASARALLYPRARLRVLMVVDGNRAEDLYMVDMFREVFADEDPATYVWDGNYHQPWEPAAAGAVGAGAYREVEAEDPGRLAVEALVRTRRCVCVAQRWGGKREVMYTAFKALGDSVDYVQVCDSDTRLDPMALLELVRVLDEDPRVGAVGGDVRILNPLDSWVSFLSSLRYWVAFNVERACQSYFHCVSCISGPLGLYRNNLLQQFLEAWYNQKFLGTHCTFGDDRHLTNRMLSMGYATKYTSRSRCYSETPSSFLRWLSQQTRWSKSYFREWLYNALWWHRHHAWMTYEAVVSGLFPFFVAATVLRLFYAGRPWALLWVLLCVQGVALAKAAFAAWLRGCLRMVLLSLYAPLYMCGLLPAKFLALVTMNQSGWGTSGRRKLAANYVPLLPLALWALLLLGGLVRSVAHEARADWSGPSRAAEAYHLAAGAGAYVGYWVAMLTLYWVGVRRLCRRRTGGYRVQV

SEQ ID NO: 20086 - protein, 124 aa, Homo sapiens
MQDEERYMTLNVQSKKRSSAQTSQLTFKDYSVTLHWYKILLGISGTVNGILTLTLISLILLVSQGVLLKCQKGSCSNATQYEDTGDLKVNNGTRRNISNKDLCASRSADQTVPRPHFRLLYRKT

SEQ ID NO: 20087 - protein, 415 aa, Homo sapiens
MEMRWFLSKIQDDFRGGKINLEKTQRLLEKLDIRCSYIHVKQIFKTSDYPVVLSLENHCSTAQQEVMADNLQATFGESLLSDMLDDFPDTLPSPEALKFKILVKNKKIGTLKETHERKGSDKRGDNQDKETGVKKLPGVMLFKKKKTRKLKIALALSDLVIYTKAEKFKSFQHSRLYQQFNENNSIGETQARKLSKLRVHEFIFHTRKFITRIYPKATRADSSNFNPQEFWNIGCQMVALNFQTPGLPMDLQNGKFLDNGGSGYILKPHFLRESKSYFNPSNIKEGMPITLTIRLISGIQLPLTHSSSNKGDSLVIIEVFGVPNDQMKQQTRVIKKNAFSPRWNETFTFIIHVPELALIRFVVEGQGLIAGNEFLGQYTLPLLCMNKGYRRIPLFSRMGESLEPASLFVYVWYVR

SEQ ID NO: 20088 - protein, 1617 aa, Homo sapiens
MSTPDPPLGGTPRPGPSPGPGPSPGAMLGPSPGPSPGSAHSMMGPSPGPPSAGHPIPTQGPGGYPQDNMHQMHKPMESMHEKGMSDDPRYNQMKGMGMRSGGHAGMGPPPSPMDQHSQGYPSPLGGSEHASSPVPASGPSSGPQMSSGPGGAPLDGADPQALGQQNRGPTPFNQNQLHQLRAQIMAYKMLARGQPLPDHLQMAVQGKRPMPGMQQQMPTLPPPSVSATGPGPGPGPGPGPGPGPAPPNYSRPHGMGGPNMPPPGPSGVPPGMPGQPPGGPPKPWPEGPMANAAAPTSTPQKLIPPQPTGRPSPAPPAVPPAASPVMPPQTQSPGQPAQPAPMVPLHQKQSRITPIQKPRGLDPVEILQEREYRLQARIAHRIQELENLPGSLAGDLRTKATIELKALRLLNFQRQLRQEVVVCMRRDTALETALNAKAYKRSKRQSLREARITEKLEKQQKIEQERKRRQKHQEYLNSILQHAKDFKEYHRSVTGKIQKLTKAVATYHANTEREQKKENERIEKERMRRLMAEDEEGYRKLIDQKKDKRLAYLLQQTDEYVANLTELVRQHKAAQVAKEKKKKKKKKKAENAEGQTPAIGPDGEPLDETSQMSDLPVKVIHVESGKILTGTDAPKAGQLEAWLEMNPGYEVAPRSDSEESGSEEEEEEEEEEQPQAAQPPTLPVEEKKKIPDPDSDDVSEVDARHIIENAKQDVDDEYGVSQALARGLQSYYAVAHAVTERVDKQSALMVNGVLKQYQIKGLEWLVSLYNNNLNGILADEMGLGKTIQTIALITYLMEHKRINGPFLIIVPLSTLSNWAYEFDKWAPSVVKVSYKGSPAARRAFVPQLRSGKFNVLLTTYEYIIKDKHILAKIRWKYMIVDEGHRMKNHHCKLTQVLNTHYVAPRRLLLTGTPLQNKLPELWALLNFLLPTIFKSCSTFEQWFNAPFAMTGEKVDLNEEETILIIRRLHKVLRPFLLRRLKKEVEAQLPEKVEYVIKCDMSALQRVLYRHMQAKGVLLTDGSEKDKKGKGGTKTLMNTIMQLRKICNHPYMFQHIEESFSEHLGFTGGIVQGLDLYRASGKFELLDRILPKLRATNHKVLLFCQMTSLMTIMEDYFAYRGFKYLRLDGTTKAEDRGMLLKTFNEPGSEYFIFLLSTRAGGLGLNLQSADTVIIFDSDWNPHQDLQAQDRAHRIGQQNEVRVLRLCTVNSVEEKILAAAKYKLNVDQKVIQAGMFDQKSSSHERRAFLQAILEHEEQDEEEDEVPDDETVNQMIARHEEEFDLFMRMDLDRRREEARNPKRKPRLMEEDELPSWIIKDDAEVERLTCEEEEEKMFGRGSRHRKEVDYSDSLTEKQWLKTLKAIEEGTLEEIEEEVRQKKSSRKRKRDSDAGSSTPTTSTRSRDKDDESKKQKKRGRPPAEKLSPNPPNLTKKMKKIVDAVIKYKDSSSGRQLSEVFIQLPSRKELPEYYELIRKPVDFKKIKERIRNHKYRSLNDLEKDVMLLCQNAQTFNLEGSLIYEDSIVLQSVFTSVRQKIEKEDDSEGEESEEEEEGEEEGSESESRSVKVKIKLGRKEKAQDRLKGGRRRPSRGSRAKPVVSDDDSEEEQEEDRSGSGSEED

SEQ ID NO: 20089 - protein, 3013 aa, Homo sapiens
MASQQDSGFFEISIKYLLKSWSNTSPVGNGYIKPPVPPASGTHREKGPPTMLPINVDPDSKPGEYVLKSLFVNFTTQAERKIRIIMAEPLEKPLTKSLQRGEDPQFDQVISSMSSLSEYCLPSILRTLFDWYKRQNGIEDESHEYRPRTSNKSKSDEQQRDYLMERRDLAIDFIFSLVLIEVLKQIPLHPVIDSLIHDVINLAFKHFKYKEGYLGPNTGNMHIVADLYAEVIGVLAQAKFPAVKKKFMAELKELRHKEQNPYVVQSIISLIMGMKFFRIKMYPVEDFEASLQFMQECAHYFLEVKDKDIKHALAGLFVEILVPVAAAVKNEVNVPCLRNFVESLYDTTLELSSRKKHSLALYPLVTCLLCVSQKQLFLNRWHIFLNNCLSNLKNKDPKMARVALESLYRLLWVYMIRIKCESNTATQSRLITIITTLFPKGSRGVVPRDMPLNIFVKIIQFIAQERLDFAMKEIIFDFLCVGKPAKAFSLNPERMNIGLRAFLVIADSLQQKDGEPPMPVTGAVLPSGNTLRVKKTYLSKTLTEEEAKMIGMSLYYSQVRKAVDNILRHLDKEVGRCMMLTNVQMLNKEPEDMITGERKPKIDLFRTCVAAIPRLLPDGMSKLELIDLLARLSIHMDDELRHIAQNSLQGLLVDFSDWREDVLFGFTNFLLREVNDMHHTLLDSSLKLLLQLLTQWKLVIQTQGKVYEQANKIRNSELIANGSSHRIQSERGPHCSVLHAVEGFALVLLCSFQVATRKLSVLILKEIRALFIALGQPEDDDRPMIDVMDQLSSSILESFIHVAVSDSATLPLTHNVDLQWLVEWNAVLVNSHYDVKSPSHVWIFAQSVKDPWVLCLFSFLRQENLPKHCPTALSYAWPYAFTRLQSVMPLVDPNSPINAKKTSTAGSGDNYVTLWRNYLILCFGVAKPSIMSPGHLRASTPEIMATTPDGTVSYDNKAIGTPSVGVLLKQLVPLMRLESIEITESLVLGFGRTNSLVFRELVEELHPLMKEALERRPENKKRRERRDLLRLQLLRIFELLADAGVISDSTNGALERDTLALGALFLEYVDLTRMLLEAENDKEVEILKDIRAHFSAMVANLIQCVPVHHRRFLFPQQSLRHHLFILFSQWAGPFSIMFTPLDRYSDRNHQITRYQYCALKAMSAVLCCGPVFDNVGLSPDGYLYKWLDNILACQDLRVHQLGCEVVVLLLELNPDQINLFNWAIDRCYTGSYQLASGCFKAIATVCGSRNYPFDIVTLLNLVLFKASDTNREIYEISMQLMQILEAKLFVYSKKVAEQRPGSILYGTHGPLPPLYSVSLALLSCELARMYPELTLPLFSEVSQRFPTTHPNGRQIMLTYLLPWLHNIELVDSRLLLPGSSPSSPEDEVKDREGDVTASHGLRGNGWGSPEATSLVLNNLMYMTAKYGDEVPGPEMENAWNALANNEKWSNNLRITLQFLISLCGVSSDTVLLPYIKKVAIYLCRNNTIQTMEELLFELQQTEPVNPIVQHCDNPPFYRFTASSKASAAASGTTSSSNTVVAGQENFPDAEENKILKESDERFSNVIRAHTRLESRYSNSSGGSYDEDKNDPISPYTGWLLTITETKQPQPLPMPCTGGCWAPLVDYLPETITPRGPLHRCNIAVIFMTEMVVDHSVREDWALHLPLLLHAVFLGLDHYRPEVFEHSKKLLLHLLIALSCNSNFHSIASVLLQTREMGEAKTLTVQPAYQPEYLYTGGFDFLREDQSSPVPDSGLSSSSTSSSISLGGSSGNLPQMTQEVEDVDTAAETDEKANKLIEFLTTRAFGPLWCHEDITPKNQNSKSAEQLTNFLRHVVSVFKDSKSGFHLEHQLSEVALQTALASSSRHYAGRSFQIFRALKQPLSAHALSDLLSRLVEVIGEHGDEIQGYVMEALLTLEAAVDNLSDCLKNSDLLTVLSRSSSPDLSSSSKLTASRKSTGQLNMNPGTTSGNTATAERSRHQRSFSVPKKFGVIDRSSDPPRSATLDRIQACTQQGLSSKTRSSSSLKDSLTDPSHINHPTNLLATIFWVTVALMESDFEFEYLMALRLLSRLLAHMPLDKAENREKLEKLQAQLKWADFSGLQQLLLKGFTSLTTTDLTLQLFSLLTPVSKISMVDASHAIGFPLNVLCLLPQLIQHFENPNQFCKDIAERIAQVCLEEKNPKLSNLAHVMTLYKTHSYTRDCATWVNVVCRYLHEAYADITLNMVTYLAELLEKGLPSVQQPLLQVIYSLLSYMDLSVVPVKQFNVEVLKTIEKYVQSVHWREALNILKLVVSRSASLVLPSYQHSDLSKIEIHRVWTSASKELPGKTLDFHFDISETPIIGRRYDELQNSSGRDGKPRAMAVTRSTSSTSSGSNSNVLVPVSWKRPQYSQKRTKEKLVHVLSLCGQEVGLSKNPSVIFSSCGDLDLLEHQTSLVSSEDGAREQENMDDTNSEQQFRVFRDFDFLDVELEDGEGESMDNFNWGVRRRSLDSLDKCDMQILEERQLSGSTPSLNKMHHEDSDESSEEEDLTASQILEHSDLIMTLSPSEETNPMELLTTACDSTPAEPHSFNTRMSSFDASLPDMNNLQISEGSKAEAVREEEDTTVHEDDLSSSINELPAAFECSDSFSLDMTEGEEKGNRALDQFTLASFGEGDRGVSPPPSPFFSAILAAFQPAACDDAEEAWRSHINQLMCDSDGSCAVYTFHVFSSLFKNIQKRFCFLTCDAASYLGDNLRGIGSKFVSSSQMLTSCSECPTLFVDAETLLSCGLLDKLKFSVLELQEYLDTYNNRKEATLSWLANCKATFAGGSRDGVITCQPGDSEEKQLELCQRLYKLHFQLLLLFQSYCKLIGQVHEVSSMPELLNMSRELSDLKKHLKEASAVIAADPLYSDGAWSEPTFTSTEAAIQSMLECLKNNELGKALRQIRECRSLWPNDIFGSSSDDEVQTLLNIYFRHQTLGQTGTYALVGSNQSLTEICTKLMELNMEIRDMIRRAQSYRVLTTFLPDSSVSGTSL

SEQ ID NO: 20090 - protein, 388 aa, Homo sapiens
MFLQPIAKGIISSNGKRWKEIRRFSLTTLRNFGMGKRSIEDRVQEEAHCLVEELRKTKASPCDPTFILGCAPCNVICSVVFQKRFDYKDQNFLTLMKRFNENFRILNSPWIQVCNNFPLLIDCFPGTHNKVLKNVALTRSYIREKVKEHQASLDVNNPRDFIDCFLIKMEQEKDNQKSEFNIENLVGTVADLFVAGTETTSTTLRYGLLLLLKHPEVTAKVQEEIDHVIGRHRSPCMQDRSHMPYTDAVVHEIQRYSDLVPTGVPHAVTTDTKFRNYLIPKGTTIMALLTSVLHDDKEFPNPNIFDPGHFLDKNGNFKKSDYFMPFSAGKRICAGEGLARMELFLFLTTILQNFNLKSVDDLKNLNTTAVTKGIVSLPPSYQICFIPV

SEQ ID NO: 20091 - protein, 475 aa, Homo sapiens
METQLQSIFEEVVKTEVIEEAFPGMFMDTPEDEKTKLISCLGAFRQFWGGLSQESHEQCIQWIVKFIHGQHSPKRISFLYDCLAMAVETGLLPPRLVCESLINSDTLEWERTQLWALTFKLVRKIIGGVDYKGVRDLLKVILEKILTIPNTVSSAVVQQLLAAREVIAYILERNACLLPAYFAVTEIRKLYPEGKLPHWLLGNLVSDFVDTFRPTARINSICGRCSLLPVVNNSGAICNSWKLDPATLRFPLKGLLPYDKDLFEPQTALLRYVLEQPYSRDMVCNMLGLNKQHKQRCPVLEDQLVDLVVYAMERSETEEKFDDGGTSQLLWQHLSSQLIFFVLFQFASFPHMVLSLHQKLAGRGLIKGRDHLMWVLLQFISGSIQKNALADFLPVMKLFDLLYPEKEYIPVPDINKPQSTHAFAMTCIWIHLNRKAQNDNSKLQIPIPHSLRLHHESAFANCFQITCMGDLTHTP

SEQ ID NO: 20092 - protein, 472 aa, Homo sapiens
MAGGEAGVTLGQPHLSRQDLTTLDVTKLTPLSHEVISRQATINIGTIGHVAHGKSTVVKAISGVHTVRFKNELERNITIKLGYANAKIYQLDDPSCPRPECYRSCGSSMPDEFPTDIPGTKGNFRLVRHVSFVDCPGHDILMATMLNGAAVMDAALLLIAGNESCPQPQTSEHLAAIEIMKLKHILILQNKIDLVKERQAKEQYEQILAFVQGTVAEGAPIIPISAQLKYNIEVVCEYIVKKIPVPPRDFTSEPRLIVIRSFDVNKPGCEVDDLKGGVAGGSILKGVLKVGQETEVRPGIVSKDSEGKLMCKSIFSKIVSLFAEHNDLQYAAPGGLIGVGTKIDPTLCRADRMVGQILGAVGALPEIFTELEISYFLLRRLLGVRTEGDKKAAKVQKLSKNEVLMVNIGSLSTGGRVSAVKADLGKIVLTNPVCTEVGEKIALSRRVEKHWRLIGWGQIRRGVTIKPTVDDD

SEQ ID NO: 20093 - protein, 570 aa, Homo sapiens
MAKTPSDHLLSTLEELVPYDFEKFKFKLQNTSVQKEHSRIPRSQIQRARPVKMATLLVTYYGEEYAVQLTLQVLRAINQRLLAEELHRAAIQGRPPDTAASPRCHAQEGDPVDGTCVRDSCSFPEAVSGHPQASGSRSPGCPRCQDSHERKSPGSLSPQPLPQCKRHLKQVQLLFCEDHDEPICLICSLSQEHQGHRVRPIEEVALEHKKKIQKQLEHLKKLRKSGEEQRSYGEEKAVSFLKQTEALKQRVQRKLEQVYYFLEQQEHFFVASLEDVGQMVGQIRKAYDTRVSQDIALLDALIGELEAKECQSEWELLQDIGDILHRAKTVPVPEKWTTPQEIKQKIQLLHQKSEFVEKSTKYFSETLRSEMEMFNVPELIGAQAHAVNVILDAETAYPNLIFSDDLKSVRLGNKWERLPDGPQRFDSCIIVLGSPSFLSGRRYWEVEVGDKTAWILGACKTSISRKGNMTLSPENGYWVVIMMKENEYQASSVPPTRLLIKEPPKRVGIFVDYRVGSISFYNVTARSHIYTFASCSFSGPLQPIFSPGTRDGGKNTAPLTICPVGGQGPD

SEQ ID NO: 20094 - protein, 1477 aa, Homo sapiens
LDQPRAIALDPSSGFMYWTDWGEVPKIERAGMDGSSRFIIINSEIYWPNGLTLDYEEQKLYWADAKLNFIHKSNLDGTNRQAVVKGSLPHPFALTLFEDILYWTDWSTHSILACNKYTGEGLREIHSDIFSPMDIHAFSQQRQPNATNPCGIDNGGCSHLCLMSPVKPFYQCACPTGVKLLENGKTCKDGATELLLLARRTDLRRISLDTPDFTDIVLQLEDIRHAIAIDYDPVEGYIYWTDDEVRAIRRSFIDGSGSQFVVTAQIAHPDGIAVDWVARNLYWTDTGTDRIEVTRLNGTMRKILISEDLEEPRAIVLDPMVGYMYWTDWGEIPKIERAALDGSDRVVLVNTSLGWPNGLALDYDEGKIYWGDAKTDKIEVMNTDGTGRRVLVEDKIPHIFGFTLLGDYVYWTDWQRRSIERVHKRSAEREVIIDQLPDLMGLKATNVHRVIGSNPCAEENGGCSHLCLYRPQGLRCACPIGFELISDMKTCIVPEAFLLFSRRADIRRISLETNNNNVAIPLTGVKEASALDFDVTDNRIYWTDISLKTISRAFMNGSALEHVVEFGLDYPEGMAVDWLGKNLYWADTGTNRIEVSKLDGQHRQVLVWKDLDSPRALALDPAEGFMYWTEWGGKPKIDRAAMDGSERTTLVPNVGRANGLTIDYAKRRLYWTDLDTNLIESSNMLGLNREVIADDLPHPFGLTQYQDYIYWTDWSRRSIERANKTSGQNRTIIQGHLDYVMDILVFHSSRQSGWNECASSNGHCSHLCLAVPVGGFVCGCPAHYSLNADNRTCSAPTTFLLFSQKSAINRMVIDEQQSPDIILPIHSLRNVRAIDYDPLDKQLYWIDSRQNMIRKAQEDGSQGFTVVVSSVPSQNLEIQPYDLSIDIYSRYIYWTCEATNVINVTRLDGRSVGVVLKGEQDRPRAVVVNPEKGYMYFTNLQERSPKIERAALDGTEREVLFFSGLSKPIALALDSRLGKLFWADSDLRRIESSDLSGANRIVLEDSNILQPVGLTVFENWLYWIDKQQQMIEKIDMTGREGRTKVQARIAQLSDIHAVKELNLQEYRQHPCAQDNGGCSHICLVKGDGTTRCSCPMHLVLLQDELSCGEPPTCSPQQFTCFTGEIDCIPVAWRCDGFTECEDHSDELNCPVCSESQFQCASGQCIDGALRCNGDANCQDKSDEKNCEVLCLIDQFRCANGQCIGKHKKCDHNVDCSDKSDELDCYPTEEPAPQATNTVGSVIGVIVTIFVSGTVYFICQRMLCPRMKGDGETMTNDYVVHGPASVPLGYVPHPSSLSGSLPGMSRGKSMISSLSIMGGSSGPPYDRAHVTGASSSSSSSTKGTYFPAILNPPPSPATERSHYTMEFGYSSNSPSTHRSYSYRPYSYRHFAPPTTPCSTDVCDSDYAPSRRMTSVATAKGYTSDLNYDSEPVPPPPTPRSQYLSAEENYESCPPSPYTERSYSHHLYPPPPSPCTDSS

SEQ ID NO: 20095 - protein, 2624 aa, Homo sapiens
MVPPVWTLLLLVGAALFRKEKPPDQKLVVRSSRDNYVLTQCDFEDDAKPLCDWSQVSADDEDWVRASGPSPTGSTGAPGGYPNGEGSYLHMESNSFHRGGVARLLSPDLWEQGPLCVHFAHHMFGLSWGAQLRLLLLSGEEGRRPDVLWKHWNTQRPSWMLTTVTVPAGFTLPTRLMFEGTRGSTAYLDIALDALSIRRGSCNRVCMMQTCSFDIPNDLCDWTWIPTASGAKWTQKKGSSGKPGVGPDGDFSSPGSGCYMLLDPKNARPGQKAVLLSPVSLSSGCLSFSFHYILRGQSPGAALHIYASVLGSIRKHTLFSGQPGPNWQAVSVNYTAVGRIQFAVVGVFGKTPEPAVAVDATSIAPCGEGFPQCDFEDNAHPFCDWVQTSGDGGHWALGHKNGPVHGMGPAGGFPNAGGHYIYLEADEFSQAGQSVRLVSRPFCAPGDICVEFAYHMYGLGEGTMLELLLGSPAGSPPIPLWKRVGSQRPYWQNTSVTVPSGHQQPMQLIFKGIQGSNTASVVAMGFILINPGTCPVKVLPELPPVSPVSSTGPSETTGLTENPTISTKKPTVSIEKPSVTTEKPTVPKEKPTIPTEKPTISTEKPTIPSEKPNMPSEKPTIPSEKPTILTEKPTIPSEKPTIPSEKPTISTEKPTVPTEEPTTPTEETTTSMEEPVIPTEKPSIPTEKPSIPTEKPTISMEETIISTEKPTISPEKPTIPTEKPTIPTEKSTISPEKPTTPTEKPTIPTEKPTISPEKPTTPTEKPTISPEKLTIPTEKPTIPTEKPTIPTEKPTISTEEPTTPTEETTISTEKPSIPMEKPTLPTEETTTSVEETTISTEKLTIPMEKPTISTEKPTIPTEKPTISPEKLTIPTEKLTIPTEKPTIPIEETTISTEKLTIPTEKPTISPEKPTISTEKPTIPTEKPTIPTEETTISTEKLTIPTEKPTISPEKLTIPTEKPTISTEKPTIPTEKLTIPTEKPTIPTEKPTIPTEKLTALRPPHPSPTATGLAALVMSPHAPSTPMTSVILGTTTTSRSSTERCPPNARYESCACPASCKSPRPSCGPLCREGCVCNPGFLFSDNHCIQASSCNCFYNNDYYEPGAEWFSPNCTEHCRCWPGSRVECQISQCGTHTVCQLKNGQYGCHPYAGTATCLVYGDPHYVTFDGRHFGFMGKCTYILAQPCGNSTDPFFRVTAKNEEQGQEGVSCLSKVYVTLPESTVTLLKGRRTLVGGQQVTLPAIPSKGVFLGASGRFVELQTEFGLRVRWDGDQQLYVTVSSTYSGKLCGLCGNYDGNSDNDHLKLDGSPAGDKEELGNSWQTDQDEDQECQKYQVVNSPSCDSSLQSSMSGPGFCGRLVDTHGPFETCLLHVKAASFFDSCMLDMCGFQGLQHLLCTHMSTMTTTCQDAGHAVKPWREPHFCPMACPPNSKYSLCAKPCPDTCHSGFSGMFCSDRCVEACECNPGFVLSGLECIPRSQCGCLHPAGSYFKVGERWYKPGCKELCVCESNNRIRCQPWRCRAQEFCGQQDGIYGCHAQGAATCTASGDPHYLTFDGALHHFMGTCTYVLTRPCWSRSQDSYFVVSATNENRGGILEVSYIKAVHVTVFDLSISLLRGCKVMLNGHRVALPVWLAQGRVTIRLSSNLVLLYTNFGLQVRYDGSHLVEVTVPSSYGGQLCGLCGNYNNNSLDDNLRPDRKLAGDSMQLGAAWKLPESSEPGCFLVGGKPSSCQENSMADAWNKNCAILINPQGPFSQCHQVVPPQSSFASCVHGQCGTKGDTTALCRSLQAYASLCAQAGQAPAWRNRTFCPMRCPPGSSYSPCSSPCPDTCSSINNPRDCPKALPCAESCECQKGHILSGTSCVPLGQCGCTDPAGSYHPVGERWYTENTCTRLCTCSVHNNITCFQSTCKPNQICWALDGLLHCRASGVGVCQLPGESHYVSFDGSNHSIPDACTLVLVKVCHPAMALPFFKISAKHEKEEGGTEAFRLHEVYIDIYDAQVTLQKGHRVLINSKQVTLPAISQIPGVSVKSSSIYSIVNIKIGVQVKFDGNHLLEIEIPTTYYGKVCGMCGNFNDEEEDELMMPSDEVANSDSEFVNSWKDKDIDPSCQSLLVDEQQIPAEQQENPSGNCRAADLRRAREKCEAALRAPVWAQCASRIDLTPFLVDCANTLCEFGGLYQALCQALQAFGATCQSQGLKPPLWRNSSFCPLECPAYSSYTNCLPSCSPSCWDLDGRCEGAKVPSACAEGCICQPGYVLSEDKCVPRSQCGCKDAHGGSIPLGKSWVSSGCTEKCVCTGGAIQCGDFRCPSGSHCQLTSDNSNSNCVSDKSEQCSVYGDPRYLTFDGFSYRLQGRMTYVLIKTVDVLPEGVEPLLVEGRNKMDPPRSSIFLQEVITTVYGYKVQLQAGLELVVNNQKMAVPYRPNEHLRVTLWGQRLYLVTDFELVVSFGGRKNAVISLPSMYEGLVSGLCGNYDKNRKNDMMLPSGALTQNLNTFGNSWEVKTEDALLRFPRAIPAEEEGQGAELGLRTGLQVSECSPEQLASNSTQACRVLADPQGPFAACHQTVAPEPFQEHCVLDLCSAQDPREQEELRCQVLSGYAILCQEAGAALAGWRDRTLCAGQQLSD

SEQ ID NO: 20096 - protein, 171 aa, Homo sapiens
MSVKGCFTDFHIDFGGTSVWYHVFRGGKIFWLIPPTLHNLALYEEWVLSGKQSDIFLGDRVERCQRIELKQGYTFFIPSGWIHAVYTPVDSLVFGGNILHSFNVPMQLRIYEIEDRTRVQPKFRYPFYYEMCWYVLERYVYCVTQRSHLTQEYQRESMLIDAPRKPSIDGF

SEQ ID NO: 20097 - protein, 1100 aa, Homo sapiens
MLCAENRKEMEDWISSLKSVQTREPYEVAQFNVEHFSGMHNWYACSHARPTFCNVCRESLSGVTSHGLSCEVCKFKAHKRCAVRATNNCKWTTLASIGKDIIEDEDGVAMPHQWLEGNLPVSAKCAVCDKTCGSVLRLQDWKCLWCKTMVHTACKDLYHPICPLGQCKVSIIPPIALNSTDSDGFCRATFSFCVSPLLVFVNSKSGDNQGVKFLRRFKQLLNPAQVFDLMNGGPHLGLRLFQKFDNFRILVCGGDGSVGWVLSEIDKLNLNKQCQLGVLPLGTGNDLARVLGWGGSYDDDTQLPQILEKLERASTKMLDRWSIMTYELKLPPKASLLPGPPEASEEFYMTIYEDSVATHLTKILNSDEHAVVISSAKTLCETVKDFVAKVEKTYDKTLENAVVADAVASKCSVLNEKLEQLLQALHTDSQAAPVLPGLSPLIVEEDAVESSSEESLGESKEQLGDDVTKPSSQKAVKPREIMLRANSLKKAVRQVIEEAGKVMDDPTVHPCEPANQSSDYDSTETDESKEEAKDDGAKESITVKTAPRSPDARASYGHSQTDSVPGPAVAASKENLPVLNTRIICPGLRAGLAASIAGSSIINKMLLANIDPFGATPFIDPDLDSVDGYSEKCVMNNYFGIGLDAKISLEFNNKREEHPEKCRSRTKNLMWYGVLGTRELLQRSYKNLEQRVQLECDGQYIPLPSLQGIAVLNIPSYAGGTNFWGGTKEDDIFAAPSFDDKILEVVAIFDSMQMAVSRVIKLQHHRIAQCRTVKITIFGDEGVPVQVDGEAWVQPPGIIKIVHKNRAQMLTRDRAFESTLKSWEDKQKCDSGKPVLRTHLYIHHAIDLATEEVSQMQLCSQAAEELITRICDAATIHCLLEQELAHAVNACSHALNKANPRCPESLTRDTATEIAINVKALYNETESLLVGRVPLQLESPHEERVSNALHSVEVELQKLTEIPWLYYILHPNEDEEPPMDCTKRNNRSTVFRIVPKFKKEKVQKQKTSSQPVQKWGTEEVAAWLDLLNLGEYKDIFIRHDIRGAELLHLERRDLKNTVGEKRDTKENGKHMDLGIPKVGHVKRILQGIKELGRSTPQSEV

SEQ ID NO: 20098 - protein, 497 aa, Homo sapiens
MGLEALVPLAMIVAIFLLLVDLMHRHQRWAARYPPGPLPLPGLGNLAACGLPEHTILLRPVAAPLRGRVQPAAGLDAGGRAQWAGGRARGDGDPRRGHGRPPACAHLPGPGLRAAFPRGDPVALWARVARAEALLRVHLAQLGPGQEVAGAVGDRGGRLPLCRLRRPSRTPLSPQRPLGQSREQRDRLPHLRAPLRVRRPSLPQAAGPSSGGTEGGVGLPARGAECCPRPPAHPSAGWQGPTLPKGFPDPAGUAANUAQDDLGPSPATPRPDUGLPGKEGEGQGEPUEQLQUUEPAHSGGUPVPCRDGDHLDHAGLGPPAHDPTPGCAAPCPTGDRRRDRAGAATRDGUPGSHALHHCRDSRGAALWGHRPPGCDPYDIPUHRSTGLPHPUGNDTHHQPVIGAEGUGRLEEALPLPPRTLPGCPGPLCEAGGLPAFLSRPPCMPRGAPGPHGALPLLHLPAAALQLLRGRRTAPAQPLSCRQLSGDPIPLRALCCAP

SEQ ID NO: 20099 - protein, 325 aa, Homo sapiens
MEETKEAMSEMLRHPRISGKPILVLANKQDKEGALGEADVIECLSLEKLVNEHKCLCQIEPCSAISGYGKKIDKSIKKGLYWLLHVIARDFDALNERIQKETTEQRALEEQEKQERAERVRKLREERKQNEQEQAELDGTSGLAELDPEPTNPFQPIASVIIENEGKLEREKKNQKMEKDSDGCHLKHKMEHEQIETQGQVNHNGQKNNEFGLVENYKEALTQQLKNEDETDRPSLESANGKKKTKKLRMKRNHRVEPLNIDDCAPESPTPPPPPPPVGWGTPKVTRLPKLEPLGETHHNDFYRKPLPPLAVPQRPNSDAHDVIS

SEQ ID NO: 20100 - protein, 367 aa, Homo sapiens
MEEEFIRNQEQMKPLEEKQEEERSKVDDLRGTPMSVGTLEEIIDDNHAIVSTSVGSEHYVSILSFVDKDLLEPGCSVLLNHKVHAVIGVLMDDTDPLVTVMKVEKAPQETYADIGGLDNQIQEIKESVELPLTHPEYYEEMGIKPPKGVILYGPPGTGKTLLAKAVANQTSATFLRVVGSELIQKYLGDGPKLVRELFRVAEEHAPSIVFIDEIDAIGTKRYDSNSGGEREIQRTMLELLNQLDGFDSRGDVKVIMATNRIETLDPALIRPGRIDRKIEFPLPDEKTKKRIFQIHTSRMTLADDVTLDDLIMAKDDLSGADIKAICTEAGLMALRERRMKVTNEDFKKSKENVLYKKQEGTPEGLYL

SEQ ID NO: 20101 - protein, 985 aa, Homo sapiens
MGKLIRMGPQERWLLRTKRLHWSRLLFLLGMLIIGSTYQHLRRPRGLSSLWAAVSSHQPIKLASRDLSSEEMMMMSSSPSKPSSEMGGKMLVPQASVGSDEATLSMTVENIPSMPKRTAKMIPTTTKNNYSPTAAGTERRKEDTPTSSRTLTYYTSTSSRQIVKKYTPTPRGEMKSYSPTQVREKVKYTPSPRGRRVGTYVPSTFMTMETSHAITPRTTVKDSDITATYKILETNSLKRIMEETTPTTLKGMFDSTPTFLTHEVEANVLTSPRSVMEKNNLFPPRRVESNSSAHPWGLVGKSNPKTPQGTVLLHTPATSEGQVTISTMTGSSPAETKAFTAAWSLRNPSPRTSVSAIKTAPAIVWRLAKKPSTAPSTSTTPTVRAKLTMQVHHCVVVKPTPAMLTTPSPSLTTALLPEELSPSPSVLPPSLPDLHPKGEYPPDLFSVEERRQGWVVLHVFGMMYVFVALAIVCDEYFVPALGVITDKLQISEDVAGATFMAAGGSAPELFTSLIGVFISHSNVGIGTIVGSAVFNILFVIGTCSLFSREILNLTWWPLFRDVSFYILDLIMLILFFLDSLIAWWESLLLLLAYAFYVFTMKWNKHIEVWVKEQLSRRPVAKVMALEDLSKEDVAEAESTGEMPGEEGETAGEGETEEKSGGETQPEGEGETETQGKGEECEDENEAEGKGDNEGEDEGEIHAEDGEMKGNEGETESQELSAENHGEAKNDEKGVEDGGGSDGGDSEEEEEEEEEQEEEEEEEEQEEEEEEEEEEEEKGNEEPLSLDWPETRQKQAIYLFLLPIVFPLWLTVPDVRRQESRKFFVFTFLGSIMWIAMFSYLMVWWAHQVGETIGISEEIMGLTILAAGTSIPDLITSVIVARKGLGDMAVSSSVGSNIFDITVGLPVPWLLFSLINGLQPVPVSSNGLFCAIVLLFLMLLFVISSIASCKWRMNKILGFTMFLLYFVFLIISVMLEDRIISCPVSV

SEQ ID NO: 20102 - protein, 170 aa, Homo sapiens
MSNLTPESSPELAKKSWFGNFISLEKEEQIFVVIKDKPLSSIKADIVHAFLSIPSLSHSVISQTSFRAEYKATGGPAVFQKPVKFQVDITYTEGGEAQKENGIYSVTFTLLSGPSRRFKRVVETIQAQLLSTHDPPAAQHLSEPPPPAPGLSWGAGLKGQKVATSYESSL

SEQ ID NO: 20103 - protein, 1379 aa, Homo sapiens
MEPGSDDFLPPPECPVFEPSWAEFRDPLGYIAKIRPIAEKSGICKIRPPAIVVEEGGYEAICKDRRWARVAQRLNYPPGKNIGSLLRSHYERIVYPYEMYQSGANLVQCNTRPFDNEEKDKEYKPHSIPLRQSVQPSKFNSYGRRAKRLQPDPEPTEEDIEKNPELKKLQIYGAGPKMMGLGLMAKDKTLRKKDKEGPECPPTVVVKEELGGDVKVESTSPKTFLESKEELSHSPEPCTKMTMRLRRNHSNAQFIESYVCRMCSRGDEDDKLLLCDGCDDNYHIFCLLPPLPEIPKGVWRCPKCVMAECKRPPEAFGFEQATREYTLQSFGEMADSFKADYFNMPVHMVPTELVEKEFWRLVNSIEEDVTVEYGADIHSKEFGSGFPVSDSKRHLTPEEEEYATSGWNLNVMPVLEQSVLCHINADISGMKVPWLYVGMVFSAFCWHIEDHWSYSINYLHWGEPKTWYGVPSLAAEHLEEVMKKLTPELFDSQPDLLHQLVTLMNPNTLMSHGVPVVRTNQCAGEFVITFPRAYHSGFNQGYNFAEAVNFCTADWLPAGRQCIEHYRRLRRYCVFSHEELICKMAACPEKLDLNLAAAVHKEMFIMVQEERRLRKALLEKGITEAEREAFELLPDDERQCIKCKTTCFLSALACYDCPDGLVCLSHINDLCKCSSSRQYLRYRYTLDELPAMLHKLKVRAESFDTWANKVRVALEVEDGRKRSLEELRALESEARERRFPNSELLQQLKNCLSEAEACVSRALGLVSGQEAGPHRVAGLQMTLTELRAFLDQMNNLPCAMHQIGDVKGVLEQVEAYQAEAREALASLPSSPGLLQSLLERGRQLGVEVPEAQQLQRQVEQARWLDEVKRTLAPSARRGTLAVMRGLLVAGASVAPSPAVDKAQAELQELLTIAERWEEKAHLCLEARQKHPPATLEAIIREAENIPVHLPNIQALKEALAKARAWIADVDEIQNGDHYPCLDDLEGLVAVGRDLPVGLEELRQLELQVLTAHSWREKASKTFLKKNSCYTLLEVLCPCADAGSDSTKRSRWMEKELGLYKSDTELLGLSAQDLRDPGSVIVAFKEGEQKEKEGILQLRRTNSAKPSPLASSSTASSTTSICVCGQVLAGAGALQCDLCQDWFHGRCVSVPRLLSSPRPNPTSSPLLAWWEWDTKFLCPLCMRSRRPRLETILALLVALQRLPVRLPEGEALQCLTERAISWQGRARQALASEDVTALLGRLAELRQRLQAEPRPEEPPNYPAAPASDPLREGSGKDMPKVQGLLENGDSVTSPEKVAPEEGSDLELLSSLLPQLTGPVLELPEATRAPLEELMMEGDLLEVTLDENHSIPESLDFCILTPRYCSDLSSWGPAPGVFPPW

SEQ ID NO: 20104 - protein, 706 aa, Homo sapiens [sequence omitted]

SEQ ID NO: 20105 - protein, 643 aa, Homo sapiens
MFSPPVSSGKNGPTSLASGHFTGSNVEDRSSSGSWGNGGHPSPSRNYGDGTPYDHMTSRDLGSHDNLSPPFVNSRIQSKTERGSYSSYGRESNLQGCHQQSLLGGDMDMGNPGTLSPTKPGSQYYQYSSNNPRRRPLHSSAMEVQTKKVRKVPPGLPSSVYAPSASTADYNRDSPGYPSSKPATSTFPSSFFMQDGHHSSDPWSSSSGMNQPGYAGMLGNSSHIPQSSSYCSLHPHERLSYPSHSSADINSSLPPMSTFHRSGTNHYSTSSCTPPANGTDSIMANRGSGAAGSSQTGDALGKALASIYSPDHTNNSFSSNPSTPVGSPPSLSAGTAVWSRNGGQASSSPNYEGPLHSLQSRIEDRLERLDDAIHVLRNHAVGPSTAMPGGHGDMHGIIGPSHNGAMGGLGSGYGTGLLSANRHSLMVGTHREDGVALRGSHSLLPNQVPVPQLPVQSATSPDLNPPQDPYRGMPPGLQGQSVSSGSSEIKSDDEGDENLQDTKSSEDKKLDDDKKDIKSITSNNDDEDLTPEQKAEREKERRMANNARERLRVRDINEAFKELGRMVQLHLKSDKPQTKLLILHQAVAVILSLEQQVRERNLNPKAACLKRREEEKVSSEPPPLSLAGPHPGMGDASNHMGQM

SEQ ID NO: 20106 - protein, 562 aa, Homo sapiens
MGDSPGRGAPERRHKAQPGRARKYEWRPEGPTSMGSLGQREDLQDEDRNSAFTWKVQANNRAYNGQFKEKVILCWQRKKYKTNVIRTAKYNFYSFLPLNLYEQFHRVSNLFFLIIIILQSIPDISTLPWFSLSTPMVCLLFIRATRDLVDDMGRHKSDRAINNRPCQILMGKSFKQKKWQDLCVGDVVCLRKDNIVPADMLLLASTEPSSLCYVETVDIDGETNLKFRQALMVTHKELATIKKMASFQGTVTCEAPNSRMHHFVGCLEWNDKKYSLDIGNLLLRGCRIRNTDTCYGLVIYAGFDTKIMKNCGKIHLKRTKLDLLMNKLVVVIFISVVLVCLVLAFGFGFSVKEFKDHHYYLSGVHGSSVAAESFFVFWSFLILLSVTIPMSMFILSEFIYLGNSVFIDWDVQMYYKPQDVPAKARSTSLNDHLGQVEYIFSDKTGTLTQNILTFNKCCISGRVYGAAPTPELPAGSSIFKGLRVPENQSHVWPHAQHLRPNLNQGTVARWPGFLWRGPGKFFFFFEAESHSVYPGRNAVVQSWLTAISTSQVQAILLAQPPE

SEQ ID NO: 20107 - protein, 1633 aa, Homo sapiens
MHPGLWLLLVTLCLTEELAAAGEKSYGKPCGGQDCSGSCQCFPEKGARGRPGPIGIQGPTGPQGFTGSTGLSGLKGERGFPGLLGPYGPKGDKGPMGVPGFLGINGIPGHPGQPGPRGPPGLDGCNGTQGAVGFPGPDGYPGLLGPPGLPGQKGSKGDPVLAPGSFKGMKGDPGLPGLDGITGPQGAPGFPGAVGPAGPPGLQGPPGPPGPLGPDGNMGLGFQGEKGVKGDVGLPGPAGPPPSTGELEFMGFPKGKKGSKGEPGPKGFPGISGPPGFPGLGTTGEKGEKGEKGIPGLPGPRGPMGSEGVQGPPGQQGKKGTLGFPGLNGFQGIEGQKGDIGLPGPDVFIDIDGAVISGNPGDPGVPGLPGLKGDEGIQGLRGPSGVPGLPALSGVPGALGPQGFPGLKGDQGNPGRTTIGAAGLPGRDGLPGPPGPPGPPSPEFETETLHNKESGFPGLRGEQGPKGNLGLKGIKGDSGFCACDGGVPNTGPPGEPGPPGPWGLIGLPGLKGARGDRGSGGAQGPAGAPGLVGPLGPSGPKGKKGEPILSTIQGMPGDRGDSGSQGFRGVIGEPGKDGVPGLPGLPGLPGDGGQGFPGEKGLPGLPGEKGHPGPPGLPGNGLPGLPGPRGLPGDKGKDGLPGQQGLPGSKGITLPCIIPGSYGPSGFPGTPGFPGPKGSRGLPGTPGQPGSSGSKGEPGSPGLVHLPELPGFPGPRGEKGLPGFPGLPGKDGLPGMIGSPGLPGSKGATGDIFGAENGAPGEQGLQGLTGHKGFLGDSGLPGLKGVHGKPGLLGPKGERGSPGTPGQVGQPGTPGSSGPYGIKGKSGLPGAPGFPGISGHPGKKGTRGKKGPPGSIVKKGLPGLKGLPGNPGLVGLKGSPGSPGVAGLPALSGPKGEKGSVGFVGFPGIPGLPGIPGTRGLKGIPGSTGKMGPSGRAGTPGEKGDRGNPGPVGIPSPRRPMSNLWLKGDKGSQGSAGSNGFPGPRGDKGEAGRPGPPGLPGAPGLPGIIKGVSGKPGPPGFMGIRGLPGLKGSSGITGFPGMPGESGSQGIRGSPGLPGASGLPGLKGDNGQTVEISGSPGPKGQPGESGFKGTKGRDGLIGNIGFPGNKGEDGKVGVSGDVGLPGAPGFPGVAGMRGEPGLPGSSGHQGAIGPLGSPGLIGPKGPSITGVPGPAGLPGPKGEKGYPGIGIGAPGKPGLRGQKGDRGFPGLQGPAGLPGAPGISLPSLIAGQPGDPGRPGLDGERGRPGPAGPPGPPGPSSNQGDTGDPGFPGIPGPKGPKGDQGIPGFSGLPGELGLKGSSGLQGDPGQTPTAEAVQVPPGPLGLPGIDGIPGLTGDPGAQGPVGLQGSKGLPGIPGKDGPSGLPGPPGALGDPGLPGLQGPPGFEGAPGQQGPFGMPGMPGQSMRVGYTLVKHSQSEQVPPCPIGMSQLWVGYSLLFVEGQEKAHNQDLGFAGSCLPRFSTMPFIYCNINEVCHYARRNDKSYWLSTTAPIPMMPVSQTQIPQYISRCSVCEAPSQAIAVHSQDITIPQCPLGWRSLWIGYSFLMHTAAGAEGGGQSLVSPGSCLEDFRATPFIECSGARGTCHYFANKYSFWLTTVEERQQFGELPVSETLKAGQLHTRVSRCQVCMKSL

SEQ ID NO: 20108 - protein, 1135 aa, Homo sapiens
MAQFGGQKNPPWATQFTATAVSQPAALGVQQPSLLGASPTIYTQQTALAAAGLTTQTPANYQLTQTAALQQQAAAAAAALQQLQQPQQTLLTQPAVALPTSLSLSTPQPTAQITVSYPTPRSSQQQTQPQKQRVFTGVVTKLHDTFGFVDEDVFFQLSAVKGKTPQVGDRVLVEATYNPNMPFKWNAQRIQTLPNQNQSQTQPLLKTPPAVLQPIAPQTTFGVQTQPQPQSLLQAQISAASITPLLQTQPQPLLQQPQQKAGLLQPPVRIVSQPQPARRLDPPSRFSGRNDRGDQVPNRKDDRSRERERERRRSRERSPQRKRSRERSPRRERERSPRRVRRVVPRYTVQFSKFSLDCPSCDMMELRRRYQNLYIPSDFFDAQFTWVDAFPLSRPFQLGNYCNFYVMHREVESLEKNMAILDPPDADHLYSAKVMLMASPSMEDLYHKSCALAEDPQELRDGFQHPARLVKFLVGMKGKDEAMAIGGHWSPSLDGPDPEKDPSVLIKTAIRCCKALTGIDLSVCTQWYRFAEIRYHRPEETHKGRTVPAHVETVVLFFPDVWHCLPTRSEWETLSRGYKQQLVEKLQGERKEADGEQDEEEKDDGEAKEISTPTHWSKLDPKTMKVNDLRKELESRALSSKGLKSQLIARLTKQLKVEEQKEEQKELEKSEKEEDEDDDRKSEDDKEEEERKRQEEIERQRRERRYILPDEPAIIVHPNWAAKSGKFDCSIMSLSVLLDYRLEDNKEHSFEVSLFAELFNEMLQRDFGVRIYKSLLSLPEKEDKKEKDKKSKKDERKDKKEERDDETDEPKPKRRKSGDDKDKKEDRDERKKEDKRKDDSKDDDETEEDNNQDEYDPMEAEEAEDEEDDRDEEEMTKRDDKRDINRYCKERPSKDKEKEKTQMITINRDLLMAFVYFDQSHCGYLLEKDLEEILYTLGLHLSRAQVKKLLNKVVLRESCFYRKLTDTSKDEENHEESESLQEDMLGNRLLLPTPTVKQESKDVEENVGLIVYNGAMVDVGSLLQKLEKSEKVRAEVEQKLQLLEEKTDEDEKTILNLENSNKSLSGELREVKKDLSQLQENLKISENMNLQFENQMNKTIRNLSTVMDEIHTVLKKDNVKNEDKDQKSKENGASV

SEQ ID NO: 20109 - protein, 112 aa, Homo sapiens
EPVRKKRGRPMTKNLDPDPEPPSPDSPTETFAAPAEVRHFTDGSFPAGFVLQLFSHTQLRGPDSKDSPKDREVAEGGLPRAESPSPGSPHFKSWGTLCANSIYLEWYIGWRQ

SEQ ID NO: 20110 - protein, 2330 aa, Homo sapiens
MAAEEGVASAASAGGSWGTAAMGRVLPMLLVPVPAEAMGQLGSRAQLRTQPEALGSLTAAGSLQVLSLTPGSRGGGRCCLEGPFWHFLWEDSRNSSTPTEKPKLLALGENYELLIYEFNLKDGRCDATILYSCSREALQKLIDDQDISISLLSLRILSFHNNTSLLFINKCVILHIIFPERDAAIRVLNCFTLPLPAQAVDMIIDTQLCRGILFVLSSLGWIYIFDVVDGTYVAHVDLALHKEDMCNEQQQEPAKISSFTSLKVSQDLDVAVIVSSSNSAVALNLNLYFRQHPGHLLCERILEDLPIQGPKGVDEDDPVNSAYNMKLAKFSFQIDRSWKAQLSSLNETIKNSKLEVSCCAPWFQDILHLESPESGNHSTSVQSWAFIPQDIMHGQYNVLQKDHAKTSDPGRSWKIMHISEQEEPIELKCVSVTGFTALFTWEVERMGYTITLWDLETQGMQCFSLGTKCIPVDSSGDQQLCFVLTENGLSLILFGLTQEEFLNRLMIHGSASTVDTLCHLNGWGRCSIPIHALEAGIENRQLDTVNFFLKSKENLFNPSSKSSVSDQFDHLSSHLYLRNVEELIPALDLLCSAIRESYSEPQSKHFSEQLLNLTLSFLNNQIKELFIHTEELDEHLQKGVNILTSYINELRTFMIKFPWKLTDAIDEYDVHENVPKVKESNIWKKLSFEEVIASAILNNKIPEAQTFFRIDSHSAQKLEELIGIGLNLVFDNLKKNNIKEASELLKNMGFDVKGQLLKICFYTTNKNIRDFLVEILKEKNYFSEKEKRTIDFVHQVEKLYLGHFQENMQIQSFPRYWIKEQDFFKHKSVLDSFLKYDCKDEFNKQDHRIVLNWALWWDQLTQESILLPRISPEEYKSYSPEALWRYLTARHDWLNIILWIGEFQTQHSYASLQQNKWPLLTVDVINQNTSCNNYMRNEILDKLARNGVFLASELEDFECFLLRLSRIGGVIQDTLPVQNYKTKEGWDFHSQFILYCLEHSLQHLLYVYLDCYKLSPENCPFLEKKELHEAHPWFEFLVQCRQVASNLTDPKLIFQASLANAQILIPTNQASVSSMLLEGHTLLALATTMYSPGGVSQVVQNEENENCLKKVDPQLLKMALTPYPKLKTALFPQCTPPSVLPSDITIYHLIQSLSPFDPSRLFGWQSANTLAIGDAWSHLPHFSSPDLVNKYAIVERLNFAYYLHNGRPSFAFGTFLVQELIKSKTPKQLIQQVGNEAYVIGLSSFHIPSIGAACVCFLELLGLDSLKLRVDMKVANIILSYKCRNEDAQYSFIRESVAEKLSKLADGEKTTTEELLVLLEEGTWNSIQQQEIKRLSSESSSQWALVVQFCRLHNMKLSISYLRECAKANDWLQFIIHSQLHNYHPAEVKSLIQYFSPVIQDHLRLAFENLPSVPTSKMDSDQVCNKCPQELQGSKQEMTDLFEILLQCSEEPDSWHWLLVEAVKQQAPILSVLASCLQGASAISCLCVWIITSVEDNVATEAMGHIQDSTEDHTWNLEDLSVIWRTLLTRQKSKTLIRGFQLFFKDSPLLLVMEMYELCMFFRNYKEAEAKLLEFQKSLETLNTAATKVHPVIPAMWLEDQVCFLLKLMLQQCKTQYELGKLLQLFVEREHLFSDGPDVKKLCILCQILKDTSIAINHTIITSYSIENLQHECRSILERLQTDGQFALARRVAELAELPVDNLVIKEITQEMQTLKHIEQWSLKQARIDFWKKCHENFKKNSISSKAASSFFSTQAHVACEHPTGWSSMEERHLLLTLAGHWLAQEDVVPLDKLEELEKQIWLCRITQHTLGRNQEETEPRFSRQISTSGELSFDSLASEFSFSKLAALNTSKYLELNSLPSKETCENRLDWKEQESLNFLIGRLLDDGCVHEASRVCRYFHFYNPDVALVLHCRALASGEASMEDLHPEIHALLQSAELLEEEAPDIPLRRVHSRHKQMFNPTEESQTFLQLTTLCQDRTLVGMKLLDKISSVPHGELSCTTELLILAHHCFTLTCHMEGIIRVLQAAHMLTDNHLAPSEEYGLVVRLLTGIGRYNEMTYIFDLLHKKHYFEVLMRKKLDPSGTLKTALLDYIKRCRPGDSEKHNMIALCFSMCREIGENHEAAARIQLKLIESQPWEDSLKDGHQLKQLLLKALTLMLDAAESYAKDSCVRQAQHCQRLTKLITLQIHFLNTGQNTMLINLGRHKLMDCILALPRFYQASIVAEAYDFVPDWAEILYQQVILKGDFNYLEEFKQQRLLKSSIFEEISKKYKQHQPTDMVMENLKKLLTYCEDVYLYYKLAYEHKFYEIVNVLLKDPQTGCCLKDMLAG

SEQ ID NO: 20111 - protein, 156 aa, Homo sapiens
MWLLYLLVPALFCRAGGSIPIPQKLFGEVTSPLFPKPYPNNFETTTVITVPTGYRVKLVFQQFDLEPSEGCFYDYVKKEFMSQGNKMLLTFHTDFSNEENGTIMFYKGFLAYYQAVDLDECASRSKSGEEDPQPQCQHLCHNYVGGYFCSCRPGYE

SEQ ID NO: 20112 - protein, 114 aa, Homo sapiens
PSILLKGLSCQGRTHIHLAPGLPGDPGIISGMRSHCEIAVFIDGPLALADGIPFFRSANGVILTPGNTDGFLLPKYFKEALQLRPTRENHHPSPYSLFLKAVPFCPHLSPSFQP

SEQ ID NO: 20113 - protein, 808 aa, Homo sapiens
MWLRLGPPSLSLSPKPTVGRSLCLTLWFLSLALRASTQAPAPTVNTHFGKLRGARVPLPSEILGPVDQYLGVPYAAPPIGEKRFLPPEPPPSWSGIRNATHFPPVCPQNIHTAVPEVMLPVWFTANLDIVATYIQEPNEDCLYLNVYVPTEDDIRDSGAKPVMVYIHGGSYMEGTGNMIDGSILASYGNVIVITLNYRVGVLGFLSTGDQAAKGNYGLLDQIQALRWVSENIAFFGGDPRRITVFGSGIGASCVSLLTLSHHSEGLFQRAIIQSGSALSSWAVNYQPVKYTSLLADKVGCNVLDTVDMVDCLRQKSAKELVEQDIQPARYHVAFGPVIDGDVIPDDPEILMEQGEFLNYDIMLGVNQGEGLKFVEGVVDPEDGVSGTDFDYSVSNFVDNLYGYPEGKDTLRETIKFMYTDWADRDNPETRRKTLVALFTDHQWVEPSVVTADLHARYGSPTYFYAFYHHCQSLMKPAWSDAAHGDEVPYVFGVPMVGPTDLFPCNFSKNDVMLSAVVMTYWTNFAKTGDPNKPVPQDTKFIHTKANRFEEVAWSKYNPRDQLYLHIGLKPRVRDHYRATKVAFWKHLVPHLYNLHDMFHYTSTTTKVPPPDTTHSSHITRRPNGKTWSTKRPAISPAYSNENAQGSWNGDQDAGPLLVENPRDYSTELSVTIAVGASLLFLNVLAFAALYYRKDKRRQEPLRQPSPQRGAGAPELGAAPEEELAALQLGPTHHECEAGPPHDTLRLTALPDYTLTLRRSPDDIPLMTPNTITMIPNSLVGLQTLHPYNTFAAGFNSTGLPHSHSTTRV

SEQ ID NO: 20114 - protein, 1023 aa, Homo sapiens
MAFKVGRDKYEPAAVSEQGDKKGKKGKKDRDMDELKKEVSMDDHKLSLDELHRKYGTDLSRGLTSARAAEILARDGPNALTPPPTTPEWIKFCRQLFGGFSMLLWIGAILCFLAYSIQAATEEEPQNDNLYLGVVLSAVVIITGCFSYYQEAKSSKIMESFKNMVPQQALVIRNGEKMSINAEEVVVGDLVEVKGGDRIPADLRIISANGCKVDNSSLTGESEPQTRSPDFTNENPLETRNIAFFSTNCVEGTARGIVVYTGDRTVMGRIATLASGLEGGQTPIAAEIEHFIHIITGVAVFLGVSFFILSLILEYTWLEAVIFLIGIIVANVPEGLLATVTVCLTLTAKRMARKNCLVKNLEAVETLGSTSTICSDKTGTLTQNRMTVAHMWFDNQIHEADTTENQSGVSFDKTSATWLALSRIAGLCNRAVFQANQENLPILKRAVAGDASESALLKCIELCCGSVKEMRERYAKIVEIPFNSTNKYQLSIHKNPNTSEPQHLLVMKGAPERILDRCSSILLHGKEQPLDEELKDAFQNAYLELGGLGERVLGFCHLFLPDEQFPEGFQFDTDDVNFPIDNLCFVGLISMIDPPRAAVPDAVGKCRSAGIKVIMVTGDHPITAKAIAKGVGIISEGNETVEDIAARLNIPVSQVNPRDAKACVVHGSDLKDMTSEQLDDILKYHTEIVFARTSPQQKLIIVEGCQRQGAIVAVTGDGVNDSPALKKADIGVAMGIAGSDVSKQAADMILLDDNFASIVTGVEEGRLIFDNLKKSIAYTLTSNIPEITPFLIFIIANIPLPLGTVTILCIDLGTDMVPAISLAYEQAESDIMKRQPRNPKTDKLVNERLISMAYGQIGMIQALGGFFTYFVILAENGFLPIHLLGLRVDWDDRWINDVEDSYGQQWTYEQRKIVEFTCHTAFFVSIVVVQWADLVICKTRRNSVFQQGMKNKILIFGLFEETALAAFLSYCPGMGVALRMYPLKPTWWFCAFPYSLLIFVYDEVRKLIIRRRPGGWVEKETYY

SEQ ID NO: 20115 - protein, 1299 aa, Homo sapiens
MQQAPQPYEFFSEENSPKWRGLLVSALRKVQEQVHPTLSANEESLYYIEELIFQLLNKLCMAQPRTVQDVEERVQKTFPHPIDKWAIADAQSAIEKRKRRNPLLLPVDKIHPSLKEVLGYKVDYHVSLYIVAVLEYISADILKLAGNYVFNIRHYEISQQDIKVSMCADKVLMDMFDQDDIGLVSLCEDEPSSSGELNYYDLVRTEIAEERQYLRELNMIIKVFREAFLSDRKLFKPSDIEKIFSNISDIHELTVKLLGLIEDTVEMTDESSPHPLAGSCFEDLAEEQAFDPYETLSQDILSPEFHEHFNKLMARPAVALHFQQLKACSEEQEDRECLNQAITALMNLQGSMDRIYKQYSPRRRPGDPVCPFYSHQLRSKHLAIKKMNEIQKNIDGWEGKDIGQCCNEFIMEGPLTRIGAKHERHIFLFDGLMISCKPNHGQTRLPGYSSAEYRLKEKFVMRKIQICDKEDTCEHKHAFELVSKDENSIIFAAKSAEEKNNWMAALISLHYRSTLDRMLDSVLLKEENEQPLRLPSPEVYRFVVKDSEENIVFEDNLQSRSGIPIIKGGTVVKLIERLTYHMYADPNFVRTFLTTYRSFCKPQELLSLLIERFEIPEPEPTDADKLAIEKGEQPISADLKRFRKEYVQPVQLRILNVFRHWVEHHFYDFERDLELLERLESFISSVRGKAMKKWVESIAKIIRRKKQAQANGVSHNITFESPPPPIEWHISKPGQFETFDLMTLHPIEIARQLTLLESDLYRKVQPSELVGSVWTKEDKEINSPNLLKMIRHTTNLTLWFEKCIVEAENFEERVAVLSRIIEILQVFQDLNNFNGVLEIVSAVNSVSVYRLDHTFEALQERKRKILDEAVELSQDHFKKYLVKLKSINPPCVPFFGIYLTNILKTEEGNNDFLKKKGKDLINFSKRRKVAEITGEIQQYQNQPYCLRIEPDMRRFFENLNPMGSASEKEFTDYLFNKSLEIEPRNCKQPPRFPRKSTFSLKSPGIRPNTGRHGSTSGTLRGHPTPLEREPCKISFSRIAETELESTVSAPTSPNTPSTPPVSASSDLSVFLDVDLNSSCGSNSIFAPVLLPHSKSFFSSCGSLHKLSEEPLIPPPLPPRKKFDHDASNSKGNMKSDDDPPAIPPRQPPPPKVKPRVPVPTGAFDGPLHSPPPPPPRDPLPDTPPPVPLRPPEHFINCPFNLQPPPLGHLHRDSDWLRDISTCPNSPSTPPSTPSPRVPRRCYVLSSSQNNLAHPPAPPVPPRQNSSPHLPKLPPKTYKRELSHPPLYRLPLLENAETPQ

SEQ ID NO: 20116 - protein, 440 aa, Homo sapiens
MGCDGRVSGLLRRNLQPTLTYWSVFFSFGLCIAFLGPTLLDLRCQTHSSLPQISWVFFSQQLCLLLGSALGGVFKRTLAQSLWALFTSSLAISLVFAVIPFCRDVKVLASVMALAGLAMGCIDTVANMQLVRMYQKDSAVFLQVLHFFVGFGALLSPLIADPFLSEANCLPANSTANTTSRGHLFHVSRVLGQHHVDAKPWSNQTFPGLTPKDGAGTRVSYAFWIMALINLPVPMAVLMLLSKERLLTCCPQRRPLLLSADELALETQPPEKEDASSLPPKFQSHLGHEDLFSCCQRKNLRGAPYSFFAIHITGALVLFMTDGLTGAYSAFVYSYAVEKPLSVGHKVAGYLPSLFWGFITLGRLLSIPISSRMKPATMVFINVVGVVVTFLVLLIFSYNVVFLFVGTASLGLFLSSTFPSMLAYTEDSLQYKDIPGSGQL

SEQ ID NO: 20117 - protein, 610 aa, Homo sapiens
MDTPRGIGTFVVWDYVVFAGMLVISAAIGIYYAFAGGGQQTSKDFLMGGRRMTAVPVALSLTASFMSAVTVLGTPSEVYRFGAIFSIFAFTYFFVVVISAEVFLPVFYKLGITSTYEYLELRFNKCVRLCGTVLFIVQTILYTGIVIYAPALALNQVTGFDLWGAVVATGVVCTFYCTLGGLKAVIWTDVFQVGIMVAGFASVIIQAVVMQGGISTILNDAYDGGRLNFWNFNPNPLQRHTFWTIIIGGTFTWTSIYGVNQSQVQRYISCKSRFQAKLSLYINLVGLWAILTCSVFCGLALYSRYHDCDPWTAKKVSAPDQLMPYLVLDILQDYPGLPGLFVACAYSGTLSTVSSSINALAAVTVEDLIKPYFRSLSERSLSWISQGMSVVYGALCIGMAALASLMGALLQAALSVFGMVGGPLMGLFALGILVPFANSIGALVGLMAGFAISLWVGIGAQIYPPLPERTLPLHLDIQGCNSTYNETNLMTTTEMPFTTSVFQIYNVQRTPLMDNWYSLSYLYFSTVGTLVTLLVGILVSLSTGGRKQNLDPRYILTKEDFLSNFDIFKKKKHVLSYKSHPVEDGGTDNPAFNHIELNSDQSGKSNGTRL

SEQ ID NO: 20118 - protein, 830 aa, Homo sapiens
MSAKAISEQTGKELLYKFICTTSAIQNRFKYARVTPDTDWARLLQDHPWLLSQNLVVKPDQLIKRRGKLGLVGVNLTLDGVKSWLKPRLGQEATGIVRAIRDYQGPLKEHEVTIFVRRGGPNYQEGLRVMGEVGKTTGIPIHVFGTETHMTAIVGMALGHRPIPNQPPTAAHTANFLLNASGSTSTPAPSRTASFSESRADEVAPAKKAKPAMPQGKSTTLFSRHTKAIVWGMQTRAVQGMLDFDYVCSRDEPSVAAMVYPFTGDHKQKFYWGHKEILIPVFKNMADAMRKHPEVDVLINFASLRSAYDSTMETMNYAQIRTIAIIAEGIPEALTRKLIKKADQKGVTIIGPATVGGIKPGCFKIGNTGGMLDNILASKLYRPGSVAYVSRSGGMSNELNNIISRTTDGVYEGVAIGGDRYPGSTFMDHVLRYQDTPGVKMIVVLGEIGGTEEYKICRGIKEGRLTKPIVCWCIGTCATMFSSEVQFGHAGACANQASETAVAKNQALKEAGVFVPRSFDELGEIIQSVYEDLVANGVIVPAQEVPPPTVPMDYSWARELGLIRKPASFMTSICDERGQELIYAGMPITEVFKEEMGIGGVLGLLWFQKRLPKYSCQFIEMCLMVTADHGPAVSGAHNTIICARAGKDLVSSLTSGLLTIGDRFGGALDAAAKMFSKAFDSGIIPMEFVNKMKKEGKLIMGIGHRVKSINNPDMRVQILKDYVRQHFPATPLLDYALEVEKITTSKKPNLILNVDGLIGVAFVDMLRNCGSFTREEADEYIDIGALNGIFVLGRSMGFIGHYLDQKRLKQGLYRHPWDDISYVLPEHMSM

SEQ ID NO: 20119 - protein, 353 aa, Homo sapiens
MQSKRDCELWCERVNPENKAALEAWVRETGIRLVQVNGQRKYGGPPPGWVGSPPPAGSEVFIGRLPQDVYEHQLIPLFQRVGRLYEFRLMMTFSGLNRGFAYARYSSRRGAQAAIATLHNHPLRPSCPLLVCRSTEKCELSVDGLPPNLTRSALLLALQPLGPGLQEARLLPSPGPAPGQIALLKFSSHRAAAMAKKALVEGQSHLCGEQVAVEWLKPDLKQRLRQQLVGPFLRSPQPEGSQLALARDKLGFQGARATLQLLCQRMKLGSPVFLTKCLGIGPAGWHRFWYQVVIPGHPVPFSGLIWVVLTLDGRDGHEVAKDAVSVRLLQALSESGANLLWSAGAEAGTMVKQ

SEQ ID NO: 20120 - protein, 614 aa, Homo sapiens
PELENLTVTEVGWDGLRLNWTAADQAYEHFIIQVQEANKVEAARNLTVPGSLRAVDIPGLKAATPYTVSIYGVIQGYRTPVLSAEASTAKEPEIGNLNVSDITPESFNLSWMATDGIFETFTIEIIDSNRLLETVEYNISGAERTAHISGLPPSTDFIVYLSGLAPSIRTKTISATATTEAEPEVDNLLVSDATPDGFRLSWTADEGVFDNFVLKIRDTKKQSEPLEITLLAPERTRDITGLREATEYEIELYGISKGRRSQTVSAIATTAMGSPKEVIFSDITENSATVSWRAPTAQVESFRITYVPITGGTPSMVTVDGTKTQTRLVKLIPGVEYLVSIIAMKGFEESEPVSGSFTTALDGPSGLVTANITDSEALARWQPAIATVDSYVISYTGEKVPEITRTVSGNTVEYALTDLEPATEYTLRIFAEKGPQKSSTITAKFTTDLDSPRDLTATEVQSETALLTWRPPRASVTGYLLVYESVDGTVKEVIVGPDTTSYSLADLSPSTHYTAKIQALNGPLRSNMIQTIFTTIGLLYPFPKDCSQAMLNGDTTSGLYTIYLNGDKAEALEVFCDMTSDGGGWIVFLRRKNGRENFYQNWKAYAAGFGDRRE

SEQ ID NO: 20121 - protein, 1486 aa, Homo sapiens
MAYSWQTDPNPNESHEKQYEHQEFLFVNQPHSSSQVSLGFDQIVDEISGKIPHYESEIDENTFFVPTAPKWDSTGHSLNEAHQISLNEFTSKSRELSWHQVSKAPAIGFSPSVLPKPQNTNKECSWGSPIGKHHGADDSRFSILAPSFTSLDKINLEKELENENHNYHIGFESSIPPTNSSFSSDFMPKEENKRSGHVNIVEPSLMLLKGSLQPGMWESTWQKNIESIGCSIQLVEVPQSSNTSLASFCNKVKKIRERYHAADVNFNSGKIWSTTTAFPYQLFSKTKFNIHIFIDNSTQPLHFMPCANYLVKDLIAEILHFCTNDQLLPKDHILSVCGSEEFLQNDHCLGSHKMFQKDKSVIQLHLQKSREAPGKLSRKHEEDHSQFYLNQLLEFMHIWKVSRQCLLTLIRKYDFHLKYLLKTQENVYNIIEEVKKICSVLGCVETKQITDAVNELSLILQRKGENFYQSSETSAKGLIEKVTTELSTSIYQLINVYCNSFYADFQPVNVPRCTSYLNPGLPSHLSFTVYAAHNIPETWVHSYKAFSFTCWLTYAGKKLCQVRNYRNIPDKKLFFFLVNWNETINFPLEIKSLPRESMLTVKLFGIACATNNANLLAWTCLPLFPKEKSILGSMLFSMTLQSEPPVEMITPGVWDVSQPSPVTLQIDFPATGWEYMKPDSEENRSNLEEPLKECIKHIARLSQKQTPLLLSEEKKRYLWFYRFYCNNENCSLPLVLGSAPGWDERTVSEMHTILRRWTFSQPLEALGLLTSSFPDQEIRKVAVQQLDNLLNDELLEYLPQLVQAVKFEWNLESPLVQLLLHRSLQSIQVAHRLYWLLKNAENEAYFKSWYQKLLAALQFCAGKALNDEFSKEQKLIKILGDIGERVKSASDHQRQEVLKKEIGRLEEFFQDVNTCHLPLNPALCIKGIDHDACSYFTSNALPLKITFINANPMGKNISIIFKAGDDLRQDMLVLQLIQVMDNIWLQEGLDMQMIIYRCLSTGKDQGLVQMVPDAVTLAKIHRHSGLIGPLKENTIKKWFSQHNHLKADYEKALRNFFYSCAGWCVVTFILGVCDRHNDNIMLTKSGHMFHIDFGKFLGHAQTFGGIKRDRAPFIFTSEMEYFITEGGKNPQHFQDFVELCCRAYNIIRKHSQLLLNLLEMMLYAGLPELSGIQDLKYVYNNLRPQDTDLEATSHFTKKIKESLECFPVKLNNLIHTLAQMSAISPAKSTSQTFPQESCLLSTTRSIERATILGFSKKSSNLYLIQVTHSNNETSLTEKSFEQFSKLHSQLQKQFASLTLPEFPHWWHLPFTNSDHRRFRDLNHYMEQILNVSHEVTNSDCVLSFFLSEAVQQTVEESSPVYLGEKFPDKKPKVQLVISYEDVKLTILVKHMKNIHLPDGSAPSAHVEFYLLPYPSEVRRRKTKSVPKCTDPTYNEIVVYDEVTELQGHVLMLIVKSKTVFVGAINIRLCSVPLDKEKWYPLGNSII

SEQ ID NO: 20122 - protein, 128 aa, Homo sapiens
MAAGTAVGAWVLVLSLWGAVVGAQNITARIGEPLVLKCKGAPKKPPQRLEWKLNTGRTEAWKVLSPQGGGPWDSVARVLPNGSLFLPAVGIQDEGIFRCQAMNRNGKETKSNYRVRVYQFENLHNYSL

SEQ ID NO: 20123 - protein, 194 aa, Homo sapiens
MAAAALPAWLSLQSRARTLRAFSTAVYSATPVPTPSLPERTPGNERPPRRKALPPRTEKMAVDQDWPSVYPVAAPFKPSAVPLPVRMGYPVKKGVPMAKEGNLELLKIPNFLHLTPVAIKKHCEALKDFCTEWPAALDSDEKCEKHFPIEIDSTDYVSSGPSVRNPRARVVVLRVPFKEAELRLCSVSTNSVIP

SEQ ID NO: 20124 - protein, 736 aa, Homo sapiens
MTTYLEFIQQNEERDGVRFSWNVWPSSRLEATRMVVPVAALFTPLKERPDLPPIQYEPVLCSRTTCRAVLNPLCQVDYRAKLWACNFCYQRNQRGPQMPLIFLYVVDTCMEDEDLQALKESMQMSLSLLPPTALVGLITFGRMVQVHELGCEGISKSYVFRGTKDLSAKQLQEMLGLSKVPLTQATRGPQVQQPPPSNRFLQPVQKIDMNLTDLLGELQRDPWPVPQGKRPLRSSGVALSIAVGLLECTFPNTGARIMMFIGGPATQGPGMVVGDELKTPIRSWHDIDKDNAKYVKKGTKHFEALANRAATTGHVIDIYACALDQTGLLEMKCCPNLTGGYMVMGDSFNTSLFKQTFQRVFTKDMHGQFKMGFGGTLEIKTSREIKISGAIGPCVSLNSKGPCVSENEIGTGGTCQWKICGLSPTTTLAIYFEVVNQHNAPIPQGGRGAIQFVTQYQHSSGQRRIRVTTIARNWADAQTQIQNIAASFDQEAAAILMARLAIYRAETEEGPDVLRWLDRQLIRLCQKFGEYHKDDPSSFRFSETFSLYPQFMFHLRRSSFLQVFNNSPDESSYYRHHFMRQDLTQSLIMIQPILYAYSFSGPPEPVLLDSSSILADRILLMDTFFQILIYHGETIAQWRKSGYQDMPEYENFRHLLQAPVDDAQEILHSRFPMPRYIDTEHGGSQARFLLSKVNPSQTHNNMYAWGQESGAPILTDDVSLQVFMDHLKKLAVSSAA

SEQ ID NO: 20125 - protein, 862 aa, Homo sapiens
MAQPGPASQPDVSLQQRVAELEKINAEFLRAQQQLEQEFNQKRAKFKELYLAKEEDLKRQNAVLQAAQDDLGHLRTQLWEAQAEMENIKAIATVSENTKQEAIDEVKRQWREEVASLQAVMKETVRDYEHQFHLRLEQERTQWAQYRESAEREIADLRRRLSEGQEEENLENEMKKAQEDAEKLRSVVMPMEKEIAALKDKLTEAEDKIKELEASKVKELNHYLEAEKSCRTDLEMYVAVLNTQKSVLQEDAEKLRKELHEVCHLLEQERQQHNQLKHTWQKANDQFLESQRLLMRDMQRMEIVLTSEQLRQVEELKKKDQEDDEQQRLNKRKDHKKADVEEEIKIPVVCALTQEESSAQLSNEEEHLDSTRGSVHSLDAGLLLPSGDPFSKSDNDMFKDGLRRAQSTDSLGTSGSLQSKALGYNYKAKSAGNLDESDFGPLVGADSVSENFDTASLGSLQMPSGFMLTKDQERAIKAMTPEQEETASLLSSVTQGMESAYVSPSGYRLVSETEWNLLQKEVHNAGNKLGRRCDMCSNYEKQLQGIQIQEAETRDQVKKLQLMLRQANDQLEKTMKDKQELEDFIKQSSEDSSHQISALVLRAQASEILLEELQQGLSQAKRDVQEQMAVLMQSREQVSEELVRLQKDNDSLQGKHSLHVSLQQAEDFILPDTTEALRELVLKYREDIINVRTAADHVEEKLKAEILFLKEQIQAEQCLKENLEETLQLEIENCKEEIASISSLKAELERIKVEKGQLESTLREKSQQLESLQEIKISLEEQLKKETAAKATVEQLMFEEKNKAQRLQTELDVSEQVQRDFVKLSQTLQVQLERIRQADSLERIRAILNDTKLTDINQLPET

SEQ ID NO: 20126 - protein, 354 aa, Homo sapiens
MERILSQGPVYSSFKGGWKCKDHTEMLQENQGCIRKVTVSHQEALAQHMNISTVERPYGCHECGKTFGRRFSLVLHQRTHTGEKPYACKECGKTFSQISNLVKHQMIHTGKKPHECKDCNKTFSYLSFLIEHQRTHTGEKPYECTECGKAFSRASNLTRHQRIHIGKKQYICRKCGKAFSSGSELIRHQITHTGEKPYECIECGKAFRRFSHLTRHQSIHTTKTPYECNECRKAFRCHSFLIKHQRIHAGEKLYECDECGKVFTWHASLIQHTKSHTGEKPYACAECDKAFSRSFSLILHQRTHTGEKPYVCKVCNKSFSWSSNLAKHQRTHTLDNPYEYENSFNYHSFLTEHQ

SEQ ID NO: 20127 - protein, 394 aa, Homo sapiens
MANYFRDYANLCFEAFGDRVKHWITFSDPRAMAEKGYETGHHAPGLKLRGTGLYKAAHHIIKAHAKAWHSYNTTWRSKQQGLVGISLNCDWGEPVDISNPKDLEAAERYLQFCLGWFANPIYAGDYPQVMKDYIGRKSAEQGLEMSRLPVFSLQEKSYIKGTSDFLGLGHFTTRYITERNYPSRQGPSYQNDRDLIELVDPNWPDLGSKWLYSVPWGFRRLLNFAQTQYGDPPIYVMENGASQKFHCTQLCDEWRIQYLKGYINEMLKAIKDGANIKGYTSWSLLDKFEWEKGYSDRYGFYYVEFNDRNKPRYPKASVQYYKKIIIANGFPNPREVESWYLKALETCSINNQMLAAEPLLSHMQMVTEIVVPTVCSLCVLITAVLLMLLLRRQS

SEQ ID NO: 20128 - protein, 328 aa, Homo sapiens
MRRGWKMALSGGLRCCRRVLSWVPVLVIVLVVLWSYYAYVFELCLVIYLILYHAIFVFFTWTYWKSIFTLPQQPNQKFHLSYTDKERYENEERPEVQKQMLVDMAKKLPVYTRTGSGAVRFCDRCHLIKPDRCHHCSVCAMCVLKMDHHCPWVNNCIGFSNYKFFLQFLAYSVLYCLYIATTVFSYFIKYWRGELPSVRSKFHVLFLLFVACMFFVSLVILFGYHCWLVSRNKTTLEAFCTPVFTSGPEKNGFNLGFIKNIQQVFGDKKKFWLIPIGSSPGDGHSFPMRSMNESQNPLLANEETWEDNEDDNQDYPEGSSSLAVETET

SEQ ID NO: 20129 - protein, 858 aa, Homo sapiens
MLQQELLSRTSLETQKLDLMAEISNLKLKLTAVEKDRLDYEDKFRDTEGLIQEINDLRLKVSEMDSERLQYEKKLKSTKSLMAKLSSMKIKVGQMQYEKQRMEQKWESLKDELASLKEQLEEKESEVKRLQEKLVCKMKGEGVEIVDRDIEVQKMKKAVESLMAANEEKDRKIEDLRQCLNRYKKMQDTVVLAQGKDGEYEELLNSSSISSLLDAQGFSDLEKSPSPTPVMGSPSCDPFNTSVPEEFHTTILQVSIPSLLPATVSMETSEKSKLTPKPETSFEENDGNIILGATVDTQLCDKLLTSSLQKSSSLGNLKKETSDGEKETIQKTSEDRAPAESRPFGTLPPRPPGQDTSMDDNPFGTRKVRSSFGRGFFKIKSNKRTASAPNLAETEKETAEHLDLAGASSRPKDSQRNSPFQIPPPSPDSKKKSRGIMKLFGKLRRSQSTTFNPDDMSEPEFKRGGTRATAGPRLGWSRDLGQSNSDLDMPFAKWTKEQVCNWLMEQGLGSYLNSGKHWIASGQTLLQASQQDLEKELGIKHSLHRKKLQLALQALGSEEETNHGKLDFNWVTRWLDDIGLPQYKTQFDEGRVDGRMLHYMTVDDLLSLKVVSVLHHLSIKRAIQVLRINNFEPNCLRRRPSDENTIAPSEVQKWTNHRVMEWLRSVDLAEYAPNLRGSGVHGGLMVLEPRFNVETMAQLLNIPPNKTLLRRHLATHFNLLIGAEAQHQKRDAMELPDYVLLTATAKVKPKKLAFSNFGNLRKKKQEDGEEYVCPMELGQASGSASKKGFKPGLDMRLYEEDDLDRLEQMEDSEGTVRQIGAFSEGINNLTHMLKEDDMFKDFAARSPSASITDEDSNV

SEQ ID NO: 20130 - protein, 808 aa, Homo sapiens
MSSVSPIQIPSRLPLLLTHEGVLLPGSTMRTSVDSARNLQLVRSRLLKGTSLQSTILGVIPNTPDPASDAQDLPPLHRIGTAALAVQVVGSNWPKPHYTLLITGLCRFQIVQVLKEKPYPIAEVEQLDRLEEFPNTCKMREELGELSEQFYKYAVQILDAVSLEERFKMTIPLLVRQIEGLKLLQKTRKPKQDDDKRVIAIRPIRRITHISGTLEDEDEDEDNDDIVMLEKKIRTSSMPEQAHKVCVKEIKRLKKMPQSMPEYALTRNYLELMVELPWNKSTTDRLDIRAARILLDNDHYAMEKLKKRVLEYLAVRQLKNNLKGPILCFVGPPGVGKTSVGRSVAKTLGREFHRIALGGVCDQSDIRGHRRTYVGSMPGRIINGLKTVGVNNPVFLLDEVDKLGKSLQGDPAAALLEVLDPEQNHNFTDHYLNVAFDLSQVLFIATANTTATIPAALLDRMEIIQVPGYTQEEKIEIAHRHLIPKQLEQHGLTPQQIQIPQVTTLDIITRYTREAGVRSLDRKLGAICRAVAVKVAEGQHKEAKLDRSDVTEREGCREHILEDEKPESISDTTDLALPPEMPILIDFHALKDILGPPMYEMEVSQRLSQPGVAIGLAWTPLGGEIMFVEASRMDGEGQLTLTGQLGDVMKESAHLAISWLRSNAKKYQLTNAFGSFDLLDNTDIHLHFPAGAVTKDGPSAGVTIVTCLASLFSGRLVRSDVAMTGEITLRGLVLPVGGIKDKVLAAHRAGLKQVIIPRRNEKDLEGIPGNVRQDLSFVTASCLDEVLNAAFDGGFTVKTRPGLLNSKL

SEQ ID NO: 20131 - protein, 124 aa, Homo sapiens
DDAQVVCQQLGCGPALKAFKEAEFGQGTGPIWLNEVKCKGNESSLWDCPARRWGHSECGHKEDAAVNCTDISVQKTPQKATTENSHESADFSAAELISVSKFLPISGMEKEAILSHTEKENGNL

SEQ ID NO: 20132 - protein, 119 aa, Homo sapiens
MVSKLSQLQTELLAALLESGLSKEALIQALGEPGPYLLAGEGPLDKGESCGGGRGELAELPNGLGETRGSEDETDDDGEDFTPPILKELENLSPEEAAHQKAVVETLLQVHPCRAGRAD

SEQ ID NO: 20133 - protein, 580 aa, Homo sapiens
MKDYDELLKYYELHETIGTGGFAKVKLACHILTGEMVAIKIMDKNTLGSDLPRIKTEIEALKNLRHQHICQLYHVLETANKIFMVLEGNKDYHLQTCCGSLAYAAPELIQGKSYLGSEADVWSMGILLYVLMCGFLPFDDDNVMALYKKIMRGKYDVPKWLSPSSILLLQQMLQVDPKKRISMKNLLNHPWIMQDYNYPVEWQSKNPFIHLDDDCVTELSVHHRNNRQTMEDLISLWQYDHLTATYLLLLAKKARGKPVRLRLSSFSCGQASATPFTDIKSNNWSLEDVTASDKNYVAGLIDYDWCEDDLSTGAATPRTSQFTKYWTESNGVESKSLTPALCRTPANKLKNKENVYTPKSAVKNEEYFMFPEPKTPVNKNQHKREILTTPNRYTTPSKARNQCLKETPIKIPVNSTGTDKLMTGVISPERRCRSVELDLNQAHMEETPKRKGAKVFGSLERGLDKVITVLTRSKRKGSARDGPRRLKLHYNVTTTRLVNPDQLLNEIMSILPKKHVDFVQKGYTLKCQTQSDFGKVTMQFELEVCQLQKPDVVGIRRQRLKGDAWVYKRLVEDILSSCKV

SEQ ID NO: 20134 - protein, 176 aa, Homo sapiens
MLPLSHPGGVTNTAQYQNRLMVYEPNQNKWISRSPMLQRRVYHSMAAVQRKLYVLGGNDLDYNNDRILVRHIDSYNIDTDQWTRCNFNLLTGQNESGVAVHNGRIYLVGGYSIWTNEPLACIQVLDVSREGKEEVFYGPTLPFASNGIAACFLPAPYFTCPNLQTLQVPHHRIGTI

SEQ ID NO: 20135 - protein, 625 aa, Homo sapiens
MKTMEFYCEACETAMCGECRAGEHREHGTVLLRDVVEQHKAALQRQLEAVRGRLPQLSAAIALVGGISQQLQERKAEALAQISAAFEDLEQALQQRKQALVSDLETICGAKQKVLQSQLDTLRQGQEHIGSSCSFAEQALRLGSAPEVLLVRKHMRERLAALAAQAFPERPHENAQLELVLEVDGLRRSVLNLGALLTTSATAHETVATGEGLRQALVGQPASLTVTTKDKDGRLVRTGSAELRAEITGPDGTRLPVPVVDHKNGTYELVYTARTEGELLLSVLLYGQPVRGSPFRVRALRPGDLPPSPDDVKRRVKSPGGPGSHVRQKAVRRPSSMYSTGGKRKDNPIEDELVFRVGSRGREKGEFTNLQGVSAASSGRIVVADSNNQCIQVFSNEGQFKFRFGVRGRSPGQLQRPTGVAVDTNGDIIVADYDNRWVSIFSPEGKFKTKIGAGRLMGPKGVAVDRNGHIIVVDNKSCCVFTFQPNGKLVGRFGGRGATDRHFAGPHFVAVNNKNEIVVTDFHNHSVKVYSADGEFLFKFGSHGEGNGQFNAPTGVAVDSNGNIIVADWGNSRIQVFDSSGSFLSYINTSAEPLYGPQGLALTSDGHVVVADAGNHCFKAYRYLQ

SEQ ID NO: 20136 - protein, 779 aa, Homo sapiens
MLPCHSPSRSDQVNLGPSINSKLLGMSTQNYALMQVAGQEGTFSLVALPHVASAQPIQKPRMSLPENLKLPIPRYQPPRNSKASRKKPILIFPKSGCSKAPAQTQMCPQMSPSPPHHPELLYKPSPFEEVPSLEQAPASISTAALTNGSDHGDLRPPVTNTHGSLNPPATPASSTPEEPAKQDLTALSGKAHFVSKITSSKPSAVASEKFKEQVDLAKTMTNLSPTILGNAVQLISSVPKGKLPIPPYSRMKTMEVYKIKSDANIAGFSLPGPKADCDKIPSTTEGFNAATKVASRLPVPQVSQQSACESAFCPPTKLDLNHKTKLNSGAAKRKGRKRKVPDEILAFQGKRRKYIINKCRDGKERVKNDPQEFRDQKLGTLKKYRSIMPKPIMVIPTLASLASPTTLQSQMLGGLGQDVLLNNSLTPKYLGCKQDNSSSPKPSSVFRNGFSGIKKPWHRCHVCNHHFQFKQHLRDHMNTHTNRRPYSCRICRKSYVRPGSLSTHMKLHHGENRLKKLMCCEFCAKVFGHIRVYFGHLKEVHRVVISTEPAPSELQPGDIPKNRDMSVRGMEGSLERENKSNLEEDFLLNQADEVKLQIKCGRCQITAQSFAEIKFHLLDVHGEEIEGRLQEGTFPGSKGTQEELVQHASPDWKRHPERGKPEKVHSSSEESHACPRLKRQLHLHQNGVEMLMENEGPQSGTNKPRETCQGPECPGLHTFLLWSHSGFNCLLCAEMLGRKEDLLHHWKHQHNCEDPSKLWAILNTVSNQGVIELSSEAEK

SEQ ID NO: 20137 - protein, 488 aa, Homo sapiens
MDKILLSSGRDASLMVTNDGATILKNIGVDNPAAKVLVDMSRVQDDEVGDGTTSVTVLAAELLREAESLIAKKIHPQTIIAGWREATKAAREALLSSAVDHGSDEVKFRQDLMNIAGTTLSSKLLTHHKDHFTKLAVEAVLRLKGSGNLEAIHIIKKLGGSLADSYLDEGFLLDKKIGVNQPKRIENAKILIANTGMDTDKIKIFGSRVRVDSTAKVAEIEHAEKEKMKEKVERILKHGINCFINRQLIYNYPEQLFGAAGVMAIEHADFAGVERLALVTGGEIASTFDHPELVKLGSCKLIEEVMIGEDKLIHFSGVALGEACTIVLRGATQQILDEAERSLHDALCVLAQTVKDSRTVYGGGCSEMLMAHAVTQLANRTPGKEAVAMESYAKALRMLPTIIADNAGYDSADLVAQLRAAHSEGNTTAGLDMREGTIGDMAILGITESFQVKRQVLLSAAEAAEVILRVDNIIKAAPRKRVPDHHPC

SEQ ID NO: 20138 - protein, 471 aa, Homo sapiens
MEGSADSYTSRPSLDSDVSLEEDRESARREVESQAQQQLERAKHKPVAFAVRTNVSYCGVLDEECPVQGSGVNFEAKDFLHIKEKYSNDWWIGRLVKEGGDIAFIPSPQRLESIRLKQEQKARRSGNPSSLSDIGNRRSPPPSLAKQKQKQAEHVPPYDVVPSMRPVVLVGPSLKGYEVTDMMQKALFDFLKHRFDGRISITRVTADLSLAKRSVLNNPGKRTIIERSSARSSIAEVQSEIERIFELAKSLQLVVLDADTINHPAQLAKTSLAPIIVFVKVSSPKVLQRLIRSRGKSQMKHLTVQMMAYDKLVQCPPESFDVILDENQLEDACEHLAEYLEVYWRATHHPAPGPGLLGPPSAIPGLQNQQLLGERGEEHSPLERDSLMPSDEASESSRQAWTGSSQRSSRHLEEDYADAYQDLYQPHRQHTSGLPSANGHDPQDRLLAQDSEHNHSDRNWQRNRPWPKDSY

SEQ ID NO: 20139 - protein, 354 aa, Homo sapiens
MGVCGYLFLPWKCLVVVSLRLLFLVPTGVPVRSGDATFPKAMDNVTVRQGESATLRCTIDDRVTRVAWLNRSTILYAGNDKWSIDPRVIILVNTPTQYSIMIQNVDVYDEGPYTCSVQTDNHPKTSRVHLIVQVPPQIMNISSDITVNEGSSVTLLCLAIGRPEPTVTWRHLSVKEGQGFVSEDEYLEISDIKRDQSGEYECSALNDVAAPDVRKVKITVNYPPYISKAKNTGVSVGQKGILSCEASAVPMAEFQWFKEETRLATGLDGMRIENKGRMSTLTFFNVSEKDYGNYTCVATNKLGNTNASITLYEISPSSAVAGPGAVIDGVNSASRALACLWLSGTLLAHFFIKF

SEQ ID NO: 20140 - protein, 760 aa, Homo sapiens
MGDPGSEIIESVPPAGPEASESTTDENEDDIQFVSILFPKMPKRQGDFLHFLNVKKVKTDTENNEVSKNHCRLSKAKEPHFEYIEQPIIEEKPSLSSKKEIDNLVLPDCWNEKQAFMFTEQYKWLEIKEGKLGCKDCSAVRHLGSKAEKHVHVSKEWIAYLVTPNGSNKTTRQASLRKKIREHDVSKAHGKIQDLLKESTNDSICNLVHKQNNKNIDATVKVFNTVYSLVKHNRPLSDIEGARELQEKNGEVNCLNTRYSATRIAEHIAKEMKMKIFKNIIEENAKICIIIDEASTVSKKTTLVIYLQCTIQSAPAPVMLFVALKELVSTIAECIVNTLLTTLNDCGFTNEYLKANLIAFCSDGANTILGRKSGVATKLLENFPEIIIWNCLNHRLQLSLDDSISEIKQINHLKIFIDKIYSIYHQPNKNQTKLLGTVAKELETEIIKIGRVMGPRWAACSLQAATAVWHAYPILYMHFSHSYSGLAKRLANINFLQDLALMIDILEEFSVLSTALQSRSTNIKKAQKLIKRTIRALENLKIGTGKYESQIEDLIKSDKFKDIPFNKNNKFNALPRSILLDNIIQHMNLRLLSDRNHEDIFNYFDLLEPSTWPYEEITSPWIAGEKTLFHLCKILKYEVDLNDFREFVNNNIKSNNVSIPTTIYKAKKIVSTIAINSAEAERGFNLMNIICTRVRNSLTIDHVSDLMTINLLGKELADWDATPFVKSWSNCNHRLATDTRVRQKSTKVFHENQLAIWNLK

SEQ ID NO: 20141 - protein, 493 aa, Homo sapiens
MALLPRALSAGAGPSWRRAARAFRGFLLLLPEPAALTRALSRAMACRQEPQPQGPPPAAGAVASYDYLVIGGGSGGLASARRAAELGARAAVVESHKLGGTCVNVGCVPKKVMWNTAVHSEFMHDHADYGFPSCEGKFNWRVIKEKRDAYVSRLNAIYQNNLTKSHIEIIRGHAAFTSDPKPTIEVSGKKYTAPHILIATGGMPSTPHESQIPGASLGITSDGFFQLEELPGRSVIVGAGYIAVEMAGILSALGSKTSLMIRHDKVKEVKKTLSGLEVSMVTAVPGRLPVMTMIPDVDCLLWAIGRVPNTKDLSLNKLGIQTDDKGHIIVDEFQNTNVKGIYAVGDVCGKALLTPVAIAAGRKLAHRLFEYKEDSKLDYNNIPTVVFSHPPIGTVGLTEDEAIHKYGIENVKTYSTSFTPMYHAVTKRKTKCVMKMVCANKEEKVVGIHMQGLGCDEMLQGFAVAVKMGATKADFDNTVAIHPTSSEELVTLR

SEQ ID NO: 20142 - protein, 413 aa, Homo sapiens
MRRGCAVLGALGLLAGAGVGSWLLVLYLCPAASQPISGTLQDEEITLSCSEASAEEALLPALPKTVSFRINSEDFLLEAQVRDQPRWLLVCHEGWSPALGLQICWSLGHLRLTHHKGVNLTDIKLNSSQEFAQLSPRLGGFLEEAWQPRNNCTSGQVVSLRCSECGARPLASRIVGGQSVAPGRWPWQASVALGFRHTCGGSVLAPRWVVTAAHCMHSFRLARLSSWRVHAGLVSHSAVRPHQGALVERIIPHPLYSAQNHDYDVALLRLQTALNFSDTVGAVCLPAKEQHFPKGSRCWVSGWGHTHPSHTYSSDMLQDTVVPLFSTQLCNSSCVYSGALTPRMLCAGYLDGRADACQGDSGGPLVCPDGDTWRLVGVVSWGRGCAEPNHPGVYAKVAEFLDWIHDTAQDSLL

SEQ ID NO: 20143 - protein, 1392 aa, Homo sapiens
MSMLKPSGLKAPTKILKPGSTALKTPTAVVAPVEKTISSEKASSTPSSETQEEFVDDFRVGERVWVNGNKPGFIQFLGETQFAPGQWAGIVLDEPIGKNDGSVAGVRYFQCEPLKGIFTRPSKLTRKVQAEDEANGLQTTPASRATSPLCTSTASMVSSSPSTPSNIPQKPSQPAAKEPSATPPISNLTKTASESISNLSEAGSIKKGERELKIGDRVLVGGTKAGVVRFLGETDFAKGEWCGVELDEPLGKNDGAVAGTRYFQCQPKYGLFAPVHKVTKIGFPSTTPAKAKANAVRRVMATTSASLKRSPSASSLSSMSSVASSVSSRPSRTGLLTETSSRYARKISGTTALQEALKEKQQHIEQLLAERDLERAEVAKATSHVGEIEQELALARDGHDQHVLELEAKMDQLRTMVEAADREKVELLNQLEEEKRKVEDLQFRVEEESITKGDLEVATVSEKSRIMELEKDLALRVQEVAELRRRLESNKPAGDVDMSLSLLQEISSLQEKLEVTRTDHQREITSLKEHFGAREETHQKEIKALYTATEKLSKENESLKSKLEHANKENSDVIALWKSKLETAIASHQQAMEELKVSFSKGLGTETAEFAELKTQIEKMRLDYQHEIENLQNQQDSERAAHAKEMEALRAKLMKVIKEKENSLEAIRSKLDKAEDQHLVEMEDTLNKLQEAEIKVKELEVLQAKCNEQTKVIDNFTSQLKATEEKLLDLDALRKASSEGKSEMKKLRQQLEAAEKQIKHLEIEKNAESSKASSITRELQGRELKLTNLQENLSEVSQVKETLEKELQILKEKFAEASEEAVSVQRSMQETVNKLHQKEEQFNMLSSDLEKLRENLADMEAKFREKDEREEQLIKAKEKLENDIAEIMKMSGDNSSQLTKMNDELRLKERDVEELQLKLTKANENASFLQKSIEDMTVKAEQSQQEAAKKHEEEKKELERKLSDLEKKMETSHNQCQELKARYERATSETKTKHEEILQNLQKTLLDTEDKLKGAREENSGLLQELEELRKQADKAKAAQTAEDAMQIMEQMTKEKTETLASLEDTKQTNAKLQNELDTLKENNLKNVEELNKSKELLTVENQKMEEFRKEIETLKQAAAQKSQQLSALQEENVKLAEELGRSRDEVTSHQKLEEERSVLNNQLLEMKKRESKFIKDADEEKASLQKSISITSALLTEKDAELEKLRNEVTVLRGENASAKSLHSVVQTLESDKVKLELKVKNLELQLKENKRQLSSSSGNTDTQADEDERAQESQIDFLNSVIVDLQRKNQDLKMKVEMMSEAALNGNGDDLNNYDSDDQEKQSKKKPRLFCDICDCFDLHDTEDCPTQAQMSEDPPHSTHHGSRGEERPYCEICEMFGHWATNCNDDETF

SEQ ID NO: 20144 - protein, 443 aa, Homo sapiens
MTHTLPSSYHNDARSSLSVSLEPESLGLGSANSSQDSLHKAPKKKGIKSSIGRLFGKKEKARLGQLRGFMETEAAAQESLGLGKLGTQAEKDRRLKKKHELLEEARRKGLPFAQWDGPTVVAWLELWLGMPAWYVAACRANVKSGAIMSALSDTEIQREIGISNPLHRLKLRLAIQEMVSLTSPSAPPTSRTCPVFLQTLAYGDMNHEWIGNEWLPSLGLPQYRSYFMECLVDARMLDHLTKKDLRVHLKMVDSFHRTSLQYGIMCLKRLNYDRKELERRREASQHEIKDVLVWSNDRVIRWIQAIGLREYANNILESGVHGSLIALDENFDYSSLALLLQIPTQNTQARQILEREYNNLLALGTERRLDESDDKNFRRGSTWRRQFPPREVHGISMMPGSSETLPAGFRLTTTSGQSRKMTTDVASSRLQRLDNSTVRTYSC

SEQ ID NO: 20145 - protein, 211 aa, Homo sapiens
MYGPRAASRNKETSAGPVAVMGKDYYKILGIPSGANEDEIKKAYRKMALKYHPDKNKEPNAEEKFKEIAEAYDVLSDPKKRGLYDQYGEEGLKTGGGTSGGSSGSFHYTFHGDPHATFASFFGGSNPFDIFFASSRSTRPFSGFDPDDMDVDEDEDPFGAFGRFGFNGLSRGPRRAPEPLYPRRKVQDPPVVHELRVSLEEIYHGSTKRMK

SEQ ID NO: 20146 - protein, 570 aa, Homo sapiens
MAEPQAESEPLLGGARGGGGDWPAGLTTYRSIQVGPGAAARWDLCIDQAVVFIEDAIQYRSINHRVDASSMWLYRRYYSNVCQRTLSFTIFLILFLAFIETPSSLTSTADVRYRAAPWEPPCGLTESVEVLCLLVFAADLSVKGYLFGWAHFQKNLWLLGYLVVLVVSLVDWTVSLSLVCHEPLRIRRLLRPFFLLQNSSMMKKTLKCIRWSLPEMASVGLLLAIHLCLFTMFGMLLFAGGKQDDGQDRERLTYFQNLPESLTSLLVLLTTANNPDVMIPAYSKNRAYAIFFIVFTVIGSLFLMNLLTAIIYSQFRGYLMKSLQTSLFRRRLGTRAAFEVLSSMVGEGGAFPQAVGVKPQNLLQVLQKVQLDSSHKQAMMEKVRSYGSVLLSAEEFQKLFNELDRSVVKEHPPRPEYQSPFLQSAQFLFGHYYFDYLGNLIALANLVSICVFLVLDADVLPAERDDFILGILNCVFIVYYLLEMLLKVFALGLRGYLSYPSNVFDGLLTVVLLNFLHKWDPRSHLQPLAGTPEATYQMTVELLFRDILEEPGEDELTERLSQHPHLWLCR

SEQ ID NO: 20147 - protein, 1073 aa, Homo sapiens
MRMVHILTSVVGSKCEVQVKNGGIYEGVFKTYSPKCDLVLDAAHEKSTESSSGPKREEIMESILFKCSDFVVVQFKDMDSSYAKRDAFTDSAISAKVNGEHKEKDLEPWDAGELTANEELEALENDVSNGWDPNDMFRYNEENYGVVSTYDSSLSSYTVPLERDNSEEFLKREARANQLAEEIESSAQYKARVALENDDRSEEEKYTAVQRNSSEREGHSINTRENKYIPPGQRNREVISWGSGRQNSPRMGQPGSGSMPSRSTSHTSDFNPNSGSDQRVVNGGVPWPSPCPSPSSRPPSRYQSGPNSLPPRAATPTRPPSRPPSRPSRPPSHPSAHGSPAPVSTMPKRMSSEGPPRMSPKAQRHPRNHRVSAGRGSISSGLEFVSHNPPSEAATPPVARTSPSGGTWSSVVSGVPRLSPKTHRPRSPRQNSIGNTPSGPVLASPQAGIIPTEAVAMPIPAASPTPASPASNRAVTPSSEAKDSRLQDQRQNSPAGNKENIKPNETSPSFSKAENKGISPVVSEHRKQIDDLKKFKNDFRLQPSSTSESMDQLLNKNREGEKSRDLIKDKIEPSAKDSFIENSSSNCTSGSSKPNSPSISPSILSNTEHKRGPEVTSQGVQTSSPACKQEKDDKEEKKDAAEQVRKSTLNPNAKEFNPRSFSQPKPSTTPTSPRPQAQPSPSMVGHQQPTPVYTQPVCFAPNMMYPVPVSPGVQPLYPIPMTPMPVNQAKTYRAVPNMPQQRQDQHHQSAMMHPASAAGPPIAATPPAYSTQYVAYSPQQFPNQPLVQHVPHYQSQHPHVYSPVIQGNARMMAPPTHAQPGLVSSSATQYGAHEQTHAMYACPKLPYNKETSPSFYFAISTGSLAQQYAHPNATLHPHTPHPQPSATPTGQQQSQHGGSHPAPSPVQHHQHQAAQALHLASPQQQSAIYHAGLAPTPPSMTPASNTQSPQNSFPAAQQTVFTIHPSHVQPAYTNPPHMAHVPQCASEALARCGLEMRLSWIYLSEGYLAHVQSGMVPSHPTAHAPMMLMTTQPPGGPQAALAQSALQPIPVSTTAHFPYMTHPSVQAHHQQQL

SEQ ID NO: 20148 - protein, 1508 aa, Homo sapiens
MAEGFRKNDEMKAMDVLPILKEKVAYLSGGRDKRGGPILTFPARSNHDRIRQEDLRRLISYLACIPSEEVCKRGFTVIVDMRGSKWDSIKPLLKILQESFPCCIHVALIIKPDNFWQKQRTNFGSSKFEFETNMVSLEGLTKVVDPSQLTPEFDGCLEYNHEEWIEIRVAFEDYISNATHMLSRLEELQDILAKKELPQDLEGARNMIEEHSQLKKKVIKAPIEDLDLEGQKLLQRIQSSESFPKKNSGSGNADLQNLLPKVSTMLDRLHSTRQHLHQMWHVRKLKLDQCFQLRLFEQDAEKMFDWITHNKGLFLNSYTEIGTSHPHAMELQTQHNHFAMNCMNVYVNINRIMSVANRLVESGHYASQQIRQIASQLEQEWKAFAAALDERSTLLDMSSIFHQKAEKYMSNVDSWCKACGEVDLPSELQDLEDAIHHHQGIYEHITLAYSEVSQDGKSLLDKLQRPLTPGSSDSLTASANYSKAVHHVLDVIHEVLHHQRQLENIWQHRKVRLHQRLQLCVFQQDVQQVLDWIENHGEAFLSKHTGVGKSLHRARALQKRHEDFEEVAQNTYTNADKLLEAAEQLAQTGECDPEEIYQAAHQLEDRIQDFVRRVEQRKILLDMSVSFHTHVKELWTWLEELQKELLDDVYAESVEAVQDLIKRFGQQQQTTLQVTVNVIKEGEDLIQQLRDSAISSNKTPHNSSINHIETVLQQLDEAQSQMEELFQERKIKLELFLQLRIFERDAIDIISDLESWNDELSQQMNDFDTEDLTIAEQRLQHHADKALTMNNLTFDVIHQGQDLLQYVNEVQASGVELLCDRDVDMATRVQDLLEFLHEKQQELDLAAEQHRKHLEQCVQLRHLQAEVKQVLGWIRNGESMLNAGLITASSLQEAEQLQREHEQFQHAIEKTHQSALQVQQKAEAMLQANHYDMDMIRDCAEKVASHWQQLMLKMEDRLKLVNASVAFYKTSEQVCSVLESLEQEYKREEDWCGGADKLGPNSETDHVTPMISKHLEQKEAFLKACTLARRNADVFLKYLHRNSVNMPGMVTHIKAPEQQVKNILNELFQRENRVLHYWTMRKRRLDQCQQYVVFERSAKQALEWIHDNGEFYLSTHTSTGSSIQHTQELLKEHEEFQITAKQTKERVKLLIQLADGFCEKGHAHAAEIKKCVTAVDKRYRDFSLRMEKYRTSLEKALGISSDSNKSSKSLQLDIIPASIPGSEVKLRDAAHELNEEKRKSARRKEFIMAELIQTEKAYVRDLRECMDTYLWEMTSGVEEIPPGIVNKELIIFGNMQEIYEFHNNIFLKELEKYEQLPEDVGHCFVTWADKFQMYVTYCKNKPDSTQLILEHAGSYFDEIQQRHGLANSISSYLIKPVQRITKYQLLLKELLTCCEEGKGEIKDGLEVMLSVPKRANDAMHLSMLEGFDENIESQGELILQESFQVWDPKTLIRKGRERHLFLFEMSLVFSKEVKDSSGRSKYLYKSKLFVSIGVQNCKSKGNTIAVFL

SEQ ID NO: 20149 - protein, 1077 aa, Homo sapiens
MEPSLKYINKKFPNIDVRNSTQHLGPVHREKAEIIRFLTNYYQSFVDVMEFRDHVYELLNTIDACQCHFDINLNFDFTRSYLDLIVTYTSVILLLSRIEDRRILIGMYNCAHEMLHGHGDPSFARLGQMVLEYDHPLKKLTEEFGPHTKAVSGALLSLHFLFVRRNQGAEQWRSAQLLSLISNPPAMINPANSDTMACEYLSVEVMERWIIIGFLLCHGCLNSNSQCQKLWKLCLQGSLYITLIREDVLQVHKVTEDLFSSLKGYGKRVADIKESKEHVIANSGQFHCQRRQFLRMAVKELETVLADEPGLLGPKALFAFMALSFIRDEVTWLVRHTENVTKTKTPEDYADSSIAELLFLLEGIRSLVRRHIKVIQQYHLQYLARFDALVLSDIIQNLSVCPEEESIIMSSFVSILSSLNLKQVDNGEKFEFSGLRLDWFRLQAYTSVAKAPLHLHENPDLAKVMNLIVFHSRMLDSVEKLLVETSDLSTFCFHLRIFEKMFAMTLEESAMLRYAIAFPLICAHFVHCTHEMCPEEYPHLKNHGLHHCNSFLEELAKQTSNCVLEICAEQRNLSEQLLPKHCATTISKAKNKKTRKQRQTPRKGEPERDKPGAESHRKNRSIVTNMDKLHLNLTELALTMNHVYSFSVFEHTIFPSEYLSSHLEARLNRAIVWLAGYNATTQEIVRPSELLAGVKAYIGFIQSLAQFLGADASRVIRNALLQQTQPLDSCGEQTITTLYTNWYLESLLRQASSGTIILSPAMQAFVSLPREGEQNFSAEEFSDISEMRALAELLGPYGMKFLSENLMWHVTSQIVELKKLVVENMDILVQIRSNFSKPDLMASLLPQLTGAENVLKRMTIIGVILSFRAMAQEGLREVFSSHCPFLMGPIECLKEFVTPDTDIKVTLSIFELASAAGVGCDIDPALVAAIANLKADTSSPEEEYKVACLLLIFLAVSLPLLATDPSSFYSIEKDGYNNNIHCLTKAIIQVSAALFTLYNKNIETHLKEFLVVASVSLLQLGQETDKLKTRNRESISLLMRLVVEESSFLTLDMLESCFPYVLLRNAYREVSRAFHLN

SEQ ID NO: 20150 - protein, 1637 aa, Homo sapiens
MLGAPDESSVRVAVRIRPQLAKEKIEGCHICTSVTPGEPQVFLGKDKAFTFDYVFDIDSQQEQIYIQCIEKLIEGCFEGYNATVFAYGQTGAGKTYTMGTGFDVNIVEEELGIISRAVKHLFKSIEEKKHIAIKNGLPAPDFKVNAQFLELYNEEVLDLFDTTRDIDAKSKKSNIRIHEDSTGGIYTVGVTTRTVNTESEMMQCLKLGALSRTTASTQMNVQSSRSHAIFTIHVCQTRVCPQIDADNATDNKIISESAQMNEFETLTAKFHFVDLAGSERLKRTGATGERAKEGISINCGLLALGNVISALGDKSKRATHVPYRDSKLTRLLQDSLGGNSQTIMIACVSPSDRDFMETLNTLKYANRARNIKNKVMVNQDRASQQINALRSEITRLQMELMEYKTGKRIIDEEGVESINDMFHENAMLQTENNNLRVRIKAMQETVDALRSRITQLVSDQANHVLARAGEGNEEISNMIHSYIKEIEDLRAKLLESEAVNENLRKNLTRATARAPYFSGSSTFSPTILSSDKETIEIIDLAKKDLEKLKRKEKRKKKSVAGKEDNTDTDQEKKEEKGVSERENNELEVEESQEVSDHEDEEEEEEEEEDDIDGGESSDESDSESDEKANYQADLANITCEIAIKQKLIDELENSQKRLQTLKKQYEEKLMMLQHKIRDTQLERDQVLQNLGSVESYSEEKAKKVRSEYEKKLQAMNKELQRLQAAQKEHARLLKNQSQYEKQLKKLQQDVMEMKKTKVRLMKQMKEEQEKARLTESRRNREIAQLKKDQRKRDHQLRLLEAQKRNQEVVLRRKTEEVTALRRQVRPMSDKVAGKVTRKLSSSDAPAQDTGSSAAAVETDASRTGAQQKMRIPVARVQALPTPATNGNRKKYQRKGLTGRVFISKTARMKWQLLERRVTDIIMQKMTISNMEADMNRLLKQREELTKRREKLSKRREKIVKENGEGDKNVANINEEMESLTANIDYINDSISDCQANIMQMEEAKEEGETLDVTAVINACTLTEARYLLDHFLSMGINKGLQAAQKEAQIKVLEGRLKQTEITSATQNQLLFHMLKEKAELNPELDALLGHALQENVEDSTDEDAPLNSPGSEGSTLSSDLMKLCGEVKPKNKARRRTTTQMELLYADSSELASDTSTGDASLPGPLTPVAEGQEIGMNTETSGTSAREKELSPPPGLPSKIGSISRQSSLSEKKIPEPSPVTRRKAYEKAEKSKAKEQKHSDSGTSEASLSPPSSPPSRPRNELNVFNRLTVSQGNTSVQQDKGIINPFPASKGIRAFPLQCIHIAEGHTKAVLCVDSTDDLLFTGSKDRTCKVWNLVTGQEIMSLGGHPNNVVSVKYCNYTSLVFTVSTSYIKVWDIRDSAKCIRTLTSSGQVTLGDACSASTSRTVAIPSGENQINQIALNPTGTFLYAASGNAVRMWDLKRFQSTGKLTGHLGPVMCLTVDQISSGQDLIITGSKDHYIKMFDVTEGALGTVSPTHNFEPPHYDGIEALTIQGDNLFSGSRDNGIKKWDLTQKDLLQQVPNAHKDWVCALGVVPDHPVLLSGCRGGILKVWNMDTFMPVGEMKGHDSPINAICVNSTHIFTAADDRTVRIWKARNLQDGQISDTGDLGEDIASN

SEQ ID NO: 20151 - protein, 752 aa, Homo sapiens
MKLEEVVVTLQLGGDKEPTETIGDLSICLDGLQLESEVVTNGETTCSESASQNDDGSRSKDETRVSTNGSDDPEDAGAGENRRVSGNNSPSLSNGGFKPSRPPRPSRPPPPTPRRPASVNGSPSATSESDGSSTGSLPPTNTNTNTSEGATSGLIIPLTISGGSGPRPLNPVTQAPLPPGWEQRVDQHGRVYYVDHVEKRTTWDRPEPLPPGWERRVDNMGRIYYVDHFTRTTTWQRPTLESVRNYEQWQLQRSQLQGAMQQFNQRFIYGNQDLFATSQSKEFDPLGPLPPGWEKRTDSNGRVYFVNHNTRITQWEDPRSQGQLNEKPLPEGWEMRFTVDGIPYFVDHNRRTTTYIDPRTGKSALDNGPQIAYVRDFKAKVQYFRFWCQQLAMPQHIKITVTRKTLFEDSFQQIMSFSPQDLRRRLWVIFPGEEGLDYGGVAREWFFLLSHEVLNPMYCLFEYAGKDNYCLQINPASYINPDHLKYFRFIGRFIAMALFHGKFIDTGFSLPFYKRILNKPVGLKDLESIDPEFYNSLIWVKENNIEECDLEMYFSVDKEILGEIKSHDLKPNGGNILVTEENKEEYIRMVAEWRLSRGVEEQTQAFFEGFNEILPQQYLQYFDAKELEVLLCGMQEIDLNDWQRHAIYRHYARTSKQIMWFWQFVKEIDNEKRMRLLQFVTGTCRLPVGGFADLMGSNGPQKFCIEKVGKENWLPRSHTCFNRLDLPPYKSYEQLKEKLLFAIEETEGFGQE

SEQ ID NO: 20152 - protein, 2717 aa, Homo sapiens
MPRTKQIHPRNLRDKIEEAQKELNGAEVSKKEILQAGVKGTSESLKGVKRKKIVAENHLKKIPKSPLRNPLQAKHKQNTEESSFAVLHSASESHKKQNYIPVKNGKQFTKQNGETPGIIAEASKSEESVSPKKPLFLQQPSELRRWRSEGADPAKFSDLDEQCDSSSLSSKTRTDNSECISSHCGTTSPSYTNTAFDVLLKAMEPELSTLSQKGSPCAIKTEKLRPNKTARSPPKLKNSSMDAPNQTSQELVAESQSSCTSYTVHMSAAQKNEQGAMQSASHLYHQHEHFVPKSNQHNQQLPGCSGFTGSLTNLQNQENAKLEQVYNIAVTSSVGLTSPSSRSQVTPQNQQMDSASPLSISPANSTQSPPMPIYNSTHVASVVNQSVEQMCNLLLKDQKPKKQGKYICEYCNRACAKPSVLLKHIRSHTGERPYPCVTCGFSFKTKSNLYKHKKSHAHTIKLGLVLQPDAGGLFLSHESPKALSIHSDVEDSGESEEEGATDERQHDLGAMELQPVHIIKRMSNAETLLKSSFTPSSPENVIGDFLLQDRSAESQAVTELPKVVVHHVTVSPLRTDSPKAMDPKPELSSAQKQKDLQVTNVQPLSANMSQGGVSRLETNENSHQKGDMNPLEGKQDSHVGTVHAQLQRQQATDYSQEQQGKLLSPRSLGSTDSGYFSRSESADQTVSPPTPFARRLPSTEQDSGRSNGPSAALVTTSTPSALPTGEKALLLPGQMRPPLATKTLEERISKLISDNEALVDDKQLDSVKPRRTSLSRRGSIDSPKSYIFKDSFQFDLKPVGRRTSSSSDIPKSPFTPTEKSKQVFLLSVPSLDCLPITRSNSMPTTGYSAVPANIIPPPHPLRGSQSFDDKIGAFYDDVFVSGPNAPVPQSGHPRTLVRQAAIEDSSANESHVLGTGQSLDESHQGCHAAGEAMSVRSKALAQGPHIEKKKSHQGRGTMFECETCRNRYRKLENFENHKKFYCSELHGPKTKVAMREPEHSPVPGGLQPQILHYRVAGSSGIWEQTPQIRKRRKMKSVGDDEELQQNESGTSPKSSEGLQFQNALGCNPSLPKHNVTIRSDQQHKNIQLQNSHIHLVARGPEQTMDPKLSTIMEQQISSAAQDKIELQRHGTGISVIQHTNSLSRPNSFDKPEPFERASPVSFQELNRTGKSGSLKVIGISQEESHPSRDGSHPHQLALSDALRGELQESSRKSPSERHVLGQPSRLVRQHNIQVPEILVTEEPDRDLEAQCHDQEKSEKFSWPQRSETLSKLPTEKLPPKKKRLRLAEIEHSSTESSFDSTLSRSLSRESSLSHTSSFSASLDIEDVSKTEASPKIDFLNKAEFLMIPAGLNTLNVPGCHREMRRTASEQINCTQTSMEVSDLRSKSFDCGSITPPQTTPLTELQPPSSPSRVGVTGHVPLLERRRGPLVRQISLNIAPDSHLSPVHPTSFQNTALPSVNAVPYQGPQLTSTSLAEFSANTLHSQTQVKDLQAETSNSSSTNVFPVQQLCDINLLNQIHAPPSHQSTQLSLQVSTQGSKPDKNSVLSGSSKSEDCFAPKYQLHCQVFTSGPSCSSNPVHSLPNQVISDPVGTDHCVTSATLPTKLIDSMSNSHPLLPPELRPLGSQVQKVPSSFMLPIRLQSSVPAYCFATLTSLPQILVTQDLPNQPICQTNHSVVPISEEQNSVPTLQKGHQNALPNPEKEFLCENVFSEMSQNSSLSESLPITQKISVGRLSPQQESSASSKRMLSPANSLDIAMEKHQKRAKDENGAVCATDVRPLEALSSRVNEASKQKKPILVRQVCTTEPLDGVMLEKDVFSQPEISNEAVNLTNVLPADNSSTGCSKFVVIEPISELQEFENIKSSTSLTLTVRSSPAPSENTHISPLKCTDNNQERKSPGVKNQGDKVNIQEQSQQPVTSLSLFNIKDTQQLAFPSLKTTTNFTWCYLLRQKSLHLPQKDQKTSAYTDWTVSASNPNPLGLPTKVALALLNSKQNTGKSLYCQAITTHSKSDLLVYSSKWKSSLSKRALGNQKSTVVEFSNKDASEINSEQDKENSLIKSEPRRIKIFDGGQSNEEYVYVRGRGRGKYICEECGIRCKKPSMLKKHIRTHTDVRPYHCTYCNFSFKTKGNLTKHMKSKAHSKKCVDLGVSVGLIDEQDTEESDEKQRFSYERSGYDLEESDGPDEDDNENEDDDEDSQAESVLSATPSVTASPQHLPSRSSLQDPVSTDEDVRITDCFSGVHTDPMDVLPRALLTRMTVLSTAQSDYNRKTLSPGKARQRAARDENDTIPSVDTSRSPCHQMSVDYPESEEILRSSMAGKAVAITQSPSSVRLPPAAAEHSPQTAAGMPSVASPHPDPQEQKQQITLQPTPGLPSPHTHLFSHLPLHSQQQSRTPYNMVPVGGIHVVPAGLTYSTFVPLQAGPVQLTIPAVSVVHRTLGTHRNTVTEVSGTTNPAGVAELSSVVPCIPIGQIRVPGLQNLSTPGLQSLPSLSMETVNIVGLANTNMAPQVHPPGLALNAVGLQVLTANPSSQSSPAPQAHIPGLQILNIALPTLIPSVSQVAVDAQGAPEMPASQSKACETQPKQTSVASANQVSRTESPQGLPTVQRENAKKVLNPPAPAGDHARLDGLSKMDTEKAASANHVKPKPELTSIQGQPASTSQPLLKAHSEVFTKPSGQQTLSPDRQVPRPTALPRRQPTVHFSDVSSDDDEDRLVIAT

SEQ ID NO: 20153 - protein, 492 aa, Homo sapiens
MDPGQQPPPQPAPQGQGQPPSQPPQGQGPPSGPGQPAPAATQAAPQAPPAGHQIVHVRGDSETDLEALFNAVMNPKTANVPQTVPMRLRKLPDSFFKPPEPKSHSRQASTDAGTAGALTPQHVRAHSSPASLQLGAVSPGTLTPTGVVSGPAATPTAQHLRQSSFEIPDDVPLPAGWEMAKTSSGQRYFLNHIDQTTTWQDPRKAMLSQMNVTAPTSPPVQQNMMNSASGPLPDGWEQAMTQDGEIYYINHKNKTTSWLDPRLDPRFAMNQRISQSAPVKQPPPLAPQSPQGGVMGGSNSNQQQQMRLQQLQMEKERLRLKQQELLRQVRPQELALRSQLPTLEQDGGTQNPVSSPGMSQELRTMTTNSSDPFLNSGTYHSRDESTDSGLSMSSYSVPRTPDDFLNSVDEMDTGDTINQSTLPSQQNRFPDYLEAIPGTNVDLGTLEGDGMNIEGEELMPSLQEALSSDILNDMESVLAATKLDKESFLTWL

SEQ ID NO: 20154 - protein, 252 aa, Homo sapiens
MEKLAASTEPQGPRPVLGRESVQVPDDQDFRSFRSECEAEVGWNLTYSRAGVSVWVQAVEMDRTLHKIKCRMECCDVPAETLYDVLHDIEYRKKWDSNVIETFDIARLTVNADVGYYSWRCPKPLKNRDVITLRSWLPMGADYIIMNYSVKHPKYPPRKDLVRAVSIQTGYLIQSTGPKSCVITYLAQVDPKGSLPKWVVNKSSQFLAPKAMKKMYKACLKYPEWKQKHLPHFKPWLHPEQSPLPSLALSEL

SEQ ID NO: 20155 - protein, 361 aa, Homo sapiens
MDDDDFGGFEAAETFDGGSGETQTTSPAIPWAAFPAVSGVHLSPSSPEIVLDRDHSSSIGCLSSDAIISSPENTHAANSIVSQTIPKAQIQQSTHTHLDISLFPLGLTDEKSNGTIALVDDSEDPGANVSNIQLQQKISSLEIKLKVSEEEKQRIKQDVESLMEKHNVLEKGFLKEKEQEAISFQDRYKELQEKHKQELEDMRKAGHEALSIIVDEYKALLQSSVKQQVEAIEKQYISAIEKQAHKCEELLNAQHQRLLEMLDTEKELLKEKIKEALIQQSQEQKEILEKCLEEERQRNKEALVSAAKLEKEAVKDAVLKVVEEERKNLEKAHAEERELWKTEHAKDQEKVSQEIQKAIQE

SEQ ID NO: 20156 - protein, 407 aa, Homo sapiens
MSAGGPCPAAAGGGPGGASCSVGAPGGVSMFRWLEVLEKEFDKAFVDVDLLLGEIDPDQADITYEGRQKMTSLSSCFAQLCHKAQSVSQINHKLEAQLVDLKSELTETQAEKVVLEKEVHDQLLQLHSIQLQLHAKTGQSADSGTIKAKLSGPSVEELERELEANKKEKMKEAQLEAEVKLLRKENEALRRHIAVLQAEVYGARLAAKYLDKELAGRVQQIQLLGRDMKGPAHDKLWNQLEAEIHLHRHKTVIRACRGRNDLKRPMQAPPGHDQDSLKKSQGVGPIRKVLLLKEDHEGLGISITRGEIEFEVVYVAPEVDSDDENVEYEDESGHRYRLYLDELEGGGNPGASCKDTSGEIKVLQGFNKKAVTDTHENGDLGTASETPLDDGASKLDDLHTLYHKKSY

SEQ ID NO: 20157 - protein, 346 aa, Homo sapiens
MNEPQCFYNESIAFFYNRSGKHLATEWNTVSKLVMGLGITVCIFIMLANLLVMVAIYVNRRFHFPIYYLMANLAAADFFAGLAYFYLMFNTGPNTRRLTVSTWLLRQGLIDTSLTASVANLLAIAIERHITVFRMQLHTRMSNRRVVVVIVVIWTMAIVMGAIPSVGWNCICDIENCSNMAPLYSDSYLVFWAIFNLVTFVVMVVLYAHIFGYVRQRTMRMSRHSSGPRRNRDTMMSLLKTVVIVLGAFIICWTPGLVLLLLDVCCPQCDVLAYEKFFLLLAEFNSAMNPIIYSYRDKEMSATFRQILCCQRSENPTGPTEGSDRSASSLNHTILAGVHSNDHSVV

SEQ ID NO: 20158 - protein, 646 aa, Homo sapiens
MAAPAQPKKIVAPTVSQINAEFVTQLACKYWAPHIKKKSPFDIKVIEDIYEKEIVKSRFAIRKIMLLEFSQYLENYLWMNYSPEVSSKAYLMSICCMVNEKFRENVPAWEIFKKKPDHFPFFFKHILKAALAETDGEFSLHEQTVLLLFLDHCFNSLEVDLIRSQVQQLISLPMWMGLQLARLELELKKTPKLRKFWNLIKKNDEKMDPEAREQAYQERRFLSQLIQKFISVLKSVPLSEPVTMDKVHYCERFIELMIDLEALLPTRRWFNTILDDSHLLVHCYLSNLVRREEDGHLFSQLLDMLKFYTGFEINDQTGNALTENEMTTIHYDRITSLQRAAFAHFPELYDFALSNVAEVDTRESLVKFFGPLSSNTLHQVASYLCLLPTLPKNEDTTFDKEFLLELLVSRHERRISQIQQLNQMPLYPTEKIIWDENIVPTEYYSGEGCLALPKLNLQFLTLHDYLLRNFNLFRLESTYEIRQDIEDSVSRMKPWQSEYGGVVFGGWARMAQPIVAFTVVEVAKPNIGENWPTRVRADVTINLNVRDHIKDEWEGLRKHDVCFLITVRPTKPYGTKFDRRRPFIEQVGLVYVRGCEIQGMLDDKGRVIEDGMVTYIFERDLNPDPILEENQGHLECFWIQTSINKI

SEQ ID NO: 20159 - protein, 441 aa, Homo sapiens
MATVPGLQPLPTLEQDLEQEEILIVKVEEDFCLEEEPSVETEDPSPETFRQLFRLFCYQEVAGPREALSRLWELCCRWLRPELRTKEQILELLVLEQFLTVLPGEIQARVREQQPESGEEAVVLVEGLQRKPRKHRQRGSELLSDDEVPLGIGGQFLKHQAEAQPEDLSLEEEARFSSQQPPAQLSHRPQRGPLLWPERGPPAPRHQEMASASPFLSAWSQVPVNLEDVAVYLSGEEPRCMDPAQRDAPLENEGPGIQLEDGGDGREDAPLRMEWYRVLSARCQGPGHPLPGQRPAPVRGLVRPDQPRGGPPPGRRASHGADKPYTCPECGKGFSKTSHLTKHQRTHTGERPYKCLVCGKGFSDRSNFSTHQRVHTGEKPYPCPECGKRFSQSSSLVIHRRTHSGERPYACTQCGKRFNNSSHFSAHRRTHTGHILRSGCT

SEQ ID NO: 20160 - protein, 353 aa, Homo sapiens
MGDSNSDGKTGLEQDEQPLNLSDSPLSAQLTSEYRIDDHNSNGKNKYKNLLISDLKMEREARENGSKSPAHSYSSYDSGKNESVDRGAEDLSLNRGDEDEDDHEDHDDSEKVNETDGVEAERLKAFNMFVRLFVDENLDRMVPISKQPKEKIQAIIDSCRRQFPEYQERARKRIRTYLKSCRRMKRSGFEMSRPIPSHLTSAVAESILASACESESRNAAKRMRLERQQDESAPADKQCKPEATQATYSTSAVPGSQDVLYINGNGTYSYHSYRGLGGGLLNLNDASSSGPTDLSMKRQLATSSGSSSSSNSRPQLSPTEINAVRQLVAGYRESAAFLLRSADELENLILQQN

SEQ ID NO: 20161 - protein, 734 aa, Homo sapiens
MEDTKLYSPDSYKVQDKKNASSRPASAISGQNNNHSGNKPDPPPVLRVDDRQRLARERREEREKQLAAREIVWLEREERARQHYEKHLEERKKRLEEQRQKEERRRAAVEEKRRQRLEEDKERHEAVVRRTMERSQKPKQKHNRWSWGGSLHGSPSIHSADPDRRSVSTMNLSKYVDPVISKRLSSSSATLLNSPDRARRLQLSPWESSVVNRLLTPTHSFLARSKSTAALSGEAASCSPIIMPYKAAHSRNSMDRPKLFVTPPEGSSRRRIIHGTASYKKERERENVLFLTSGTRRAVSPSNPKARQPARSRLWLPSKSLPHLPGTPRPTSSLPPGSVKAAPAQVRPPSPGNIRPVKREVKVEPEKKDPEKEPQKVANEPSLKGRAPLVKVEEATVEERTPAEPEVGPAAPAMAPAPASAPAPASAPAPAPVPTPAMVSAPSSTVNASASVKTSAGTTDPEEATRLLAEKRRLAREQREKEERERREQEELERQKREELAQRVAEERTTRREEESRRLEAEQAREKEEQLQRQAEERALREREEAERAQRQKEEEARVREEAERVRQEREKHFQREEQERLERKKRLEEIMKRTRRTEATDKKTSDQRNGDIAKGALTGGTEVSALPCTTNAPGNGKPVGSPHVVTSHQSKVTVESTPDLEKQPNENGVSVQNENFEEIINLPIGSKPSRLDVTNSESPEIPLNPILAFDDEGTLGPLPQVDGVQTQQTAEVI

SEQ ID NO: 20162 - protein, 583 aa, Homo sapiens
MTAELQQDDAAGAADGHGSSCQMLLNQLREITGIQDPSFLHEALKASNGDITQAVSLLTDERVKEPSQDTVATEPSEVEGSAANKEVLAKVIDLTHDNKDDLQAAIALSLLESPKIQADGRDLNRMHEATSAETKRSKRKRCEVWGENPNPNDWRRVDGWPVGLKNVGNTCWFSAVIQSLFQLPEFRRLVLSYSLPQNVLENCRSHTEKRNIMFMQELQYLFALMMGSNRKFVDPSAALDLLKGAFRSSEEQQQDVSEFTHKLLDWLEDAFQLAVNVNSPRNKSENPMVQLFYGTFLTEGVREGKPFCNNETFGQYPLQVNGYRNLDECLEGAMVEGDVELLPSDHSVKYGQERWFTKLPPVLTFELSRFEFNQSLGQPEKIHNKLEFPQIIYMDRYMYRSKELIRNKRECIRKLKEEIKILQQKLERYVKYGSGPARFPLPDMLKYVIEFASTKPASESCPPESDTHMTLPLSSVHCSVSDQTSKESTSTESSSQDVESTFSSPEDSLPKSKPLTSSRSSMEMPSQPAPRTVTDEEINFVKTCLQRWRSEIEQDIQDLKTCIASTTQTIEQMYCDPLLRQVE

SEQ ID NO: 20163 - protein, 2259 aa, Homo sapiens
MSLRSGGRRRADPGADGEASRDDGATSSVSALKRLERSQWTDKMDLRFGFERLKEPGEKTGWLINMHPVALPYKPYFYIATRKGCEREVSSFLSKKFQGKIAKVETVPKEDLDLPNHLVGLKRNYIRLSFHTVEDLVKVRKEISPAVKKNREQDHASDAYTALLSSVLQRGGVITDEEETSKKIADQLDNIVDMREYDVPYHIRLSIDLKIHVAHWYNVRYRGNAFPVEITRRDDLVERPDPVVLAFDIETTKLPLKFPDAETDQIMMISYMIDGQGYLITNREIVSEDIEDFEFTPKPEYEGPFCVFNEPDEAHLIQRWFEHVQETKPTIMVTYNGDFFDWPFVEARAAVHGLSMQQEIGFQKDSQGEYKAPQCIHMDCLRWVKRDSYLPVGSHNLKAAAKAKLGYDPVELDPEDMCRMATEQPQTLATYSVSDAVATYYLYMKYVHPFIFALCTIIPMEPDEVLRKGSGTLCEALLMVQAFHANIIFPNKQEQEFNKLTDDGHVLDSETYVGGHVEALESGVFRSDIPCRFRMNPAAFDFLLQRVEKTLRHALEEEEKVPVEQVTNFEEVCDEIKSKLASLKDVPSRIECPLIYHLDVGAMYPNIILTNRLQPSAMVDEATCAACDFNKPGANCQRKMAWQWRGEFMPASRSEYHRIQHQLESEKFPPLFPEGPARAFHELSREEQAKYEKRRLADYCRKAYKKIHITKVEERLTTICQRENSFYVDTVRAFRDRRYEFKGLHKVWKKKLSAAVEVGDAAEVKRCKNMEVLYDSLQLAHKCILNSFYGYVMRKGARWYSMEMAGIVCFTGANIITQARELIEQIGRPLELDTDGIWCVLPNSFPENFVFKTTNVKKPKVTISYPGAMLNIMVKEGFTNDQYQELAEPSSLTYVTRSENSIFFEVDGPYLAMILPASKEEGKKLKKRYAVFNEDGSLAELKGFEVKRRGELQLIKIFQSSVFEAFLKGSTLEEVYGSVAKVADYWLDVLYSKAANMPDSELFELISENRSMSRKLEDYGEQKSTSISTAKRLAEFLGDQMVKDAGLSCRYIISRKPEGSPVTERAIPLAIFQAEPTVRKHFLRKWLKSSSLQDFDIRAILDWDYYIERLGSAIQKIITIPAALQQVKNPVPRVKHPDWLHKKLLEKNDVYKQKKISELFTLEGRRQVTMAEASEDSPRPSAPDMEDFGLVKLPHPAAPVTVKRKRVLWESQEESQDLTPTVPWQEILGQPPALGTSQEEWLVWLRFHKKKWQLQARQRLARRKRQRLESAEGVLRPGAIRDGPATGLGSFLRRTARSILDLPWQIVQISETSQAGLFRLWALVGSDLHCIRLSIPRVFYVNQRVAKAEEGASYRKVNRVLPRSNMVYNLYEYSVPEDMYQEHINEINAELSAPDIEGVYETQVPLLFRALVHLGCVCVVNKQLVRHLSGWEAETFALEHLEMRSLAQFSYLEPGSIRHIYLYHHAQAHKALFGIFIPSQRRASVFVLDTVRSNQMPSLGALYSAEHGLLLEKVGPELLPPPKHTFEVRAETDLKTICRAIQRFLLAYKEERRGPTLIAVQSSWELKRLASEIPVLEEFPLVPICVADKINYGVLDWQRHGARRMIRHYLNLDTCLSQAFEMSRYFHIPIGNLPEDISTFGSDLFFARHLQRHNHLLWLSPTARPDLGGKEADDNCLVMEFDDQATVEINSSGCYSTVCVELDLQNLAVNTILQSHHVNDMEGADSMGISFDVIQQASLEDMITGGQAASAPASYDETALCSNTFRILKSMVVGWVKEITQYHNIYADNQVMHFYRWLRSPSSLLHDPALHRTLHNMMKKLFLQLIAEFKRLGSSVIYANFNRIILCTKKRRVEDAIAYVEYITSSIHSKETFHSLTISFSRCWEFLLWMDPSNYGGIKGKVSSRIHCGLQDSQKAGGAEDEQENEDDEEERDGEEEEEAEESNVEDLLENNWNILQFLPQAASCQNYFLMIVSAYIVAVYHCMKDGLRRSAPGSTPVRRRGASQLSQEAEGAVGALPGMITFSQDYVANELTQSFFTITQKIQKKVTGSRNSTELSEMFPVLPGSHLLLNNPALEFIKYVCKVLSLDTNITNQVNKLNRDLLRLVDVGEFSEEAQFRDPCRSYVLPEVICRSCNFCRDLDLCKDSSFSEDGAVLPQWLCSNCQAPYDSSAIEMTLVEVLQKKLMAFTLQDLVCLKCRGVKETSMPVYCSCAGDFALTIHTQVFMEQIGIFRNIAQHYGMSYLLETLEWLLQKNPQLGH

SEQ ID NO: 20164 - protein, 539 aa, Homo sapiens
MPGQRRALSPKMASMRESDTGLWLHNKLGATDELWAPPSIASLLTAAVIDNIRLCFHGLSSAVKLKLLLGTLHLPRRTVDEMKGALMEIIQLASLDSDPWVLMVADILKSFPDTGSLNLELEEQNPNVQDILGELREKVGECEASAMLPLECQYLNKNALTTLAGPLTPPVKHFQLKRKPKSATLRAELLQKSTETAQQLKRSAGVPFHAKGRGLLRKMDTTTPLKGIPKQAPFRSPTAPSVFSPTGNRTPIPPSRTLLRKERGVKLLDISELDMVGAGREAKRRRKTLDAEVVEKPAKEETVVENATPDYAAGLVSTQKLGSLNNEPALPSTSYLPSTPSVVPASSYIPSSETPPAPSSREASRPPEEPSAPSPTLPAQFKQRAPMYNSGLSPATPTPAAPTSPLTPTTPPAVAPTTQTPPVAMVAPQTQAPAQQQPKKNLSLTREQMFAAQEMFKTANKVTRPEKALILGFMAGSRENPCQEQGDVIQIKLSEHTEDLPKADGQGSTTMLVDTVFEMNYATGQWTRFKKYKPMTNVS

SEQ ID NO: 20165 - protein, 455 aa, Homo sapiens
MVEQGDAAPLLRWAEGPAVSLPQAPQPQAGGWGRGGGGGARPAAEPPRRREPEEPAAPEVLLQPGRLELGDVEEDQVVAVFVVTFDPRSGNMVEWCLPQDIDLEGVEFKSMASGSHKIQSDFIYFRKGPFFGLACFANMPVESELERGARMKSVGILSPSYTLLYRYMHFLENQVRHQLEMPGHYSHLAAFYEDKKGVLHAGPGRGSSLPPVYWLPSIHRYMYPEMKITHPAGCMSQFIKFFGEQILILWKFALLRKRILIFSPPPVGVVCYRVYCCCCLANVSLPGIGGTIPESKPFFYVNVADIESLEVEVSYVACTTEKIFEEKRELYDVYVDNQNVKTHHDHLQPLLKINSADREKYRRLNEQRQMLLYSQEVEEDYNPCEEDLFVLFFLEQNNRIFQTLLEVSASQDKTLTAEHARGMGLDPQGDRSFLLDLLEAYGIDVMLVIDNPCCP

SEQ ID NO: 20166 - protein, 286 aa, Homo sapiens
MAGMKTASGDYIDSSWELRVFVGEEDPEAESVTLRVTGESHIGGVLLKIVEQINRKQDWSDHAIWWEQKRQWLLQTHWTLDKYGILADARLFFGPQHRPVILRLPNRRALRLRASFSQPLFQAVAAICRLLSIRHPEELSLLRAPEKKEKKKKEKEPEEELYDLSKVVLAGGVAPALFRGMPAHFSDSAQTEACYHMLSRPQPPPDPLLLQRLPRPSSLSDKTQLHSRWLDSSRCLMQQGIKAGDALWLRFKYYSFFDLDPKTDPVRLTQLYEQARWDLLLEEIDC

SEQ ID NO: 20167 - protein, 442 aa, Homo sapiens
LIHAGSALAANVCKKITGRLTSAIAKQEDVSVQLEALDIMADMLSRQGGLLVNFHPSILTCLLPQLTSPRLAVRKRTIIALGHLVMSCGNIVFVDLIEHLLSELSKNDSMSTTRTYIQCIAAISRQAGHRIGEYLEKIIPLVVKFCNVDDDELREYCIQAFESFVRRCPKEVYPHVSTIINICLKYLTYDPNYNYDDEDEDENAMDADGGDDDDQGSDDEYSDDDDMSWKVRRAAAKCLDAVVSTRHEMLPEFYKTVSPALISRFKEREENVKADVFHAYLSLLKQTRPVQSWLCDPDAMEQGETPLTMLQSQVPNIVKALHKQMKEKSVKTRQCCFNMLTELVNVLPGALTQHIPVLVPGIIFSLNDKSSSSNLKIDALSCLYVILCNHSPQVFHPHVQALVPPVVACVGDPFYKITSEALLVTQQLVKAHHMPEAQWLRL

SEQ ID NO: 20168 - protein, 210 aa, Homo sapiens
EFIQPNVISGIPIYRVMDRQGQIINPSEDPHLPKEKVLKLYKSMTLLNTMDRILYESQRQGRISFYMTNYGEEGTHVGSAAALDNTDLVFGQYREAEARPHHVAQAGLQLLGSSDPPTSASQSAGITGVLMYRDYPLELFMAQCYGNISDLGKGRQMPVHYGCKERHFVTISSPLATQIPQAVGAAYAAKRANANRVVICYFGEGAASEG

SEQ ID NO: 20169 - protein, 965 aa, Homo sapiens
MDLGSPSLPKKSLPVPGALEQVASRLSSKVAAEVPHGSKQELQDLKAQSLTTCEVCGACFETRKGLSSHARSHLRQLGVAESESSGAPIDLLYELVKQKGLPDAHLGLPPGLAKKSSSLKEVVAGAPRPGLLSLAKPLDAPAVNKAIKSPPGFSAKGLGHPPSSPLLKKTPLALAGSPTPKNPEDKSPQLSLSPRPASPKAQWPQSEDEGPLNLTLDSDGGRELDCQLCGAWFETRKGLSSHARAHLRHLGVSDPDAKGSPIDVLHGLIRRDGVQIRLPPRRGALAHPGRPPPTSAALSLLPPPPPAKKAKLKAAGMASPWGKQDLSAAAAAGIFWASDVEPSPLNLSSGPEPARDIRCEFCGEFFENRKGLSSHARSHLRQMGVTEWYVNGSPIDTLREILKRRTQSRPGGPPNPPGPSPKALAKMMGGAGPGSSLEARSPSDLHISPLAKKLPPPPGSPLGHSPTASPPPTARKMFPGLAAPSLPKKLKPEQIRVEIKREMLPGALHGELHPSEGPWGAPREDMTPLNLSSRAEPVRDIRCEFCGEFFENRKGLSSHARSHLRQMGVTEWSVNGSPIDTLREILKKKSKPCLIKKEPPAGDLAPALAEDGPPTVAPGPVQSPLPLSPLAGRPGKPGAGPAQVPRELSLTPITGAKPSATGYLGSVAAKRPLQEDRLLPAEVKAKTYIQTELPFKAKTLHEKTSHSSTEACCELCGLYFENRKALASHARAHLRQFGVTEWCVNGSPIETLSEWIKHRPQKVGAYRSYIQGGRPFTKKFRSAGHGRDSDKRPSLGLAPGGLAVVGRSAGGEPGPEAGRAADGGERPLAASPPGTVKAEEHQRQNINKFERRQARPPDASAARGGEDTNDLQQKLEEVRQPPPRVRPVPSLVPRPPQTSLVKFVGNIYTLKCRFCEVEFQGPLSIQEEWVRHLQRHILEMNFSKADPPPEESQAPQAQTAAAEAP

SEQ ID NO: 20170 - protein, 447 aa, Homo sapiens
MLSWNLPFSPIQLANNFLTSVLEQHKLTKEQWEERIQNWHEEHRGMLREDSMMEYLKIAQDLEMYGVNYFEIKNKKGTELWLGVDALGLNIYEHDDKLTPKIGFPWSEIRNISFNDKKFVIKPIDKKAPDFVFYAPRLRINKRILALCMGNHELYMRRRKPDTIEVQQMKAQAREEKHQKQLERAQLENEKKKREIAEKEKERIEREKEELMERLKQIEEQTIKAQKELEEQTRKALELDQERKRAKEEAERLEKERRAAEEAKSAIAKQAADQMKNQEQLAAELAEFTAKIALLEEAKKKKEEEATEWQHKAFAAQEDLEKTKEELKTVMSAPPPPPPPPVIPPTENEHDEHDENNAEASAELSNEGVMNHRSEEERVTETQKNERVKKQLQALSSELAQARDETKKTQNDVLHAENVKAGRDKYKTLRQIRQGNTKQRIDEFEAM

SEQ ID NO: 20171 - protein, 342 aa, Homo sapiens
MLQGHSSVFQALLGTFFTWGMTAAGAALVFVFSSGQRRILDGSLGFAAGVMLAASYWSLLAPAVEMATSSGGFGAFAFFPVAVGFTLGAAFVYLADLLMPHLGAAEDPQTTLALNFGSTLMKKKSDPEGPALLFPESELSIRIGRAGLLSDKSENGEAYQRKKAAATGLPEGPAVPVPSRGNLAQPGGSSWRRIALLILAITIHNVPEGLAVGVGFGAIEKTASATFESARNLAIGIGIQNFPEGLAVSLPLRGAGFSTWRAFWYGQLSGMVEPLAGVFGAFAVVLAEPILPYALAFAAGAMVYVVMDDIIPEAQISGNGKLASWASILGFVVMMSLDVGLG

SEQ ID NO: 20172 - protein, 551 aa, Homo sapiens
MGSFSSHMTEFPRKRKGSDSDPSQEAHSQTEKRRRDKMNNLIEELSAMIPQCNPMARKLDKLTVLRMAVQHLRSLKGLTNSYVGSNYRPSFLQDNELRHLILKTAEGFLFVVGCERGKILFVSKSVSKILNYDQASLTGQSLFDFLHPKDVAKVKEQLSSFDISPREKLIDAKTGLQVHSNLHAGRTRVYSGSRRSFFCRIKSCKISVKEEHGCLPNSKKKEHRKFYTIHCTGYLRSWPPNIVGMEEERNSKKDNSNFTCLVAIGRLQPYIVPQNSGEINVKPTEFITRFAVNGKFVYVDQRATAILGYLPQELLGTSCYEYFHQDDHNNLTDKHKAVLQSKEKILTDSYKFRAKDGSFVTLKSQWFSFTNPWTKELEYIVSVNTLVLGHSEPGEASFLPCSSQSSEESSRQSCMSVPGMSTGTVLGAGSIGTDIANEILDLQRLQSSSYLDDSSPTGLMKDTHTVNCRSMSNKELFPPSPSEMGELEATRQNQSTVAVHSHEPLLSDGAQLDFDALCDNDDTAMAAFMNYLEAEGGLGDPGDFSDIQWTL

SEQ ID NO: 20173 - protein, 164 aa, Homo sapiens
MSAFNLLHLVTKSQPVALRACGLPSGSCRDKKNCKVVFSQQELRKRLTPLQYHVTQEKGTESAFEGEYTHHKDPGIYKCVVCGTPLFKSETKFDSGSGWPSFHDVINSEAITFTDDFSYGMHRVETSCSQCGAHLGHIFDDGPRPTGKRYCINSAALSFTPADS

SEQ ID NO: 20174 - protein, 1153 aa, Homo sapiens
MEEFDLVKTLHKTSSSVGSDENSLHSLGLNLNTDRSSPHLSTNGVSSFSGKTRPSVIQGTVEVLTSLMQELQNSGKTDSELWKNCEHIQEEIKNLVKLQTSSASLASCEGNSSNKQVSSESQMGFFSLSSERNESVIHYPESTEPEIQQEMSTSQPDCNVDSCSVSSGYGTFCISELNLYKSKDPKEFMEHIDVPKGQYVAPAVPAESLVDGVKNENFYIQTPEECHVSLKEDVSISPGEFEHNFLGENKVSEVYSGKTNSNAITSWAQKLKQNQPKRAHVEDGGSRSKQGNEQSKKTPIEKSDFAAATHPRAFYLSKPDETPNAWMSDSGTGLTYWKLEEKDMHHSLPETLEKTFISLSSTDVSPNQSNTSNEMKLPSLKDIYYKKQRENKQLPERNLTSASNPNHPPEVLTLDPTLHMKPKQQISGIQPHGLPNALDDRISFSPDSVLEPSMSSPSDIDSFSQASNVTSQLPGFPKYPSHTKASPVDSWKNQTFQNESRTSSTFPSVYTITSNDISVNTVDEENTVMVASASVSQSQLPGTANSVPECISLTSLEDPVILSKIRQNLKEKHARHIADLRAYYESEINSLKQKLEAKEISGVEDWKITNQILVDRCGQLDSALHEATSRVRTLENKNNLLEIEVNDLRERFSAASSASKILQERIEEMRTSSKEKDNTIIRLKSRLQDLEEAFENAYKLSDDKEAQLKQENKMFQDLLGEYESLGKEHRRVKDALNTTENKLLDAYTQISDLKRMISKLEAQVKQVEHENMLSLRHNSRIHVRPSRANTLATSDVSRRKWLIPGAEYSIFTGQPLDTQDSNVDNQLEETCSLGHRSPLEKDSSPGSSSTSLLIKKQRETSDTPIMRALKELDEGKIFKNWGTQTEKEDTSNINPRQTETSVNASRSPEKCAQQRQKRLNSASQRSSSLPPSNRKSSTPTKREIMLTPVTVAYSPKRSPKENLSPGFSHLLSKNESSPIRFDILLDDLDTVPVSTLQRTNPRKQLQFLPLDDSEEKTYSEKATDNHVNHSSCPEPVPNGVKKVSVRTAWEKNKSVSYEQCKPVSVTPQGNDFEYTAKIRTLAETERFFDELTKEKDQIEAALSRMPSPGGRITLQTRLNQEALEDRLERINRELGSVRMTLKKFHVLRTSANL

SEQ ID NO: 20175 - protein, 144 aa, Homo sapiens
LVHKWAWTKDDVILHVLPLHHVHGVVNALLCPLWVGATCVMMPEFSPQQVWEKFLSSETPRINVFMAVPTIYTKLMEYYDRHFTQPHAQDFLRAVCEEKIRFRGDPTAWSTGAHCLRKPTEGSLLLHHPRRGRREGDQGPQPML

SEQ ID NO: 20176 - protein, 390 aa, Homo sapiens
MADNLQATFGESLLSDMLDDFPDTLPSPEALKFKILVKNKKIGTLKETHERKGSDKRGKVEEWEEEVADGEEEEEEEEEEEEEEEDKFKESEVLESVLGDNQDKETGVKKLPGVMLFKKKKTRKLKIALALSDLVIYTKAEKFKSFQHSRLYQQFNENNSIGETQARKLSKLRVHEFIFHTRKFITRIYPKATRADSSNFNPQEFWNIGCQMVALNFQTPGLPMDLQNGKFLDNGGSGYILKPHFLRESKSYFNPSNIKEGMPITLTIRLISGIQLPLTHSSSNKGDSLVIIEVFGVPNDQMKQQTRVIKKNAFSPRWNETFTFIIHVPELALIRFVVEGQGLIAGNEFLGQYTLPLLCMNKGYRRIPLFSRMGESLEPASLFVYVWYVR

SEQ ID NO: 20177 - protein, 523 aa, Homo sapiens
MVESRKSFKFRNQQKIASQYKEIKTLKTEQDEITLLLSLMKSSRNMNRSEKNYMELRLLLQTKEDYEALIKSLKVLLAELDEKILQMEKKIANQKQIFAKMQEANNPRKLQKQIHILETRLNLVTVHFDKMLTTNAKLRKEIEDLRFEKAAYDNVYQQLQHCLLMEKKTMNLAIEQSSQAYEQRVEAMARMAAMKDRQKKDTSQYNLEIRELERLYAHESKLKSFLLVKLNDRNEFEEQAKREEALKAKKHVKKNRGESFESYEVAHLRLLKLAESGNLNQLIEDFLAKEEKNFARFTYVTELNNDMEMMHKRTQRIQDEIILLRSQQKLSHDDNHSVLRQLEDKLRKTTEEADMYESKYGEVSKTLDLLKNSVEKLFKKINCDATKILVQLGETGKVTDINLPQYFAIIEKKTNDLLLLETYRRILEVEGAEAEIPPPFINPFWGGSALLKPPEPIKVIPPVLGADPFSDRLDDVEQPLDHSSLRQLVLDNYILKENRSKEVRGDSLPEKVDDFRSRKKVTM

SEQ ID NO: 20178 - protein, 265 aa, Homo sapiens
GYTLTSKLLFKTVIQAIHKYAFMALKFKILVKNKKIGTLKETHERKGSDKRGDNQDKETGVKKLPGVMLFKKKKTRKLKIALALSDLVIYTKAEKFKSFQHSRLYQQFNENNSIGETQARKLSKLRVHEFIFHTRKFITRIYPKATRADSSNFNPQEFWNIGCQMVALNFQTPGLPMDLQNGKFLDNGGSGYILKPHFLRESKSYFNPSNIKEGMPITLTIRLISGIQLPLTHSSSNKGDSLVIIEVFGVPNDQMKQQTRVIKKN

SEQ ID NO: 20179 - protein, 415 aa, Homo sapiens
MQRSIMSFFHPKKEGKAKKPEKEASNSSRETEPPPKAALKEWNGVVSESDSPVKRPGRKAARVLGSEGEEEDEALSPAKGQKPALDCSQVSPPRPATSPENNASLSDTSPMDSSPSGIPKRRTEEETPKESLTEAEVATEKEGEDGDQPTTPPKPLKTSKAETPTESVSEPEVATKQELQEEEEQTKPPRRAPKTLSSFFTPRKPAVKKEVKEEEPGAPGKEGAAEGPLDPSGYNPAKNNYHPVEDACWKPGQKVPYLAVARTFEKIEEVSARLRMVETLSNLLRSVVALSPPDLLPVLYLSLNHLGPPQQGLELGVGDGVLLKAVAQATGRERRETRSHNCHPRHPHPRSPLKVGSWSPSGLRQPRKATWGWWPRTAAAPRGSCCHHLRSLPPGSSASSATSPGSLAVLPQPRR

SEQ ID NO: 20180 - protein, 2721 aa, Homo sapiens
MVPPVWTLLLLVGAALFRKEKPPDQKLVVRSSRDNYVLTQCDFEDDAKPLCDWSQVSADDEDWVRASGPSPTGSTGAPGGYPNGEGSYLHMESNSFHRGGVARLLSPDLWEQGPLCVHFAHHMFGLSWGAQLRLLLLSGEEGRRPDVLWKHWNTQRPSWMLTTVTVPAGFTLPTRLMFEGTRGSTAYLDIALDALSIRRGSCNRVCMMQTCSFDIPNDLCDWTWIPTASGAKWTQKKGSSGKPGVGPDGDFSSPGSGCYMLLDPKNARPGQKAVLLSPVSLSSGCLSFSFHYILRGQSPGAALHIYASVLGSIRKHTLFSGQPGPNWQAVSVNYTAVGRIQFAVVGVFGKTPEPAVAVDATSIAPCGEGFPQCDFEDNAHPFCDWVQTSGDGGHWALGHKNGPVHGMGPAGGFPNAGGHYIYLEADEFSQAGQSVRLVSRPFCAPGDICVEFAYHMYGLGEGTMLELLLGSPAGSPPIPLWKRVGSQRPYWQNTSVTVPSGHQQPMQLIFKGIQGSNTASVVAMGFILINPGTCPVKVLPELPPVSPVSSTGPSETTGLTENPTISTKKPTVSIEKPSVTTEKPTVPKEKPTIPTEKPTISTEKPTIPSEKPNMPSEKPTIPSEKPTILTEKPTIPSEKPTIPSEKPTISTEKPTVPTEEPTTPTEETTTSMEEPVIPTEKPSIPTEKPSIPTEKPTISMEETIISTEKPTISPEKPTIPTEKPTIPTEKSTISPEKPTTPTEKPTIPTEKPTISPEKPTTPTEKPTISPEKLTIPTEKPTIPTEKPTIPTEKPTISTEEPTTPTEETTISTEKPSIPMEKPTLPTEETTTSVEETTISTEKLTIPMEKPTISTEKPTIPTEKPTISPEKLTIPTEKLTIPTEKPTIPIEETTISTEKLTIPTEKPTISPEKPTISTEKPTIPTEKPTIPTEETTISTEKLTIPTEKPTISPEKLTIPTEKPTISTEKPTIPTEKLTIPTEKPTIPTEKPTIPTEKLTALRPPHPSPTATGLAALVMSPHAPSTPMTSVILGTTTTSRSSTERCPPNARYESCACPASCKSPRPSCGPLCREGCVCNPGFLFSDNHCIQASSCNCFYNNDYYEPGAEWFSPNCTEHCRCWPGSRVECQISQCGTHTVCQLKNGQYGCHPYAGTATCLVYGDPHYVTFDGRHFGFMGKCTYILAQPCGNSTDPFFRVTAKNEEQGQEGVSCLSKVYVTLPESTVTLLKGRRTLVGGQQVTLPAIPSKGVFLGASGRFVELQTEFGLRVRWDGDQQLYVTVSSTYSGKLCGLCGNYDGNSDNDHLKLDGSPAGDKEELGNSWQTDQDEDQECQKYQVVNSPSCDSSLQSSMSGPGFCGRLVDTHGPFETCLLHVKAASFFDSCMLDMCGFQGLQHLLCTHMSTMTTTCQDAGHAVKPWREPHFCPMACPPNSKYSLCAKPCPDTCHSGFSGMFCSDRCVEACECNPGFVLSGLECIPRSQCGCLHPAGSYFKVGERWYKPGCKELCVCESNNRIRCQPWRCRAQEFCGQQDGIYGCHAQGAATCTASGDPHYLTFDGALHHFMGTCTYVLTRPCWSRSQDSYFVVSATNENRGGILEVSYIKAVHVTVFDLSISLLRGCKVMLNGHRVALPVWLAQGRVTIRLSSNLVLLYTNFGLQVRYDGSHLVEVTVPSSYGGQLCGLCGNYNNNSLDDNLRPDRKLAGDSMQLGAAWKLPESSEPGCFLVGGKPSSCQENSMADAWNKNCAILINPQGPFSQCHQVVPPQSSFASCVHGQCGTKGDTTALCRSLQAYASLCAQAGQAPAWRNRTFCPMRCPPGSSYSPCSSPCPDTCSSINNPRDCPKALPCAESCECQKGHILSGTSCVPLGQCGCTDPAGSYHPVGERWYTENTCTRLCTCSVHNNITCFQSTCKPNQICWALDGLLHCRASGVGVCQLPGESHYVSFDGSNHSIPDACTLVLVKVCHPAMALPFFKISAKHEKEEGGTEAFRLHEVYIDIYDAQVTLQKGHRVLINSKQVTLPAISQIPGVSVKSSSIYSIVNIKIGVQVKFDGNHLLEIEIPTTYYGKVCGMCGNFNDEEEDELMMPSDEVANSDSEFVNSWKDKDIDPSCQSLLVDEQQIPAEQQENPSGNCRAADLRRAREKCEAALRAPVWAQCASRIDLTPFLVDCANTLCEFGGLYQALCQALQAFGATCQSQGLKPPLWRNSSFCPLECPAYSSYTNCLPSCSPSCWDLDGRCEGAKVPSACAEGCICQPGYVLSEDKCVPRSQCGCKDAHGGSIPLGKSWVSSGCTEKCVCTGGAIQCGDFRCPSGSHCQLTSDNSNSNCVSDKSEQCSVYGDPRYLTFDGFSYRLQGRMTYVLIKTVDVLPEGVEPLLVEGRNKMDPPRSSIFLQEVITTVYGYKVQLQAGLELVVNNQKMAVPYRPNEHLRVTLWGQRLYLVTDFELVVSFGGRKNAVISLPSMYEGLVSGLCGNYDKNRKNDMMLPSGALTQNLNTFGNSWEVKTEDALLRFPRAIPAEEEGQGAELGLRTGLQVSECSPEQLASNSTQACRVLADPQGPFAACHQTVAPEPFQEHCVLDLCSAQDPREQEELRCQVLSGYAILCQEAGAALAGWRDRTLCESPCLQNPCQNDGQCREQGATFTCECEVGYGGGLCMEPRDAPPPRKPASNLVGVLLGLLVPVVVVLLAVTRECIYRTRRKREKTQEGDRLARLVDTDTVLDCAC

SEQ ID NO: 20181 - protein, 498 aa, Homo sapiens
MSSCVSSQPSSNRAAPQDELGGRGSSSSESQKPCEALRGLSSLSIHLGMESFIVVTECEPGCAVDLGLARDRPLEADGQEVPLDTSGSQARPHLSGRKLSLQERSQGGLAAGGSLDMNGRCICPSLPYSPVSSPQSSPRLPRRPTVESHHVSITGMQDCVQLNQYTLKDEIGKGSYGVVKLAYNENDNTYYAMKVLSKKKLIRQAGFPRRPPPRGTRPAPGGCIQPRGPIEQVYQEIAILKKLDHPNVVKLVEVLDDPNEDHLYMVFELVNQGPVMEVPTLKPLSEDQARFYFQDLIKGIEYLHYQKIIHRDIKPSNLLVGEDGHIKIADFGVSNEFKGSDALLSNTVGTPAFMAPESLSETRKIFSGKALDVWAMGVTLYCFVFGQCPFMDERIMCLHSKIKSQALEFPDQPDIAEDLKDLITRMLDKNPESRIVVPEIKILVKTMIRKRSFGNPFEGSRREERSLSAPGNLLTKQGSEDNLQGTDPPPVGEEEVLL

SEQ ID NO: 20182 - protein, 261 aa, Homo sapiens
MAFNDLLQQVGGVGRFQQIQVTLVVLPLLLMASHNTLQNFTAAIPTHHCRPPADANLSKNGGLEVWLPRDRQGQPESCLRFTSPQWGLPFLNGTEANGTGATEPCTDGWIYDNSTFPSTIVTEGPTPAGPVLVHGGGAARSHGVRLPCRQARPPEGTHLELPADSCVRDLRSLRTQLPHLLRLPAPLGHGSGWHLPQLHDTECGVDAHSHTGLRGHLDWLCLQPGPVPPGWCGLRCAPLAPPAATGLCAFFCLLHLLLVLH

SEQ ID NO: 20183 - protein, 1178 aa, Homo sapiens
MGQDAEDTSEEPPEKEELAGVQEAETATDCPEVLEEGCEEATGVTGGEQVDLSEPPDHEKKTNQEVAAATLEDHAQDESAEESCQIVPFENDCMEDFVTSLTGSPYEFFPTESTSFCSESCSPLSESAKGLESEQAPKLGLRAEENPMVGALCGQCGSLQGGAAEGPAAPDVVVVLEEEALDDALANPYVMGVGLPGQAAPGEGGQAASDALGGYGSKEELNCEAEGGLVPADRKNTSTRVRPHSGKVAGYVPETVPEETGPEAGSSAPGIGGAAEEVGKTLLSLEGKPLEASRALPAKPRAFTLYPRSFSVEGREIPVSVYQEPEGSGLDDHRIKRKEDNLSLSCVIGSSGSFSQRNHLPSSGTSTPSSMVDIPPPFDLACITKKPITKSSPSLLIESDSPDKYKKKKSSFKRFLALTFKKKTENKLHVDVNVSSSRSSSESSYHGPSRILEVDRRSLSNSPQLKSRTGKLRASESPSSLIFYRDGKRKGVPFSRTVSRVESFEDRSRPPFLPLPLTKPRSISFPSADTSDYENIPAMNSDYENIQIPPRRPARAGAFTKLFEDQSRALSTANENDGYVDMSSFNAFESKQQSADQDAESAYTEPYKVCPISSAAPKEDLTSDEEQRSSEEEDSASRDPSVTHKVEGQSRALVIAQELLSSEKAYVEMLQHLNLDFHGAVMRALDDMDHEGRDTLAREELRQGLSELPAIHDLHQGILEELEERLSNWESQQKVADVFLAREQGFDHHATHILQFDRYLGLLSENCLHSPRLAAAVREFEQSVQGGSQTAKHRLLRVVQRLFQYQVLLTDYLNNLCPDSAEYDNTQGALSLISKVTDRANDSMEQGENLQKLVHIEHSVRGQGDLLQPGREFLKEGTLMKVTGKNRRPRHLFLMNDVLLYTYPQKDGKYRLKNTLAVANMKVSRPVMEKVPYALKIETSESCLMLSASSCAERDEWYGCLSRALPEDYKAQALAAFHHSVEIRERLGVSLGERPPTLVPVTHVMMCMNCGCDFSLTLRRHHCHACGKIVCRNCSRNKYPLKYLKDRMAKVCDGCFGELKKRGRAVPGLMRERPVSMSFPLSSPRFSGSAFSSVFQSINPSTFKKQKKVPSALTEDKVALESMPLLGFTIAPEKEEGSSEVGPIFHLYHKKTLFYSFKAEDTNSAQRWIEAMEDASVL

SEQ ID NO: 20184 - protein, 1269 aa, Homo sapiens
MDSLEEPQKKVFKARKTMRVSDRQQLEAVYKVKEELLKTDVKLLNGNHENGDLDPTSPLENMDYIKDKEEVNGIEEICFDPEGSKAEWKETPCILSVNVKNKQDDDLNCEPLSPHNITPEPVSKLPAEPVSGDPAPGDLDAGDPASGVLASGDSTSGDPTSSEPSSSDAASGDATSGDAPSGDVSPGDATSGDATADDLSSGDPTSSDPIPGEPVPVEPISGDCAADDIASSEITSVDLASGAPASTDPASDDLASGDLSSSELASDDLATGELASDELTSESTFDRTFEPKSVPVCEPVPEIDNIEPSSNKDDDFLEKNGADEKLEQIQSKDSLDEKNKADNNIDANEETLETDDTTICSDRPPENEKKVEEDIITELALGEDAISSSMEIDQGEKNEDETSADLVETINENVIEDNKSENILENTDSMETDEIIPILEKLAPSEDELTCFSKTSLLPIDETNPDLEEKMESSFGSPSKQESSESLPKEAFLVLSDEEDISGEKDESEVISQNETCSPEVESNEKDNKPEEEEQVIHEDDERPSEKNEFSRRKRSKSEDMDNVQSKRRRYMEEEYEAEFQVKITAKGDINQKLQKVIQWLLEEKLCALQCAVFDKTLAELKTRVEKIECNKRHKTVLTELQAKIARLTKRFEAAKEDLKKRHEHPPNPPVSPGKTVNDVNSNNNMSYRNAGTVRQMLESKRNVSESAPPSFQTPVNTVSSTNLVTPPAVVSSQPKLQTPVTSGSLTATSVLPAPNTATVVATTQVPSGNPQPTISLQPLPVILHVPVAVSSQPQLLQSHPGTLVTNQPSGNVEFISVQSPPTVSGLTKNPVSLPSLPNPTKPNNVPSVPSPSIQRNPTASAAPLGTTLAVQAVPTAHSIVQATRTSLPTVGPSGLYSPSTNRGPIQMKIPISAFSTSSAAEQNSNTTPRIENQTNKTIDASVSKKAADSTSQCGKATGSDSSGVIDLTMDDEESGASQDPKKLNHTPVSTMSSSQPVSRPLQPIQPAPPLQPSGVPTSGPSQTTIHLLPTAPTTVNVTHRPVTQVTTRLPVPRAPANHQVVYTTLPAPPAQAPLRGTVMQAPAVRQVNPQNSVTVRVPQTTTYVVNNGLTLGSTGPQLTVHHRPPQVHTEPPRPVHPAPLPEAPQPQRLPPEAASTSLPQKPHLKLARVQSQNGIVLSWSVLEVDRSCATVDSYHLYAYHEEPSATVPSQWKKIGEVKALPLPMACTLTQFVSGSKYYFAVRAKDIYGRFGPFCDPQSTDVISSTQSS

SEQ ID NO: 20185 - protein, 519 aa, Homo sapiens
MEQVNELKEKGNKALSVGNIDDALQCYSEAIKLDPHNHVLYSNRSAAYAKKGDYQKAYEDGCKTVDLKPDWGKGLKHEANNPQLKEGLQNMEARLAERKFMNPFNMPNLYQKLESDPRTRTLLSDPTYRELIEQLRNKPSDLGTKLQDPRIMTTLSVLLGVDLGSMDEEEEIATPPPPPPPKKETKPEPMEEDLPENKKQALKEKELGNDAYKKKDFDTALKHYDKAKELDPTNMTYITNQAAVYFEKGDYNKCRELCEKAIEVGRENREDYRQIAKAYARIGNSYFKEEKYKDAIHFYNKSLAEHRTPDVLKKCQQAEKILKEQERLAYINPDLALEEKNKGNECFQKGDYPQAMKHYTEAIKRNPKDAKLYSNRAACYTKLLEFQLALKDCEECIQLEPTFIKGYTRKAAALEAMKDYTKAMDVYQKALDLDSSCKEAADGYQRCMMAQYNRHDSPEDVKRRAMADPEVQQIMSDPAMRLILEQMQKDPQALSEHLKNPVIAQKIQKLMDVGLIAIR

SEQ ID NO: 20186 - protein, 1079 aa, Homo sapiens
MAAEGAVCGFVYLEGTAWAVPEDTEPLASCTLGHGNHRESSPFLSPLEASRGIDYYDRNLALFEEELDIRPKVSSLLGKLVSYTNLTQGAKEHEEAESGEGTRRRAAEAPSMGTLMGVYLPCLQNIFGVILFLRLTWMVGTAGVLQALLIVLICCCCTLLTAISMSAIATNGVVPAGGSYFMISRSLGPEFGGAVGLCFYLGTTFAAAMYILGAIEILLTYIAPPAAIFYPSGAHDTSNATLNNMRVYGTIFLTFMTLVVFVGVKYVNKFASLFLACVIISILSIYAGGIKSIFDPPVFPVCMLGNRTLSRDQFDICAKTAVVDNETVATQLWSFFCHSPNLTTDSCDPYFMLNNVTEIPGIPGAAAGVLQENLWSAYLEKGDIVEKHGLPSADAPSLKESLPLYVVADIATSFTVLVGIFFPSVTGIMAGSNRSGDLRDAQKSIPVGTILAIITTSLVYFSSVVLFGACIEGVVLRDKYGDGVSRNLVVGTLAWPSPWVIVIGSFFSTCGAGLQSLTGAPRLLQAIAKDNIIPFLRVFGHGKVNGEPTWALLLTALIAELGILIASLDMVAPILSMFFLMCYLFVNLACAVQTLLRTPNWRPRFKYYHWALSFLGMSLCLALMFVSSWYYALVAMLIAGMIYKYIEYQGAEKEWGDGIRGLSLSAARYALLRLEEGPPHTKNWRPQLLVLLKLDEDLHVKYPRLLTFASQLKAGKGLTIVGSVIQGSFLESYGEAQAAEQTIKNMMEIEKVKGFCQVVVASKVREGLAHLIQSCGLGGMRHNSVVLGWPYGWRQSEDPRAWKTFIDTVRCTTAAHLALLVPKNIAFYPSNHERYLEGHIDVWWIVHDGGMLMLLPFLLRQHKVWRKCRMRIFTVAQMDDNSIQMKKDLAVFLYHLRLEAEVEVVEMHNSDISAYTYERTLMMEQRSQMLRQMRLTKTEREREAQLVKDRHSALRLESLYSDEEDESAVGADKIQMTWTRDKYMTETWDPSHAPDNFRELVHIKPDQSNVRRMHTAVKLNEVIVTRSHDARLVLLNMPGPPRNSEGDENYMEFLEVLTEGLERVLLVRGGGREVITIYS

SEQ ID NO: 20187 - protein, 484 aa, Homo sapiens
MNRKDSKRKSHQECTGKIGGRGRPRQVRRHKTCPSPREISKVMASMNLGLLSEGGCSEDELLEKCIQSFDSAGSLCHEDHMLNMVLAMHSWVLPSADLAARLLTSYQKATGDTQELRRLQICHLVRYWLMRHPEVMHQDPQLEEVIGRFWATVAREGNSAQRRLGDSSDLLSPGGPGPPLPMSSPGLGKKRKVSLLFDHLETGELAQHLTYLEFRSFQAITLSLDLFYTEDEIYELSYAREPRCPKSLPPSPFNAPLVVEWAPGVTPKPDRVTLGRHVEQLVESVFKNYDPEGRGTISQEDFERLSGNFPFACHGLHPPPRQGRGSFSREELTGYLLRASAICSKLGLAFLHTFHEVTFRKPTFCDSCSGFLWGVTKQGYRCRECGLCCHKHCRDQVKVECKKRPGAKGDAGPPGAPVPSTPAPHASCGSEENHSYTLSLEPETGCQLRHAWTQTESPHPSWETDTVPCPVMDPPSTASSKLDS

SEQ ID NO: 20188 - protein, 264 aa, Homo sapiens
MGEMEQLRQEAEQLKKQIADARKACADVTLAELVSGLEVVGRVQMRTRRTLRGHLAKIYAMHWATDSKLLVSASQDGKLIVWDSYTTNKVHAIPLRSSWVMTCAYAPSGNFVACGGLDNMCSIYNLKSREGNVKVSRELSAHTGYLSCCRFLDDNNIVTSSGDTTCAKLWDVREGTCRQTFTGHESDINAICFFPNGEAICTGSDDASCRLFDLRADQELICFSHESIICGITSVAFSLSGRLLFAGYDDFNCNVWDSMKSERV

SEQ ID NO: 20189 - protein, 699 aa, Homo sapiens
MDLKTLKLFNSQLRCGWLLYIWNKAFMAHLRVPQDEWTGYTPRGKDDEIPCRRMRSGSYIKAMGDEDSGDSDTSPKPSPKVAARRESYLKATQPSLTELTTLKISNEHSPKLQIRSHSYLRAVSEVSINRSLDSLDPAGLLTSPKFRSRNESYMRAMSTISQVSEMEVNGQFESVCESVFSELESQAVEALDLPMPGCFRMRSHSYVRAIEKGCSQDDECVSLRSSSPPRTTTTVRTIQSSTGVIKLSSAVEVSSCITTYKKTPPPVPPRTTTKPFISITAQSSTESAQDAYMDGQGQRGDIISQSGLSNSTESLDSMKALTAAIEAANAQIHGPASQHMGNNTATVTTTTTIATVTTEDRKKDHFKKNRCLSIGIQVDDAEEPDKTGENKAPSKFQSVGVQVEEEKCFRRFTRSNSVTTAVQADLDFHDNLENSLESIEDNSCPGPMARQFSRDASTSTVSIQGSGNHYHACAADDDFDTDFDPSILPPPDPWIDSITEDPLEAVQRSVCHRDGHWFLKLLQAERDRMEGWCQQMEREERENNLPEDILGKIRTAVGSAQLLMAQKFYQFRELCEENLNPNAHPRPTSQDLAGFWDMLQLSIENISMKFDELHQLKANNWKQMDPLDKKERRAPPPVPKKPAKGPAPLIRERSLESSQRQEARKRLMAAKRAASVRQNSATESAESIEIYIPEAQTRL

SEQ ID NO: 20190 - protein, 338 aa, Homo sapiens
DRAQVHTREPTTYPPVLSERAFLRGSLTLESSTSSDSRLGRARDEEGLLEMQKGKVTPETDLHKETHLGKVSLEGEGLGTDDGLHSRALQEWLSADVLHECDSQQPGKDALIHAGTNPYKCKQCGKGFNRKWYLVRHQRVHTGMKPYECNACGKAFSQSSTLIRHYLIHTGEKPYKCLECGKAFKRRSYLMQHHPIHTGEKPYECSQCRKAFTHRSTFIRHNRTHTGEKPFECKECEKAFSNRAHLIQHYIIHTGEKPYDCMACGKAFRCSSELIQHQRIHTGEKPYECTQCGKAFHRSTYLIQHSVIHTGEMPYKCIECGKAFKRRSHLLQHQRVHT

SEQ ID NO: 20191 - protein, 536 aa, Homo sapiens
MILLSFVSDSNVGTGEKKVTEAWISEDENSHRTTSDRLTVMELPSPESEEVHEPRLGELLGNPEGQSLGSSPSQDRGCKQVTVTHWKIQTGETAQVCTKSGRNHILNSDLLLLQRELIEGEANPCDICGKTFTFNSDLVRHRISHAGEKPYTCDQCGKGFGQSSHLMEHQRIHTGERLYVCNVCGKDFIHYSGLIEHQRVHSGEKPFKCAQCGKAFCHSSDLIRHQRVHTRERPFECKECGKGFSQSSLLIRHQRIHTGERPYECNECGKSFIRSSSLIRHYQIHTEVKQYECKECGKAFRHRSDLIEHQRIHTGERPFECNECGKAFIRSSKLIQHQRIHTGERPYVCNECGKRFSQTSNFTQHQRIHTGEKLYECNECGKAFFLSSYLIRHQKIHTGERVYECKECGKAFLQKAHLTEHQKIHSGDRPFECKDCGKAFIQSSKLLLHQIIHTGEKPYVCSYCGKGFIQRSNFLQHQKIHTEEKLYECSQYGRDFNSTTNVKNNQRVHQEGLSLSKAPIHLGERSVDKGEHTGNL

SEQ ID NO: 20192 - protein, 640 aa, Homo sapiens
MELEVPDEAESAEAGAVPSEAAWAAESGAAAGLAQKKAAPTEVLSMTAQPGPGHGKKLGHRGVDASGETTYKKTTSSTLKGAIQLGIGYTVGHLSSKPERDVLMQDFYVVESIFFPSEGSNLTPAHHFQDFRFKTYAPVAFRYFRELFGIRPDDYLYSLCNEPLIELSNPGASGSLFYVTSDDEFIIKTVMHKEAEFLQKLLPGYYMNLNQNPRTLLPKFYGLYCVQSGGKNIRVVVMNNILPRVVKMHLKFDLKGSTYKRRASKKEKEKSFPTYKDLDFMQDMPEGLLLDADTFSALVKTLQRDCLVLESFKIMDYSLLLGVHNIDQHERERQAQGAQSTSDEKRPVGQKALYSTAMESIQGGAARGEAIESDDTMGGIPAVNGRGERLLLHIGIIDILQSYRFIKKLEHTWKALVHDGDTVSVHRPSFYAERFFKFMSNTVFRKNSSLKSSPSKKGRGGALLAVKPLGPTAAFSASQIPSEREEAQYDLRGARSYPTLEDEGRPDLLPCTPPSFEEATTASIATTLSSTSLSIPERSPSETSEQPRYRRRTQSSGQDGRPQEEPPAEEDLQQITVQVEPACSVEIVVPKEEDAGVEASPAGASAAVEVETASQASDEEGAPASQASDEEDAPATDIYF

SEQ ID NO: 20193 - protein, 485 aa, Homo sapiens
MESSKKMDSPGALQTNPPLKLHTDRSAGTPVFVPEQGGYKEKFVKTVEDKYKCEKCHLVLCSPKQTECGHRFCESCMAALLSSSSPKCTACQESIVKDKVFKDNCCKREILALQIYCRNESRGCAEQLMLGHLLVHLKNDCHFEELPCVRPDCKEKVLRKDLRDHVEKACKYREATCSHCKSQVPMIALQVSLLQNESVEKNKSIQSLHNQICSFEIEIERQKEMLRNNESKILHLQRVIDSQAEKLKELDKEIRPFRQNWEEADSMKSSVESLQNRVTELESVDKSAGQVARNTGLLESQLSRHDQMLSVHDIRLADMDLRFQVLETASYNGVLIWKIRDYKRRKQEAVMGKTLSLYSQPFYTGYFGYKMCARVYLNGDGMGKGTHLSLFFVIMRGEYDALLPWPFKQKVTLMLMDQGSSRRHLGDAFKPDPNSSSFKKPTGEMNIASGCPVFVAQTVLENGTYIKDDTIFIKVIVDTSDLPDP

SEQ ID NO: 20194 - protein, 456 aa, Homo sapiens
MNKLRQSFRRKKDVYVPEASRPHQWQTDEEGVRTGKCSFPVKYLGHVEVDESRGMHICEDAVKRLKAERKFFKGFFGKTGKKAVKAVLWVSADGLRVVDEKTKDLIVDQTIEKVSFCAPDRNFDRAFSYICRDGTTRRWICHCFMAVKDTGERLSHAVGCAFAACLERKQKREKECGVTATFDASRTTFTREGSFRVTTATEQAEREEIMKQMQDAKKGTEWGQSSGAASPGLFQAGHRRTPSEADRWLEEVSKSVRAQQPQASAAPLQPVLQPPPPTAISQPASPFQGNAFLTSQPVPVGVVPALQPAFVPAQSYPVANGMPYPAPNVPVVGITPSQMVANVFGTAGHPQAAHPHQSPSLVRQQTFPHYEASSATTSPFFKPPAQHLNGSAAFNGVDDGRLASADRHTEVPTGTCPVDPFEAQWAALENKSKQRTNPSPTNPFSSDLQKTFEIEL

SEQ ID NO: 20195 - protein, 787 aa, Homo sapiens
MKKEGTTLGLTVSGGIDKDGKPRVSNLRQGGIAARSDQLDVGDYIKAVNGINLAKFRHDEIISLLKNVGERVVLEVEYELPPVSVQGSSVIFRTVEVTLHKEGNTFGFVIRGGAHDDRNKSRPVVITCVRPGGPADREGTIKPGDRLLSVDGIRLLGTTHAEAMSILKQCGQEAALLIEYDVSVMDSVATASGPLLVEVAKTPGASLGVALTTSMCCNKQVIVIDKIKSASIADRCGALHVGDHILSIDGTSMEYCTLAEATQFLANTTDQVKLEILPHHQTRLALKGPDHVSLASSTVGLAGQVVHTETTEVVLTADPVTGFGIQLQGSVFATETLSSPPLISYIEADSPAERCGVLQIGDRVMAINGIPTEDSTFEEASQLLRDSSITSKVTLEIEFDVAESVIPSSGTFHVKLPKKHNVELGITISSPSSRKPGDPLVISDIKKGSVAHRTGTLELGDKLLAIDNIRLDNCSMEDAVQILQQCEDLVKLKIRKDEDNSDEQESSGAIIYTVELKRYGGPLGITISGTEEPFDPIIISSLTKGGLAERTGAIHIGDRILAINSSSLKGKPLSEAIHLLQMAGETVTLKIKKQTDAQSASSPKKFPISSHLSDLGDVEEDSSPAQKPGKLSDMYPSTVPSVDSAVDSWDGSAIDTSYGTQGTSFQASGYNFNTYDWRSPKQRGSLSPVTKPRSQTYPDVGLSYEDWDRSTASGFAGAADSAETEQEENFWSQALEDLETCGQSGILRELEATIMSGSTMSLNHEAPTPRSQLGRQASFQERSSSRP

SEQ ID NO: 20196 - protein, 754 aa, Homo sapiens
MATSRGASRCPRDIANVMQRLQDEQEIVQKRTFTKWINSHLAKRKPPMVVDDLFEDMKDGVKLLALLEVLSGQKLPCEQGRRMKRIHAVANIGTALKFLEGRKIKLVNINSTDIADGRPSIVLGLMWTIILYFQIEELTSNLPQLQSLSSSASSVDSIVSSETPSPPSKRKVTTKIQGNAKKALLKWVQYTAGKQTGIEVKDFGKSWRSGVAFHSVIHAIRPELVDLETVKGRSNRENLEDAFTIAETELGIPRLLDPEDVDVDKPDEKSIMTYVAQFLKHYPDIHNASTDGQEDDEILPGFPSFANSVQNFKREDRVIFKEMKVWIEQFERDLTRAQMVESNLQDKYQSFKHFRVQYEMKRKQIEHLIQPLHRDGKLSLDQALVKQSWDRVTSRLFDWHIQLDKSLPAPLGTIGAWLYRAEVALREEITVQQVHEETANTIQRKLEQHKDLLQNTDAHKRAFHEIYRTRSVNGIPVPPDQLEDMAERFHFVSSTSELHLMKMEFLELKYRLLSLLVLAESKLKSWIIKYGRRESVEQLLQNYVSFIENSKFFEQYEVTYQILKQTAEMYVKADGSVEEAENVMKFMNETTAQWRNLSVEVRSVRSMLEEVISNWDRYGNTVASLQAWLEDAEKMLNQSENAKKDFFRNLPHWIQQHTAMNDAGNFLIETCDEMVSRDLKQQLLLLNGRWRELFMEVKQYAQADEMDRMKKEYTDCVVTLSAFATEAHKKLSEPLEVSFMNVKLLIQDLEVRGF

SEQ ID NO: 20197 - protein, 876 aa, Homo sapiens
MKKEGTTLGLTVSGGIDKDGKPRVSNLRQGGIAARSDQLDVGDYIKAVNGINLAKFRHDEIISLLKNVGERVVLEVEYELPPVSVQGSSVIFRTVEVTLHKEGNTFGFVIRGGAHDDRNKSRPVVITCVRPGGPADREGTIKPGDRLLSVDGIRLLGTTHAEAMSILKQCGQEAALLIEYDVSVMDSVATASGPLLVEVAKTPGASLGVALTTSMCCNKQVIVIDKIKSASIADRCGALHVGDHILSIDGTSMEYCTLAEATQFLANTTDQVKLEILPHHQTRLALKGPDHAALVSSSFSPTSMSAYSLSSLNMGTLPRSLYSTSPRGTMMRRRLKKKDFKSSLSLASSTVGLAGQVVHTETTEVVLTADPVTGFGIQLQGSVFATETLSSPPLISYIEADSPAERCGVLQIGDRVMAINGIPTEDSTFEEASQLLRDSSITSKVTLEIEFDVAESVIPSSGTFHVKLPKKHNVELGITISSPSSRKPGDPLVISDIKKGSVAHRTGTLELGDKLLAIDNIRLDNCSMEDAVQILQQCEDLVKLKIRKDEDNSDEQESSGAIIYTVELKRYGGPLGITISGTEEPFDPIIISSLTKGGLAERTGAIHIGDRILAINSSSLKGKPLSEAIHLLQMAGETVTLKIKKQTDAQSASSPKKFPISSHLSDLGDVEEDSSPAQKPGKLSDMYPSTVPSVDSAVDSWDGSAIDTSYGTQGTSFQASGYNFNTYDWRSPKQRGSLSPVTKPRSQTYPDVGLSYEDWDRSTASGFAGAADSAETEQEENFWSQALEDLETCGQSGILRELEEKADRRVSLRNMTLLATIMSGSTMSLNHEAPTPRSQLGRQASFQERSSSRPHYSQTTRSNTLPSDVGRKSVTL

SEQ ID NO: 20198 - protein, 91 aa, Homo sapiens
MDDDDFGGFEAAETFDGGSGETQTTSPAIPWAAFPAVSGVHLSPSSPEIVLDRDHSSSIGCLSSDAIISSPENTHAANSIVSQTIPKAQIQ

SEQ ID NO: 20199 - protein, 1056 aa, Homo sapiens
MIAVSFKCRCQILRRLTKDESPYTKSASQTKPPDGALAVRRQSIPEEFKGSTVVELMKKEGTTLGLTVSGGIDKDGKPRVSNLRQGGIAARSDQLDVGDYIKAVNGINLAKFRHDEIISLLKNVGERVVLEVEYELPPVSVQGSSVIFRTVEVTLHKEGNTFGFVIRGGAHDDRNKSRPVVITCVRPGGPADREGTIKPGDRLLSVDGIRLLGTTHAEAMSILKQCGQEAALLIEYDVSVMDSVATASGPLLVEVAKTPGASLGVALTTSMCCNKQVIVIDKIKSASIADRCGALHVGDHILSIDGTSMEYCTLAEATQFLANTTDQVKLEILPHHQTRLALKGPDHAALVSSSFSPTSMSAYSLSSLNMGTLPRSLYSTSPRGTMMRRRLKKKDFKSSLSLASSTVGLAGQVVHTETTEVVLTADPVTGFGIQLQGSVFATETLSSPPLISYIEADSPAERCGVLQIGDRVMAINGIPTEDSTFEEASQLLRDSSITSKVTLEIEFDVAESVIPSSGTFHVKLPKKHNVELGITISSPSSRKPGDPLVISDIKKGSVAHRTGTLELGDKLLAIDNIRLDNCSMEDAVQILQQCEDLVKLKIRKDEDNSDEQESSGAIIYTVELKRYGGPLGITISGTEEPFDPIIISSLTKGGLAERTGAIHIGDRILAINSSSLKGKPLSEAIHLLQMAGETVTLKIKKQTDAQSASSPKKFPISSHLSDLGDVEEDSSPAQKPGKLSDMYPSTVPSVDSAVDSWDGSAIDTSYGTQGTSFQASGYNFNTYDWRSPKQRGSLSPVTKPRSQTYPDVGLSYEDWDRSTASGFAGAADSAETEQEENFWSQALEDLETCGQSGILRELEATIMSGSTMSLNHEAPTPRSQLGRQASFQERSSSRPHYSQTTRSNTLPSDVGRKSVTLRKMKQEIKEIMSPTPVELHKVTLYKDSDMEDFGFSVADGLLEKGVYVKNIRPAGPGDLGGLKPYDRLLQVNHVRTRDFDCCLVVPLIAESGNKLDLVISRNPLASQKSIDQQSLPGDWSEQNSAFFQQPSHGGNLETRE

SEQ ID NO: 20200 - protein, 512 aa, Homo sapiens
MLLPAPALRRALLSRPWTGAGLRWKHTSSLKVANEPVLAFTQGSPERDALQKALKDLKGRMEAIPCVVGDEEVWTSDVQYQVSPFNHGHKVAKFCYADKSLLNKAIEAALAARKEWDLKPIADRAQIFLKAADMLSGPRRAEILAKTMVGQGKTVIQAEIDAAAELIDFFRFNAKYAVELEGQQPISVPPSTNSTVYRGLEGFVAAISPFNFTAIGGNLAGAPALMGNVVLWKPSDTAMLASYAVYRILREAGLPPNIIQFVPADGPLFGDTVTSSEHLCGINFTGSVPTFKHLWKQVAQNLDRFHTFPRLAGECGGKNFHFVHRSADVESVVSGTLRSAFEYGGQKCSACSRLYVPHSLWPQIKGRLLEEHSRIKVGDPAEDFGTFFSAVIDAKEIFGPVLSVYVYPDDKYKETLQLVDSTTSYGLTGAVFSQDKDVVQEATKVLRNAAGNFYINDKSTGSIVGQQPFGGARASGTNDKPGGPHYILRWTSPQVIKETHKPLGDWSYAYMQ

SEQ ID NO: 20201 - protein, 81 aa, Homo sapiens
MDGKVAVQECGPPAVSWVPEEGEKLDQEDEDQEPSSSPTSSSSLSAASRCSSWRWRWANTPAKGVSQPGGRSAPSSRALVW

SEQ ID NO: 20202 - protein, 930 aa, Homo sapiens
MSEFRIHHDVNELLSLLRVHGGDGAEVYIDLLQKNRTPYVTTTVSAHSAKVKIAEFSRTPEDFLKKYDELKSKNTRNLDPLVYLLSKLTEDKETLQYLQQNAKERAELAAAAVGSSTTSINVPAAASKISMQELEELRKQLGSVATGSTLQQSLELKRKMLRDKQNKKNSGQHLPIFPAWVYERPALIGDFLIGAGISTDTALPIVLLRWNLALSPRLKCSGVISAHCNLHLPGTLPLASQESAVVEDLLYVLVGVDGRYVSAQPLAGRQSRTFLVDPNLDLSIRELVHRILPVAASYSAVTRFIEEKSSFEYGQVNHALAAAMRTLVKEHLILVSQLEQLHRQGLLSLQKLWFYIQPAMRTMDILASLATSVDKGECLGGSTLSLLHDRSFSYTGDSQAQELCLYLTKAASAPYFEVLEKWIYRGIIHDPYSEFMVEEHELRKERIQEDYNDKYWDQRYTIVQQQIPSFLQKMADKILSTGKYLNVVRECGHDVTCPVAKEIIYTLKERAYVEQIEKAFNYASKVLLDFLMEEKELVAHLRSIKRYFLMDQGDFFVHFMDLAEEELRKPVEDITPPRLEALLELALRMSTANTDPFKDDLKIDLMPHDLITQLLRVLAIETKQEKAMAHADPTELALSGLEAFSFDYIVKWPLSLIINRKALTRYQMLFRHMFYCKHVERQLCSVWISNKTAKQHSLHSAQWFAGAFTLRQRMLNFVQNIQYYMMFEVMEPTWHILEKNLKSASNIDDVLGHHTGFLDTCLKDCMLTNPELLKVFSKLMSVCVMFTNCMQKFTQSMKLDGELGGQTLEHSTVLGLPAGAEERARKELARKHLAEHADTVQLVSGFEATINKFDKNFSAHLLDLLARLSIYSTSDCEHGMASVISRLDFNGFYTERLERLSAERSQKATPQVPVLRGPPAPAPRVAVTAQ

SEQ ID NO: 20203 - protein, 622 aa, Homo sapiens
MASPLPSGFPARRNSRLDVFLRRHLPPEVYDAVRAYEPCIVVSNSENHILKYVVLSDRLVYLTENPPKSIRRVVALRDVVAIDLIDDYPEFLSSPDREISQHIRIIYSSTVLKKECKKSNSVRKFLFPFHHTKANNKKVKEEKNGLAFWRSKESRSLKESPLRDQQESSTPSKDSTLCPRPGLKKLSLHGQGAFRPLPSPSRRSSQSAPTTGKAVSEPSCTTNTKEPQGLPDHNSISEIPFKCNGNGNEFYLGNSLLDSPSQSNSNLEKKESELHLYVISTTSSIFLHLKSSWNNYIIKATLLQDPFYASEFSPAIGSQKPYRSEEKIKHFSQLKSELFLKDNSLRRILSLLMELKVAAQKNFILKRLFWKTSDLFYFIVNKLHEYLPESRDKNALQNQSQRVDELVACIEIIQTLVLMFRETETESSRLNTLAAKKGALFNLLVILISEPQIPKSCPVFDIQLVADSALVRMSFDAELQKLILEYTNTATALLYEILLVFQQGNLGLGSTKFAISWIMSFLQSCPPIITFVASIVKQVVRGLSASFQLLSPCQAVLLYQQFYILKSCLRHSRTLAEYIRNNYREEFRYFIHMPALQKRLPLCYPITQPTIQLFHEVLKLVE

SEQ ID NO: 20204 - protein, 147 aa, Homo sapiens
MERVGCTLTTTYAHPRPTPTNFLPAISTMASSYRDRFPHSNLTHSLSLPWRPSTYYKVASNSPSVAPYCTRSQRVSENTMLPFVSNRTTFFTRYTPDDWYRSNLTNYQESNTSRHNSEKLRVDTSRLIQDKYQQTRKTQADTTQNLG

SEQ ID NO: 20205 - protein, 1127 aa, Homo sapiens
MPEPTKKEENEVPAPAPPPEEPSKEKEAGTTPAKDWTLVETPPGEEQAKQNANSQLSILFIEKPQGGTVKVGEDITFIAKVKAEDLLRKPTIKWFKGKWMDLASKAGKHLQLKETFERHSRVYTFEMQIIKAKDNFAGNYRCEVTYKDKFDSCSFDLEVHESTGTTPNIDIRSAFKRREVKQQEEEPQVDVWELLKNAKPSEYEKIAFQYGITDLRGMLKRLKRMRREEKKSAAFAKILDPAYQVDKGGRVRFVVELADPKLEVKWYKNGQEIRPSTKYIFEHKGCQRILFINNCQMTDDSEYYVTAGDEKCSTELFVREPPIMVTKQLEDTTAYCGERVELECEVSEDDANVKWFKNGEEIIPGPKSRYRIRVEGKKHILIIEGATKADAAEYSVMTTGGQSSAKLSVDLKPLKILTPLTDQTVNLGKEICLKCEISENIPGKWTKNGLPVQESDRLKVVHKGRIHKLVIANALTEDEGDYVFAPDAYNVTLPAKVHVIDPPKIILDGLDADNTVTVIAGNKLRLEIPISGEPPPKAMWSRGDKAIMEGSGRIRTESYPDSSTLVIDIAERDDSGVYHINLKNEAGEAHASIKVKVVDFPDPPVAPTVTEVGDDWCIMNWEPPAYDGGSPILGYFIERKKKQSSRWMRLNFDLCKETTFEPKKMIEGVAYEVRIFAVNAIGISKPSMPSRPFVPLAVTSPPTLLTVDSVTDTTVTMRWRPPDHIGAAGLDGYVLEYCFEGTEDWIVANKDLIDKTKFTITGLPTDAKIFVRVKAVNAAGASEPKYYSQPILVKEIIEPPKIRIPRHLKQTYIRRVGEAVNLVIPFQGKPRPELTWKKDGAEIDKNQINIRNSETDTIIFIRKAERSHSGKYDLQVKVDKFVETASIDIQIIDRPGPPQIVKIEDVWGENVALTWTPPKDDGNAAITGYTIQKADKKSMEWFTVIEHYHRTSATITELVIGNEYYFRVFSENMCGLSEDATMTKESAVIARDGKIYKNPVYEDFDFSEAPMFTQPLVNTYAIAGYNATLNCSVRGNPKPKITWMKNKVAIVDDPRYRMFSNQGVCTLEIRKPSPYDGGTYCCKAVNDLGTVEIECKLEVKVIYQGVNTPGQPVFLEGQQQSLHNKDF

SEQ ID NO: 20206 - protein, 2363 aa, Homo sapiens
MPVLGVASKLRQPAVGSKPVHTALPIPNLGTTGSQHCSSRPLELTETESSMLSCQLALKSTCEFGEKKPLQGKAKEKEDSKIYTDWANHYLAKSGHKRLIKDLQQDIADGVLLAEIIQIIANEKVEDINGCPRSQSQMIENVDVCLSFLAARGVNVQGLSAEEIRNGNLKAILGLFFSLSRYKQQQHHQQQYYQSLVELQQRVTHASPPSEASQAKTQQDMQSSLAARYATQSNHSGIATSQKKPTRLPGPSRVPAAGSSSKVQGASNLNRRSQSFNSIDKNKPPNYANGNEKDSSKGPQSSSGVNGNVQPPSTAGQPPASAIPSPSASKPWRSKSMNVKHSATSTMLTVKQSSTATSPTPSSDRLKPPVSEGVKTAPSGQKSMLEKFKLVNARTALRPPQPPSSGPSDGGKDDDAFSESGEMEGFNSGLNSGGSTNSSPKVSPKLAPPKAGSKNLSNKKSLLQPKEKEEKNRDKNKVCTEKPVKEEKDQVTEMAPKKTSKIASLIPKGSKTTAAKKESLIPSSSGIPKPGSKVPTVKQTISPGSTASKESEKFRTTKGSPSQSLSKPITMEKASASSCPAPLEGREAGQASPSGSCTMTVAQSSGQSTGNGAVQLPQQQQHSHPNTATVAPFIYRAHSENEGTALPSADSCTSPTKMDLSYSKTAKQCLEEISGEDPETRRMRTVKNIADLRQNLEETMSSLRGTQISHSTLETTFDSTVTTEVNGRTIPNLTSRPTPMTWRLGQACPRLQAGDAPSLGAGYPRSGTSRFIHTDPSRFMYTTPLRRAAVSRLGNMSQIDMSEKASSDLDMSSEVDVGGYMSDGDILGKSLRTDDINSGYMTDGGLNLYTRSLNRIPDTATSRDIIQRGVHDVTVDADSWDDSSSVSSGLSDTLDNISTDDLNTTSSVSSYSNITVPSRKNTQLRTDSEKRSTTDETWDSPEELKKPEEDFDSHGDAGGKWKTVSSGLPEDPEKAGQKASLSVSQTGSWRRGMSAQGGAPSRQKAGTSALKTPGKTDDAKASEKGKAPLKGSSLQRSPSDAGKSSGDEGKKPPSGIGRSTATSSFGFKKPSGVGSSAMITSSGATITSGSATLGKIPKSAAIGGKSNAGRKTSLDGSQNQDDVVLHVSSKTTLQYRSLPRPSKSSTSGIPGRGGHRSSTSSIDSNVSSKSAGATTSKLREPTKIGSGRSSPVTVNQTDKEKEKVAVSDSESVSLSGSPKSSPTSASACGAQGLRQPGSKYPDIASPTFRRLFGAKAGGKSASAPNTEGVKSSSVMPSPSTTLARQGSLESPSSGTGSMGSAGGLSGSSSPLFNKPSDLTTDVISLSHSLASSPASVHSFTSGGLVWAANMSSSSAGSKDTPSYQSMTSLHTSSESIDLPLSHHGSLSGLTTGTHEVQSLLMRTGSVRSTLSESMQLDRNTLPKKGLRYTPSSRQANQEEGKEWLRSHSTGGLQDTGNQSPLVSPSAMSSSAAGKYHFSNLVSPTNLSQFNLPGPSMMRSNSIPAQDSSFDLYDDSQLCGSATSLEERPRAISHSGSFRDSMEEVHGSSLSLVSSTSSLYSTAEEKAHSEQIHKLRRELVASQEKVATLTSQLSANAHLVAAFEKSLGNMTGRLQSLTMTAEQKESELIELRETIEMLKAQNSAAQAAIQGALNGPDHPPKDLRIRRQHSSESVSSINSATSHSSIGSGNDADSKKKKKKNWVNSRGSELRSSFKQAFGKKKSTKPPSSHSDIEELTDSSLPASPKLPHNAGDCGSASMKPSQSASAICECTEAEAEIILQLKSELREKELKLTDIRLEALSSAHHLDQIREAMNRMQNEIEILKAENDRLKAETGNTAKPTRPPSESSSSTSSSSSRQSLGLSLNNLNITEAVSSDILLDDAGDATGHKDGRSVKIIVSISKGYGRAKDQKSQAYLIGSIGVSGKTKWDVLDGVIRRLFKEYVFRIDTSTSLGLSSDCIASYCIGDLIRSHNLEVPELLPCGYLVGDNNIITVNLKGVEENSLDSFVFDTLIPKPITQRYFNLLMEHHRIILSGPSGTGKTYLANKLAEYVITKSGRKKTEDAIATFNVDHKSSKELQQYLANLAEQCSADNNGVELPVVIILDNLHHVGSLSDIFNGFLNCKYNKCPYIIGTMNQGVSSSPNLELHHNFRWVLCANHTEPVKGFLGRYLRRKLIEIEIERNIRNNDLVKIIDWIPKTWHHLNSFLETHSSSDVTIGPRLFLPCPMDVEGSRVWFMDLWNYSLVPYILEAVREGLQMYGKRTPWEDPSKWVLDTYPWSSATLPQESPALLQLRPEDVGYESCTSTKEATTSKHIPQTDTEGDPLMNMLMKLQEAANYSSTQSCDSESTSHHEDILDSSLESTL

SEQ ID NO: 20207 - protein, 589 aa, Homo sapiens
MAAEKQVPGGGGGGGSGGGGGSGGGGSGGGRGAGGEENKENERPSAGSKANKEFGDSLSLEILQIIKESQQQHGLRHGDFQRYRYLLLVLMDAERAWSYAMQLKQEANTEPRKRFHLLSRLRKAVKHAEELERLCESNRVDAKTKLEAQAYTAYLSGMLRFEHQEWKAAIEAFNKCKTIYEKLASAFTEEQAVLYNQRVEEISPNIRYCAYNIGDQSAINELMQMRLRSGGTEGLLAEKLEALITQTRAKQAATMSEVEWRGRTVPVKIDKVRIFLLGLADNEAAIVQAESEETKERLFESMLSECRDAIQVVREELKPDQKQRDYILEGEPGKVSNLQYLHSYLTYIKLSTAIKRNENMAKGLQRALLQQQPEDDSKRSPRPQDLIRLYDIILQNLVELLQLPGLEEDKAFQKEIGLKTLVFKAYRCFFIAQSYVLVKKWSEALVLYDRVLKYANEVNSDAGAFKNSLKDLPDVQELITQVRSEKCSLQAAAILDANDAHQTETSSSQVKDNKPLVERFETFCLDPSLVTKQANLVHFPPGFQPIPCKPLFFDLALNHVAFPPLEDKLEQKTKSGLTGYIKGIFGFRS

SEQ ID NO: 20208 - protein, 219 aa, Homo sapiens
SPGAQLGRGAPTSAFPPPAAEAHPAARRGLRSPQLPSGAMSQNGAPGMQEESLQGSWVELHFSNNGNGGSVPASVSIYNGDMEKILLDAQHESGRSSSKSSHCDSPPRSQTPQDTNRASETDTHSIGEKNSSQSEEDDIERRKEVESILKKNSDWIWDWSSRPENIPPKEFLFKHPKRTATLSMRNTSVMKKGGIFSAEFLKVFLPSLLLSHLLAIGLG

SEQ ID NO: 20209 - protein, 400 aa, Homo sapiens
MDGDEMTRIIWQFIKEKLILPHVDIQLKYFDLGLPNRDQTDDQVTIDSALATQKYSVAVKCATITPDEARVEEFKLKKMWKSPNGTIRNILGGTVFREPIICKNIPRLVPGWTKPITIGRHAHGDQYKATDFVADRAGTFKMVFTPKDGSGVKEWEVYNFPAGGVGMGMYNTDESISGFAHSCFQYAIQKKWPLYMSTKNTILKAYDGRFKDIFQEIFDKHYKTDFDKNKIWYEHRLIDDMVAQVLKSSGGFVWACKNYDGDVQSDILAQGFGSLGLMTSVLVCPDGKTIEAEAAHGTVTRHYREHQKGRPTSTNPIASIFAWTRGLEHRGKLDGNQDLIRFAQMLEKVCVETVESGAMTKDLAGCIHGLSNVKLNEHFLNTTDFLDTIKSNLDRALGRQ

SEQ ID NO: 20210 - protein, 521 aa, Homo sapiens
MLETCGLLVALGDSTKPETVEPIPSHLALPEEVSLQEQLAQGVPRYSYLGQAMDQDGPSEMQEYFLRPGTDPQSEKLHGKMSLEHEGLATADGICSMMIQNQVSPEDALYGFDSYGPVTDSLIHEGENSYKFEEMFNENCFLVQHEQILPRVKPYDCPECGKAFGKSKHLLQHHIIHTGEKPYKCLECGKDFNRRSHLTRHQRTHNGDKPFVCSECGRTFNRGSHLTRHQRVHSGEKPFVCNECGKAFTYRSNFVLHNKSHNEKKPFACSECGKGFYESTALIQHFIIHTGERPFKCLECGKAFNCRSHLKQHERIHTGEKPFVCSQCGKAFTHYSTYVLHERAHTGEKPFECKECGKAFSIRKDLIRHFNIHTGEKPYECLQCGKAFTRMSGLTRHQWIHTGEKPYVCIQCGKAFCRTTNLIRHFSIHTGEKPYECVECGKAFNRRSPLTRHQRIHTAEKSHEPIQSGNVSCESTDLIQHSIIHTESSPVSAVNMETPSIAAHSSSLDINGFIVEETLPL

SEQ ID NO: 20211 - protein, 546 aa, Homo sapiens
MRLFVSDGVPGCLPVLAAAGRARGRAEVLISTVGPEDCVVPFLTRPKVPVLQLDSGNYLFSTSAICRYFFLLSGWEQDDLTNQWLEWEATELQPALSAALYYLVVQGKKGEDVLGSVRRALTHIDHSLSRQNCPFLAGETESLADIVLWGALYPLLQDPAYLPEELSALHSWFQTLSTQEPCQRAAETVLKQQGVLALRPYLQKQPQPSPAEGRAVTNEPEEEELATLSEEEIAMAVTAWEKGLESLPPLRPQQNPVLPVAGERNVLITSALPYVNNVPHLGNIIGCVLSADVFARYSRLRQWNTLYLCGTDEYGTATETKALEEGLTPQEICDKYHIIHADIYRWFNISFDIFGRTTTPQQTKITQDIFQQLLKRGFVLQDTVEQLRCEHCARFLADRFVEGVCPFCGYEEARGDQCDKCGKLINAVELKKPQCKVCRSCPVVQSSQHLFLDLPKLEKRLEEWLGRTLPGSDWTPNAQFITRSWLRDGLKPRCITRDLKWGTPVPLEGFEDKVFYVWFDATIGYLSITANYTDQWERWWKNPEQP

SEQ ID NO: 20212 - protein, 482 aa, Homo sapiens
MPQLNGGGGDDLGANDELISFKDEGEQEEKSSENSSAERDLADVKSSLVNESETNQNSSSDSEAERRPPPRSESFRDKSRESLEEAAKRQDGGLFKGPPYPGYPFIMIPDLTSPYLPNGSLSPTARTLHFQSGSTHYSAYKTIEHQIAVQYLQMKWPLLDVQAGSLQSRQALKDARSPSPAHIVSNKVPVVQHPHHVHPLTPLITYSNEHFTPGNPPPHLPADVDPKTGIPRPPHPPDISPYYPLSPGTVGQIPHPLGWLVPQQGQPVYPITTGGFRHPYPTALTVNASMSRFPPHMVPPHHTLHTTGIPHPAIVTPTVKQESSQSDVGSLHSSKHQDSKKEEEKKKPHIKKPLNAFMLYMKEMRAKVVAECTLKESAAINQILGRRWHALSREEQAKYYELARKERQLHMQLYPGWSARDNYGKKKKRKRDKQPGETNEHSECFLNPCLSLPPITGEKKSAFATYKVKAAASAHPLQMEAY

SEQ ID NO: 20213 - protein, 312 aa, Homo sapiens
MSSHGNSLFLRESGQRLGRVGWLQRLQESLQQRALRTRLRLQTMTLEHVLRFLRRNAFILLTVSAVVIGVSLAFALRPYQLTYRQIKYFSFPGELLMRMLQMLVLPLIVSSLVTGMASLDNKATGRMGMRAAVYYMVTTIIAVFIGILMVTIIHPGKGSKEGLHREGRIETIPTADAFMDLIRNMFPPNLVEACFKQFKTQYSTRVVTRTMVRTENGSEPGASMPPPFSVENGTSFLENVTRALGTLQEMLSFEETVPVPGSANGINALGLVVFSVAFGLVIGGMKHKGRVLRDFFDSLNEAIMRLVGIIIW

SEQ ID NO: 20214 - protein, 49 aa, Homo sapiens
MASSTSLPAPGSRPKKPLGKMADWFRQTLLKKPKKRPGSLTYLTLHYLS

SEQ ID NO: 20215 - protein, 407 aa, Homo sapiens
MAAELYAPASAAAADLANSNAGAAVGRKAGPRSPPSAPAPAPPPPAPAPPTLGNNHQESPGWRCCRPTLRERNALMFNNELMADVHFVVGPPGATRTVPAHKYVLAVGSSVFYAMFYGDLAEVKSEIHIPDVEPAAFLILLKYMYSDEIDLEADTVLATLYAAKKYIVPALAKACVNFLETSLEAKNACVLLSQSRLFEEPELTQRCWEVIDAQAEMALRSEGFCEIDRQTLEIIVTREALNTKEAVVFEAVLNWAEAECKRQGLPITPRNKRHVLGRALYLVRIPTMTLEEFANGAAQSDILTLEETHSIFLWYTATNKPRLDFPLTKRKGLAPQRCHRFQSSAYRSNQWRYRGRCDSIQFAVDRRVFIAGLGLYGSSSGKAEYSVKIELKRLGVVLAQNLTKFMS

SEQ ID NO: 20216 - protein, 422 aa, Homo sapiens
MAETKDAAQMLVTFKDVAVTFTREEWRQLDLAQRTLYREVMLETCGLLVSLGHRVPKPELVHLLEHGQELWIVKRGLSHATCAGDRAQVHTREPTTYPPVLSERAFLRGSLTLESSTSSDSRLGRARDEEGLLEMQKGKVTPETDLHKETHLGKVSLEGEGLGTDDGLHSRALQEWLSADVLHECDSQQPGKDALIHAGTNPYKCKQCGKGFNRKWYLVRHQRVHTGMKPYECNACGKAFSQSSTLIRHYLIHTGEKPYKCLECGKAFKRRSYLMQHHPIHTGEKPYECSQCRKAFTHRSTFIRHNRTHTGEKPFECKECEKAFSNRAHLIQHYIIHTGEKPYDCMACGKAFRCSSELIQHQRIHTGEKPYECTQCGKAFHRSTYLIQHSVIHTGEMPYKCIECGKAFKRRSHLLQHQRVHT

SEQ ID NO: 20217 - protein, 196 aa, Homo sapiens
RHPLACRRRSWRAAGEAADKVVLHTGKYEELIVCSHEIAASTAQLVAASKVKANKHSPHLSRLQECSRTVNERAANVVASTKSGQEQIEDRDTMDFSGLSLIKLKKQEMETQVRVLELEKTLEAERMRLGELRKQHYVLAGASGSPGEEVAIRPSTAPRSVTTKKPPLAQKPSVAPRQDHQLDKKDGIYPAQLVNY

SEQ ID NO: 20218 - protein, 1105 aa, Homo sapiens
MLQSALLSTRKHLYGLFHYNPMMLGLESLPDPTDTWEIIETIGKGTYGKVYKVTNKRDGSLAAVKILDPVSDMDEEIEAEYNILQFLPNHPNVVKFYGMFYKADHCVGGQLWLVLELCNGGSVTELVKGLLRCGQRLDEAMISYILYGALLGLQHLHNNRIIHRDVKGNNILLTTEGGVKLVDFGVSAQLTSTRLRRNTSVGTPFWMAPEVIACEQQYDSSYDARCDVWSLGITAIELGDGDPPLFDMHPVKTLFKIPRNPPPTLLHPEKWCEEFNHFISQCLIKDFERRPSVTHLLDHPFIKGVHGKVLFLQKQLAKVLQDQKHQNPVAKTRHERMHTRRPYHVEDAEKYCLEDDLVNLEVLDEDTIIHQLQKRYADLLIYTYVGDILIALNPFQNLSIYSPQFSRLYHGVKRASNPPHIFASADAAYQCMVTLSKDQCIVISGESGSGKTESAHLIVQHLTFLGKANNQTLREKILQVNSLVEAFGNSCTAINDNSSRFGKYLEMMFTPTGVVMGARISEYLLEKSRVIKQAAREKNFHIFYYIYAGLHHQKKLSDFRLPEEKPPRYIADETGRVMHDITSKESYRRQFEAIQHCFRIIGFTDKEVHSVYRILAGILNIGNIEFAAISSQHQTDKSEVPNAEALQNAASVLCISPEELQEALTSHCVVTRGETIIRANTVDRAADVRDAMSKALYGRLFSWIVNRINTLLQPDENICSAGGGMNVGILDIFGFENFQRNSFEQLCINIANEQIQYYFNQHVFALEQMEYQNEGIDAVPVEYEDNRPLLDMFLQKPLGLLALLDEESRFPQATDQTLVDKFEDNLRCKYFWRPKGVELCFGIQHYAGKVLYDASGVLEKNRDTLPADVVVVLRTSENKLLQQLFSIPLTKTGNLAQTRARITVASSSLPPHFSAGKAKVDTLEVIRHPEETTNMKRQTVASYFRYSLMDLLSKMVVGQPHFVRCIKPNDDREALQFSRERVLAQLRSTGILETVSIRRQGYSHRILFEEFVKRYYYLAFTAHQTPLASKESCVAILEKSRLDHWVLGKTKVFLKYYHVEQLNLLLREVIGRVVVLQAYTKGWLGARRYKRVREKREKGAIAIQS

SEQ ID NO: 20219 - protein, 579 aa, Homo sapiens
MPQLNGGGGDDLGANDELISFKDEGEQEEKSSENSSAERDLADVKSSLVNESETNQNSSSDSEAERRPPPRSESFRDKSRESLEEAAKRQDGGLFKGPPYPGYPFIMIPDLTSPYLPNGSLSPTARTYLQMKWPLLDVQAGSLQSRQALKDARSPSPAHIVSNKVPVVQHPHHVHPLTPLITYSNEHFTPGNPPPHLPADVDPKTGIPRPPHPPDISPYYPLSPGTVGQIPHPLGWLVPQQGQPVYPITTGGFRHPYPTALTVNASMSRFPPHMVPPHHTLHTTGIPHPAIVTPTVKQESSQSDVGSLHSSKHQDSKKEEEKKKPHIKKPLNAFMLYMKEMRAKVVAECTLKESAAINQILGRRWHALSREEQAKYYELARKERQLHMQLYPGWSARDNYGKKKKRKRDKQPGETNDLSAPKKCRARFGLDQQNNWCGPCRRKKKCVRYIQGEGSCLSPPSSDGSLLDSPPPSPNLLGSPPRDAKSQTEQTQPLSLSLKPDPLAHLSMMPPPPALLLAEATHKASALCPNGALDLPPAALQPAAPSSSIAQPSTSSLHSHSSLAGTQPQPLSLVTKSLE

SEQ ID NO: 20220 - protein, 1860 aa, Homo sapiens
MGWGSRCCCPGRLDLLCVLALLGGCLLPVCRTRVYTNHWAVKIAGGFPEANRIASKYGFINIGQIGALKDYYHFYHSRTIKRSVISSRGTHSFISMEPKVEWIQQQVVKKRTKRDYDFSRAQSTYFNDPKWPSMWYMHCSDNTHPCQSDMNIEGAWKRGYTGKNIVVTILDDGIERTHPDLMQNYDALASCDVNGNDLDPMPRYDASNENKHGTRCAGEVAAAANNSHCTVGIAFNAKIGGVRMLDGDVTDMVEAKSVSFNPQHVHIYSASWGPDDDGKTVDGPAPLTRQAFENGVRMGRRGLGSVFVWASGNGGRSKDHCSCDGYTNSIYTISISSTAESGKKPWYLEECSSTLATTYSSGESYDKKIITTDLRQRCTDNHTGTSASAPMAAGIIALALEANPFLTWRDVQHVIVRTSRAGHLNANDWKTNAAGFKVSHLYGFGLMDAEAMVMEAEKWTTVPRQHVCVESTDRQIKTIRPNSAVRSIYKASGCSDNPNRHVNYLEHVVVRITITHPRRGDLAIYLTSPSGTRSQLLANRLFDHSMEGFKNWEFMTIHCWGERAAGDWVLEVYDTPSQLRNFKTPGKLKEWSLVLYGTSVQPYSPTNEFPKVERFRYSRVEDPTDDYGTEDYAGPCDPECSEVGCDGPGPDHCNDCLHYYYKLKNNTRICVSSCPPGHYHADKKRCRKCAPNCESCFGSHGDQCMSCKYGYFLNEETNSCVTHCPDGSYQDTKKNLCRKCSENCKTCTEFHNCTECRDGLSLQGSRCSVSCEDGRYFNGQDCQPCHRFCATCAGAGADGCINCTEGYFMEDGRCVQSCSISYYFDHSSENGYKSCKKCDISCLTCNGPGFKNCTSCPSGYLLDLGMCQMGAICKDGEYVDEHGHCQTCEASCAKCQGPTQEDCTTCPMTRIFDDGRCVSNCPSWKFEFENQCHPCHHTCQRCQGSGPTHCTSCGADNYGREHFLYQGECGDSCPEGHYATEGNTCLPCPDNCELCHSVHVCTRCMKGYFIAPTNHTCQKLECGQGEVQDPDYEECVPCEEGCLGCSLDDPGTCTSCAMGYYRFDHHCYKTCPEKTYSEEVECKACDSNCGSCDQNGCYWCEEGFFLLGGSCVRKCGPGFYGDQEMGECESCHRACETCTGPGHDECSSCQEGLQLLRGMCVHATKTQEEGKFWNDILRKLQPCHSSCKTCNGSATLCTSCPKGAYLLAQACVSSCPQGTWPSVRSGSCENCTEACAICSGADLCKKCQMQPGHPLFLHEGRCYSKCPEGSYAEDGICERCSSPCRTCEGNATNCHSCEGGHVLHHGVCQENCPERHVAVKGVCKHCPEMCQDCIHEKTCKECTPEFFLHDDMCHQSCPRGFYADSRHCVPCHKDCLECSGPKADDCELCLESSWVLYDGLCLEECPAGTYYEKETKECRDCHKSCLTCSSSGTCTTCQKGLIMNPRGSCMANEKCSPSEYWDEDAPGCKPCHVKCFHCMGPAEDQCQTCPMNSLLLNTTCVKDCPEGYYADEDSNRCAHCHSSCRTCEGRHSRQCHSCRPGWFQLGKECLLQCREGYYADNSTGRCERCNRSCKGCQGPRPTDCLSCDRFFFLLRSKGECHRSCPDHYYVEQSTQTCERCHPTCDQCKGKGALNCLSCVWSYHLMGGICTSDCLVGEYRVGEGEKFNCEKCHESCMECKGPGAKNCTLCPANLVLHMDDSHCLHCCNTSDPPSAQECCDCQDTTDECILRTSKVRPATEHFKTALFITSSMMLVLLLGAAVVVWKKSRGRVQPAAKAGYEKLADPNKSYSSYKSSYRESTSFEEDQVIEYRDRDYDEDDDDDIVYMGQDGTVYRKFKYGLLDDDDIDELEYDDESYSYYQ

SEQ ID NO: 20221 - protein, 368 aa, Homo sapiens
MLPHVVLTFRRLGCALASCRLAPARHRGSGLLHTAPVARSDRSAPVFTRALAFGDRIALVDQHGRHTYRELYSRSLRLSQEICRLCGCVGGDLREERVSFLCANDASYVVAQWASWMSGGVAVPLYRKHPAAQLEYVICDSQSSVVLASQEYLELLSPVVRKLGVPLLPLTPAIYTGAVEEPAEVPVPEQGWRNKGAMIIYTSGTTGRPKGVLSTHQNIRAVVTGLVHKWAWTKDDVILHVLPLHHVHGVVNALLCPLWVGATCVMMPEFSPQQVWEKFLSSETPRINVFMAVPTIYTKLMEYYDRHFTQPHAQDFLRAVCEEKIRFRGDPTAWSTGAHCLRKPTEGSLLLHHPRRGRREGDQGDPRV

SEQ ID NO: 20222 - protein, 241 aa, Homo sapiens
MFRSDRMWSCHWKWKPSPLLFLFALYIMCVPHSVWGCANCRVVLSNPSGTFTSPCYPNDYPNSQACMWTLRAPTGYIIQITFNDFDIEEAPNCIYDSLSLDNGESQTKFCGATAKGLSFNSSANEMHVSFSSDFSIQKKGFNASYIRVAVSLRNQKVILPQTSDAYQVSVAKSISIPELSAFTLCFEATKVGHEDSDWTAFSYSNASFTQLLSFGKAKSGYFLSISDSKCLLNNALPVKEK

SEQ ID NO: 20223 - protein, 345 aa, Homo sapiens
MANYIHVPPGSPEVPKLNVTVQDQEEHRCREGALSLLQHLRPHWDPQEVTLQLFTDGITNKLIGCYVGNTMEDVVLVRIYGNKTELLVDRDEEVKSFRVLQAHGCAPQLYCTFNNGLCYEFIQGEALDPKHVCNPAIFRLIARQLAKIHAIHAHNGWIPKSNLWLKMGKYFSLIPTGFADEDINKRFLSDIPSSQILQEEMTWMKEILSNLGSPVVLCHNDLLCKNIIYNEKQGDVQFIDYEYSGYNYLAYDIGNHFNEFAGVSDVDYSLYPDRELQSQWLRAYLEAYKEFKGFGTEVTEKEVEILFIQVNQFALGENLNFIIGNKYCQLFSLKWLLISFGDCGL

SEQ ID NO: 20224 - protein, 636 aa, Homo sapiens
MREAAAALVPPPAFAVTPAAAMEEPPPPPPPPPPPPEPETESEPECCLAARQEGTLGDSACKSPESDLEDFSDETNTENLYGTSPPSTPRQMKRMSTKHQRNNVGRPASRSNLKEKMNAPNQPPHKDTGKTVENVEEYSYKQEKKIRAALRTTERDRKKNVQCSFMLDSVGGSLPKKSIPDVDLNKPYLSLGCSNAKLPVSVPMPIARPARQTSRTDCPADRLKFFETLRLLLKLTSVSKKKDREQRGQENTSGFWLNRSNELIWLELQAWHAGRTINDQDFFLYTARQAIPDIINEILTFKVDYGSFAFVRDRAGFNGTSVEGQCKATPGTKIVGYSTHHEHLQRQRVSFEQVKRIMELLEYIEALYPSLQALQKDYEKYAAKDFQDRVQALCLWLNITKDLNQKLRIMGTVLGIKNLSDIGWPVFEIPSPRPSKGNEPEYEGDDTEGELKELESSTDESEEEQISDPRVPEIRQPIDNSFDIQSRDCISKKLERLESEDDSLGWGAPDWSTEAGFSRHCLTSIYRPFVDKALKQMGLRKLILRLHKLMDGSLQRARIALVKNDRPVEGDMRHQSIYVRCTLVPSRKTGQLEAGMGLAGHSFLNFQIPCGVQIMCSCQGHHLHLRRNAVLCRGRS

SEQ ID NO: 20225 - protein, 685 aa, Homo sapiens
MNLIFHKDILFGIPANKVPQDEWTGYTPRGKDDEIPCRRMRSGSYIKAMGDEDSGDSDTSPKPSPKVAARRESYLKATQPSLTELTTLKISNEHSPKLQIRSHSYLRAVSEVSINRSLDSLDPAGLLTSPKFRSRNESYMRAMSTISQVSEMEVNGQFESVCESVFSELESQAVEALDLPMPGCFRMRSHSYVRAIEKGCSQDDECVSLRSSSPPRTTTTVRTIQSSTGVIKLSSAVEVSSCITTYKKTPPPVPPRTTTKPFISITAQSSTESAQDAYMDGQGQRGDIISQSGLSNSTESLDSMKALTAAIEAANAQIHGPASQHMGNNTATVTTTTTIATVTTEDRKKDHFKKNRCLSIGIQVDDAEEPDKTGENKAPSKFQSVGVQVEEEKCFRRFTRSNSVTTAVQADLDFHDNLENSLESIEDNSCPGPMARQFSRDASTSTVSIQGSGNHYHACAADDDFDTDFDPSILPPPDPWIDSITEDPLEAVQRSVCHRDGHWFLKLLQAERDRMEGWCQQMEREERENNLPEDILGKIRTAVGSAQLLMAQKFYQFRELCEENLNPNAHPRPTSQDLAGFWDMLQLSIENISMKFDELHQLKANNWKQMDPLDKKERRAPPPVPKKPAKGPAPLIRERSLESSQRQEARKRLMAAKRAASVRQNSATESAESIEIYIPEAQTRL

SEQ ID NO: 20226 - protein, 615 aa, Homo sapiens
MEGAGYRDNDVLLHWAPVEEAGDSTQILFSKKDSSGGDSCASEEEPTFDPGYEPDWAVISTVRPQLCHSEPTRGAEPSCPQGSWAFSVSLGELKSIRRSKPGLSWAYLVLVTQAGGSLPALHFHRGGTRALLRVLSRYLLLASSPQDSRLYLVFPHDSSALSNSFHHLQLFDQDSSNVVSRFLQDPYSTTFSSFSRVTNFFRGALQPQPEGAASDLPPPPDDEPEPGFEVISCVELGPRPTVERGPPVTEEEWARHVGPEGRLQQVPELKNRIFSGGLSPSLRREAWKFLLGYLSWEGTAEEHKAHIRKKTDEYFRMKLQWKSVSPEQERRNSLLHGYRSLIERDVSRTDRTNKFYEGPENPGLGLLNDILLTYCMYHFDLGYVQGMSDLLSPILYVIQNEVDAFWCFCGFMELVQGNFEESQETMKRQLGRLLLLLRVLDPLLCDFLDSQDSGSLCFCFRWLLIWFKREFPFPDVLRLWEVLWTGLPGPNLHLLVACAILDMERDTLMLSGFGSNEILKHINELTMKLSVEDVLTRAEALHRQLTACPELPHNVQEILGLAPPAEPHSPSPTASPLPLSPTRAPPTPPPSTDTAPQPDSSLEILPEEEDEGADS

SEQ ID NO: 20227 - protein, 2084 aa, Homo sapiens
MLEAIDKNRALHAAERLQTKLRERGDVANEDKLSLLKSVLQSPLFSQILSLQTSVQQLKDQVNIATSATSNIEYAHVPHLSPAVIPTLQNESFLLSPNNGNLEALTGPGIPHINGKPACDEFDQLIKNMAQGRHVEVFELLKPPSGGLGFSVVGLRSENRGELGIFVQEIQEGSVAHRDGRLKETDQILAINGQALDQTITHQQAISILQKAKDTVQLVIARGSLPQLVSPIVSRSPSAASTISAHSNPVHWQHMETIELVNDGSGLGFGIIGGKATGVIVKTILPGGVADQHGRLCSGDHILKIGDTDLAGMSSEQVAQVLRQCGNRVKLMIARGAIEERTAPTALGITLSSSPTSTPELRVDASTQKGEESETFDVELTKNVQGLGITIAGYIGDKKLEPSGIFVKSITKSSAVEHDGRIQIGDQIIAVDGTNLQGFTNQQAVEVLRHTGQTVLLTLMRRGMKQEAELMSREDVTKDADLSPVNASIIKENYEKDEDFLSSTRNTNILPTEEEGYPLLSAEIEEIEDAQKQEAALLTKWQRIMGINYEIVVAHVSKFSENSGLGISLEATVGHHFIRSVLPEGPVGHSGKLFSGDELLEVNGITLLGENHQDVVNILKELPIEVTMVCCRRTVPPTTQSELDSLDLCDIELTEKPHVDLGEFIGSSETEDPVLAMTDAGQSTEEVQAPLAMWEAGIQHIELEKGSKGLGFSILDYQDPIDPASTVIIIRSLVPGGIAEKDGRLLPGDRLMFVNDVNLENSSLEEAVEALKGAPSGTVRIGVAKPLPLSPEEGYVSAKEDSFLYPPHSCEEAGLADKPLFRADLALVGTNDADLVDESTFESPYSPENDSIYSTQASILSLHGSSCGDGLNYGSSLPSSPPKDVIENSCDPVLDLHMSLEELYTQNLLQRQDENTPSVDISMGPASGFTINDYTPANAIEQQYECENTIVWTESHLPSEVISSAELPSVLPDSAGKGSEYLLEQSSLACNAECVMLQNVSKESFERTINIAKGNSSLGMTVSANKDGLGMIVRSIIHGGAISRDGRIAIGDCILSINEESTISVTNAQARAMLRRHSLIGPDIKFSAAPADDRAPFYVITYVPAEHLEEFKISLGQQSGRVMALDIFSSYTGRDIPELPEREEGEGEESELQNTAYSNWNQPRRVELWREPSKSLGISIVGGRGMGSRLSNGEVMRGIFIKHVLEDSPAGKNGTLKPGDRIVEVDGMDLRDASHEQAVEAIRKAGNPVVFMVQSIINRPRKSPLPSLLHNLYPKYNFSSTNPFADSLQINADKAPSQSESEPEKAPLCSVPPPPPSAFAEMGSDHTQSSASKISQDVDKEDEFGYSWKNIRERYGTLTGELHMIELEKGHSGLGLSLAGNKDRSRMSVFIVGIDPNGAAGKDGRLQIADELLEINGQILYGRSHQNASSIIKCAPSKVKIIFIRNKDAVNQMAVCPGNAVEPLPSNSENLQNKETEPTVTTSDAAVDLSSFKNVQHLELPKDQGGLGIAISEEDTLSGVIIKSLTEHGVAATDGRLKVGDQILAVDDEIVVGYPIEKFISLLKTAKMTVKLTIHAENPDSQAVPSAAGAASGEKKNSSQSLMVPQSGSPEPESIRNTSRSSTPAIFASDPATCPIIPGCETTIEISKGRTGLGLSIVGGSDTLLGAIIIHEVYEEGAACKDGRLWAGDQILEVNGIDLRKATHDEAINVLRQTPQRVRLTLYRDEAPYKEEEVCDTLTIELQKKPGKGLGLSIVGKRNDTGVFVSDIVKGGIADADGRLMQGDQILMVNGEDVRNATQEAVAALLKCSLGTVTLEVGRIKAGPFHSERRPSQSSQVSEGSLSSFTFPLSGSSTSESLESSSKKNALASEIQGLRTVEMKKGPTDSLGISIAGGVGSPLGDVPIFIAMMHPTGVAAQTQKLRVGDRIVTICGTSTEGMTHTQAVNLLKNASGSIEMQVVAGGDVSVVTGHQQEPASSSLSFTGLTSSSIFQDDLGPPQCKSITLERGPDGLGFSIVGGYGSPHGDLPIYVKTVFAKGAASEDGRLKRGDQIIAVNGQSLEGVTHEEAVAILKRTKGTVTLMVLS

SEQ ID NO: 20228 - protein, 1146 aa, Homo sapiens
MCTRIAFCLMEKISWLCRPRRVCLCAASRPWVSSSACTPSPTRALCAPCFFLRVSESRTHRMTGMPQMGRMRSPRCPRALAPPAFLPTGPSSPLPAPETPTAPAAESAPNGLSTVSHDYLKGSYGLDLEAVRGGASHLPHLTRTLATSCRRLHSEVDKVLSGLEILSKVFDQQSSPMVTRLLQQQNLPQTGEQELESLVLKLSVLKDFLSGIQKKALKALQDMSSTAPPAPQPSTRKAKTIPVQAFEVKLDVTLGDLTKIGKSQKFTLSVDVEGGRLVLLRRQRDSQEDWTTFTHDRIRQLIKSQRVQNKLGVVFEKEKDRTQRKDFIFVSARKREAFCQLLQLMKNKHSKQDEPDMISVFIGTWNMGSVPPPKNVTSWFTSKGLGKTLDEVTVTIPHDIYVFGTQENSVGDREWLDLLRGGLKELTDLDYRPIAMQSLWNIKVAVLVKPEHENRISHVSTSSVKTGIANTLGNKGAVGVSFMFNGTSFGFVNCHLTSGNEKTARRNQNYLDILRLLSLGDRQLNAFDISLRFTHLFWFGDLNYRLDMDIQEILNYISRKEFEPLLRVDQLNLEREKHKVFLRFSEEEISFPPTYRYERGSRDTYAWHKQKPTGVRTNVPSWCDRILWKSYPETHIICNSYGCTDDIVTSDHSPVFGTFEVGVTSQFISKKGLSKTSDQAYIEFESIEAIVKTASRTKFFIEFYSTCLEEYKKSFENDAQSSDNINFLKVQWSSRQLPTLKPILADIEYLQDQHLLLTVKSMDGYESYGECVVALKSMIGSTAQQFLTFLSHRGEETGNIRGSMKVRVPTERLGTRERLYEWISIDKDEAGAKSKAPSVSRGSQEPRSGSRKPAFTEASCPLSRLFEEPEKPPPTGRPPAPPRAAPREEPLTPRLKPEGAPEPEGVAAPPPKNSFNNPAYYVLEGVPHQLLPPEPPSPARAPVPSATKNKVAITVPAPQLGHHRHPRVGEGSSSDEESGGTLPPPDFPPPPLPDSAIFLPPSLDPLPGPVVRGRGGAEARGPPPPKAHPRPPLPPGPSPASTFLGEVASGDDRSCSVLQMAKTLSEVDYAPAGPARSALLPGPLELQPPGTALGLWPAPQLPSTPHPGEHPGRPGRGGSVPAGRAGQRAGRGRHECLAAGHRLGAL

SEQ ID NO: 20229 - protein, 449 aa, Homo sapiens
MLLALRINVLAKGYSGISLETLKQVIEMFNASCLPYVPEKGTVGASGDLAPLSHLALGLVGEGKMWSPKSGWADAKYVLEAHGLKPVILKPKEGLALINGTQMITSLGCEAVERASAIARQADIVAALTLEVLKGTTKAFDTDIHALRPHRGQIEVAFRFRSLLDSDHHPSEIAESHRFCDRVQDAYTLRCCPQVHGVVNDTIAFVKNIITTELNSATDNPMVFANRGETVSGGNFHGEYPAKALDYLAIGIHELAAISERRIERLCNPSLSELPAFLVAEGGLNSGFMIAHCTAAALVSENKALCHPSSVDSLSTSAATEDHVSMGGWAARKALRVIEHVEQVLAIELLAACQGIEFLRPLKTTTPLEKVYDLVRSVVRPWIKDRFMAPDIEAAHRLLLEQKVWEVAAPYIEKYRMEHIPESRPLSPTAFSLQFLHKKSTKIPESEDL

SEQ ID NO: 20230 - protein, 563 aa, Homo sapiens
METAKQKALEVANRLYQKDLRAPDVVIGADTIVTVGGLILEKPVDKQDAYRMLSRLSGREHSVFTGVAIVHCSSKDHQLDTRVSEFYEETKVKFSELSEELLWEYVHSGEPMDKAGGYGIQALGGMLVESVHGDFLNVVGFPLNHFCKQLVKLYYPPRPEDLRRSVKHDSIPAADTFEDLSDVEGGGSEPTQRDAGSRDEKAEAGEAGQATAEAECHRTRETLPPFPTRLLELIEGFMLSKGLLTACKLKVFDLLKDEAPQKAADIASKVDASACGMERLLDICAAMGLLEKTEQGYSNTETANVYLASDGEYSLHGFIMHNNDLTWNLFTYLEFAIREGTNQHHRALGKKAEDLFQDAYYQSPETRLRFMRAMHGMTKLTACQVATAFNLSRFSSACDVGGCTGALARELAREYPRMQVTVFDLPDIIELAAHFQPPGPQAVQIHFAAGDFFRDPLPSAELYVLCRILHDWPDDKVHKLLSRVAESCKPGAGLLLVETLLDEEKRVAQRALMQSLNMLVQTEGKERSLGEYQCLLELHGFHQVQVVHLGGVLDAILATKVAP

SEQ ID NO: 20231 - protein, 344 aa, Homo sapiens
MAGSGCAWGAEPPRFLEAFGRLWQVQSRLGSGSSASVYRVRCCGNPGSPPGALKQFLPPGTTGAAASAAEYGFRKERAALEQLQGHRNIVTLYGVFTIHFSPNVPSRCLLLELLDVSVSELLLYSSHQGCSMWMIQHCARDVLEALAFLHHEGYVHADLKPRNILWSAENECFKLIDFGLSFKEGNQDVKYIQTDGYRAPEAELQNCLAQAGLQSDTECTSAVDLWSLGIILLEMFSGMKLKHTVRSQEWKANSSAIIDHIFASKAVVNAAIPAYHLRDLIKSMLHDDPSRRIPAEMALCSPFFSIPFAPHIEDLVMLPTPVLRLLNVLDDDYLENEEEYEGLC

SEQ ID NO: 20232 - protein, 690 aa, Homo sapiens
MAEAEGESLESWLNKATNPSNRQEDWEYIIGFCDQINKELEGPQIAVRLLAHKIQSPQEWEALQALTYLGDRVSEKVKTKVIELLYSWTMALPEEAKIKDAYHMLKRQGIVQSDPPIPVDRTLIPSPPPRPKNPVFDDEEKSKLLAKLLKSKNPDDLQEANKLIKSMVKEDEARIQKVTKRLHTLEEVNNNVRLLSEMLLHYSQEDSSDGDRELMKELFDQCENKRRTLFKLASETEDNDNSLGDILQASDNLSRVINSYKTIIEGQVINGEVATLTLPDSEGNSQCSNQGTLIDLAELDTTNSLSSVLAPAPTPPSSGIPILPPPPQASGPPRSRSSSQAEATLGPSSTSNALSWLDEELLCLGLADPAPNVPPKESAGNSQWHLLQREQSDLDFFSPRPGTAACGASDAPLLQPSAPSSSSSQAPLPPPFPAPVVPASVPAPSAGSSLFSTGVAPALAPKVEPAVPGHHGLALGNSALHHLDALDQLLEEAKVTSGLVKPTTSPLIPTTTPARPLLPFSTGPGSPLFQPLSFQSQGSPPKGPELSLASIHVPLESIKPSSALPVTAYDKNGFRILFHFAKECPPGRPDVLVVVVSMLNTAPLPVKSIVLQAAVPKSMKVKLQPPSGTELSPFSPIQPPAAITQVMLLANPLKEKVRLRYKLTFALGEQLSTEVGEVDQFPPVEQWGNL

SEQ ID NO: 20233 - protein, 1192 aa, Homo sapiens
MREESGMPPPWDASLLENEFFQVLDDLDSKLAQEQSASSVNTRTPLNYGSRTQFGHFYSSGNRHGNITERHKKHYNETSNMSIYDILRPGTPREGFKTFSPRTSTIYDMYRTREPRVFKEDYVQKNTFGSTSLCFDSRQRSALPATGHFTARSLHFPATTQSKSGFIPPRHQQSPKRTPLSSIIWNRSDSSRDRENQEEFLRAPSPMEIDPADKYVYPRGFQENKRYESYHSQNVYQRVSLNAPMENAMSPDTFENSENMPFYHQSNTFTRSFFSNTFGRSGEQRRFGQGPFWGQEKGHSFWSDFHRSRKSFSSSDRDFEMISMEANSVSAIHGHNVSSEHWESFSSGYGTDVSRGQEEPHPWQFDFQRSTLDSMVVSHGNETQLTPHFGTPNVCSMTGSSYHVKSSELVSQQDSSPVEVHINKEASSFGIAQTLASSFKTSFSQISDDRRNPQSPNLQNPTVTLQKIFPNKPASHPMRSHTEVTVTSSNSVDSLPLAKSQPNILVTEVNNEKDLNESISEEDKQLSKMDQTNKAGEIPQPVSQTGISNSLPDFQNPLSQDSAKSNGFGFNASTIISSKKSPRVFSRKDTSKMYIPHTDKSNDIKQDKRFTENRKLGSTASLPFIQEHRTPPSFPRTDQGCHQELTVNNEDISRIITNNHWSSALTDTQNAQYSKCKLTPGHKTSCDSLDLSSAALPDSSPSKNSSLDAPVVPSTTVFSRRSPSDKDPSLGEREEKDNAGKNQKNQFIVSHSENQERNDSPVPTHDEVVDVKCHSHSPFRNERGKGKIRHHISCIEKLSKTESISVPTSDHRSLIEANQSNSKVSELDTIYCTLPRKSSSFLIHGRQSGSKIMAASLRNGPPPFQIKNNVEDAMGNYMLNKFSPSSPESANECSKVLSDSALEAPEATERMTNVKSSGSTSVRKGPLPFLINRAMSCPSGEPHASTGREGRKKPLTSGMDASELTPRAWERIISPVESDSSVRDCSLTKRQHQKENFQEYTEKEGKMAASRRSVFALSNEDPLPFCSDLSGKERGKTLHKVKTTSTFSVSGDEDNVKCLEVVSIYYTLPRKPSKKFCNLLQQYTQNTNLLIESPQVETETFPNALEKDKQNYSTREQSGTPSCENLKMSVNSDQTLTTENMTAFRLSNRGPLAPTLQEMASVEAAVSLPEEESKAREIFSDNLAKTPLGDSE

SEQ ID NO: 20234 - protein, 894 aa, Homo sapiens
MARQKKMGQSVLRAVFFLVLGLLGHSHGGFPNTISIGGLFMRNTVQEHSAFRFAVQLYNTNQNTTEKPFHLNYHVDHLDSSNSFSVTNAFCSQFSRGVYAIFGFYDQMSMNTLTSFCGALHTSFVTPSFPTDADVQFVIQMRPALKGAILSLLGHYKWEKFVYLYDTERGFSILQAIMEAAVQNNWQVTARSVGNIKDVQEFRRIIEEMDRRQEKRYLIDCEVERINTILEQVVILGKHSRGYHYMLANLGFTDILLERVMHGGANITGFQIVNNENPMVQQFIQRWVRLDEREFPEAKNAPLKYTSALTHDAILVIAEAFRYLRRQRVDVSRRGSAGDCLANPAVPWSQGIDIERALKMVQVQGMTGNIQFDTYGRRTNYTIDVYEMKVSGSRKAGYWNEYERFVPFSDQQISNDSASSENRTIVVTTILESPYVMYKKNHEQLEGNERYEGYCVDLAYEIAKHVRIKYKLSIVGDGKYGARDPETKIWNGMVGELVYGRADIAVAPLTITLVREEVIDFSKPFMSLGISIMIKKPQKSKPGVFSFLDPLAYEIWMCIVFAYIGVSVVLFLVSRFSPYEWHLEDNNEEPRDPQSPPDPPNEFGIFNSLWFSLGAFMQQGCDISPRSLSGRIVGGVWWFFTLIIISSYTANLAAFLTVERMVSPIESAEDLAKQTEIAYGTLDSGSTKEFFRRSKIAVYEKMWSYMKSAEPSVFTKTTADGVARVRKSKGKFAFLLESTMNEYIEQRKPCDTMKVGGNLDSKGYGVATPKGSALRNAVNLAVLKLNEQGLLDKLKNKWWYDKGECGSGGGDSKDKTSALSLSNVAGVFYILVGGLGLAMMVALIEFCYKSRAESKRMKLTKNTQNFKPAPATNTQNYATYREGYNVYGTESVKI

SEQ ID NO: 20235 - protein, 2092 aa, Homo sapiens
MVLKVDTSESLWHIQISRSRFLLDSDGKRLICEVSLCKINSKVLKSGQLEDTCLVELSLALDLCLKVGISSRHLTAITVDVWTLHAELHEGLFQSQLLCQGPSLASKPVPCSEVTENLVEPTLPGLFLLQQLPDQVKVKMENTSVVLSMNSQKRHLTWTLKLLQFLYHRDEDQLPLRSFTANSDMAQMSTELLLEDGLLLSQSRQRIVCLNSLKASVQVTTIDLSASLVLNTCIIHYRHQEFSHWLHLLALETQGSSSPVLKQRKKRTFPQILAPIIFSTSISNVNISIQLGDTPPFALGFNSISLDYQHLRPQSIHQRGVLTVDHLCWRVGSDSHIQRAPHPPNMHVWGEALVLDSFTLQGSYNQPLGLSSTQSDTLFLDCTIRGLQVEASDTCAQCLSRILSLMGPQSGKSAVSRHSSFGESVSLLWKVDLKVEDMNLFTLSALVGASEVRLDTLTILGSAETSTVGIQGLVLALVKSVTEKMQPCCKAPDIPTPVLSLSMLSITYHSSIRSLEVQCGAGLTLLWSPPDHMYLYQHVLATLQCRDLLRATVFPETVPSLALETSGTTSELEGRAPEPLPPKRLLNLTLEVSTAKLTAFVAEDKFITLAAESVSLSRHGGSLQAYCPELAAGFDGNSIFNFKEVEVQLLPELEEMILHRNPFPALQTLRNRVWLLSFGSVSVEFPYQYDFSRTLDEAVGVQKWLKGLHQGTRAWASPSPVPLPPDLLLKVEHFSWVFLDDVFEVKLHDNYELMKDESKESAKRLQLLDAKVAALRKQHGELLPARKIEELYASLERKNIEIYIQRSRRLYGNTPMRRALLTWSLAGLELVALADASFHGPEHVVEQVQELDPGSPFPPEGLDLVIQWCRMLKCNVKSFLVRIRDYPRYLFEIRDWRLMGRLVGTEQSGQPCSRRRQILHLGLPWGNVAVERNMPPLKFYHDFHSEIFQYTVVWGPCWDPAWTLIGQCVDLLTKPSADPSPPLPWWDKSRLLFHGDWHMDIEQANLHQLATEDPYNTTENMHWEWSHLSFHWKPGQFVFKGDLDINVRTASKYDDCCFLHLPDLCMTLDLQWLCHGNPHDHHSVTLRAPEFLPEVPLGQLHDSYRAFRSENLNLSIKMDLTRHSGTISQPRILLYSSTLRWMQNFWATWTSVTRPICRGKLFNNLKPSKKKLGQHYKQLSYTALFPQLQVHYWASFAQQRGIQIECSQGHVFTRGTQRLIPQAGTVMRRLISDWSVTQMVSDLSQVTVHLMASPTEENADHCLDPLVTKTHLLSLSSLTYQRHSNRTAEEELSARDGDPTFHTHQLHLVDLRISWTTTNRDIAFGLYDGYKKAAVLKRNLSTEALKGLKIDPQMPAKKPKRGVPTSASAPPRVNTPSFSGQPDKGSSGGAYMLQKLIEETDRFVVFTEEESGMSDQLCGIAACQTDDIYNRNCLIELVNCQMVLRGAETEGCVIVSAAKAQLLQCQHHPAWYGDTLKQKTSWTCLLDGMQYFATTESSPTEQDGRQLWLEVKNIEEHRQRSLDSVQELMESGQAVGGMVTTTTDWNQPAEAQQAQQVQRIISRCNCRMYYISYSHDIDPELATQIKPPEVLENQEKEDLLKKQEGAVDTFTLIHHELEISTNPAQYAMILDIVNNLLLHVEPKRKEHSEKKQRVRFQLEISSNPEEQRSSILHLQEAVRQHVAQIRQLEKQMYSIMKSLQDDSKNENLLDLNQKLQLQLNQEKANLQLESEELNILIRCFKDFQLQRANKMELRKQQEDVSVVRRTEFYFAQARWRLTEEDGQLGIAELELQRFLYSKVNKSDDTAEHLLELGWFTMNNLLPNAVYKVVLRPQSSCQSGRQLALRLFSKVRPPVGGISVKEHFEVNVVPLTIQLTHQFFHRMMGFFFPGRSVEDDEVGDEEDKSKLVTTGIPVVKPRQLIATDDAVPLGPGKGVAQGLTRSSGVRRSFRKSPEHPVDDIDKMKERAAMNNSFIYIKIPQVPLCVSYKGEKNSVDWGDLNLVLPCLEYHNNTWTWLDFAMAVKRDSRKALVAQVIKEKLRLKSATGSEVRGKLETKSDLNMQQQEEEEKARLLIGLSVGDKNPGKKSIFGRRK

SEQ ID NO: 20236 - protein, 1068 aa, Homo sapiens; identical to SEQ ID NO: 19949

SEQ ID NO: 20237 - protein, 145 aa, Homo sapiens
MAESLRSPRRSLYKLVGSPPWKEAFRQRCLERMRNSRDRLLNRYRQAGSSGPGNSQNSFLVQEVMEEEWNALQSVENCPEDLAQLEELIDMAVLEEIQQELINQEQSIISEYEKSLQFDEKCLSIMLAEWEANPLICPVCTNLLS

SEQ ID NO: 20238 - protein, 1240 aa, Homo sapiens
MPRGSWKPQVCTGTDMKLRLPASPETHLDMLRHLYQGCQVVQGNLELTYLPTNASLSFLQDIQEVQGYVLIAHNQVRQVPLQRLRIVRGTQLFEDNYALAVLDNGDPLNNTTPVTGASPGGLRELQLRSLTEILKGGVLIQRNPQLCYQDTILWKDIFHKNNQLALTLIDTNRSRACHPCSPMCKGSRCWGESSEDCQSLTRTVCAGGCARCKGPLPTDCCHEQCAAGCTGPKHSDCLACLHFNHSGICELHCPALVTYNTDTFESMPNPEGRYTFGASCVTACPYNYLSTDVGSCTLVCPLHNQEVTAEDGTQRCEKCSKPCARVCYGLGMEHLREVRAVTSANIQEFAGCKKIFGSLAFLPESFDGDPASNTAPLQPEQLQVFETLEEITGYLYISAWPDSLPDLSVFQNLQVIRGRILHNGAYSLTLQGLGISWLGLRSLRELGSGLALIHHNTHLCFVHTVPWDQLFRNPHQALLHTANRPEDECVGEGLACHQLCARGHCWGPGPTQCVNCSQFLRGQECVEECRVLQGLPREYVNARHCLPCHPECQPQNGSVTCFGPEADQCVACAHYKDPPFCVARCPSGVKPDLSYMPIWKFPDEEGACQPCPINCTHSCVDLDDKGCPAEQRASPLTSIISAVVGILLVVVLGVVFGILIKRRQQKIRKYTMRRLLQETELVEPLTPSGAMPNQAQMRILKETELRKVKVLGSGAFGTVYKGIWIPDGENVKIPVAIKVLRENTSPKANKEILDEAYVMAGVGSPYVSRLLGICLTSTVQLVTQLMPYGCLLDHVRENRGRLGSQDLLNWCMQIAKGMSYLEDVRLVHRDLAARNVLVKSPNHVKITDFGLARLLDIDETEYHADGGKVPIKWMALESILRRRFTHQSDVWSYGVTVWELMTFGAKPYDGIPAREIPDLLEKGERLPQPPICTIDVYMIMVKCWMIDSECRPRFRELVSEFSRMARDPQRFVVIQNEDLGPASPLDSTFYRSLLEDDDMGDLVDAEEYLVPQQGFFCPDPAPGAGGMVHHRHRSSSTRSGGGDLTLGLEPSEEEAPRSPLAPSEGAGSDVFDGDLGMGAAKGLQSLPTHDPSPLQRYSEDPTVPLPSETDGYVAPLTCSPQPEYVNQPDVRPQPPSPREGPLPAARPAGATLERPKTLSPGKNGVVKDVFAFGGAVENPEYLTPQGGAAPQPHPPPAFSPAFDNLYYWDQDPPERGAPPSTFKGTPTAENPEYLGLDVPV

SEQ ID NO: 20239 - protein, 1230 aa, Homo sapiens
MSRQSTLYSFFPKSPALSDANKASARASREGGRAAAAPGASPSPGGDAAWSEAGPGPRPLARSASPPKAKNLNGGLRRSVGTTYVTDKSEEDNEIESEEEVQPKTQGSRRSSRQIKKRRVISDSESDIGGSDVEFKPDTKEEGSSDEISSGVGDSESEGLNSPVKVARKRKRMVTGNGSLKRKSSRKETPSATKQATSISSETKNTLRAFSAPQNSESQAHVSGGGDDSSRPTVWYHETLEWLKEEKRRDEHRRRPDHPDFDASTLYVPEDFLNSCTPGMRKWWQIKSQNFDLVICYKVGKFYELYHMDALIGVSELGLVFMKGNWAHSGFPEIAFGRYSDSLVQKGYKVARVEQTETPEMMEARCRKMAHISKYDRVVRREICRIITKGTQTYSVLEGDPSENYSKYLLSLKEKEEDSSGHTRAYGVCFVDTSLGKFFIGQFSDDRHCSRFRTLVAHYPPVQVLFEKGNLSKETKTILKSSLSCSLQEGLIPGSQFWDASKTLRTLLEEEYFREKLSDGIGVMLPQVLKGMTSESDSIGLTPGEKSELALSALGGCVFYLKKCLIDQELLSMANFEEYIPLDSDTVSTTRSGAIFTKAYQRMVLDAVTLNNLEIFLNGTNGSTEGTLLERVDTCHTPFGKRLLKQWLCAPLCNHYAINDRLDAIEDLMVVPDKISEVVELLKKLPDLERLLSKIHNVGSPLKSQNHPDSRAIMYEETTYSKKKIIDFLSALEGFKVMCKIIGIMEEVADGFKSKILKQVISLQTKNPEGRFPDLTVELNRWDTAFDHEKARKTGLITPKAGFDSDYDQALADIRENEQSLLEYLEKQRNRIGCRTIVYWGIGRNRYQLEIPENFTTRNLPEEYELKSTKKGCKRYWTKTIEKKLANLINAEERRDVSLKDCMRRLFYNFDKNYKDWQSAVECIAVLDVLLCLANYSRGGDGPMCRPVILLPEDTPPFLELKGSRHPCITKTFFGDDFIPNDILIGCEEEEQENGKAYCVLVTGPNMGGKSTLMRQAGLLAVMAQMGCYVPAEVCRLTPIDRVFTRLGASDRIMSGESTFFVELSETASILMHATAHSLVLVDELGRGTATFDGTAIANAVVKELAETIKCRTLFSTHYHSLVEDYSQNVAVRLGHMACMVENECEDPSQETITFLYKFIKGACPKSYGFNAARLANLPEEVIQKGHRKAREFEKMNQSLRLFREVCLASERSTVDAEAVHKLLTLIKEL

SEQ ID NO: 20240 - protein, 835 aa, Homo sapiens
MSLKPQQQQQQQQQQQQQQQQQQQQQQQPPPAAANVRKPGGSGLLASPAAAPSPSSSSVSSSSATAPSSVVAATSGGGRPGLGRGRNSNKGLPQSTISFDGIYANMRMVHILTSVVGSKCEVQVKNGGIYEGVFKTYSPKCDLVLDAAHEKSTESSSGPKREEIMESILFKCSDFVVVQFKDMDSSYAKRDAFTDSAISAKVNGEHKEKDLEPWDAGELTANEELEALENDVSNGWDPNDMFRYNEENYGVVSTYDSSLSSYTVPLERDNSEEFLKREARANQLAEEIESSAQYKARVALENDDRSEEEKYTAVQRNSSEREGHSINTRENKYIPPGQRNREVISWGSGRQNSPRMGQPGSGSMPSRSTSHTSDFNPNSGSDQRVVNGGVPWPSPCPSPSSRPPSRYQSGPNSLPPRAATPTRPPSRPPSRPSRPPSHPSAHGSPAPVSTMPKRMSSEGPPRMSPKAQRHPRNHRVSAGRGSISSGLEFVSHNPPSEAATPPVARTSPSGGTWSSVVSGVPRLSPKTHRPRSPRQNSIGNTPSGPVLASPQAGIIPTEAVAMPIPAASPTPASPASNRAVTPSSEAKDSRLQDQRQNSPAGNKENIKPNETSPSFSKAENKGISPVVSEHRKQIDDLKKFKNDFRLQPSSTSESMDQLLNKNREGEKSRDLIKDKIEPSAKDSFIENSSSNCTSGSSKPNSPSISPSILSNTEHKRGPEVTSQGVQTSSPACKQEKDDKEEKKDAAEQVRKSTLNPNAKEFNPRSFSQPKPSTTPTSPRPQAQPSPSMVGHQQPTPVYTQPVCFAPNMMYPVPVSPGVQYQICPNSGKTSIIRVP

SEQ ID NO: 20241 - protein, 457 aa, Homo sapiens
MYDDSYVPGFEDSEAGSADSYTSRPSLDSDVSLEEDRESARREVESQAQQQLERAKHKPVAFAVRTNVSYCGVLDEECPVQGSGVNFEAKDFLHIKEKYSNDWWIGRLVKEGGDIAFIPSPQRLESIRLKQEQKARRSGNPSSLSDIGNRRSPPPSLAKQKQKQVTDMMQKALFDFLKHRFDGRISITRVTADLSLAKRSVLNNPGKRTIIERSSARSSIAEVQSEIERIFELAKSLQLVVLDADTINHPAQLAKTSLAPIIVFVKVSSPKVLQRLIRSRGKSQMKHLTVQMMAYDKLVQCPPESFDVILDENQLEDACEHLAEYLEVYWRATHHPAPGPGLLGPPSAIPGLQNQQLLGERGEEHSPLERDSLMPSDEASESSRQAWTGSSQRSSRHLEEDYADAYQDLYQPHRQHTSGLPSANGHDPQDRLLAQDSEHNHSDRNWQRNRPWPKDSY

SEQ ID NO: 20242 - protein, 383 aa, Homo sapiens
LIYDSVMLKHQCSCGDNSRHPEHAGRIQSIWSRLQERGLRSQCECLRGRKASLEELQSVHSERHVLLYGTNPLSRLKLDNGKLAGLLAQRMFVMLPCGGVGVDTDTIWNELHSSNAARWAAGSVTDLAFKVASRELKDVHHGNGTQQTFYQDPSVLYISLHRHDDGNFFPGSGAVDEVGAGSGEGFNVNVAWAGGLDPPMGDPEYLAAFRIVVMPIAREFSPDLVLVSAGFDAAEGHPAPLGGYHVSAKCFGYMTQQLMNLAGGAVVLALEGGHDLTAICDASEACVAALLGNRVDPLSEEGWKQKPNLNAIRSLEAVIRVHSKYWGCMQRLASCPDSWVPRVPGADKEEVEAVTALASLSVGILAEDRPSEQLVEEEEPMNL

SEQ ID NO: 20243 - protein, 283 aa, Homo sapiens
HKALDEKVRERLRVSLERVSALEEELAAANQEIVALREQNVHIQRKMASSEGSTESEHLEGMEPGQKVHEKRLSNGSIDSTDETSQIVELQELLEKQNYEMAQMKERLAALSSRVGEVEQEAETARKDLIKTEEMNTKYQRDIREAMAQKEDMEERITTLEKRYLSAQRESTSIHDMNDKLENELANKEAILRQVQYLCLGFLLVCAFSSFSQNGMEEKNRQLQERLELAEQKLQQTMRKAETLPEVEAELAQRIAALTKAEERHGNIEERMRHLEGQLEEKN

SEQ ID NO: 20244 - protein, 142 aa, Homo sapiens
MTVTYSSKVANATFFGFHRLLLKWRGSIYKLLYREFIVFAVLYTAISLVYRLLLTGVQKRYFEKLSIYCDRYAEQIPVTFVLGFMTTDERKLFNHLKSPHLKYWVPFIWFGNLATKARNEGRIRDSVDLQSLMTEMNRYRSW

SEQ ID NO: 20245 - protein, 1313 aa, Homo sapiens
MRSAAAAPRSPAVATESRRFAAARWPGWRSLQRPARRSGRGGGGAAPGPYPSAAPPPPGPGPPPSRQSSPPSASDCFGSNGNGGGAFRPGSRRLLGLGGPPRPFVVLLLPLASPGAPPAAPTRASPLGARASPPRSGVSLARPAPGCPRPACEPVYGPLTMSLKPQQQQQQQQQQQQQQQQQQQQQQQPPPAAANVRKPGGSGLLASPAAAPSPSSSSVSSSSATAPSSVVAATSGGGRPGLGRGRNSNKGLPQSTISFDGIYANMRMVHILTSVVGSKCEVQVKNGGIYEGVFKTYSPKCDLVLDAAHEKSTESSSGPKREEIMESILFKCSDFVVVQFKDMDSSYAKRDAFTDSAISAKVNGEHKEKDLEPWDAGELTANEELEALENDVSNGWDPNDMFRYNEENYGVVSTYDSSLSSYTVPLERDNSEEFLKREARANQLAEEIESSAQYKARVALENDDRSEEEKYTAVQRNSSEREGHSINTRENKYIPPGQRNREVISWGSGRQNSPRMGQPGSGSMPSRSTSHTSDFNPNSGSDQRVVNGGVPWPSPCPSPSSRPPSRYQSGPNSLPPRAATPTRPPSRPPSRPSRPPSHPSAHGSPAPVSTMPKRMSSEGPPRMSPKAQRHPRNHRVSAGRGSISSGLEFVSHNPPSEAATPPVARTSPSGGTWSSVVSGVPRLSPKTHRPRSPRQNSIGNTPSGPVLASPQAGIIPTEAVAMPIPAASPTPASPASNRAVTPSSEAKDSRLQDQRQNSPAGNKENIKPNETSPSFSKAENKGISPVVSEHRKQIDDLKKFKNDFRLQPSSTSESMDQLLNKNREGEKSRDLIKDKIEPSAKDSFIENSSSNCTSGSSKPNSPSISPSILSNTEHKRGPEVTSQGVQTSSPACKQEKDDKEEKKDAAEQVRKSTLNPNAKEFNPRSFSQPKPSTTPTSPRPQAQPSPSMVGHQQPTPVYTQPVCFAPNMMYPVPVSPGVQPLYPIPMTPMPVNQAKTYRAVPNMPQQRQDQHHQSAMMHPASAAGPPIAATPPAYSTQYVAYSPQQFPNQPLVQHVPHYQSQHPHVYSPVIQGNARMMAPPTHAQPGLVSSSATQYGAHEQTHAMYACPKLPYNKETSPSFYFAISTGSLAQQYAHPNATLHPHTPHPQPSATPTGQQQSQHGGSHPAPSPVQHHQHQAAQALHLASPQQQSAIYHAGLAPTPPSMTPASNTQSPQNSFPAAQQTVFTIHPSHVQPAYTNPPHMAHVPQAHVQSGMVPSHPTAHAPMMLMTTQPPGGPQAALAQSALQPIPVSTTAHFPYMTHPSVQAHHQQQL

SEQ ID NO: 20246 - protein, 176 aa, Homo sapiens
MNESKPGDSQNLACVFCRKHDDCPNKYGEKKTKEKWNLTVHYYCLLMSSGIWQRGKEEEGVYGFLIEDIRKEVNRASKLKCCVCKKNGASIGCVAPRCKRSYHFPCGLQRECIFQFTGNFASFCWDHRPVQIITSNNYRESLPCTICLEFIEPIPSYNILRSPCCKNAWFHRDCLQ

SEQ ID NO: 20247 - protein, 412 aa, Homo sapiens
MALDILAMAPLYQAPAINRIGPKTDPSKRPADPLKPLVLSRTKLTTIEAKRIMSILDEAIYKVELVTLLSYVASNREDMEGMLGEDVMRAVREHEDLCQVLLENVRCLKEKERQLQEQKEAEEEGWLRDRLLSIELQKSSLSPLMQQIKDSTKNVLRLLLSNPQAARLLQMQTQGRSAEAQNFIDSLIELRGFLFEKLLTSPMEARDKAQFLQDISRQNSNNQQIIDTLEKELAERMKNRNAEVEKENFVIQELKNHLHQVLKFSENSLVRTKQEAEKQQKADFRASQARVAKIQQEILQLQSQFYNLVMENREAEQALRKVPREAARMGRGGPWWGGWVGLFHHSWRSSSVGQGRTAPATQEVAWWRGRAQEQGRPKSKPVSPGRQEGAAHRPGDRGQTGILSQHCCMPAL

SEQ ID NO: 20248 - protein, 679 aa, Homo sapiens
MPVLGVASKLRQPAVGSKPVHTALPIPNLGTTGSQHCSSRPLELTETESSMLSCQLALKSTCEFGEKKPLQGKAKEKEDSKIYTDWANHYLAKSGHKRLIKDLQQDIADGVLLAEIIQIIANEKVEDINGCPRSQSQMIENVDVCLSFLAARGVNVQGLSAEEIRNGNLKAILGLFFSLSRYKQQQHHQQQYYQSLVELQQRVTHASPPSEASQAKTQQDMQSSLAARYATQSNHSGIATSQKKPTRLPGPSRVPAAGSSSKVQGASNLNRRSQSFNSIDKNKPPNYANGNEKDSSKGPQSSSGVNGNVQPPSTAGQPPASAIPSPSASKPWRSKSMNVKHSATSTMLTVKQSSTATSPTPSSDRLKPPVSEGVKTAPSGQKSMLEKFKLVNARTALRPPQPPSSGPSDGGKDDDAFSESGEMEGFNSGLNSGGSTNSSPKVSPKLAPPKAGSKNLSNKKSLLQPKEKEEKNRDKNKVCTEKPVKEEKDQVTEMAPKKTSKIASLIPKGSKTTAAKKESLIPSSSGIPKPGSKVPTVKQTISPGSTASKESEKFRTTKGSPSQSLSKPITMEKASASSCPAPLEGREAGQASPSGSCTMTVAQSSGQSTGNGAVQLPQQQQHSHPNTATVAPFIYRAHSENEGTALPSADSCTSPTKMDLSYSKTAKQCLEEISGEDPE

SEQ ID NO: 20249 - protein, 1483 aa, Homo sapiens
MLCVAGARLKRELDATATVLANRQDESEQSRKRLIEQSREFKKNTPEDLRKQVAPLLKSFQGEIDALSKRSKEAEAAFLNVYKRLIDVPDPVPALDLGQQLQLKVQRLHDIETENQKLRETLEEYNKEFAEVKNQEVTIKALKEKIREYEQTLKNQAETIALEKEQKLQNDFAEKERKLQETQMSTTSKLEEAEHKVQSLQTALEKTRTELFDLKTKYDEETTAKADEIEMIMTDLERANQRAEVAQREAETLREQLSSANHSLQLASQIQKAPDVEQAIEVLTRSSLEVELAAKEREIAQLVEDVQRLQASLTKLRENSASQISQLEQQLSAKNSTLKQLEEKLKGQADYEEVKKELNILKSMEFAPSEGAGTQDAAKPLEVLLLEKNRSLQSENAALRISNSDLSGSARRKGKDQPESRRPGSLPAPPPSQLPRNPGEQASNTNGTHQFSPAGLSQDFFSSSLASPSLPLASTGKFALNSLLQRQLMQSFYSKAMQEAGSTSMIFSTGPYSTNSISSQSPLQQSPDVNGMAPSPSQSESAGSVSEGEEMDTAEIARQVKEQLIKHNIGQRIFGHYVLGLSQGSVSEILARPKPWNKLTVRGKEPFHKMKQFLSDEQNILALRSIQGRQRGNITTRIRASETGSDEAIKSILEQAKRELQVQKTAEPAQPSSASGSGNSDDAIRSILQQARREMEAQQAALDPALKQAPLSQSDITILTPKLLSTSPMPTVSSYPPLAISLKKPSAAPEAGASALPNPPALKKEAQDAPGLDPQGAADCAQGVLRQVKNEVGRSGAWKDHWWSAVQPERRNAASSEEAKAEETGGGKEKGSGGSGGGSQPRAERSQLQGPSSSEYWKEWPSAESPYSQSSELSLTGASRSETPQNSPLPSSPIVPMSKPTKPSVPPLTPEQYEVYMYQEVDTIELTRQVKEKLAKNGICQRIFGEKVLGLSQGSVSDMLSRPKPWSKLTQKGREPFIRMQLWLNGELGQGVLPVQGQQQGPVLHSVTSLQDPLQQGCVSSESTPKTSASCSPAPESPMSSSESVKSLTELVQQPCPPIEASKDSKPPEPSDPPASDSQPTTPLPLSGHSALSIQELVAMSPELDTYGITKRVKEVLTDNNLGQRLFGETILGLTQGSVSDLLARPKPWHKLSLKGREPFVRMQLWLNDPNNVEKLMDMKRMEKKAYMKRRHSSVSDSQPCEPPSVGTEYSQGASPQPQHQLKKPRVVLAPEEKEALKRAYQQKPYPSPKTIEDLATQLNLKTSTVINWFHNYRSRIRRELFIEEIQAGSQGQAGASDSPSARSGRAAPSSEGDSCDGVEATEGPGSADTEEPKSQGEAEREEVPRPAEQTEPPPSGTPGPDDARDDDHEGGPVEGPGPLPSPASATATAAPAAPEDAATSAAAAPGEGPAAPSSAPPPSNSSSSSAPRRPSSLQSLFGLPEAAGARDSRDNPLRKKKAANLNSIIHRLEKAASREEPIEWEF

SEQ ID NO: 20250 - protein, 151 aa, Homo sapiens
MDLVLKRCLLHLAVIGALLAVGATKVPRNQDWLGVSRQLRTKAWNRQLYPEWTEAQRLDCWRGGQVSLKVSNDGPTLIGANASFSIALNFPGSQKVLPDGQVIWVNNTIINGSQVWGGQPVYPQETDDACIFPDGGPCPSGSWSQKRSFVY

SEQ ID NO: 20251 - protein, 1072 aa, Homo sapiens
MSGTSSPEAVKKLLENMQSDLRALSLECKKKFPPVKEAAESGIIKVKTIAARNTEILAALKENSSEVVQPFLMGCGTKEPKITQLCLAAIQRLMSHEVVSETAAGNIINMLWQLMENSLEELKLLQTVLVLLTTNTVVHDEALSKAIVLCFRLHFTKDNITNNTAAATVRQVVTVVFERMVAEDERHRDIIEQPVLVQGNSNRRSVSTLKPCAKDAYMLFQDLCQLVNADAPYWLVGMTEMTRTFGLELLESVLNDFPQVFLQHQEFSFLLKERVCPLVIKLFSPNIKFRQGSSTSSSPAPVEKPYFPICMRLLRVVSVLIKQFYSLLVTECEIFLSLLVKFLDADKPQWLRAVAVESIHRFCVQPQLLRSFCQSYDMKQHSTKVFRDIVNALGSFIQSLFLVPPTGNPATSNQAGNNNLGGSVSAPANSGMVGIGGGVTLLPAFEYRGTWIPILTITVQGSAKATYLEMLDKVEPPTIPEGYAMSVAFHCLLDLVRGITSMIEGELGELETECQTTTEEGSSPTQSTEQQDLQSTSDQMDKEIVSRAVWEEMVNACWCGLLAALSLLLDASTDEAATENILKAELTMAALCGRLGLVTSRDAFITAICKGSLPPHYALTVLNTTTAATLSNKSYSVQGQSVMMISPSSESHQQVVAVGQPLAVQPQGTVMLTSKNIQCMRTLLNLAHCHGAVLGTSWQLVLATLQHLVWILGLKPSSGGALKPGRAVEGPSTVLTTAVMTDLPVISNILSRLFESSQYLDDVSLHHLINALCSLSLEAMDMAYGNNKEPSLFAVAKLLETGLVNMHRIEILWRPLTGHLLEVCQHPNSRMREWGAEALTSLIKAGLTFNHDPPLSQNQRLQLLLLNPLKEMSNINHPDIRLKQLECVLQILQSQGDSLGPGWPLVLGVMGAIRNDQGESLIRTAFQCLQLVVTDFLPTMPCTCLQIVVDVAGSFGLHNQELNISLTSIGLLWNISDYFFQRGETIEKELNKEEAAQQKQAEEKGVVLNRPFHPAPPFDCLWLCLYAKLGELCVDPRPAVRKSAGQTLFSTIGAHGTLLQHSTWHTVIWKVL

SEQ ID NO: 20252 - protein, 1257 aa, Homo sapiens
KRSTTDETWDSPEELKKPEEDFDSHGDAGGKWKTVSSGLPEDPEKAGQKASLSVSQTGSWRRGMSAQGGAPSRQKAGTSALKTPGKTDDAKASEKGKAPLKGSSLQRSPSDAGKSSGDEGKKPPSGIGRSTATSSFGFKKPSGVGSSAMITSSGATITSGSATLGKIPKSAAIGGKSNAGRKTSLDGSQNQDDVVLHVSSKTTLQYRSLPRPSKSSTSGIPGRGGHRSSTSSIDSNVSSKSAGATTSKLREPTKIGSGRSSPVTVNQTDKEKEKVAVSDSESVSLSGSPKSSPTSASACGAQGLRQPGSKYPDIASPTFRRYTPSSRQANQEEGKEWLRSHSTGGLQDTGNQSPLVSPSAMSSSAAGKYHFSNLVSPTNLSQFNLPGPSMMRSNSIPAQDSSFDLYDDSQLCGSATSLEERPRAISHSGSFRDSMEEVHGSSLSLVSSTSSLYSTAEEKAHSEQIHKLRRELVASQEKVATLTSQLSANAHLVAAFEKSLGNMTGRLQSLTMTAEQKESELIELRETIEMLKAQNSAAQAAIQGALNGPDHPPKDLRIRRQHSSESVSSINSATSHSSIGSGNDADSKKKKKKNWVNSRGSELRSSFKQAFGKKKSTKPPSSHSDIEELTDSSLPASPKLPHNAGDCGSASMKPSQSASAICECTEAEAEIILQLKSELREKELKLTDIRLEALSSAHHLDQIREAMNRMQNEIEILKAENDRLKAETGNTAKPTRPPSESSSSTSSSSSRQSLGLSLNNLNITEAVSSDILLDDAGDATGHKDGRSVKIIVSISKGYGRAKDQKSQAYLIGSIGVSGKTKWDVLDGVIRRLFKEYVFRIDTSTSLGLSSDCIASYCIGDLIRSHNLEVPELLPCGYLVGDNNIITVNLKGVEENSLDSFVFDTLIPKPITQRYFNLLMEHHRIILSGPSGTGKTYLANKLAEYVITKSGRKKTEDAIATFNVDHKSSKELQQYLANLAEQCSADNNGVELPVVIILDNLHHVGSLSDIFNGFLNCKYNKCPYIIGTMNQGVSSSPNLELHHNFRWVLCANHTEPVKGFLGRYLRRKLIEIEIERNIRNNDLVKIIDWIPKTWHHLNSFLETHSSSDVTIGPRLFLPCPMDVEGSRVWFMDLWNYSLVPYILEAVREGLQMYGKRTPWEDPSKWVLDTYPWSSATLPQESPALLQLRPEDVGYESCTSTKEATTSKHIPQTDTEGDPLMNMLMKLQEAANYSSTQSCDSESTSHHEDILDSSLESTL

SEQ ID NO: 20253 - protein, 478 aa, Homo sapiens
MFKFHQMKHIFEILDKMRCLRKRSTVSFLGVLVIFLLFMNLYIEDSYVLEGDKQLIRETSTHQLNSERYVHTFKDLSNFSGAINVTYRYLAATPLQRKRYLTIGLSSVKRKKGNYLLETIKSIFEQSSYEELKEISVVVHLADFNSSWRDAMVQDITQKFAHHIIAGRLMVIHAPEEYYPILDGLKRNYNDPEDRVKFRSKQNVDYAFLLNFCANTSDYYVMLEDDVRCSKNFLTAIKKVIASLEGTYWVTLEFSKLGYIGKLYHSHDLPRLAHFLLMFYQEMPCDWLLTHFRGLLAQKNVIRFKPSLFQHMGYYSSYKGTENKLKDDDFEEESFDIPDNPPASLYTNMNVFENYEASKAYSSVDEYFWGKPPSTGDVFVIVFENPIIIKKIKVNTGTEDRQNDILHHGALDVGENVMPSKQRRQCSTYLRLGEFKNGNFEMSGVNQKIPFDIHCMRIYVTKTQKEWLIIRSISIWTS

SEQ ID NO: 20254 - protein, 284 aa, Homo sapiens
MLGFVGRVAAAPASGALRRLTPSASLPPAQLLLRAAPTAVHPGESTVRTIAMDGTEGLVRGQKVLDSGAPIKIPVGPETLGRIMNVIGEPIDERGPIKTKQFAPIHAEAPEFMEMSVEQEILVTGIKVVDLLAPYAKGGKIGLFGGAGVGKTVLIMELINNVAKAHGGYSVFAGVGERTREGNDLYHEMIESGVINLKDATSKVSALLGRIPSAVGYQPTLATDMGTMQERITTTKKGSITSVQDYKSLQDIIAILGMDELSEEDKLTVSRARKIQRFLSQPFQ

SEQ ID NO: 20255 - protein, 153 aa, Homo sapiens
RIERLCNPSLSELPAFLVAEGGLNSGFMIAHCTAAALVSENKALCHPSSVDSLSTSAATEDHVSMGGWAARKALRVIEHVEQVLAIELLAACQGIEFLRPLKTTTPLEKVYDLVRSVVRPWIKDRFMAPDIEAAHRLLLEQKASWLLGLFLNF

SEQ ID NO: 20256 - protein, 383 aa, Homo sapiens
MEAAVAAPRPRLLLLVLAAAAAAAAALLPGATALQCFCHLCTKDNFTCVTDGLCFVSVTETTDKVIHNSMCIAEIDLIPRDRPFVCAPSSKTGSVTTTYCCNQDHCNKIELPTTGPFSVKSSPGLGPVELAAVIAGPVCFVCISLMLMVYICHNRTVIHHRVPNEEDPSLDRPFISEGTTLKDLIYDMTTSGSGSGLPLLVQRTIARTIVLQESIGKGRFGEVWRGKWRGEEVAVKIFSSREERSWFREAEIYQTVMLRHENILGFIAADNKDNGTWTQLWLVSDYHEHGSLFDYLNRYTVTVEGMIKLALSTASGLAHLHMEIVGTQGKPAIAHRDLKSKNILVKKNGTCCIADLGLAVRHDSATDTIDIAPNHRVGTKRNS

SEQ ID NO: 20257 - protein, 232 aa, Homo sapiens
DQAGVDKVLAQSRHELDSKTIDPKVAFPRRAQPKMVTRTKKIFVGGLSVNTTVEDVKQYFEQFGKVDDAMLMFDKTTNRHRGFGFVTFESEDIVEKVCEIHFHEINNKMVECKKAQPKEVMSPTGSARGRSRVMPYGMDAFMLGIGMLGYPGFQATTYASRSYTGLAPGYTYQFPAIPLTAYGPMAAAAAAAAVVRGTGSHPWTMAPPPGSTPSRTGGFLGTTSPGPMAELY

SEQ ID NO: 20258 - protein, 615 aa, Homo sapiens
MQHLCLLAAVGVTRHKSKELSRKQSQQLELLESELRKEIRDGFAELQMDKLDVVDSFGTVPFLDYKHFALRTFFPESGGFTHIFTEDMHNRDANDKNESLTALDALICNKSFLVTVIHTLEKQKNFSVKDRCLFASFLTIALQTKLVYLTSILEVLTRDLMEQCSNMQPKLMLRRTESVVEKLLTNWMSVCLSGFLRETVGEPFYLLVTTLNQKINKGPVDVITCKALYTLNEDWLLWQVPEFSTVALNVVFEKIPENESADVCRNISVNVLDCDTIGQAKEKIFQAFLSKNGSPYGLQLNEIGLELQMGTRQKELLDIDSSSVILEDGITKLNTIGHYEISNGSTIKVFKKIANFTSDVEYSDDHCHLILPDSEAFQDVQGKRHRGKHKFKVKEMYLTKLLSTKVAIHSVLEKLFRSIWSLPNSRAPFAIKYFFDFLDAQAENKKITDPDVVHIWKTNSLPLRFWVNILKNPQFVFDIKKTPHIDGCLSVIAQAFMDAFSLTEQQLGKEAPTNKLLYAKDIPTYKEEVKSYYKAIRDLPPLSSSEMEEFLTQESKKHENEFNEEVALTEIYKYIVKYFDEILNKLERERGLEEAQKQLLHVKVLFDEKKKCKWM

SEQ ID NO: 20259 - protein, 435 aa, Homo sapiens
MPPMPSAPPVHPPPDGGWGWIVVGAAFISIGFSYAFPKAVTVFFKEIQQIFHTTYSEIAWISSIMLAVMYAGGPVSSVLVNKYGSRPVVIAGGLLCCLGMVLASFSSSVVQLYLTMGFITGLGLAFNLQPALTIIGKYFYRKRPMANGLAMAGSPVFLSSLAPFNQYLFNTFGWKGSFLILGSLLLNACVAGSLMRPLGPNQTTSKSKNKTGKTEDDSSPKKIKTKKSTWEKVNKYLDFSLFKHRGFLIYLSGNVIMFLGFFAPIIFLAPYAKDQGIDEYSAAFLLSVMAFVDMFARPSVGLIANSKYIRPRIQYFFSFAIMFNGVCHLLCPLAQDYTSLVLYAVFFGLGFGSVSSVLFETLMDLVGAPRFSSAVGLVTIVECGPVLLGPPLAGKLVDLTGEYKYMYMSCGAIVVAASVWLLIGNAINYRLLAKE

SEQ ID NO: 20260 - protein, 222 aa, Homo sapiens
MVLRRMHRPRSCSYQLLLEHQRPSCIQGLRWTPLTNSEESLDFSESLEQASTERVLRAGRQLHRHLLATCPNLIRDRKYHLRLYRQCCSGRELVDGILALGLGVHSRSQVVGICQVLLDEGALCHVKHDWAFQDRDAQFYRFPGPEPEPVRTHEMEEELAEAVALLSQRGPDALLTVALRKPPGQRTDEELDLIFEELLHIKAVAHLSNSVKRELAAVLLFE

SEQ ID NO: 20261 - protein, 123 aa, Homo sapiens
MTIFRCQDNCAERGYLYGGLEFGAECYCGHKIQATNVSEAECDMECKGERGSVCGGANRLSVYRLQLAQESARRYGSAVFRGCFRRPDNLSLALPVTAAMLNMSVDKCVDFCTEKEYPLAALA

SEQ ID NO: 20262 - protein, 935 aa, Homo sapiens
MGRGKYNLLITFQTLASCPIDRKPFQAVFKFSALEGYVKVQVKKQLRETKDKKNENSFEKQVSCHENSKSCIRRKAIVREDLLSAKVCDLKWIHRNSLYSETGGKKNAAIKINKPQRSNWSTNQCFRNFFSNMFSSVSHSGESSFTYRAYCTEFIEASEISALIRQKRHELELSWFPDTLPGIGRIGFIPWNVETEVLPLISSVLPRTIFPTSTISFEHFGTSCKGYALAHTQEGEEKKQTSGTSNTRGSRRKPAMTTPTRRSTRNTRAETASQSQRSPISDNSGCDAPGNSNPSLSVPSSAESEKQTRQAPKRKSVRRGRKPPLLKKKLRSSVAAPEKSSSNDSVDEETAESDTSPVLEKEHQPDVDSSNICTVQTHVENQSANCLKSCNEQIEESEKHTANYDTEERVGSSSSESCAQDLPVLVGEEGEVKKLENTGIEANVLCLESEISENILEKGGDPLEKQDQISGLSQSEVKTDVCTVHLPNDFPTCLTSESKVYQPVSCPLSDLSENVESVVNEEKITESSLVEITEHKDFTLKTEELIESPKLESSEGEIIQTVDRQSVKSPEVQLLGHVETEDVEIIATCDTFGNEDFNNIQDSENNLLKNNLLNTKLEKSLEEKNESLTEHPRSTELPKTHIEQIQKHFSEDNNEMIPMECDSFCSDQNESEVEPSVNADLKQMNENSVTHCSENNMPSSDLADEKVETVSQPSESPKDTIDKTKKPRTRRSRFHSPSTTWSPNKDTPQEKKRPQSPSPRRETGKESRKSQSPSPKNESARGRKKSRSQSPKKDIARERRQSQSRSPKRDTTRESRRSESLSPRRETSRENKRSQPRVKDSSPGEKSRSQSRERESDRDGQRRERERRTRKWSRSRSHSRSPSRCRTKSKSSSFGRIDRDSYSPRWKGRWANDGWRCPRGNDRYRKNDPEKQNEN

SEQ ID NO: 20263 - protein, 266 aa, Homo sapiens
MVYTSHYKSPGRRPLKTHPTVTYWRVNEGSSSSYDNGFPTGDHELFTTFSWDDQKVRRVFVRKVYTILLIQLLVTLAVVALFTFCDPVKDYVQANPGWYWASYAVFFATYLTLACCSGPRRHFPWNLILLTVFTLSMAYLTGMLSSYYNTTSVLLCLGITALVCLSVTVFSFQTKFDFTSCQGVLFVLLMTLFFSGLILAILLPFQYVPWLHAVYAALGAGVFTLFLALDTQLLMGNRRHSLSPEEYIFGALNIYLDIIYIFTFFL

SEQ ID NO: 20264 - protein, 1544 aa, Homo sapiens
INEEHIHMAQSSPAPFQVLVSPYGLNGTLTGQAYKMSDPATRKLIEEWQYFYPMVLKKKEESKEEDELGYDDDFPVAVEVIVGGVRMVYPSAFVLISQNDIPVPQSVASAGGHIAVGQQGLGSVKDPSNCGMPLTPPTSPEQAILGESGGMQSAASHLVSQDGGMITMHSPKRSGKIPPKLHNHMVHRVWKECILNRTQSKRSQMSTPTLEEEPASNPATWDFVDPTQRVSCSCSRHKLLKRCAVGPNRPPTVSQPGFSAGPSSSSSLPPPASSKHKTAERQEKGDKLQKRPLIPFHHRPSVAEELCMEQDTPGQKLGLAGIDSSLEVSSSRKYDKQMAVPSRNTSKQMNLNPMDSPHSPISPLPPTLSPQPRGQETESLDPPSVPVNPALYGNGLELQQLSTLDDRTVLVGQRLPLMAEVSETALYCGIRPSNPESSEKWWHSYRLPPSDDAEFRPPELQGERCDAKMEVNSESTALQRLLAQPNKRFKIWQDKQPQLQPLHFLDPLPLSQQPGDSLGEVNDPYTFEDGDIKYIFTANKKCKQGTEKDSLKKNKSEDGFGTKDVTTPGHSTPVPDGKNAMSIFSSATKTDVRQDNAAGRAGSSSLTQVTDLAPSLHDLDNIFDNSDDDELGAVSPALRSSKMPAVGTEDRPLGKDGRAAVPYPPTVADLQRMFPTPPSLEQHPAFSPVMNYKDGISSETVTALGMMESPMVSMVSTQLTEFKMEVEDGLGSPKPEEIKDFSYVHKVPSFQPFVGSSMFAPLKMLPSHCLLPLKIPDACLFRPSWAIPPKIEQLPMPPAATFIRDGYNNVPSVGSLADPDYLNTPQMNTPVTLNSAAPASNSGAGVLPSPATPRFSVPTPRTPRTPRTPRGGGTASGQGSVKYDSTDQGSPASTPSTTRPLNSVEPATMQPIPEAHSLYVTLILSDSVMNIFKDRNFDSCCICACNMNIKGADVGLYIPDSSNEDQYRCTCGFSAIMNRKLGYNSGLFLEDELDIFGKNSDIGQAAERRLMMCQSTFLPQVEGTKKPQEPPISLLLLLQNQHTQPFASLNFLDYISSNNRQTLPCVSWSYDRVQADNNDYWTECFNALEQGRQYVDNPTGGKVDEALVRSATVHSWPHSNVLDISMLSSQDVVRMLLSLQPFLQDAIQKKRTGRTWENIQHVQGPLTWQQFHKMAGRGTYGSEESPEPLPIPTLLVGYDKDFLTISPFSLPFWERLLLDPYGGHRDVAYIVVCPENEALLEGAKTFFRDLSAVYEMCRLGQHKPICKVLRDGIMRVGKTVAQKLTDELVSEWFNQPWSGEENDNHSRLKLYAQVCRHHLAPYLATLQLDSSLLIPPKYQTPPAAAQGQATPGNAGPLAPNGSAAPPAGSAFNPTSNSSSTNPAASSSASGSSVPPVSSSASAPGISQISTTSSSGFSGSVGGQNPSTGGISADRTQGNIGCGGDTDPGQSSSQPSQDGQESVTERERIGIPTEPDSADSHAHPPAVVIYMVDPFTYAAEEDSTSGNFWLLSLMRCYTEMLDNLPEHMRNSFILQVTVCKFIIYF

SEQ ID NO: 20265 - protein, 692 aa, Homo sapiens
MKMADAKQKRNEQLKRWIGSETDLEPPVVKRQKTKVKFDDGAVFLAACSSGDTDEVLKLLHRGADINYANVDGLTALHQACIDDNVDMVKFLVENGANINQPDNEGWIPLHAAASCGYLDIAEFLIGQGAHVGAVNSEGDTPLDIAEEEAMEELLQNEVNRQGVDIEAARKEEERIMLRDARQWLNSGHINDVRHAKSGGTALHVAAAKGYTEVLKLLIQAGYDVNIKDYDGWTPLHAAAHWGKEEACRILVDNLCDMEMVNKVGQTAFDVADEDILGYLEELQKKQNLLHSEKRDKKSPLIESTANMDNNQSQKTFKNKETLIIEPEKNASRIESLEQEKVDEEEEGKKDESSCSSEEDEEDDSESEAETDKTKPLASVTNANTSSTQAAPVAVTTPTVSSGQATPTSPIKKFPTTATKISPKEEERKDESPATWRLGLRKTGSYGALAEITASKEGQKEKDTAGVTRSASSPRLSSSLDNKEKEKDSKGTRLAYVAPTIPRRLASTSDIEEKENRDSSSLRTSSSYTRRKWEDDLKKNSSVNEGSTYHKSCSFGRRQDDLISSSVPSTTSTPTVTSAAGLQKSLLSSTSTTTKITTGSSSAGTQSRSYLTPVRDEESESQRKARSRQARQSRRSTQGVTLTDLQEAEKTIGRSRSTRTREQENEEKEKEEKEKQDKEKQEEKKESETSRE

SEQ ID NO: 20266 - protein, 1676 aa, Homo sapiens
MSLLCVGVKKAKFDGAQEKFNTYVTLKVQNVKSTTIAVRGSQPSWEQDFMFEINRLDLGLTVEVWNKGLIWDTMVGTVWIPLRTIRQSNEEGPGEWLTLDSQVIMADSEICGTKDPTFHRILLDTRFELPLDIPEEEARYWAKKLEQLNAMRDQDEYSFQDEQDKPLPVPSNQCCNWNYFGWGEQHNDDPDSAVDDRDSDYRSETSNSIPPPYYTTSQPNASVHQYSVRPPPLGSRESYSDSMHSYEEFSEPQALSPTGSSRYASSGELSQGSSQLSEDFDPDEHSLQGSDMEDERDRDSYHSCHSSVSYHKDSPRWDQDEEELEEDLEDFLEEEELPEDEEELEEEEEEVPDDLGSYAQREDVAVAEPKDFKRISLPPAAPGKEDKAPVAPTEAPDMAKVAPKPATPDKVPAAEQIPEAEPPKDEESFRPREDEEGQEGQDSMSRAKANWLRAFNKVRMQLQEARGEGEMSKSLWFKGGPGGGLIIIDSMPDIRKRKPIPLVSDLSLVQSRKAGITSALASSTLNNEELKNHVYKKTLQALIYPISCTTPHNFEVWTATTPTYCYECEGLLWGIARQGMRCTECGVKCHEKCQDLLNADCLQRAAEKSSKHGAEDRTQNIIMVLKDRMKIRERNKPEIFELIQEIFAVTKTAHTQQMKAVKQSVLDGTSKWSAKISITVVCAQGLQAKDKTGSSDPYVTVQVGKTKKRTKTIYGNLNPVWEENFHFECHNSSDRIKVRVWDEDDDIKSRVKQRFKRESDDFLGQTIIEVRTLSGEMDVWYNLDKRTDKSAVSGAIRLHISVEIKGEEKVAPYHVQYTCLHENLFHFVTDVQNNGVVKIPDAKGDDAWKVYYDETAQEIVDEFAMRYGVESIYQAMTHFACLSSKYMCPGVPAVMSTLLANINAYYAHTTASTNVSASDRFAASNFGKERFVKLLDQLHNSLRIDLSMYRNNFPASSPERLQDLKSTVDLLTSITFFRMKVQELQSPPRASQVVKDCVKACLNSTYEYIFNNCHELYSREYQTDPAKKGEVLPEEQGPSIKNLDFWSKLITLIVSIIEEDKNSYTPCLNQFPQELNVGKISAEVMWNLFAQDMKYAMEEHDKHRLCKSADYMNLHFKVKWLYNEYVTELPAFKDRVPEYPAWFEPFVIQWLDENEEVSRDFLHGALERDKKDGFQQTSEHALFSCSVVDVFSQLNQSFEIIKKLECPDPQIVGHYMRRFAKTISNVLLQYADIISKDFASYCSKEKEKVPCILMNNTQQLRVQLEKMFEAMGGKELDAEASDILKELQVKLNNVLDELSRVFATSFQPHIEECVKQMGDILSQVKGTGNVPASACSSVAQDADNVLQPIMDLLDSNLTLFAKICEKTVLKRVLKELWKLVMNTMEKTIVLPPLTDQTGTQMIFNAAKELGQLSKLKDHMVREEAKSLTPKQCAVVELALDTIKQYFHAGGVGLKKTFLEKSPDLQSLRYALSLYTQATDLLIKTFVQTQSAQGLGVEDPVGEVSVHVELFTHPGTGEHKVTVKVVAANDLKWQTSGIFRPFIEVNIIGPQLSDKKRKFATKSKNNSWAPKYNESFQFTLSADAGPECYELQVCVKDYCFAREDRTVGLAVLQLRELAQRGSAACWLPLGRRIHMDDTGLTVLRILSQRSNDEVAKEFVKLKSDTRSAEEGGAAPAP

SEQ ID NO: 20267 - protein, 466 aa, Homo sapiens
METGQRTHASGTYSFLDRTQHSDIKADCNTCVEIEDRKVSRQQMNCEREQLRGNQEAAAAPDTMAQPYASAQFAPPQNGIPAEYTAPHPHPAPEYTGQTTVPEHTLNLYPPAQTHSEQSPADTSAQTVSGTATQTDDAAPTDGQPQTQPSENTENKSQPKRLHVSNIPFRFRDPDLRQMFGQFGKILDVEIIFNERGSKGFGFVTFENSADADRAREKLHGTVVEGRKIEVNNATARVMTNKKTVNPYTNGWKLNPVVGAVYSPEFYAGTVLLCQANQEGSSMYSAPSSLVYTSAMPGFPYPAATAAAAYRGAHLRGRGRTVYNTFRAAAPPPPIPAYGGVVYQDGFYGADIYGGYAAYRYAQPTPATAAAYSDRNQFVFVAADEISCNTSAVTDEFMLPTPTTTHLLQPPPTALVPCPKVPAPAQTSEELSCTLPGLCCQAAENLTASPPLLQFMFKVIVAQERK

SEQ ID NO: 20268 - protein, 281 aa, Homo sapiens
MRVVVIGAGVIGLSTALCIHERYHSVLQPLDIKVYADRFTPLTTTDVAAGLWQPYLSDPNNPQEADWSQQTFDYLLSHVHSPNAENLGLFLISGYNLFHEAIPVAREGADVIVNCTGVWAGALQRDPLLQPGRGQIMKVDAPWMKHFILTHDPERGIYNSPYIIPGTQTVTLGGIFQLGNWSELNNIQDHNTIWEGCCRLEPTLKNARIIGERTGFRPVRPQIRLEREQLRTGPSNTEVIHNYGHGGYGLTIHWGCALEAAKLFGRILEEKKLSRMPPSHL

SEQ ID NO: 20269 - protein, 974 aa, Homo sapiens
MKMADAKQKRNEQLKRWIGSETDLEPPVVKRQKTKVKFDDGAVFLAACSSGDTDEVLKLLHRGADINYANVDGLTALHQACIDDNVDMVKFLVENGANINQPDNEGWIPLHAAASCGYLDIAEFLIGQGAHVGAVNSEGDTPLDIAEEEAMEELLQNEVNRQGVDIEAARKEEERIMLRDARQWLNSGHINDVRHAKSGGTALHVAAAKGYTEVLKLLIQAGYDVNIKDYDGWTPLHAAAHWGKEEACRILVDNLCDMEMVNKVGQTAFDVADEDILGYLEELQKKQNLLHSEKRDKKSPLIESTANMDNNQSQKTFKNKETLIIEPEKNASRIESLEQEKVDEEEEGKKDESSCSSEEDEEDDSESEAETDKTKPLASVTNANTSSTQAAPVAVTTPTVSSGQATPTSPIKKFPTTATKISPKEEERKDESPATWRLGLRKTGSYGALAEITASKEGQKEKDTAGVTRSASSPRLSSSLDNKEKEKDSKGTRLAYVAPTIPRRLASTSDIEEKENRDSSSLRTSSSYTRRKWEDDLKKNSSVNEGSTYHKSTSNRLWAEDSTEKEKDSVPTAVTIPVAPTVVNAAASTTTLTTTTAGTVSSTTEVRERRRSYLTPVRDEESESQRKARSRQARQSRRSTQGVTLTDLQEAEKTIGRSRSTRTREQENEEKEKEEKEKQDKEKQEEKKESETSREDEYKQKYSRTYDETYQRYRPVSTSSSTTPSSSLSTMSSSLYASSQLNRPNSLVGITSAYSRGITKENEREGEKREEEKEGEDKSQPKSIRERRRPREKRRSTGVSFWTQDSDENEQEQQSDTEEGSNKKETQTDSISRYETSSTSAGDRYDSLLGRSGSYSYLEERKPYSSRLEKDDSTDFKKLYEQILAENEKLKAQLHDTNMELTDLKLQLEKATQRQERFADRSLLEMEKRERRALERRISEMEEELKMLPDLKADNQRLKDENGALIRVISKLSK

SEQ ID NO: 20270 - protein, 290 aa, Homo sapiens
MRLRTNATSSKLHLSPKADVKNLMSYVVTKTKAINGKYHRFLGRHFPRFYVLYTIFMKGLQMLWADAKKARRIKTNMWKHNIKFHQLPYREMEHLRQFRQDVTKCLFLGIISIPPFANYLVFLLMYLFPRQLLIRHFWTPKQQTDFLDIYHAFRKQSHPEIISYLEKVIPLISDAGLRWRLTDLCTKIQRGTHPAIHDILALRECFSNHPLGMNQLQALHVKALSRAMLLTSYLPPPLLRHRLKTHTTVIHQLDKALAKLGIGQLTAQEVKSACYLRGLNSTHIGEDRCR

SEQ ID NO: 20271 - protein, 1905 aa, Homo sapiens
MEMEANDHFNFTGLPPAPAASGLKPSPSSGEGLYTNGSPMNFPQQGKSLNGDVNVNGLSTVSHTTTSGILNSAPHSSSTSHLHHPSVAYDCLWNYSQYPSANPGSNLKDPPLLSQFSGGQYPLNGILGGSRQPSSPSHNTNLRAGSQEFWANGTQSPMGLNFDSQELYDSFPDQNFEVMPNGPPSFFTSPQTSPMLGSSIQTFAPSQEVGSGIHPDEAAEKEMTSVVAENGTGLVGSLELEEEQPELKMCGYNGSVPSVESLHQEVSVLVPDPTVSCLDDPSHLPDQLEDTPILSEDSLEPFNSLAPEPVSGGLYGIDDTELMGAEDKLPLEDSPVISALDCPSLNNATAFSLLADDSQTSTSIFASPTSPPVLGESVLQDNSFDLNNGSDAEQEEMETQSSDFPPSLTQPAPDQSSTIQLHPATSPAVSPTTSPAVSLVVSPAASPEISPEVCPAASTVVSPAVFSVVSPASSAVLPAVSLEVPLTASVTSPKASPVTSPAAAFPTASPANKDVSSFLETTADVEEITGEGLTASGSGDVMRRRIATPEEVRLPLQHGWRREVRIKKGSHRWQGETWYYGPCGKRMKQFPEVIKYLSRNVVHSVRREHFSFSPRMPVGDFFEERDTPEGLQWVQLSAEEIPSRIQAITGKRGRPRNTEKAKTKEVPKVKRGRGRPPKVKITELLNKTDNRPLKKLEAQETLNEEDKAKIAKSKKKMRQKVQRGECQTTIQGQARNKRKQETKSLKQKEAKKKSKAEKEKGKTKQEKLKEKVKREKKEKVKMKEKEEVTKAKPACKADKTLATQRRLEERQRQQMILEEMKKPTEDMCLTDHQPLPDFSRVPGLTLPSGAFSDCLTIVEFLHSFGKVLGFDPAKDVPSLGVLQEGLLCQGDSLGEVQDLLVRLLKAALHDPGFPSYCQSLKILGEKVSEIPLTRDNVSEILRCFLMAYGVEPALCDRLRTQPFQAQPPQQKAAVLAFLVHELNGSTLIINEIDKTLESMSSYRKNKWIVEGRLRRLKTVLAKRTGRSEVEMEGPEECLGRRRSSRIMEETSGMEEEEEEESIAAVPGRRGRRDGEVDATASSIPELERQIEKLSKRQLFFRKKLLHSSQMLRAVSLGQDRYRRRYWVLPYLAGIFVEGTEGNLVPEEVIKKETDSLKVAAHASLNPALFSMKMELAGSNTTASSPARARGRPRKTKPGSMQPRHLKSPVRGQDSEQPQAQLQPEAQLHAPAQPQPQLQLQLQSHKGFLEQEGSPLSLGQSQHDLSQSAFLSWLSQTQSHSSLLSSSVLTPDSSPGKLDPAPSQPPEEPEPDEAESSPDPQALWFNISAQMPCNAAPTPPPAVSEDQPTPSPQQLASSKPMNRPSAANPCSPVQFSSTPLAGLAPKRRAGDPGEMPQSPTGLGQPKRRGRPPSKFFKQMEQRYLTQLTAQPVPPEMCSGWWWIRDPEMLDAMLKALHPRGIREKALHKHLNKHRDFLQEVCLRPSADPIFEPRQLPAFQEGIMSWSPKEKTYETDLAVLQWVEELEQRVIMSDLQIRGWTCPSPDSTREDLAYCEHLSDSQEDITWRGRGREGLAPQRKTTNPLDLAVMRLAALEQNVERRYLREPLWPTHEVVLEKALLSTPNGAPEGTTTEISYEITPRIRVWRQTLERCRSAAQVCLCLGQLERSIAWEKSVNKVTCLVCRKGDNDEFLLLCDGCDRGCHIYCHRPKMEAVPEGDWFCTVCLAQQVEGEFTQKPGFPKRGQKRKSGYSLNFSEGDGRRRRVLLRGRESPAAGPRYSEEGLSPSKRRRLSMRNHHSDLTFCEIILMEMESHDAAWPFLEPVNPRLVSGYRRIIKNPMDFSTMRERLLRGGYTSSEEFAADALLVFDNCQTFNEDDSEVGKAGHIMRRFFESRWEEFYQGKQANL

SEQ ID NO: 20272 - protein, 1000 aa, Homo sapiens
LKLKGLEELISTLKDTKGAQKVINWHMKIEELRLQELKLNRELVKDKEEIKYLNNIISEYERTISSLEEEIVQQNKFHEERQMAWDQREVDLERQLDIFDRQQNEILNAAQKFEEATGSIPDPSLPLPNQLEIALRKIKENIRIILETRATCKSLEEKLKEKESALRLAEQNILSRDKVINELRLRLPATAEREKLIAELGRKEMEPKSHHTLKIAHQTIANMQARLNQKEEVLKKYQRLLEKAREEQREIVKKHEEDLHILHHRLELQADSSLNKFKQTAWDLMKQSPTPVPTNKHFIRLAEMEQTVAEQDDSLSSLLVKLKKVSQDLERQREITELKVKEFENIKLQLQENHEDEVKKVKAEVEDLKYLLDQSQKESQCLKSELQAQKEANSRAPTTTMRNLVERLKSQLALKEKQQKALSRALLELRAEMTAAAEERIISATSQKEAHLNVQQIVDRHTRELKTQVEDLNENLLKLKEALKTSKNRENSLTDNLNDLNNELQKKQKAYNKILREKEEIDQENDELKRQIKRLTSGLQGKPLTDNKQSLIEELQRKVKKLENQLEGKVEEVDLKPMKEKNAKEELIRWEEGKKWQAKIEGIRNKLKEKEGEVFTLTKQLNTLKDLFAKADKEKLTLQRKLKTTGMTVDQVLGIRALESEKELEELKKRNLDLENDILYMRAHQALPRDSVVEDLHLQNRYLQEKLHALEKQFSKDTYSKPSISGIESDDHCQREQELQKENLKLSSENIELKFQLEQANKDLPRLKNQVRDLKEMCEFLKKEKAEVQRKLGHVRGSGRSGKTIPELEKTIGLMKKVVEKVQRENEQLKKASGILTSEKMANIEQENEKLKAELEKLKAHLGHQLSMHYESKTKGTEKIIAENERLRKELKKETDAAEKLRIAKNNLEILNEKMTVQLEETGKRLQFAESRGPQLEGADSKSWKSIVVTRMYETKLKELETDIAKKNQSITDLKQLVKEATEREQKVNKYNEDLEQQIS

SEQ ID NO: 20273 - protein, 107 aa, Homo sapiens
MSTVICMKQREEEFLLTIRPFANRMQKSPCYIPIVSSATLWDRSTPSAKHIPCYERTSVPCSRFINHMKNFSESPKFRSLHFLNFPGSHHGQATQKLQGAMVLHLEE

SEQ ID NO: 20274 - protein, 241 aa, Homo sapiens
MKFILLWALLNLTVALAFNPDYTVSSTPPYLVYLKSDYLPCAGVLIHPLWVITAAHCNLPKLRVILGVTIPADSNEKHLQVIGYEKMIHHPHFSVTSIDHDIMLIKLKTEAELNDYVKLANLPYQTISENTMCSVSTWSYNVCDIYKEPDSLQTVNISVISKPQCRDAYKTYNITENMLCVGIVPGRRQPCKEVSAAPAICNGMLQGILSFADGCVLRADVGIYAKIFYYIPWIENVIQNN

SEQ ID NO: 20275 - protein, 670 aa, Homo sapiens
MPAVDKLLLEEALQDSPQTRSLLSVFEEDAGTLTDYTNQLLQAMQRVYGAQNEMCLATQQLSKQLLAYEKQNFALGKGDEEVISTLHYFSKVVDELNLLHTELAKQLADTMVLPIIQFREKDLTEVSTLKDLFGLASNDVCLFLEHDLSMAKYSRLPKKKENEKVKTEVGKEVAAARRKQHLSSLQYYCALNALQYRKQMAMMEPMIGFAHGQINFFKKGAEMFSKRMDSFLSSVADMVQSIQVELEAEAEKMRVSQQELLSVDESVYTPDSDVAAPQINRNLIQKAGYLNLRNKTGLVTTTWERLYFFTQGGNLMCQPRGAVAGGLIQDLDNCSVMAVDCEDRRYCFQITTPNGKSGIILQAESRKENEEWICAINNISRQIYLTDNPEAVAIKLNQTALQAVTPITSFGKKQESSCPSQNLKNSEMENENDKIVPKATASLPEAEELIAPGTPIQFDIVLPATEFLDQNRGSRRTNPFGETEDESFPEAEDSLLQQMFIVRFLGSMAVKTDSTTEVIYEAMRQVLAARAIHNIFRMTESHLMVTSQSLRLIDPQTQVSRANFELTSVTQFAAHQENKRLVGFVIRVPESTGEESLSTYIFESNSEGEKICYAINLGKEIIEVQKDPEALAQLMLSIPLTNDGKYVLLNDQPDDDDGNPNEHRGAESEA

SEQ ID NO: 20276 - protein, 176 aa, Homo sapiens
MEETYTDSLDPEKLLQCPYDKNHQIRACRFPYHLIKCRKNHPDVASKLATCPFNARHQVPRAEISHHISSCDDRSCIEQDVVNQTRSLRQETLAESTWQCPPCDEDWDKDLWEQTSTPFVWGTTHYSDNNSPASNIVTEHKNNLASGMRVPKSLPYVLPWKNNSDSLDFSLCYCLS

SEQ ID NO: 20277 - protein, 174 aa, Homo sapiens
MGEGAGGGKAKRSMGRATGRMTTSFFPLFWQAGPQPLMSEPPVYCNLVDLRRCPRSPPPGPACPLLQRLDAWEQHLDPNSGRCFYINSLTGCKSWKPPRRSRSETNPGSMEGTQTLKRNNDVLQPQAKGFRSDTGTPEPLDPQGSLSLSQRTSQLDPPALQAPRPLPQLLDDPH

SEQ ID NO: 20278 - protein, 485 aa, Homo sapiens
MNCQQLWLGFLLPMTVSGRVLGLAEVAPVDYLSQYGYLQKPLEGSNNFKPEDITEALRAFQEASELPVSGQLDDATRARMRQPRCGLEDPFNQKTLKYLLLARAALRQAFQDWSNVAPLTFQEVQAGAADIRLSFHGRQSSYCSNTFDGPGRVLAHADIPELGSVHFDEDEFWTEGTYRGVNLRIIAAHEVGHALGLGHSRYSQALMAPVYEGYRPHFKLHPDDVAGIQALYGKKSPVIRDEEEEETELPTVPPVPTEPSPMPDPCSSELDAMMLGPRGKTYAFKGDYVWTVSDSGPGPLFRVSALWEGLPGNLDAAVYSPRTQWIHFFKGDKVWRYINFKMSPGFPKKLNRVEPNLDAALYWPLNQKVFLFKGSGYWQWDELARTDFSSYPKPIKGLFTGVPNQPSAAMSWQDGRVYFFKGKVYWRLNQQLRVEKGYPRNISHNWMHCRPRTIDTTPSGGNTTPSGTGITLDTTLSATETTFEY

SEQ ID NO: 20279 - protein, 1407 aa, Homo sapiens
MEAEFYMVILTCLIFRNSEGFQIVHVQKQQCLFKNEKVVVGSCNRTIQNQQWMWTEDEKLLHVKSALCLAFIRNAAENYSQNSSERQHPNLHMTGITDTSWVLSTTQPFSSTTEETGLAEPERCNFTLAESKASSHSVSIQWRILGSPCNFSLIYSSDTLGAALCPTFRIDNTTYGCNLQDLQAGTIYNFRIISLDEERTVVLQTDPLPPARFGVSKEKTTSTSLHVWWTPSSGKVTSYEVQLFDENNQKIQGVQIQESTSWNEYTFFNLTAGSKYNIAITAVSGGKRSFSVYTNGSTVPSPVKDIGISTKANSLLISWSHGSGNVERYRLMLMDKGILVHGGVVDKHATSYAFHGLTPGYLYNLTVMTEAAGLQNYRWKLVRTAPMEVSNLKVTNDGSLTSLKVKWQRPPGNVDSYNITLSHKGTIKESRVLAPWITETHFKELVPGRLYQVTVSCVSGELSAQKMAVGRTFPDKVANLEANNNGRMRSLVVSWSPPAGDWEQYRILLFNDSVVLLNITVGKEETQYVMDDTGLVPGRQYEVEVIVESGNLKNSERCQGRTVPLAVLQLRVKHANETSLSIMWQTPVAEWEKYIISLADRDLLLIHKSLSKDAKEFTFTDLVPGRKYMATVTSISGDLKNSSSVKGRTVPAQVTDLHVANQGMTSSLFTNWTQAQGDVEFYQVLLIHENVVIKNESISSETSRYSFHSLKSGSLYSVVVTTVSGGISSRQVVVEGRTVPSSVSGVTVNNSGRNDYLSVSWLLAPGDVDNYEVTLSHDGKVVQSLVIAKSVRECSFSSLTPGRLYTVTITTRSGKYENHSFSQERTVPDKVQGVSVSNSARSDYLRVSWVHATGDFDHYEVTIKNKNNFIQTKSIPKSENECVFVQLVPGRLYSVTVTTKSGQYEANEQGNGRTIPEPVKDLTLRNRSTEDLHVTWSGANGDVDQYEIQLLFNDMKVFPPFHLVNTATEYRFTSLTPGRQYKILVLTISGDVQQSAFIEGFTVPSAVKNIHISPNGATDSLTVNWTPGGGDVDSYTVSAFRHSQKVDSQTIPKHVFEHTFHRLEAGEQYQIMIASVSGSLKNQINVVGRTVPASVQGVIADNAYSSYSLIVSWQKAAGVAERYDILLLTENGILLRNTSEPATTKQHKFEDLTPGKKYKIQILTVSGGLFSKEAQTEGRTVPAAVTDLRITENSTRHLSFRWTASEGELSWYNIFLYNPDGNLQERAQVDPLVQSFSFQNLLQGRMYKMVIVTHSGELSNESFIFGRTVPASVSHLRGSNRNTTDSLWFNWSPASGDFDFYELILYNPNGTKKENWKDKDLTEWRFQGLVPGRKYVLWVVTHSGDLSNKVTAESRTAPSPPSLMSFADIANTSLAITWKGPPDWTDYNDFELQWLPRDALTVFNPYN

SEQ ID NO: 20280 - protein, 1910 aa, Homo sapiens
MATADTPAPASSGLSPKEEGELEDGEISDDDNNSQIRSRSSSSSSGGGLLPYPRRRPPHSARGGGSGGGGGSSSSSSSSQQQLRNFSRSRHASERGHLRGPSSYRPKEPFRSHPPSVRMPSSSLSESSPRPSFWERSHLALDRFRFRGRPYRGGSRWSRGRGVGERGGKPGCRPPLGGGAGSGFSSSQSWREPSPPRKSSKSFGRSPSRKQNYSSKNENCVEETFEDLLLKYKQIQLELECINKDEKLALSSKEENVQEDPKTLNFEDQTSTDNVSITKDSSKEVAPEEKTQVKTFQAFELKPLRQKLTLPGDKNRLKKVKDGAKPLSLKSDTTDSSQGLQDKEQNLTRRISTSDILSEKKLGEDEEELSELQLRLLALQSASKKWQQKEQQVMKESKEKLTKTKTVQQKVKTSTKTHSAKKVSTTAKQALRKQQTKAWKKLQQQKEQERQKEEDQRKQAEEEERRKREEEIRKIRDLSNQEEQYNRFMKLVGGKRRSRSKSSDPDLRRSLDKQPTDSGGGIYQYDNYEEVAMDTDSETSSPAPSPVQPPFFSECSLGYFSPAPSLSLPPPPQVSSLPPLSQPYVEGLCVSLEPLPPLPPLPPLPPEDPEQPPKPPFADEEEEEEMLLREELLKSLANKRAFKPEETSSNSDPPSPPVLNNSHPVPRSNLSIVSINTVSQPRIQNPKFHRGPRLPRTVISLPKHKSVVVTLNDSDDSESDGEASKSTNSVFGGLESMIKEARRTAEQASKPKVPPKSEKENDPLRTPEALPEEKKIEYRLLKEEIANREKQRLIKSDQLKTSSSSPANSDVEIDGIGRIAMVTKQVTDAESKLKKHRILLMKDESVLKNLVQQEAKKKESVRNAEAKITKLTEQLQATEKILNVNRMFLKKLQEQIHRVQQRVTIKKALTLKYGEELARAKAVASKEIGKRKLEQDRFGPNKMMRLDSSPVSSPRKHSAELIAMEKRRLQKLEYEYALKIQKLKEARALKAKEQQNISPVVEEEPEFSLPQPSLHDLTQDKLTLDTEENDVDDEILSGSSRERRRSFLESNYFTKPNLKHTDTANKECINKLNKNTVEKPELFLGLKIGELQKLYSKADSLKQLILKTTTGITEKVLHGQEISVDVDFVTAQSKTMEVKPCPFRPYHSPLLVFKSYRFSPYYRTKEKLPLSSVSYSNMIEPDQCFCRFDLTGTCNDDDCQWQHIQDYTLSRKQLFQDILSYNLSLIGCAETSTNEEITASAEKYVEKLFGVNKDRMSMDQMAVLLVSNINESKGHTPPFTTYKDKRKWKPKFWRKPISDNSFSSDEEQSTGPIKYAFQPENQINVPALDTVVTPDDVRYFTNETDDIANLEASVLENPSHVQLWLKLAYKYLNQNEGECSESLDSALNVLARALENNKDNPEIWCHYLRLFSKRGTKDEVQEMCETAVEYAPDYQSFWTFLHLESTFEEKDYVCERMLEFLMGAAKQETSNILSFQLLEALLFRVQLHIFTGRCQSALAILQNALKSANDGIVAEYLKTSDRCLAWLAYIHLIEFNILPSKFYDPSNDNPSRIVNTESFVMPWQAVQDVKTNPDMLLAVFEDAVKACTDESLAVEERIEACLPLYTNMIALHQLLERYEAAMELCKSLLESCPINCQLLEALVALYLQTNQHDKARAVWLTAFEKNPQNAEVFYHMCKFFILQNRGDNLLPFLRKFIASFFKPGFEKYNNLDLFRYLLNIPGPIDIPSRLCKGNFDDDMFNHQVPYLWLIYCLCHPLQSSIKETVEAYEAALGVAMRCDIVQKIWMDYLVFANNRAAGSRNKVQEFKFFTDLVNRCLVTVPARYPIPFSSADYWSNYEFHNRVIFFYLSCVPKTQHSKTLERFCSVMPANSGLALRLLQHEWEESNVQILKLQAKMFTYNIPTCLATWKM

SEQ ID NO: 20281 - protein, 522 aa, Homo sapiens
PALQRCLTLLRDSRPWQRLVRIVQWGWLELPWVKQNINRQGNAPVASGRYCQPEEEVARLLTMAGVPEDELNPFHVLGVEATASDVELKKAYRQLAVMVHPDKNHHPRAEEAFKVLRAAWDIVSNAEKRKEYEMKRMAENELSRSVNEFLSKLQDDLKEAMNTMMCSRCQGKHRRFEMDREPKSARYCAECNRLHPAEEGDFWAESSMLGLKITYFALMDGKVYDITEWAGCQRVGISPDTHRVPYHISFGSRIPGTRGRQRATPDAPPADLQDFLSRIFQVPPGQMPNGNFFAAPQPAPGAAAASKPNSTVPKGEAKPKRRKKLAELKQECLARGLETKGIKQDLIHRLQAYLEEHAEEEANEEDVLGDETEEEETKPIELPVKEEEPPEKTVDVAAEKKVVKITSEIPQTERMQKRAERFNVPVSLESKKAARAARFGISSVPTKGLSSDNKPMVNLDKLKERAQRFGLNVSSISRKSEDDEKLKKRKERFGIVTSSAGTGTTEDTEAKKRKRAERFGIA

SEQ ID NO: 20282 - protein, 1407 aa, Homo sapiens
MKSSGPVERLLRALGRRDSSRAASRPRKAEPHSFREKVFRKKPPVCAVCKVTIDGTGVSCRVCKVATHRKCEAKVTSACQALPPVELRRNTAPVRRIEHLGSTKSLNHSKQRSTLPRSFSLDPLMERRWDLDLTYVTERILAAAFPARPDEQRHRGHLRELAHVLQSKHRDKYLLFNLSEKRHDLTRLNPKVQDFGWPELHAPPLDKLCSICKAMETWLSADPQHVVVLYCKGNKGKLGVIVSAYMHYSKISAGADQALATLTMRKFCEDKVATELQPSQRRYISYFSGLLSGSIRMNSSPLFLHYVLIPMLPAFEPGTGFQPFLKIYQSMQLVYTSGVYHIAGPGPQQLCISLEPALLLKGDVMVTCYHKGGRGTDRTLVFRVQFHTCTIHGPQLTFPKDQLDEAWTDERFPFQASVEFVFSSSPEKIKGSTPRNDPSVSVDYNTTEPAVRWDSYENFNQHHEDSVDGSLTHTRGPLDGSPYAQVQRPPRQTPPAPSPEPPPPPMLSVSSDSGHSSTLTTEPAAESPGRPPPTAAERQELDRLLGGCGVASGGRGAGRETAILDDEEQPTVGGGPHLGVYPGHRPGLSRHCSCRQGYREPCGVPNGGYYRPEGTLERRRLAYGGYEGSPQGYAEASMEKRRLCRSLSEGLYPYPPEMGKPATGDFGYRAPGYREVVILEDPGLPALYPCPACEEKLALPTAALYGLRLEREAGEGWASEAGKPLLHPVRPGHPLPLLLPACGHHHAPMPDYSCLKPPKAGEEGHEGCSYTMCPEGRYGHPGYPALVTYSYGGAVPSYCPAYGRVPHSCGSPGEGRGYPSPGAHSPRAGSISPGSPPYPQSRKLSYEIPTEEGGDRYPLPGHLASAGPLASAESLEPVSWREGPSGHSTLPRSPRDAPCSASSELSGPSTPLHTSSPVQGKESTRRQDTRSPTSAPTQRLSPGEALPPVSQAGTGKAPELPSGSGPEPLAPSPVSPTFPPSSPSDWPQERSPGGHSDGASPRSPVPTTLPGLRHAPWQGPRGPPDSPDGSPLTPVPSQMPWLVASPEPPQSSPTPAFPLAASYDTNGLSQPPLPEKRHLPGPGQQPGPWGPEQASSPARGISHHVTFAPLLSDNVPQTPEPPTQESQSNVKFVQDTSKFWYKPHLSRDQAIALLKDKDPGAFLIRDSHSFQGAYGLALKVATPPPSAQPWKGDPVEQLVRHFLIETGPKGVKIKGCPSEPYFGSLSALVSQHSISPISLPCCLRIPSKDPLEETPEAPVPTNMSTAADLLRQACSVLYLTSVETESLTGPQAVARASSAALSCSPRPTPAVVHFKVSAQGITLTDNQRKLFFRRHYPVNSITFSSTDPQDRRWTNPDGTTSKIFGFVAKKPGSPWENVCHLFAELDPDQPAGAIVTFITKVLLGQRK

SEQ ID NO: 20283 - protein, 289 aa, Homo sapiens
MEIQCSRILLSSLRFSVSRLLTLSRISAWFGPPASTPASTMSIRVTQKSYKVSTSGPRAFSSRSYTSGPGSRISSSSFSRVGSSNFRGGLGGGYGGASGMGGITAVTVNQSLLSPLVLEVDPNIQAVRTQEKEQIKTLNNKFASFIDKVRFLEQQNKMLETKWSLLQQQKTARSNMDNMFESYINNLRRQLETLGQEKLKLEAELGNMQGLVEDFKNKYEDEINKRTEMENEFVLIKKDVDEAYMNKVELESRLEGLTDEINFLRQLYEEEIRELQSQISDTSVVLSMD

SEQ ID NO: 20284 - protein, 249 aa, Homo sapiens
MELSWRSPSPLSASLHSTSPHPHALWTTTAGRAMAGRGGAARPNGPAAGNKICQFKLVLLGESAVGKSSLVLRFVKGQFHEYQESTIGAAFLTQTVCLDDTTVKFEIWDTAGQERYHSLAPMYYRGAQAAIVVYDITNTDTFARAKNWVKELQRQASPNIVIALAGNKADLASKRAVEFQEAQAYADDNSLLFMETSAKTAMNVNEIFMAIAKKLPKNEPQNATGAPGRNRGVDLQENNPASRSQCCSN

SEQ ID NO: 20285 - protein, 321 aa, Homo sapiens
MESRVLLRTFCLIFGLGAVWGLGVDPSLQIDVLTELELGESTTGVRQVPGLHNGTKAFLFQDTPRSIKASTATAEQFFQKLRNKHEFTILVTLKQTHLNSGVILSIHHLDHRYLELESSGHRNEVRLHYRSGSHRPHTEVFPYILADDKWHKLSLAISASHLILHIDCNKIYERVVEKPSTDLPLGTTFWLGQRNNAHGYFKGIMQDVQLLVMPQGFIAQCPDLNRTCPTCNDFHGLVQKIMELQDILAKTSAKLSRAEQRMNRLDQCYCERTCTMKGTTYREFESWIDGCKNCTCLNGTIQCETLICPNPDCPLKSALAY

SEQ ID NO: 20286 - protein, 187 aa, Homo sapiens
MRALVLLLSLFLLGGQAQHVSDWTYSEGALDEAHWPQHYPACGGQRQSPINLQRTKISLPSTMRMTVADGTVYIAQQMHFHWGGASSEISGSEHTVDGIRHVIEIHIVHYNSKYKSYDIAQDAPDGLAVLAAFVEVKNYPENTYYSNFISHLANIKYPGQRTTLTGLDVQDMLPRNLQHYYTYHGSL

SEQ ID NO: 20287 - protein, 48 aa, Homo sapiens
MDAIHIGMSSTPLVKHTAGAGLKANRPRVMSKSGHSNVRIDKVDGIYL

SEQ ID NO: 20288 - protein, 1024 aa, Homo sapiens
MDLASKAGKHLQLKETFERHSRVYTFEMQIIKAKDNFAGNYRCEVTYKDKFDSCSFDLEVHESTGTTPNIDIRSAFKRSGEGQEDAGELDFSGLLKRREVKQQEEEPQVDVWELLKNAKPSEYEKIAFQYGITDLRGMLKRLKRMRREEKKSAAFAKILDPAYQVDKGGRVRFVVELADPKLEVKWYKNGQEIRPSTKYIFEHKGCQRILFINNCQMTDDSEYYVTAGDEKCSTELFVREPPIMVTKQLEDTTAYCGERVELECEVSEDDANVKWFKNGEEIIPGPKSRYRIRVEGKKHILIIEGATKADAAEYSVMTTGGQSSAKLSVDLKPLKILTPLTDQTVNLGKEICLKCEISENIPGKWTKNGLPVQESDRLKVVHKGRIHKLVIANALTEDEGDYVFAPDAYNVTLPAKVHVIDPPKIILDGLDADNTVTVIAGNKLRLEIPISGEPPPKAMWSRGDKAIMEGSGRIRTESYPDSSTLVIDIAERDDSGVYHINLKNEAGEAHASIKVKVVDFPDPPVAPTVTEVGDDWCIMNWEPPAYDGGSPILGYFIERKKKQSSRWMRLNFDLCKETTFEPKKMIEGVAYEVRIFAVNAIGISKPSMPSRPFVPLAVTSPPTLLTVDSVTDTTVTMRWRPPDHIGAAGLDGYVLEYCFEGTEDWIVANKDLIDKTKFTITGLPTDAKIFVRVKAVNAAGASEPKYYSQPILVKEIIEPPKIRIPRHLKQTYIRRVGEAVNLVIPFQGKPRPELTWKKDGAEIDKNQINIRNSETDTIIFIRKAERSHSGKYDLQVKVDKFVETASIDIQIIDRPGPPQIVKIEDVWGENVALTWTPPKDDGNAAITGYTIQKADKKSMEWFTVIEHYHRTSATITELVIGNEYYFRVFSENMCGLSEDATMTKESAVIARDGKIYKNPVYEDFDFSEAPMFTQPLVNTYAIAGYNATLNCSVRGNPKPKITWMKNKVAIVDDPRYRMFSNQGVCTLEIRKPSPYDGGTYCCKAVNDLGTVEIECKLEVKVIAQ

SEQ ID NO: 20289 - protein, 332 aa, Homo sapiens
MFLPLYLNLVLYFVFWLHWTNCDFSLAVRGSKPGKNVQLQENEIRGLCLKSREIFLSQPILLELEAPLKICGDIHGQYYDLLRLFEYGGFPPESNYLFLGDYVDRGKQSLETICLLLAYKIKYPENFFLLRGNHECASINRIYGFYDECKRRYNIKLWKTFTDCFNCLPIAAIVDEKIFCCHGGLSPDLQSMEQIRRIMRPTDVPDQGLLCDLLWSDPDKDVLGWGENDRGVSFTFGAEVVAKFLHKHDLDLICRAHQVVEDGYEFFAKRQLVTLFSAPNYCGEFDNAGAMMSVDETLMCSFQILKPAEKKKPNATRPVTPPRGMITKQAKK

SEQ ID NO: 20290 - protein, 486 aa, Homo sapiens
MVMQFQGLENPIQISPHCSCTPSGFFMEMMSMKPAKGVLTEQVAGPLGQNLEVEPYSQYSNVQFPQVQPQISSSSYYSNLGFYPQQPEEWYSPGIYELRRMPAETLYQGETEVAEMPVTKKPRMGASAGRIKGDELCVVCGDRASGYHYNALTCEGCKGFFRRSITKNAVYKCKNGGNCVMDMYMRRKCQECRLRKCKEMGMLAECMYTGLLTEIQCKSKRLRKNVKQHADQTVNEDSEGRDLRQVTSTTKSCREKTELTPDQQTLLHFIMDSYNKQRMPQEITNKILKEEFSAEENFLILTEMATNHVQVLVEFTKKLPGFQTLDHEDQIALLKGSAVEAMFLRSAEIFNKKLPSGHSDLLEERIRNSGISDEYITPMFSFYKSIGELKMTQEEYALLTAIVILSPDRQYIKDREAVEKLQEPLLDVLQKLCKIHQPENPQHFACLLGRLTELRTFNHHHAEMLMSWRVNDHKFTPLLCEIWDVQ

SEQ ID NO: 20291 - protein, 285 aa, Homo sapiens
MQPPLDLKQILPFPLEPAPTLGLFSNYSTMDPVQKAVLSHTFGGPLLKTKRPVISCNICQIRFNSQSQAEAHYKGNRHARRVKGIEAAKTRGREPGVREPGDPAPPGSTPTNGDGVAPRPGTKHKTILEARSGLGPIKAYPRLGPPTPGEPEAPAQDRTFHCEICNVKVNSEVQLKQHISSRRHRDGVAGKPNPLLSRHKKSRGAGELAGTLTFSKELPKSLAGGLLPSPLAVAAVMAAAAGSPLSLRPAPAAPLLQGPPITHPLLHPAPGPIRTAHGPILFSPY

SEQ ID NO: 20292 - protein, 374 aa, Homo sapiens
IFMENVGAVKQLCKLTNNLEERIEELEIWNRKLARLKRLSSWKSSASEASTISKSSRAVSASSPRRAVHKKNNKVYFSGKRQACPNWVFQTLVITLIAVMAFCALTIVALYILSLKDQDRRVPNLPPSNITSSQEPALLPTASSSAPNTSLVTTPASLQVPEITFCEILPCQETYCCPIRGMKEVSSSPVQRQSEEKEFHQRRWSEDKSKSVLARNALSGPDWESDWIDTTISSIQIMEIQQIIDHQYCIQSLQCGSGNYNYNIPVNKHTPTNVKFSLEINTTEPLIVFQCKFTLGNICFHSKRGTKGLESHREISQEMTQGYQHIWSLPVAPFSDSMFHFRVAAPDLADCSTDPYFAGIFFTDYFFYFYRRCA

SEQ ID NO: 20293 - protein, 187 aa, Homo sapiens
QAEKDRRLKKNTSGHELLEEARRKGLPFAQWDGPTVVAWLELWLGMPAWYVAACRANVKSGAIMSALSDTEIQREIGISNPLHRLKLRLAIQEMVSLTSPSAPPTSRTCPVFLQTLAYGDMNHEWIGNEWLPSLGLPQYRSYFMECLVDARMLDHLTKKDLRVHLKMVDSFHRTSLQYGIMCLKRLN

SEQ ID NO: 20294 - protein, 178 aa, Homo sapiens
MSRQSSVSFRSGGSRGFGGPGFPVCPPGGIQEVTVNQSLLTPLNLQIDPSIQRVRTEEREQIKTLNNKFASFIDKVRFLEQQNKVLDTKWTLLQEQGTKTVRQNLEPLFEQYINNLRRQLDSIVGERGRLDSELRNMQDLVEDFKNKYEDEINKRTTAENEFVMLKKDVDAAYMNKVE

SEQ ID NO: 20295 - protein, 2353 aa, Homo sapiens
MNIVRKLNLMIPWSIFLLHVLLFSLQEYICASSILMGTSKNGFNENRQKRALLAAQFEATSPRYFFHDAINWGESKIKGSCPYECLNGAFCSKTGTCDCQIFQALGTRCQIIPNMGNGRDGICKTWGQYHFETFDGIYYYFPGNCSYIFAKDCGDLEPRYTVWVHNSPKCLGSVYSCYRSISLFFSNQEEIRIYGHEIKKNGISLTLPQTIGQIFIEKLADYILVKTTFGFSLAWDGISGIYLKLSEDHKGKSCGLCGNYNDIQSDDFIILQEDYTEDIAMFANSWSVQTPDDTKCVLTPSDFPNPCSSGMPAFEAIFFKCQILLQFPFLSCHEYIDPYLYIASCVNDLCKTDDDETYCRAATEYARACSHAGYPIQDWRDDFPACTDKCDDSFVHRDCISCCPPTCTFEKQCLGSNLHCLDGCYCPDGLVMDNGTCISLENCPCGFHGLAYSVGSKIEQECTECVCVGGVWNCTEQDCPVQCSVVGDSHFTTFDGRHYSFIGMCQYILVKGTGKDKFTITLQKAPCEQNLGLVCLQSITLILEDDFNKQVTLGRGGQILTSPNQGFNLNGIVEIQTLSSLFILLKTTFGLKILFAIDGERIYIQLTSAWKRRTLGLCGTFNGNIRDDFLSPSGMIEGTPQLHANAWRVSSTCFAPVHVPVVDPCNINQQNIGYAAHCDVIHQELFAPCHIYISPGLYYQLCRHDACKCGSSCLCNALAHYAYLCGQHGVPIDFRTQISFCAVVCQKGMLYHHCSSFCLHSCISLSSPEQCSDDCAEGCNCPEGKFYEDTLNFCVPIFHCRCHYRGSVYQPGELIPTPSGLCQCSNGTVKCDELATPSAVHICPEGKEYFDCRFPDPELPAGGVNCETTCANLAMNFTCTPSSPCISGCVCAPGMAEHRGKCYVPESCPCIWKDWEYLSGEVIATPCYTCVCRRGMFNCTYYPCPAVCTIYGDRHYYSFDGLEYDYISDCQVFLIKSADDSDISVIAQNKKCFDNDIVCSKSVLISVGDTEIYLNDTPYKQKQSGFFLENKSTYQLWKAGYYIVVYFPEKDITILWDRKTTIHIKVGPQWKNKLSGLCGNFDKCTSNDMTTSNNLEVRNARVFGDSWALGQCESPDETIKPCEAHQNKFPYAKKECSILYSDIFASCRNVIDVTSFAKNCHEDTCNCNLGGDCECLCTSIAAYAYKCCQEGISIHWRSSTVCSLDCEYYNEGLGEGPYMLASYGQSGLVLGANMTSRSVFCLPRSSVHTSLFFYFMITPGLFKEKVSSLALVSLESAERPNYFLYVHDNDTLSLELWEANSAFHRRATFFHHQGLWIPGYSAFELYSKKGFFIIFTDSSVKASKYDDSEEFKHSSSFSIEEIQAAVPYRKMCEWRYEPCATPCFKTCSDPEALACKFLPPVEGCLPYCPKNMILDEVTLKCVYPRDCIPVIPTEPTLMPPAKPTVPMFTVWEMITPSDITVFDMLTPTTGLECEPQKFDPVYDCSQYICLNMEWQLYNWSLNCPKDVEMPDCGFRGRPVQVNSDICCPEWECPCRCSMLSELSIITFDGNNAALYSMASYILVRIPGEIIVAHIEKCSMNQNGNSLKKLAPSGRISGLCFKKLNVTTPIHKIIVNRLARKVEVDSIVVPLPFSSQELSIEDSGSMYVITTPAGLIIKWSHLTGIIDIHFGFRFNLSSYTEGLCGICNEDPDDDLRMQNGTIITNMEDIGLFIESWEIEKSFEVTMRRPVRNCTEHDCSQCIDLLNRRIFIPCHDKVSPEDFCEKMWINYTYFWNYECDALSAYVALCNKFDICIQWRTPDYCSLSCPEGKEYQPCVRPCEARTCLNQWFYGHTSCLNLREDCVCKVGTILHRPHSAQCIPEKECACTDSEDQPRTAGEIWNGGIDECTLYKCLENGSIIPIEPDCDEEPTPVCEREAEVVMGIIDKWTCCSKEVCGCDTTLCETSIPTCTNSQKLIVGHSPLSCCPQYKCECDPLKCPSISTPECREDQFMIQVRQEEPCCFSPFCVCESCTKPVPLCHDGEFLTVDLNSTHFCCPQYYCVCEPNLCPMPLLNCAEDMNLVKENVSGQCCPTWHCECNCENLIMPTCEVGEFTAIDHNFQSDCGCIQYLCEKDDVCVFQEVSVLNPGQSMIKYLEEDFCYAIECLEEKDNHTGFHTLNFTLVNCSKKCDVHQVYTPSPSDYGCCGTCKNVSCKFHMENGTSVVYAVGSTWHYNCTTYECVKTDEGAIILNYTMVCPPFNETECKMNEGIVKLYNEGCCKICKREERICQKVIIKSVIRKQDCMSQSPINVASCDGKCPSATIYNINIESHLRFCKCCRENGVRNLSVPLYCSGNGTEIMYTLQEPIDCTCQWN

SEQ ID NO: 20296 - protein, 1564 aa, Homo sapiens
MQRGKPCRALPTLKCQTFCQRHGLMFEVVDLRWGIRNIEATDHLTTELCLEEVDRCWKTSIGPAFVALIGDQYGPCLIPSRIDEKEWEVLRDHLTARPSDLELVARYFQRDENAFPPTYVLQAPGTGEACEPEEATLTSVLRSGAQEARRLGLITQEQWQHYHRSVIEWEIERSLLSSEDREQGATVFLREIQDLHKHILEDCALRMVDRLADGCLDADAQNLLSSLKSHITDMHPGVLKTHRLPWSRDLVNPKNKTHACYLKELGEQFVVRANHQVLTRLRELDTAGQELAWLYQEIRHHLWQSSEVIQTFCGRQELLARLGQQLRHDDSKQHTPLVLFGPPGIGKTALMCKLAEQMPRLLGHKTVTVLRLLGTSQMSSDARGLLKSICFQVCLAYGLPLPPAQVLDAHTRVVQFFHTLLHTVSCRNFESLVLLLDAMDDLDSVRHARRVPWLPLNCPPRVHLILSACSGALGVLDTLQRVLLDPEAYWEVKPLSGNQGQQMIQLLLAAARRTLSPVHTDLLWASLPECGNPGRLRLAFEEARKWASFTVPVPLATTAEEATHQLCTRLEQTHGQLLVAHVLGYIVSSRHGLSEAELKDVLSLDDEVLQDVYRDWTPPSKELLRFPPLLWVRLRRDLGYYLARRPVDGFTLLAIAHRQLVEVVRERYLSGSERAKRHGVLADFFSGTWSQGTKKLITLPLVGKPLNLDRKVAPQPLWFSHTVANLRKLKELPYHLLHSGRLEELKQEVLGSMSWISCRGISGGIEDLLDDFDLCAPHLDSPEVGLVREALQLCRPAVELRGMERSLLYTELLARLHFFATSHPALVGQLCQQAQSWFQLCAHPVLVPLGGFLQPPGGPLRATLSGCHKGITAMAWGVEEKLLVIGTQDGIMAVWDMEEQHVIHMLTGHTGEVRCVKIFAKGTLANSASKDYTLHLWNLLSGQEKFTIWDGGSKNPAEPQIWNLHVDEAHKVVYSASGSKINAWNLETAEPVFHILGDASDPWMCMAVLASQATLLTVSRDGVVSLWSSATGKLQGKQHMSSIKEETPTCAVSVQKQGKLVTGFSNGSISLVSSKGDRLLEKLPDAVRFLVVSEDESLLAAGFGRSVRIFLADSRGFRRFMAMDLEHEDMVETAVFGTENNLIITGSLDALIQVWSLSEQGTLLDILEGVGAPVSLLARGGALVASASPQSSSFKVWDLSDAHRSRVPAPFLDRTGLTAVSHNGSYVYFPKIGDKNKVTIWDLAEGEEQDSLDTSSEIRCLEVAEQRKLLFTGLVSGVVLVFPLNSRQDVICIPPPEARKAINCMSLSKCEDRLAIAYDNIVLVLDITSGDPCPVIDGPRYTFYTQLPETLSSVAILTDYRVVYSMTNGDLFLYECATSKAFPLETHRSRVACVEVSHKEQLVVSGSEDALLCLWDLQARKWKFEMSYTSSYCRGVQCACFSKDDKYVYVGLKDRSILVWSVLDGTLLTVQFVHAVVNRIIPTTSGFIAPTRHGYLIRENFQCLSAKASPQDPLKNFKKAMWMVKSRQREELVAAAGAPQDLESESAQGNETKSNKCSQVCLIV

SEQ ID NO: 20297 - protein, 907 aa, Homo sapiens
MDSSYAKRDAFTDSAISAKVNGEHKEKDLEPWDAGELTANEELEALENDVSNGWDPNDMFRYNEENYGVVSTYDSSLSSYTVPLERDNSEEFLKREARANQLAEEIESSAQYKARVALENDDRSEEEKYTAVQRNSSEREGHSINTRENKYIPPGQRNREVISWGSGRQNSPRMGQPGSGSMPSRSTSHTSDFNPNSGSDQRVVNGVFILSFISFVLSGVPWPSPCPSPSSRPPSRYQSGPNSLPPRAATPTRPPSRPPSRPSRPPSHPSAHGSPAPVSTMPKRMSSEGPPRMSPKAQRHPRNHRVSAGRGSISSGLEFVSHNPPSEAATPPVARTSPSGGTWSSVVSGAASPTPASPASNRAVTPSSEAKDSRLQDQRQNSPAGNKENIKPNETSPSFSKAENKGISPVVSEHRKQIDDLKKFKNDFRLQPSSTSESMDQLLNKNREGEKSRDLIKDKIEPSAKDSFIENSSSNCTSGSSKPNSPSISPSILSNTEHKRGPEVTSQGVQTSSPACKQEKDDKEEKKDAAEQVRKSTLNPNAKEFNPRSFSQPKPSTTPTSPRPQAQPSPSMVGHQQPTPVYTQPVCFAPNMMYPVPVSPGVQPLYPIPMTPMPVNQAKTYRAVPNMPQQRQDQHHQSAMMHPASAAGPPIAATPPAYSTQYVAYSPQQFPNQPLVQHVPHYQSQHPHVYSPVIQGNARMMAPPTHAQPGLVSSSATQYGAHEQTHAMYACPKLPYNKETSPSFYFAISTGSLAQQYAHPNATLHPHTPHPQPSATPTGQQQSQHGGSHPAPSPVQHHQHQAAQALHLASPQQQSAIYHAGLAPTPPSMTPASNTQSPQNSFPAAQQTVFTIHPSHVQPAYTNPPHMAHVPQYKPTTNSSCKAALEEPKGQIPSSLLLLLPTGSTEN

SEQ ID NO: 20298 - protein, 1722 aa, Homo sapiens
MSLLCVGVKKAKFDGAQEKFNTYVTLKVQNVKSTTIAVRGSQPSWEQDFMFEINRLDLGLTVEVWNKGLIWDTMVGTVWIPLRTIRQSNEEGPGEWLTLDSQVIMADSEICGTKDPTFHRILLDTRFELPLDIPEEEARYWAKKLEQLNAMRDQDEYSFQDEQDKPLPVPSNQCCNWNYFGWGEQHNDDPDSAVDDRDSDYRSETSNSIPPPYYTTSQPNASVHQYSVRPPPLGSRESYSDSMHSYEEFSEPQALSPTGSSRYASSGELSQGSSQLSEDFDPDEHSLQGSDMEDERDRDSYHSCHSSVSYHKDSPRWDQDEEELEEDLEDFLEEEELPEDEEELEEEEEEVPDDLGSYAQREDVAVAEPKDFKRISLPPAAPGKEDKAPVAPTEAPDMAKVAPKPATPDKVPAAEQIPEAEPPKDEESFRPREDEEGQEGQDSMSRAKANWLRAFNKVRMQLQEARGEGEMSKSLWFKGGPGGGLIIIDSMPDIRKRKPIPLVSDLAMSLVQSRKAGITSALASSTLNNEELKNHVYKKTLQALIYPISCTTPHNFEVWTATTPTYCYECEGLLWGIARQGMRCTECGVKCHEKCQDLLNADCLQRAAEKSSKHGAEDRTQNIIMVLKDRMKIRERNKPEIFELIQEIFAVTKTAHTQQMKAVKQSVLDGTSKWSAKISITVVCAQGLQAKDKTGSSDPYVTVQVGKTKKRTKTIYGNLNPVWEENFHFECHNSSDRIKVRVWDEDDDIKSRVKQRFKRESDDFLGQTIIEVRTLSGEMDVWYNLDKRTDKSAVSGAIRLHISVEIKGEEKVAPYHVQYTCLHENLFHFVTDVQNNGVVKIPDAKGDDAWKVYYDETAQEIVDEFAMRYGVESIYQAMTHFACLSSKYMCPGVPAVMSTLLANINAYYAHTTASTNVSASDRFAASNFGKERFVKLLDQLHNSLRIDLSMYRNNFPASSPERLQDLKSTVDLLTSITFFRMKVQELQSPPRASQVVKDCVKACLNSTYEYIFNNCHELYSREYQTDPAKKGEVLPEEQGPSIKNLDFWSKLITLIVSIIEEDKNSYTPCLNQFPQELNVGKISAEVMWNLFAQDMKYAMEEHDKHRLCKSADYMNLHFKVKWLYNEYVTELPAFKDRVPEYPAWFEPFVIQWLDENEEVSRDFLHGALERDKKDGFQQTSEHALFSCSVVDVFSQLNQSFEIIKKLECPDPQIVGHYMRRFAKTISNVLLQYADIISKDFASYCSKEKEKVPCILMNNTQQLRVQLEKMFEAMGGKELDAEASDILKELQVKLNNVLDELSRVFATSFQPHIEECVKQMGDILSQVKGTGNVPASACSSVAQDADNVLQPIMDLLDSNLTLFAKICEKTVLKRVLKELWKLVMNTMEKTIVLPPLTDQTMIGNLLRKHGKGLEKGRVKLPSHSDGTQMIFNAAKELGQLSKLKDHMVREEAKSLTPKQCAVVELALDTIKQYFHAGGVGLKKTFLEKSPDLQSLRYALSLYTQATDLLIKTFVQTQSAQVHGGKGTRFTLSEDIYPEKGLGVEDPVGEVSVHVELFTHPGTGEHKVTVKVVAANDLKWQTSGIFRPFIEVNIIGPQLSDKKRKFATKSKNNSWAPKYNESFQFTLSADAGPECYELQVCVKDYCFAREDRTVGLAVLQLRELAQRGSAACWLPLGRRIHMDDTGLTVLRILSQRSNDEVAKEFVKLKSDTRSAEEGGAAPAP

SEQ ID NO: 20299 - protein, 267 aa, Homo sapiens
MSKSESPKEPEQLRKLFIGGLSFETTDESLRSHFEQWGTLTDCVVMRDPNTKRSRGFGFVTYATVEEVDAAMNARPHKVDGRVVEPKRAVSREDSQRPGAHLTVKKIFVGGIKEDTEEHHLRDYFEQYGKIEVIEIMTDRGSGKKRGFAFVTFDDHDSVDKIVIQKYHTVNGHNCEVRKALSKQEMASASSSQRGRSGSGNFGGGSYNDFGNYNNQSSNFGPMKGGNFGGRSSGPYGGGGQYFAKPRNQGGYGGSSSSSSYGSGRRF

SEQ ID NO: 20300 - protein, 110 aa, Homo sapiens
LFVIFSAVFMVTRLGIYPFWILNTTLFESWEIIGPYASWWLLNGLLLTLQLLHVIWSYLIARIALKALIRGKVTCPGRIRPCTLHSFLTSFLFSMPGGSWTVSSLACIEG

SEQ ID NO: 20301 - protein, 585 aa, Homo sapiens
MAKLWFKFQRYFRRKPVRFFTFLALYLTAGSLVFLHSGFVGQPAVSGNQANPAAAGGPAEGAELSFLGDMHLGRGFRDTGEASSIARRYGPWFKGKDGNERAKLGDYGGAWSRALKGRVVREKEEERAKYIGCYLDDTQSRALRGVSFFDYKKMTIFRCQDNCAERGYLYGGLEFGAECYCGHKIQATNVSEAECDMECKGERGSVCGGANRLSVYRLQLAQESARRYGSAVFRGCFRRPDNLSLALPVTAAMLNMSVDKCVDFCTEKEYPLAALAGTACHCGFPTTRFPLHDREDEQLCAQKCSAEEFESCGTPSYFIVYQTQVQDNRCMDRRFLPGKSKQLIALASFPGAGNTWARHLIELATGFYTGSYYFDGSLYNKGFKGERDHWRSGRTICIKTHESGQKEIEAFDAAILLIRNPYKALMAEFNRKYGGHIGFAAHAHWKGKGAVPGSLQILFRSICTASVGEWPEFVRNYAPWWATHTLDWLKFGKKVLVVHFEDLKQDLFVQLGRMVSLLGVAVREDRLLCVESQKDGNFKRSGLRKLEYDPYTADMQKTISAYIKMVDAALKGRNLTGVPDDYYPR

SEQ ID NO: 20302 - protein, 1104 aa, Homo sapiens
MTVVKRQAQSPSGVSSEVEVLKALKSLFEHHKALDEKVRERLRVSLERVSALEEELAAANQEIVALREQNVHIQRKMASSEGSTESEHLEGMEPGQKVHEKRLSNGSIDSTDETSQIVELQELLEKQNYEMAQMKERLAALSSRVGEVEQEAETARKDLIKTEEMNTKYQRDIREAMAQKEDMEERITTLEKRYLSAQRESTSIHDMNDKLENELANKEAILRQMEEKNRQLQERLELAEQKLQQTMRKAETLPEVEAELAQRIAALTKAEERHGNIEERMRHLEGQLEEKNQELQRARQREKMNEEHNKRLSDTVDRLLTESNERLQLHLKERMAALEEKNVLIQESETFRKNLEESLHDKERLAEEIEKLRSELDQLKMRTGSLIEPTIPRTHLDTSAELRYSVGSLVDSQSDYRTTKVIRRPRRGRMGVRRDEPKVKSLGDHEWNRTQQIGVLSSHPFESDTEMSDIDDDDRETIFSSMDLLSPSGHSDAQTLAMMLQEQLDAINKEIRLIQEEKESTELRAEEIENRVASVSLEGLNLARVHPGTSITASVTASSLASSSPPSGHSTPKLTPRSPAREMDRMGVMTLPSDLRKHRRKIAVVEEDGREDKATIKCETSPPPTPRALRMTHTLPSSYHNDARSSLSVSLEPESLGLGSANSSQDSLHKAPKKKGIKSSIGRLFGKKEKARLGQLRGFMETEAAAQESLGLGKLGTQAEKDRRLKKKHELLEEARRKGLPFAQWDGPTVVAWLELWLGMPAWYVAACRANVKSGAIMSALSDTEIQREIGISNPLHRLKLRLAIQEMVSLTSPSAPPTSRTPSGNVWVTHEEMENLAAPAKTKESEEGSWAQCPVFLQTLAYGDMNHEWIGNEWLPSLGLPQYRSYFMECLVDARMLDHLTKKDLRVHLKMVDSFHRTSLQYGIMCLKRLNYDRKELERRREASQHEIKDVLVWSNDRVIRWIQAIGLREYANNILESGVHGSLIALDENFDYSSLALLLQIPTQNTQARQILEREYNNLLALGTERRLDESDDKNFRRGSTWRRQFPPREVHGISMMPGSSETLPAGFRLTTTSGQSRKMTTDVASSRLQRLDNSTVRTYSC

SEQ ID NO: 20303 - protein, 186 aa, Homo sapiens
MDVCATSRTDREIKVTLVFEHVDQDLRTYLDKAPPPGLPAETIKDLMRQFLRGLDFLHANCIVHRDLKPENILVTSGGTVKLADFGLARIYSYQMALTPVVVTLWYRAPEVLLQSTYATPVDMWSVGCIFAEMFRRKPLFCGNSEADQLGKIFDLIGLPPEDDWPRDVSLPRGAFPPRGPRPVQSV

SEQ ID NO: 20304 - protein, 263 aa, Homo sapiens
MNCEREQLRGNQEAAAAPDTMAQPYASAQFAPPQNGIPAEYTAPHPHPAPEYTGQTTVPEHTLNLYPPAQTHSEQSPADTSAQTVSGTATQTDDAAPTDGQPQTQPSENTENKSQPKRLHVSNIPFRFRDPDLRQMFGQFGKILDVEIIFNERGSKGFGFVTFENSADADRAREKLHGTVVEGRKIEVNNATARVMTNKKTVNPYTNGWKLNPVVGAVYSPEFYAGTVLLCQANQEGSSMYSAPSSLVYTSAMPGFPYPAATA

SEQ ID NO: 20305 - protein, 605 aa, Homo sapiens
MGSCARLLLLWGCTVVAAGLSGVAGVSSRCEKACNPRMGNLALGRKLWADTTCGQNATELYCFYSENTDLTCRQPKCDKCNAAYPHLAHLPSAMADSSFRFPRTWWQSAEDVHREKIQLDLEAEFYFTHLIVMFKSPRPAAMVLDRSQDFGKTWKPYKYFATNCSATFGLEDDVVKKGAICTSKYSSPFPCTGGEVIFKALSPPYDTENPYSAKVQEQLKITNLRVQLLKRQSCPCQRNDLNEEPQHFTHYAIYDFIVKGSCFCNGHADQCIPVHGFRPVKAPGTFHMVHGKCMCKHNTAGSHCQHCAPLYNDRPWEAADGKTGAPNECRTCKCNGHADTCHFDVNVWEASGNRSGGVCDDCQHNTEGQYCQRCKPGFYRDLRRPFSAPDACKPCSCHPVGSAVLPANSVTFCDPSNGDCPCKPGVAGRRCDRCMVGYWGFGDYGCRPCDCAGSCDPITGDCISSHTDIDWYHEVPDFRPVHNKSEPAWEWEDAQGFSALLHSVLKIKILSAHDKGTHVEVNVKIKKVLKSTKLKIFRGKRTLYPESWTDRGCTCPILNPGLEYLVAGHEDIRTGKLIVNMKSFVQHWKPSLGRKVMDILKRECK

SEQ ID NO: 20306 - protein, 507 aa, Homo sapiens
MEAAVAAPRPRLLLLVLAAAAAAAAALLPGATALQCFCHLCTKDNFTCVTDGLCFVSVTETTDKVIHNSMCIAEIDLIPRDRPFVCAPSSKTGSVTTTYCCNQDHCNKIELPTTGPFSVKSSPGLGPVELAAVIAGPVCFVCISLMLMVYICHNRTVIHHRVPNEEDPSLDRPFISEGTTLKDLIYDMTTSGSGSGLPLLVQRTIARTIVLQESIGKGRFGEVWRGKWRGEEVAVKIFSSREERSWFREAEIYQTVMLRHENILGFIAADNKDNGTWTQLWLVSDYHEHGSLFDYLNRYTVTVEGMIKLALSTASGLAHLHMEIVGTQGKPAIAHRDLKSKNILVKKNGTCCIADLGLAVRHDSATDTIDIAPNHRVGTKRYMAPEVLDDSINMKHFESFKRADIYAMGLVFWEIARRCSIGGIHEDYQLPYYDLVPSDPSVEEMRKVVCEQKLRPNIPNRWQSCEALRVMAKIMRECWYANGAARLTALRIKKTLSQLSQQEGIKM

SEQ ID NO: 20307 - protein, 476 aa, Homo sapiens
MGLKKMKGLSYDEAFAMANDPLEGFHEVNLASPTSPDLLGVYESGTQEQTTSPSVIYRPHPSALSSVPIQANALDVSELPTQPVYSSPRRLNCAEISSISFHVTDPAPCSTSGVTAGLTKLTTRKDNYNAEREFLQGATITEACDGSDDIFGLSTDSLSRLRSPSVLEVREKGYERLKEELAKAQRELKLKDEECERLSKVRDQLGQELEELTASLFEEAHKMVREANIKQATAEKQLKEAQGKIDVLQAEVAALKTLVLSSSPTSPTQEPLPGGKTPFKKGHTRNKSTSSAMSGSHQDLSVIQPIVKDCKEADLSLYNEFRLWKDEPTMDRTCPFLDKIYQEDIFPCLTFSKSELASAVLEAVENNTLSIEPVGLQPIRFVKASAVECGGPKKCALTGQSKSCKHRIKLGDSSNYYYISPFCRYRITSVCNFFTYIRYIQQGLVKQQDVDQMFWEVMQLRKEMSLAKLGYFKEEL

SEQ ID NO: 20308 - protein, 1907 aa, Homo sapiens
MLSHGAGLALWITLSLLQTGLAEPERCNFTLAESKASSHSVSIQWRILGSPCNFSLIYSSDTLGAALCPTFRIDNTTYGCNLQDLQAGTIYNFRIISLDEERTVVLQTDPLPPARFGVSKEKTTSTSLHVWWTPSSGKVTSYEVQLFDENNQKIQGVQIQESTSWNEYTFFNLTAGSKYNIAITAVSGGKRSFSVYTNGSTVPSPVKDIGISTKANSLLISWSHGSGNVERYRLMLMDKGILVHGGVVDKHATSYAFHGLTPGYLYNLTVMTEAAGLQNYRWKLVRTAPMEVSNLKVTNDGSLTSLKVKWQRPPGNVDSYNITLSHKGTIKESRVLAPWITETHFKELVPGRLYQVTVSCVSGELSAQKMAVGRTFPLAVLQLRVKHANETSLSIMWQTPVAEWEKYIISLADRDLLLIHKSLSKDAKEFTFTDLVPGRKYMATVTSISGDLKNSSSVKGRTVPAQVTDLHVANQGMTSSLFTNWTQAQGDVEFYQVLLIHENVVIKNESISSETSRYSFHSLKSGSLYSVVVTTVSGGISSRQVVVEGRTVPSSVSGVTVNNSGRNDYLSVSWLLAPGDVDNYEVTLSHDGKVVQSLVIAKSVRECSFSSLTPGRLYTVTITTRSGKYENHSFSQERTVPDKVQGVSVSNSARSDYLRVSWVHATGDFDHYEVTIKNKNNFIQTKSIPKSENECVFVQLVPGRLYSVTVTTKSGQYEANEQGNGRTIPEPVKDLTLRNRSTEDLHVTWSGANGDVDQYEIQLLFNDMKVFPPFHLVNTATEYRFTSLTPGRQYKILVLTISGDVQQSAFIEGFTVPSAVKNIHISPNGATDSLTVNWTPGGGDVDSYTVSAFRHSQKVDSQTIPKHVFEHTFHRLEAGEQYQIMIASVSGSLKNQINVVGRTVPASVQGVIADNAYSSYSLIVSWQKAAGVAERYDILLLTENGILLRNTSEPATTKQHKFEDLTPGKKYKIQILTVSGGLFSKEAQTEGRTVPAAVTDLRITENSTRHLSFRWTASEGELSWYNIFLYNPDGNLQERAQVDPLVQSFSFQNLLQGRMYKMVIVTHSGELSNESFIFGRTVPASVSHLRGSNRNTTDSLWFNWSPASGDFDFYELILYNPNGTKKENWKDKDLTEWRFQGLVPGRKYVLWVVTHSGDLSNKVTAESRTAPSPPSLMSFADIANTSLAITWKGPPDWTDYNDFELQWLPRDALTVFNPYNNRKSEGRIVYGLRPGRSYQFNVKTVSGDSWKTYSKPIFGSVRTKPDKIQNLHCRPQNSTAIACSWIPPDSDFDGYSIECRKMDTQEVEFSRKLEKEKSLLNIMMLVPHKRYLVSIKVQSAGMTSEVVEDSTITMIDRPPPPPPHIRVNEKDVLISKSSINFTVNCSWFSDTNGAVKYFTVVVREADGSDELKPEQQHPLPSYLEYRHNASIRVYQTNYFASKCAENPNSNSKSFNIKLGAEMESLGGKCDPTQQKFCDGPLKPHTAYRISIRAFTQLFDEDLKEFTKPLYSDTFFSLPITTESEPLFGAIEGVSAGLFLIGMLVAVVALLICRQKVSHGRERPSARLSIRRDRPLSVHLNLGQKGNRKTSCPIKINQFEGHFMKLQADSNYLLSKEYEELKDVGRNQSCDIALLPENRGKNRYNNILPYDATRVKLSNVDDDPCSDYINASYIPGNNFRREYIVTQGPLPGTKDDFWKMVWEQNVHNIVMVTQCVEKGRVKCDHYWPADQDSLYYGDLILQMLSESVLPEWTIREFKICGEEQLDAHRLIRHFHYTVWPDHGVPETTQSLIQFVRTVRDYINRSPGAGPTVVHCSAGVGRTGTFIALDRILQQLDSKDSVDIYGAVHDLRLHRVHMVQTECQYVYLHQCVRDVLRARKLRSEQENPLFPIYENVNPEYHRDPVYSRH

SEQ ID NO: 20309 - protein, 357 aa, Homo sapiens
MANGFDNVQFMGSNVMEDQDLLEIGILNSGHRQRILQAIQLLPKMRPIGHDGYHPTSVAEWLDSIELGDYTKAFLINGYTSMDLLKKIWEVELINQSSVCEIWTNQNAGFPFSAIHQVHNTGDWGEPSITLRPPNEATASTPVQYWQHHPEKLIFQSCDYKAFYLGSMLIKELRGTESTQDACAKMRANCQKSTEQMKKVPTIILSVSYKGVKFIDATNKNIIAEHEIRNISCAAQDPEDLSTFAYITKDLKSNHHYCHVFTAFDVNLAYEIILTLGQAFEVAYQLALQARKGGHSSTLPESFENKPSKPIPKPRVSIRKSVIDPSEQKTLANLPWIVEPGQEAKRGINTKYETTIF

SEQ ID NO: 20310 - protein, 1007 aa, Homo sapiens
MARRGKKPVVRTLEDLTLDSGYGGAADSVRSSNLSLCCSDSHPASPYGGSCWPPLADSMHSRHNSFDTVNTALVEDSEGLDCAGQHCSRLLPDLDEVPWTLQELEALLLRSRDPRAGPAVPGGLPKDALAKLSTLVSRALVRIAKEAQRLSLRFAKCTKYEIQSAMEIVLSWGLAAHCTAAALAALSLYNMSSAGGDRLGRGKSARCGLTFSVGRVYRWMVDSRVALRIHEHAAIYLTACMESLFRDIYSRVVASGVPRSCSGPGSGSGSGPGPSSGPGAAPAADKEREAPGGGAASGGACSAASSASGGSSCCAPPAAAAAAVPPAAAANHHHHHHHALHEAPKFTVETLEHTVNNDSEIWGLLQPYQHLICGKNASGVLCLPDSLNLHRDPQRSNKPGELPMFSQSELRTIEQSLLATRVGSIAELSDLVSRAMHHLQPLNAKHHGNGTPLHHKQGALYWEPEALYTLCYFMHCPQMEWENPNVEPSKVNLQVERPFLVLPPLMEWIRVAVAHAGHRRSFSMDSDDVRQAARLLLPGVDCEPRQLRADDCFCASRKLDAVAIEAKFKQDLGFRMLNCGRTDLVKQAVSLLGPDGINTMSEQGMTPLMYACVRGDEAMVQMLLDAGADLNVEVVSTPHKYPSVHPETRHWTALTFAVLHGHIPVVQLLLDAGAKVEGSVEHGEENYSETPLQLAAAVGNFELVSLLLERGADPLIGTMYRNGISTTPQGDMNSFSQAAAHGHRNVFRKLLAQPEKEKSDILSLEEILAEGTDLAETAPPPLCASRNSKAKLRALREAMYHSAEHGYVDVTIDIRSIGVPWTLHTWLESLRIAFQQHRRPLIQCLLKEFKTIQEEEYTEELVTQGLPLMFEILKASKNEVISQQLCVIFTHCYGPYPIPKLTEIKRKQTSRLDPHFLNNKEMSDVTFLVEGRPFYAHKVLLFTASPRFKALLSSKPTNDGTCIEIGYVKYSIFQLVMQYLYYGGPESLLIKNNEIMEVRDPLWCWLS

SEQ ID NO: 20311 - protein, 191 aa, Homo sapiens
MELSPRSPPEMLEESDCPSPLELKSAPSKKMWIKLRSLLRYMVKQLENGEINIEELKKNLEYTASLLEAVYIDETRVSRLWKHLLSFLCDSPSGVSGKSWTRRTSCRSCGQMPCLRRCGTGWPPPSPSRPGPKAAEQRRSPSSEALCTLCRLGSSWNGCSGEHTPLWAPLTLLRFSTVSRTWISGALMSFP

SEQ ID NO: 20312 - protein, 1132 aa, Homo sapiens
MPEPTKKEENEVPAPAPPPEDWTLVETPPGEEQAKQNANSQLSILFIEKPQGGTVKVGEDITFIAKVKAEDLLRKPTIKWFKGKWMDLASKAGKHLQLKETFERHSRVYTFEMQIIKAKDNFAGNYRCEVTYKDKFDSCSFDLEVHESTGTTPNIDIRSAFKRSGEGQEDAGELDFSGLLKRREVKQQEEEPQVDVWELLKNAKPSEYEKIAFQYGITDLRGMLKRLKRMRREEKKSAAFAKILDPAYQVDKGGRVRFVVELADPKLEVKWYKNGQEIRPSTKYIFEHKGCQRILFINNCQMTDDSEYYVTAGDEKCSTELFVREPPIMVTKQLEDTTAYCGERVELECEVSEDDANVKWFKNGEEIIPGPKSRYRIRVEGKKHILIIEGATKADAAEYSVMTTGGQSSAKLSVDLKPLKILTPLTDQTVNLGKEICLKCEISENIPGKWTKNGLPVQESDRLKVVHKGRIHKLVIANALTEDEGDYVFAPDAYNVTLPAKVHVIDPPKIILDGLDADNTVTVIAGNKLRLEIPISGEPPPKAMWSRGDKAIMEGSGRIRTESYPDSSTLVIDIAERDDSGVYHINLKNEAGEAHASIKVKVVDFPDPPVAPTVTEVGDDWCIMNWEPPAYDGGSPILGYFIERKKKQSSRWMRLNFDLCKETTFEPKKMIEGVAYEVRIFAVNAIGISKPSMPSRPFVPLAVTSPPTLLTVDSVTDTTVTMRWRPPDHIGAAGLDGYVLEYCFEGTEDWIVANKDLIDKTKFTITGLPTDAKIFVRVKAVNAAGASEPKYYSQPILVKEIIEPPKIRIPRHLKQTYIRRVGEAVNLVIPFQGKPRPELTWKKDGAEIDKNQINIRNSETDTIIFIRKAERSHSGKYDLQVKVDKFVETASIDIQIIDRPGPPQIVKIEDVWGENVALTWTPPKDDGNAAITGYTIQKADKKSMEWFTVIEHYHRTSATITELVIGNEYYFRVFSENMCGLSEDATMTKESAVIARDGKIYKNPVYEDFDFSEAPMFTQPLVNTYAIAGYNATLNCSVRGNPKPKITWMKNKVAIVDDPRYRMFSNQGVCTLEIRKPSPYDGGTYCCKAVNDLGTVEIECKLEVKVIYQGVNTPGQPVFLEGQQQSLHNKDF

SEQ ID NO: 20313 - protein, 1449 aa, Homo sapiens
MLCVAGARLKRELDATATVLANRQDESEQSRKRLIEQSREFKKNTPEDLRKQVAPLLKSFQGEIDALSKRSKEAEAAFLNVYKRLIDVPDPVPALDLGQQLQLKVQRLHDIETENQKLRETLEEYNKEFAEVKNQEVTIKALKEKIREYEQTLKNQAETIALEKEQKLQNDFAEKERKLQETQMSTTSKLEEAEHKVQSLQTALEKTRTELFDLKTKYDEETTAKADEIEMIMTDLERANQRAEVAQREAETLREQLSSANHSLQLASQIQKAPDVEQAIEVLTRSSLEVELAAKEREIAQLVEDVQRLQASLTKLRENSASQISQLEQQLSAKNSTLKQLEEKLKGQADYEEVKKELNILKSMEFAPSEGAGTQDAAKPLEVLLLEKNRSLQSENAALRISNSDLSGSARRKGKDQPESRRPGSLPAPPPSQLPRNPGEQASNTNGTHQFSPAGLSQDFFSSSLASPSLPLASTGKFALNSLLQRQLMQSFYSKAMQEAGSTSMIFSTGPYSTNSISSQSPLQQSPDVNGMAPSPSQSESAGSVSEGEEMDTAEIARQVKEQLIKHNIGQRIFGHYVLGLSQGSVSEILARPKPWNKLTVRGKEPFHKMKQFLSDEQNILALRSIQGRQRAEPAQPSSASGSGNSDDAIRSILQQARREMEAQQAALDPALKQAPLSQSDITILTPKLLSTSPMPTVSSYPPLAISLKKPSAAPEAGASALPNPPALKKEAQDAPGLDPQGAADCAQGVLRQVKNEVGRSGAWKDHWWSAVQPERRNAASSEEAKAEETGGGKEKGSGGSGGGSQPRAERSQLQGPSSSEYWKEWPSAESPYSQSSELSLTGASRSETPQNSPLPSSPIVPMSKPTKPSVPPLTPEQYEVYMYQEVDTIELTRQVKEKLAKNGICQRIFGEKVLGLSQGSVSDMLSRPKPWSKLTQKGREPFIRMQLWLNGELGQGVLPVQGQQQGPVLHSVTSLQDPLQQGCVSSESTPKTSASCSPAPESPMSSSESVKSLTELVQQPCPPIEASKDSKPPEPSDPPASDSQPTTPLPLSGHSALSIQELVAMSPELDTYGITKRVKEVLTDNNLGQRLFGETILGLTQGSVSDLLARPKPWHKLSLKGREPFVRMQLWLNDPNNVEKLMDMKRMEKKAYMKRRHSSVSDSQPCEPPSVGTEYSQGASPQPQHQLKKPRVVLAPEEKEALKRAYQQKPYPSPKTIEDLATQLNLKTSTVINWFHNYRSRIRRELFIEEIQAGSQGQAGASDSPSARSGRAAPSSEGDSCDGVEATEGPGSADTEEPKSQGEAEREEVPRPAEQTEPPPSGTPGPDDARDDDHEGGPVEGPGPLPSPASATATAAPAAPEDAATSAAAAPGEGPAAPSSAPPPSNSSSSSAPRRPSSLQSLFGLPEAAGARDSRDNPLRKKKAANLNSIIHRLEKAASREEPIEWEF

SEQ ID NO: 20314 - protein, 661 aa, Homo sapiens
MDLVLKRCLLHLAVIGALLAVGATKVPRNQDWLGVSRQLRTKAWNRQLYPEWTEAQRLDCWRGGQVSLKVSNDGPTLIGANASFSIALNFPGSQKVLPDGQVIWVNNTIINGSQVWGGQPVYPQETDDACIFPDGGPCPSGSWSQKRSFVYVWKTWGQYWQVLGGPVSGLSIGTGRAMLGTHTMEVTVYHRRGSRSYVPLAHSSSAFTITDQVPFSVSVSQLRALDGGNKHFLRNQPLTFALQLHDPSGYLAEADLSYTWDFGDSSGTLISRALVVTHTYLEPGPVTAQVVLQAAIPLTSCGSSPVPGTTDGHRPTAEAPNTTAGQVPTTEVVGTTPGQAPTAEPSGTTSVQVPTTEVISTAPVQMPTAESTGMTPEKVPVSEVMGTTLAEMSTPEATGMTPAEVSIVVLSGTTAAQVTTTEWVETTARELPIPEPEGPDASSIMSTESITGSLGPLLDGTATLRLVKRQVPLDCVLYRYGSFSVTLDIVQGIESAEILQAVPSGEGDAFELTVSCQGGLPKEACMEISSPGCQPPAQRLCQPVLPSPACQLVLHQILKGGSGTYCLNVSLADTNSLAVVSTQLIMPGQEAGLGQVPLIVGILLVLMAVVLASLIYRRRLMKQDFSVPQLPHSSSHWLRLPRIFCSCPIGENSPLLSGQQV

SEQ ID NO: 20315 - protein, 1857 aa, Homo sapiens
MARKKLKKFTTLEIVLSVLLLVLFIISIVLIVLLAKESLKSTAPDPGTTGTPDPGTTGTPDPGTTGTTHARTTGPPDPGTTGTTPVSAECPVVNELERINCIPDQPPTKATCDQRGCCWNPQGAVSVPWCYYSKNHSYHVEGNLVNTNAGFTARLKNLPSSPVFGSNVDNVLLTAEYQTSNRFHFKLTDQTNNRFEVPHEHVQSFSGNAAASLTYQVEISRQPFSIKVTRRSNNRVLFDSSIGPLLFADQFLQLSTRLPSTNVYGLGEHVHQQYRHDMNWKTWPIFNRDTTPNGNGTNLYGAQTFFLCLEDASGLSFGVFLMNSNAMEVVLQPAPAITYRTIGGILDFYVFLGNTPEQVVQEYLELIGRPALPSYWALGFHLSRYEYGTLDNMREVVERNRAAQLPYDVQHADIDYMDERRDFTYDSVDFKGFPEFVNELHNNGQKLVIIVDPAISNNSSSSKPYGPYDRGSDMKIWVNSSDGVTPLIGEVWPGQTVFPDYTNPNCAVWWTKEFELFHNQVEFDGIWIDMNEVSNFVDGSVSGCSTNNLNNPPFTPRILDGYLFCKTLCMDAVQHWGKQYDIHNLYGYSMAVATAEAAKTVFPNKRSFILTRSTFAGSGKFAAHWLGDNTATWDDLRWSIPGVLEFNLFGIPMVGPDICGFALDTPEELCRRWMQLGAFYPFSRNHNGQGYKDQDPASFGADSLLLNSSRHYLNIRYTLLPYLYTLFFRAHSRGDTVARPLLHEFYEDNSTWDVHQQFLWGPGLLITPVLDEGAEKVMAYVPDAVWYDYETGSQVRWRKQKVEMELPGDKIGLHLRGGYIFPTQQPNTTTLASRKNPLGLIIALDENKEAKGELFWDNGETKDTVANKVYLLCEFSVTQNRLEVNISQSTYKDPNNLAFNEIKILGTEEPSNVTVKHNGVPSQTSPTVTYDSNLKVAIITDIDLLLGEAYTVEWSIKIRDEEKIDCYPDENGASAENCTARGCIWEASNSSGVPFCYFVNDLYSVSDVQYNSHGATADISLKSSVYANAFPSTPVNPLRLDVTYHKNEMLQFKIYDPNKNRYEVPVPLNIPSMPSSTPEGQLYDVLIKKNPFGIEIRRKSTGTIIWDSQLLGFTFSDMFIRISTRLPSKYLYGFGETEHRSYRRDLEWHTWGMFSRDQPPGYKKNSYGVHPYYMGLEEDGSAHGVLLLNSNAMDVTFQPLPALTYRTTGGVLDFYVFLGPTPELVTQQYTELIGRPVMVPYWSLGFQLCRYGYQNDSEIASLYDEMVAAQIPYDVQYSDIDYMERQLDFTLSPKFAGFPALINRMKADGMRVILILDPAISGNETQPYPAFTRGVEDDVFIKYPNDGDIVWGKVWPDFPDVVVNGSLDWDSQVELYRAYVAFPDFFRNSTAKWWKREIEELYNNPQNPERSLKFDGMWIDMNEPSSFVNGAVSPGCRDASLNHPPYMPHLESRDRGLSSKTLCMESQQILPDGSLVQHYNVHNLYGWSQTRPTYEAVQEVTGQRGVVITRSTFPSSGRWAGHWLGDNTAAWDQLKKSIIGMMEFSLFGISYTGADICGFFQDAEYEMCVRWMQLGAFYPFSRNHNTIGTRRQDPVSWDVAFVNISRTVLQTRYTLLPYLYTLMHKAHTEGVTVVRPLLHEFVSDQVTWDIDSQFLLGPAFLVSPVLERNARNVTAYFPRARWYDYYTGVDINARGEWKTLPAPLDHINLHVRGGYILPWQEPALNTHLSRQKFMGFKIALDDEGTAGGWLFWDDGQSIDTYGKGLYYLASFSASQNTMQSHIIFNNYITGTNPLKLGYIEIWGVGSVPVTSVSISVSGMVITPSFNNDPTTQVLSIDVTDRNISLHNFTSLTWISTL

SEQ ID NO: 20316 - protein, 483 aa, Homo sapiens
MMAAAPIQQNGTHTGVPIDLDPPDSRKRPLEAPPEAGSTKRTNTGEDGQYFLKVLIPSYAAGSIIGKGGQTIVQLQKETGATIKLSKSKDFYPGTTERVCLIQGTVEALNAVHGFIAEKIREMPQNVAKTEPVSILQPQTTVNPDRIKQVKIIVPNSTAGLIIGKGGATVKAVMEQSGAWVQLSQKPDGINLQERVVTVSGEPEQNRKAVELIIQKIQEDPQSGSCLNISYANVTGPVANSNPTGSPYANTAEVLPTAAAAAGLLGHANLAGVAAFPAVLSGFTGNDLVAITSALNTLASYGYNLNTLGLGLSQAAATGALAAAAASANPAAAAANLLATYASEASASGSTAGGTAGTFALGSLAAATAATNGYFGAASPLAASAILGTEKSTDGSKDVVEIAVPENLVGAILGKGGKTLVEYQELTGARIQISKKGEFVPGTRNRKVTITGTPAATQAAQYLITQRITYEQGVRAANPQKVG

SEQ ID NO: 20317 - protein, 1675 aa, Homo sapiens
MSGTSSPEAVKKLLENMQSDLRALSLECKKKFPPVKEAAESGIIKVKTIAARNTEILAALKENSSEVVQPFLMGCGTKEPKITQLCLAAIQRLMSHEVVSETAAGNIINMLWQLMENSLEELKLLQTVLVLLTTNTVVHDEALSKAIVLCFRLHFTKDNITNNTAAATVRQVVTVVFERMVAEDERHRDIIEQPVLVQGNSNRRSVSTLKPCAKDAYMLFQDLCQLVNADAPYWLVGMTEMTRTFGLELLESVLNDFPQVFLQHQEFSFLLKERVCPLVIKLFSPNIKFRQGSSTSSSPAPVEKPYFPICMRLLRVVSVLIKQFYSLLVTECEIFLSLLVKFLDADKPQWLRAVAVESIHRFCVQPQLLRSFCQSYDMKQHSTKVFRDIVNALGSFIQSLFLVPPTGNPATSNQAGNNNLGGSVSAPANSGMVGIGGGVTLLPAFEYRGTWIPILTITVQGSAKATYLEMLDKVEPPTIPEGYAMSVAFHCLLDLVRGITSMIEGELGELETECQTTTEEGSSPTQSTEQQDLQSTSDQMDKEIVSRAVWEEMVNACWCGLLAALSLLLDASTDEAATENILKAELTMAALCGRLGLVTSRDAFITAICKGSLPPHYALTVLNTTTAATLSNKSYSVQGQSVMMISPSSESHQQVVAVGQPLAVQPQGTVMLTSKNIQCMRTLLNLAHCHGAVLGTSWQLVLATLQHLVWILGLKPSSGGALKPGRAVEGPSTVLTTAVMTDLPVISNILSRLFESSQYLDDVSLHHLINALCSLSLEAMDMAYGNNKEPSLFAVAKLLETGLVNMHRIEILWRPLTGHLLEVCQHPNSRMREWGAEALTSLIKAGLTFNHDPPLSQNQRLQLLLLNPLKEMSNINHPDIRLKQLECVLQILQSQGDSLGPGWPLVLGVMGAIRNDQGESLIRTAFQCLQLVVTDFLPTMPCTCLQIVVDVAGSFGLHNQELNISLTSIGLLWNISDYFFQRGETIEKELNKEEAAQQKQAEEKGVVLNRPFHPAPPFDCLWLCLYAKLGELCVDPRPAVRKSAGQTLFSTIGAHGTLLQHSTWHTVIWKVLFHLLDRVRESSTTADKEKIESGGGNILIHHSRDTAEKQWAETWVLTLAGVARIFNTRRYLLQPLGDFSRAWDVLLDHIQSAALSKNNEVSLAALKSFQEILQIVSPVRDSDKPETPPVVNVPVPVLIGPISGMSRPFVRTDSIGEKLGRYSSSEPPIVTDELEDLNLWWAAWNTWYRIGSESTKPPITFDKLTFIPSQPFLTALIQIFPALYQHIKTGFNMDDLQKLGVILHSAISVPISSDASPFILPSYTEAVLTSLQEAVLTALDVLQKAICVGPENMQIMYPAIFDQLLAFVEFSCKPPQYGQLETKHIANAKYNQIQLFAPAEWVALNYVPFAERSLEVVVDLYQKTACHKAVVNEKVLQNIIKTLRVPLSLKYSCPSESTWKLAVSSLLRVLSIGLPVARQHASSGKFDSMWPELANTFEDFLFTKSIPPDNLSIQEFQRNENIDVEVVQLISNEILPYANFIPKEFVGQIMTMLNKGSIHSQSSSFTEAEIDIRLREEFSKMCFETLLQFSFSNKVTTPQEGYISRMALSVLLKRSQDVLHRYIEDERLSGKCPLPRQQVTEIIFVLKAVSTLIDSLKKTQPENACISLFGIPPYF

SEQ ID NO: 20318 - protein, 169 aa, Homo sapiens
MLLFVEQVASKGTGLNPNAKVWQEIAPGNTDATPVTHGTESSWHEIAATSGAHPEGNAELSEDICKEYEVMYSSSCETTRNTTGIEESTDGMILGPEDLSYQIYDVSESNSAVSTEDLKECLKKQLEFCFSRENLSKDLYLISQMDSDQFIPIWTVANMEEIKKLTTDP

SEQ ID NO: 20319 - protein, 344 aa, Homo sapiens
MLLSVTSRPGISTFGYNRNNKKPYVSLAQQMAPPSPSNSTPNSSSGSNGNDQLSKTNLYIRGLQPGTTDQDLVKLCQPYGKIVSTKAILDKTTNKCKGYGFVDFDSPSAAQKAVTALKASGVQAQMAKQQEQDPTNLYISNLPLSMDEQELEGMLKPFGQVISTRILRDTSGTSRGVGFARMESTEKCEAIITHFNGKYIKTPPGVPAPSDPLLCKFADGGPKKRQNQGKFVQNGRAWPRNADMGVMALTYDPTTALQNGFYPAPYNITPNRMLAQSALSPYLSSPVSSYQYMPTAAAMQGAYISQYTPVPSSSVSVEESSGQQNQVAVDAPSEHGVYSFQFNK

SEQ ID NO: 20320 - protein, 634 aa, Homo sapiens
YSFNIPLEERSDMFTWDPYGPWEGCTKMCQGLQRRNITCIHKSDHSVVSDKECDHLPLPSFVTQSCNTDCELRWHVIGKSECSSQCGQGYRTLDIHCMKYSIHEGQTVQVDDHYCGDQLKPPTQELCHGNCVFTRWHYSEWSQCSRSCGGGERSRESYCMNNFGHRLADNECQELSRVTRENCNEFSCPSWAASEWSECLVTCGKGTKQRQVWCQLNVDHLSDGFCNSSTKPESLSPCELHTCASWQVGPWGPCTTTCGHGYQMRDVKCVNELASAVLEDTECHEASRPSDRQCSVSCGRGTQARYVSCRDALDRIADESYCAHLPRPAEIWDCFTPCGEWQAGDWSPCSASCGHGKTTRQVLCMNYHQPIDENYCDPEVRPLMEQECSLAACPPAHSHFPSSPVQPSYYLSTNLPLTQKLEDNENQVVHPSVRGNQWRTGPWGSCSSSCSGGLQHRAVVCQDENGQSASYCDAASKPPELQQCGPGPCPQWNYGNWGECSQTCGGGIKSRLVICQFPNGQILEDHNCEIVNKPPSVIQCHMHACPADVSWHQEPWTSEDLKVKLLPQRTIILWELMKNIFCHGKHSHMYLINVVTDHLLYPRHCDPETIETYFLSLWSLQFTWGDLKYYKNSL

SEQ ID NO: 20321 - protein, 482 aa, Homo sapiens
MARKLSVLEVLLIIFCLIVVTIDILLLLLVLEETSDTSFTPECPEIPQSERIDCTPDQEVTEDICRWQYKCCWSPVADANVPRCFFPWNWGYEASNGHTNTSTGFTAQLKRLPSPSLFGNDVATTLFTAEYQTSNRFHFKITDFNNIRYEVSHENINLVDGIADASNLSYYVEVTDKPFSIKIMRTSNRRVLLDTSIGPLQFAQQYLQLSFRLPSANVYGLGEHVHQQYRHNMTWKTWPIFTRDATPTEGMINLYGAHTFFLCLEDARGSSFGVFLMNSNAMEVTLQPAPAITYRTIGGILDFYVFLGNTPEQVVQEYLELVGRPFFPPYWSLGFQLSRRDYGGINKLKEVVSRNRLAEIPYDVQYSDIDYMDGKKDFTVDEVAYSGLPDFVKELHDNGQKYLIIMNPGISKNSNYEPYNNGSLKRVWILGSNGFAVGEGYPGPTVFPDYTNPVCTEWWTDQVAKFHDHLEFDGVWIVSYYS

SEQ ID NO: 20322 - protein, 331 aa, Homo sapiens
METVISSDSSPAVENEHPQETPESNNSVYTSFMKSHRCYDLIPTSSKLVVFDTSLQVKKAFFALVTNGVRAAPLWDSKKQSFVGMLTITDFINILHRYYKSALVQIYELEEHKIETWREVYLQDSFKPLVCISPNASLFDAVSSLIRNKIHRLPVIDPESGNTLYILTHKRILKFLKLFITEFPKPEFMSKSLEELQIGTYANIAMVRTTTPVYVALGIFVQHRVSALPVVDEKGRVVDIYSKFDVINLAAEKTYNNLDVSVTKALQHRSHYFEGVLKCYLHETLETIINRLVEAEVHRLVVVDENDVVKGIVSLSDILQALVLTGGEKKP

SEQ ID NO: 20323 - protein, 543 aa, Homo sapiens
MSRQLNIKSSGDKGNFSVHSAVVPRKAVGSLASYCAAGRGAGAGFGSRSLYSLGGNRRISFNVAGGGVRAGGYGFRPGSGYGGGRASGFAGSMFGSVALGPACLSVCPPGGIHQVTVNKSLLAPLNVELDPEIQKVRAQEREQIKVLNDKFASFIDKVRFLEQQNQVLETKWELLQQLDLNNCKKNLEPILEGYISNLRKQLETLSGDRVRLDSELRSMRDLVEDYKKRYEVEINRRTTAENEFVVLKKDADAAYAVKVELQAKVDSLDKEIKFLKCLYDAEIAQIQTHASETSVILSMDNNRDLDLDSIIAEVRMHYEEIALKSKAEAEALYQTKIQELQLAASRHGDDLKHTRSEMVELNRLIQRIRCEIGNVKKQIFSVSNEPAPCPLWRASLETAIADAEQRGDNALKDAQAKLDELEGALHQAKEELARMLREYQELMSLKLALDMEIATYRKLLEGEECRMSGENPSSVSISVISSSSYSYHHPSSAGVDLGASAVAGSSGSTQSGQTKTTEARGGDLKDTQGKSTPASIPARKATR

SEQ ID NO: 20324 - protein, 631 aa, Homo sapiens
MSKRLRSSEVCADCSGPDPSWASVNRGTFLCDECCSVHRSLGRHISQVRHLKHTPWPPTLLQMVETLYNNGANSIWEHSLLDPASIMSGRRKANPQDKVHPNKAEFIRAKYQMLAFVHRLPCRDDDSVTAKDLSKQLHSSVRTGNLETCLRLLSLGAQANFFHPEKGNTPLHVASKAGQILQAELLAVYGADPGTQDSSGKTPVDYARQGGHHELAERLVEIQYELTDRLAFYLCGRKPDHKNGQHFIIPQMADSSLDLSELAKAAKKKLQSLSNHLFEELAMDVYDEVDRRETDAVWLATQNHSALVTETTVVPFLPVNPEYSSTRNQGRQKLARFNAHEFATLVIDILSDAKRRQQGSSLSGSKDNVELILKTINNQHSVESQDNDQPDYDSVASDEDTDLETTASKTNRQKSLDSDLSDGPVTVQEFMEVKNALVASEAKIQQLMKASRLEKQNSTPESDYDNTPNDMEPDGMGSSRKGRQRSMVWPGDGLVPDTAEPHVAPSPTLPSTEDVIRKTEQITKNIQELLRAAQENKHDSYIPCSERIHVAVTEMAALFPKKPKSDMVRTSLRLLTSSAYRLQSECKKTLPGDPGSPTDVQLVTQQVIQCAYDIAKAAKQLVTITTKENNN

SEQ ID NO: 20325 - protein, 1027 aa, Homo sapiens
MGNLESAEGVPGEPPSVPLLLPPGKMPMPEPCELEERFALVLSSMNLPPDKARLLRQYDNEKKWDLICDQERFQVKNPPHTYIQKLQSFLDPSVTRKKFRRRVQESTKVLRELEISLRTNHIGWVREFLNDENKGLDVLVDYLSFAQCSVMFDFEGLESGDDGAFDKLRSWSRSIEDLQPPSALSAPFTNSLARSARQSVLRYSTLPGRRALKNSRLVSQKDDVHVCILCLRAIMNYQYGFNLVMSHPHAVNEIALSLNNKNPRTKALVLELLAAVCLVRGGHEIILAAFDNFKEVCKELHRFEKLMEYFRNEDSNIDFMVACMQFINIVVHSVEDMNFRVHLQYEFTKLGLEEFLQKSRHTESEKLQVQIQAYLDNVFDVGGLLEDAETKNVALEKVEELEEHVSHLTEKLLDLENENMMRVAELEKQLLQREKELESIKETYENTSHQVHTLRRLIKEKEEAFQRRCHLEPNVRGLESVDSEALARVGPAELSEGMPPSDLDLLAPAPPPEEVLPLPPPPAPPLPPPPPPLPDKCPPAPPLPGAAPSVVLTVGLSAIRIKKPIKTKFRLPVFNWTALKPNQISGTVFSELDDEKILEDLDLDKFEELFKTKAQGPALDLICSKNKTAQKAASKVTLLEANRAKNLAITLRKAGRSAEEICRAIHTFDLQTLPVDFVECLMRFLPTEAEVKLLRQYERERQPLEELAAEDRFMLLFSKVERLTQRMAGMAFLGNFQDNLQMLTPQLNAIIAASASVKSSQKLKQMLEIILALGNYMNSSKRGAVYGFKLQSLDLLLDTKSTDRKMTLLHFIALTVKEKYPDLANFWHELHFVEKAAAVSLENVLLDVKELGRGMELIRRECSIHDNSVLRNFLSTNEGKLDKLQRDAKTAEAYNAVVRYFGESPKTTPPSVFFPVFVRFIRSYKEAEQENEARKKQEEVMREKQLAQEAKKLDAKTPSQRNKWQQQELIAELRRRQAKEHRPVYEGKDGTIEDIITVLKSVPFTARTAKRGSRFFCDAAHHDESNC

SEQ ID NO: 20326 - protein, 868 aa, Homo sapiens
MTTRQATKDPLLRGVSPTPSKIPVRSQKRTPFPTVTSCAVDQENQDPRRWVQKPPLNIQRPLVDSAGPRPKARHQAETSQRLVGISQPRNPLEELRPSPRGQNVGPGPPAQTEAPGTIEFVADPAALATILSGEGVKSCHLGRQPSLAKRVLVRGSQGGTTQRVQGVRASAYLAPRTPTHRLDPARASCFSRLEGPGPRGRTLCPQRLQALISPSGPSFHPSTRPSFQELRRETAGSSRTSVSQASGLLLETPVQPAFSLPKGEREVVTHSDEGGVASLGLAQRVPLRENREMSHTRDSHDSHLMPSPAPVAQPLPGHVVPCPSPFGRAQRVPSPGPPTLTSYSVLRRLTVQPKTRFTPMPSTPRVQQAQWLRGVSPQSCSEDPALPWEQVAVRLFDQESCIRSLEGSGKPPVATPSGPHSNRTPSLQEVKIQRIGILQQLLRQEVEGLVGGQCVPLNGGSSLDMVELQPLLTEISRTLNATEHNSGTSHLPGLLKHSGLPKPCLPEECGEPQPCPPAEPGPPEAFCRSEPEIPEPSLQEQLEVPEPYPPAEPRPLESCCRSEPEIPESSRQEQLEVPEPCPPAEPRPLESYCRIEPEIPESSRQEQLEVPEPCPPAEPGPLQPSTQGQSGPPGPCPRVELGASEPCTLEHRSLESSLPPCCSQWAPATTSLIFSSQHPLCASPPICSLQSLRPPAGQAGKELAGKECEHKRSSPHCELHTCPAPTPGNLMLPHLPPWPSLALPQEEGRGCTSSPVLLIGLAVGGGGGEDSTWWKYRTPDLPLNFPCPSGLSNLAPRTLALRERLKSCLTAIHCFHEARLDDECAFYTSRAPPSGPTRVCTNPVATLLEWQDALCFIPVGSAAPQGSP

SEQ ID NO: 20327 - protein, 331 aa, Homo sapiens
MRANDALQVLGLLFSLARGSEVGNSQAVCPGTLNGLSVTGDAENQYQTLYKLYERCEVVMGNLEIVLTGHNADLSFLQWIREVTGYVLVAMNEFSTLPLPNLRVVRGTQVYDGKFAIFVMLNYNTNSSHALRQLRLTQLTEILSGGVYIEKNDKLCHMDTIDWRDIVRDRDAEIVVKDNGRSCPPCHEVCKGRCWGPGSEDCQTLTKTICAPQCNGHCFGPNPNQCCHDECAGGCSGPQDTDCFACRHFNDSGACVPRCPQPLVYNKLTFQLEPNPHTKYQYGGVCVASCPHNFVVDQTSCVRACPPDKMEVDKNGLKMCEPCGGLCPKAF

SEQ ID NO: 20328 - protein, 332 aa, Homo sapiens
MKHSRDPNAVTVSWPSARSLLDGYIISISSESLMREEILPSTKRTFTFNSLSPGTDFLISIMTNKGLKRSHPTVLMVSTYPDPSDLLIWGQEENTICLSWKLSEGGFEKFQISYCMPSRQEKLIKVIVYGNKAKVKKLTLGMDYMFQVKKVKGKGYSVSVMKKVPIKPEQPEKLRAFNISTHSFSLHWSLPSGHVERYQVDLVPDSGFVTIRDLGGGEYQVDVSNVVPGTRYDITISSISTTYTSPVTRIVTTNVTKPGPPVFLAGERVGSAGILLSWNTPPNPNGRIISYIVKYKEVCPWMQTVYTQVRSKPDSLEVLLTNLNPGTTYEIK

SEQ ID NO: 20329 - protein, 107 aa, Homo sapiens
VIHLFRITQSLMKMKAQEVELALEEVEKAGEEQAKFENQLKTKVMKLENELEMAQQSAGGRDTRFLRNEICQLEKQLEQKDRELEDMEKELEKEKKVNEQVKHFFFP

SEQ ID NO: 20330 - protein, 153 aa, Homo sapiens
MAPGSRGERSSFRSRRGPGVPSPQPDVTMLSRLLKEHQAKQNERKELQEKRRREAITAATCLTEALVDHLNVGVAQAYMNQRKLDHEVKTLQVQAAQFAKQTGQWIGMVENFNQALKEIGDVENWARSIELDMRTIATALEYVYKGQLQSAPS

SEQ ID NO: 20331 - protein, 1522 aa, Homo sapiens
MQRGKPCRALPTLKCQTFCQRHGLMFEVVDLRWGIRNIEATDHLTTELCLEEVDRCWKTSIGPAFVALIGDQYGPCLIPSRIDEKEWEVLRDHLTARPSDLELVARYFQRDENAFPPTYVLQAPGTGEACEPEEATLTSVLRSGAQEARRLGLITQEQWQHYHRSVIEWEIERSLLSSEDREQGATVFLREIQDLHKHILEDCALRMVDRLADGCLDADAQNLLSSLKSHITDMHPGVLKTHRLPWSRDLVNPKNKTHACYLKELGEQFVVRANHQVLTRLRELDTAGQELAWLYQEIRHHLWQSSEVIQTFCGRQELLARLGQQLRHDDSKQHTPLVLFGPPGIGKTALMCKLAEQMPRLLGHKTVTVLRLLGTSQMSSDARGLLKSICFQVCLAYGLPLPPAQVLDAHTRVVQFFHTLLHTVSCRNFESLVLLLDAMDDLDSVRHARRVPWLPLNCPPRVHLILSACSGALGVLDTLQRVLLDPEAYWEVKPLSGNQGQQMIQLLLAAARRTLSPVHTDLLWASLPECGNPGRLRLAFEEARKWASFTVPVPLATTAEEATHQLCTRLEQTHGQLLVAHVLGYIVSSRHGLSEAELKDVLSLDDEVLQDVYRDWTPPSKELLRFPPLLWVRLRRDLGYYLARRPVDGFTLLAIAHRQLVEVVRERYLSGSERAKRHGVLADFFSGTWSQGTKKLITLPLVGKPLNLDRKVAPQPLWFSHTVANLRKLKELPYHLLHSGRLEELKQEVLGSMSWISCRGISGGIEDLLDDFDLCAPHLDSPEVGLVREALQLCRPAVELRGMERSLLYTELLARLHFFATSHPALVGQLCQQAQSWFQLCAHPVLVPLGGFLQPPGGPLRATLSGCHKGITAMAWGVEEKLLVIGTQDGIMAVWDMEEQHVIHMLTGHTGEVRCVKIFAKGTLANSASKDYTLHLWNLLSGQEKFTIWDGGSKNPAEPQIWNLHVDEAHKVVYSASGSKINAWNLETAEPVFHILGDASDPWMCMAVLASQATLLTVSRDGVVSLWSSATGKLQGKQHMSSIKEETPTCAVSVQKQGKLVTGFSNGSISLVSSKGDRLLEKLPDAVRFLVVSEDESLLAAGFGRSVRIFLADSRGFRRFMAMDLEHEDMVETAVFGTENNLIITGSLDALIQVWDLSDAHRSRVPAPFLDRTGLTAVSHNGSYVYFPKIGDKNKVTIWDLAEGEEQDSLDTSSEIRCLEVAEQRKLLFTGLVSGVVLVFPLNSRQDVICIPPPEARKAINCMSLSKCEDRLAIAYDNIVLVLDITSGDPCPVIDGPRYTFYTQLPETLSSVAILTDYRVVYSMTNGDLFLYECATSKAFPLETHRSRVACVEVSHKEQLVVSGSEDALLCLWDLQARKWKFEMSYTSSYCRGVQCACFSKDDKYVYVGLKDRSILVWSVLDGTLLTVQFVHAVVNRIIPTTSGFIAPTRHGYLIRENFQCLSAKASPQDPLKNFKKAMWMVKSRQREELVAAAGAPQDLESESAQGNETKSNKCSQVCLIV

SEQ ID NO: 20332 - protein, 1697 aa, Homo sapiens
MSLLCVGVKKAKFDGAQEKFNTYVTLKVQNVKSTTIAVRGSQPSWEQDFMFEINRLDLGLTVEVWNKGLIWDTMVGTVWIPLRTIRQSNEEGPGEWLTLDSQVIMADSEICGTKDPTFHRILLDTRFELPLDIPEEEARYWAKKLEQLNAMRDQDEYSFQDEQDKPLPVPSNQCCNWNYFGWGEQHNDDPDSAVDDRDSDYRSETSNSIPPPYYTTSQPNASVHQYSVRPPPLGSRESYSDSMHSYEEFSEPQALSPTGSSRYASSGELSQGSSQLSEDFDPDEHSLQGSDMEDERDRDSYHSCHSSVSYHKDSPRWDQDEEELEEDLEDFLEEEELPEDEEELEEEEEEVPDDLGSYAQREDVAVAEPKDFKRISLPPAAPGKEDKAPVAPTEAPDMAKVAPKPATPDKVPAAEQIPEAEPPKDEESFRPREDEEGQEGQDSMSRAKANWLRAFNKVRMQLQEARGEGEMSKSLWFKGGPGGGLIIIDSMPDIRKRKPIPLVSDLAMSLVQSRKAGITSALASSTLNNEELKNHVYKKTLQALIYPISCTTPHNFEVWTATTPTYCYECEGLLWGIARQGMRCTECGVKCHEKCQDLLNADCLQRAAEKSSKHGAEDRTQNIIMVLKDRMKIRERNKPEIFELIQEIFAVTKTAHTQQMKAVKQSVLDGTSKWSAKISITVVCAQGLQAKDKTGSSDPYVTVQVGKTKKRTKTIYGNLNPVWEENFHFECHNSSDRIKVRVWDEDDDIKSRVKQRFKRESDDFLGQTIIEVRTLSGEMDVWYNLDKRTDKSAVSGAIRLHISVEIKGEEKVAPYHVQYTCLHENLFHFVTDVQNNGVVKIPDAKGDDAWKVYYDETAQEIVDEFAMRYGVESIYQAMTHFACLSSKYMCPGVPAVMSTLLANINAYYAHTTASTNVSASDRFAASNFGKERFVKLLDQLHNSLRIDLSMYRNNFPASSPERLQDLKSTVDLLTSITFFRMKVQELQSPPRASQVVKDCVKACLNSTYEYIFNNCHELYSREYQTDPAKKGEVLPEEQGPSIKNLDFWSKLITLIVSIIEEDKNSYTPCLNQFPQELNVGKISAEVMWNLFAQDMKYAMEEHDKHRLCKSADYMNLHFKVKWLYNEYVTELPAFKDRVPEYPAWFEPFVIQWLDENEEVSRDFLHGALERDKKDGFQQTSEHALFSCSVVDVFSQLNQSFEIIKKLECPDPQIVGHYMRRFAKTISNVLLQYADIISKDFASYCSKEKEKVPCILMNNTQQLRVQLEKMFEAMGGKELDAEASDILKELQVKLNNVLDELSRVFATSFQPHIEECVKQMGDILSQVKGTGNVPASACSSVAQDADNVLQPIMDLLDSNLTLFAKICEKTVLKRVLKELWKLVMNTMEKTIVLPPLTDQTGTQMIFNAAKELGQLSKLKDHMVREEAKSLTPKQCAVVELALDTIKQYFHAGGVGLKKTFLEKSPDLQSLRYALSLYTQATDLLIKTFVQTQSAQVHGGKGTRFTLSEDIYPEKGLGVEDPVGEVSVHVELFTHPGTGEHKVTVKVVAANDLKWQTSGIFRPFIEVNIIGPQLSDKKRKFATKSKNNSWAPKYNESFQFTLSADAGPECYELQVCVKDYCFAREDRTVGLAVLQLRELAQRGSAACWLPLGRRIHMDDTGLTVLRILSQRSNDEVAKEFVKLKSDTRSAEEGGAAPAP

SEQ ID NO: 20333 - protein, 371 aa, Homo sapiens
MEDEDYNTSISYGDEYPDYLDSIVVLEDLSPLEARVTRIFLVVVYSIVCFLGILGNGLVIIIATFKMKKTVNMVWFLNLAVADFLFNVFLPIHITYAAMDYHWVFGTAMCKISNFLLIHNMFTSVFLLTIISSDRCISVLLPVWSQNHRSVRLAYMACMVIWVLAFFLSSPSLVFRDTANLHGKISCFNNFSLSTPGSSSWPTHSQMDPVGYSRHMVVTVTRFLCGFLVPVLIITACYLTIVCKLQRNRLAKTKKPFKIIVTIIITFFLCWCPYHTLNLLELHHTAMPGSVFSLGLPLATALAIANSCMNPILYVFMGQDFKKFKVALFSRLVNALSEDTGHSSYPSHRSFTKMSSMNERTSMNERETGML

SEQ ID NO: 20334 - protein, 222 aa, Homo sapiens
AAAAVPPAAAANHHHHHHHALHEAPKFTVETLEHTVNNDSEIWGLLQPYQHLICGKNASGDLVSRAMHHLQPLNAKHHGNGTPLHHKQGALYWEPEALYTLCYFMHCPQMEWENPNVEPSKVNLQVERPFLVLPPLMEWIRVAVAHAGHRRSFSMDSDDVRQAARLLLPGVDCEPRQLRADDCFCASRKLDAVAIEAKFKQDLGFRMLNCGRTDLVKQAVSL

SEQ ID NO: 20335 - protein, 830 aa, Homo sapiens
MEPSSCRKTSSGLRTPTDYTLCRAIKTNQDLLPETPWTHIFYNDFWGTLLTHSGSHKSYRPLCTLSFRLNHAIGGLNPWSYHLVNVLLHAAVTGLFTSFSKILLGDGYWTFMAGLMFASHPIHTEAVAGIVGRADVGASLFFLLSLLCYIKHCSTRGYSARTWGWFLGSGLCAGCSMLWKEQGVTVLAVSAVYDVFVFHRLKIKQILPTIYKRKNLSLFLSISLLIFWGSSLLGARLYWMGNKPPSFSNSDNPAADSDSLLTRTLTFFYLPTKNLWLLLCPDTLSFDWSMDAVPLLKTVCDWRNLHTVAFYTGLLLLAYYGLKSPSVDRECNGKTVTNGKQNANGHSCLSDVEYQNSETKSSFASKVENGIKNDVSQRTQLPSTENIVVLSLSLLIIPFVPATNLFFYVGFVIAERVLYIPSMGFCLLITVGARALYVKVQKRFLKSLIFYATATLIVFYGLKTAIRNGDWQNEEMLYRSGIKVNPAKAWGNLGNVLKSQSKISEAESAYRNALYYRSNMADMLYNLGLLLQENSRFAEALHYYKLAIGSRPTLASAYLNTGIILMNQGRTEEARRTFLKCSEIPDENLKDPHAHKSSVTSCLYNLGKLYHEQGHYEEALSVYKEAIQKMPRQFAPQSLYNMMGEAYMRLSKLPEAEHWYMESLRSKTDHIPAHLTYGKLLALTGRKSEAEKLFLKAIELDPTKGNCYMHYGQFLLEEARLIEAAEMAKKAAELDSTEFDVVFNAAHMLRQASLNEAAEKYYDLAARLRPNYPAALMNLGAILHLNGRLQKAEANYLRALQLKPDDVITQSNLRKLWNIMEKQGLKTSKT

SEQ ID NO: 20336 - protein, 94 aa, Homo sapiens
AMQDLESTRPDSPALFVDKPTEGERTERLIKAKLRSIMMSQDLENVTSKEIRNELEKQMNCNLKELKEFIDNEMLLILGQMDKPSLIFDHLYLG

SEQ ID NO: 20337 - protein, 152 aa, Homo sapiens
MTPEFDEEVVFEDLGHTDFEICSSLSPKTEKCTTEGQQKPPTRVLPKQGILLKVAETIKSWIFFSQCNKKDDLLHKLDIGFRLDSLHTILQQEVLLQEDVELIELLDPSILSAGQSQQQENGHLPTLCSLATPNIWDLSMLFAFISLLVMLP

SEQ ID NO: 20338 - protein, 1154 aa, Homo sapiens
MPEPTKKEENEVPAPAPPPEEPSKEKEAGTTPAKDEEEVSPPSALPPDWTLVETPPGEEQAKQNANSQLSILFIEKPQGGTVKVGEDITFIAKVKAEDLLRKPTIKWFKGKWMDLASKAGKHLQLKETFERHSRVYTFEMQIIKAKDNFAGNYRCEVTYKDKFDSCSFDLEVHESTGTTPNIDIRSAFKRSGEGQEDAGELDFSGLLKRREVKQQEEEPQVDVWELLKNAKPSEYEKIAFQYGITDLRGMLKRLKRMRREEKKSAAFAKILDPAYQVDKGGRVRFVVELADPKLEVKWYKNGQEIRPSTKYIFEHKGCQRILFINNCQMTDDSEYYVTAGDEKCSTELFVREPPIMVTKQLEDTTAYCGERVELECEVSEDDANVKWFKNGEEIIPGPKSRYRIRVEGKKHILIIEGATKADAAEYSVMTTGGQSSAKLSVDLKPLKILTPLTDQTVNLGKEICLKCEISENIPGKWTKNGLPVQESDRLKVVHKGRIHKLVIANALTEDEGDYVFAPDAYNVTLPAKVHVIDPPKIILDGLDADNTVTVIAGNKLRLEIPISGEPPPKAMWSRGDKAIMEGSGRIRTESYPDSSTLVIDIAERDDSGVYHINLKNEAGEAHASIKVKVVDFPDPPVAPTVTEVGDDWCIMNWEPPAYDGGSPILGYFIERKKKQSSRWMRLNFDLCKETTFEPKKMIEGVAYEVRIFAVNAIGISKPSMPSRPFVPLAVTSPPTLLTVDSVTDTTVTMRWRPPDHIGAAGLDGYVLEYCFEGSTSAKQSDENGEAAYDLPAEDWIVANKDLIDKTKFTITGLPTDAKIFVRVKAVNAAGASEPKYYSQPILVKEIIEPPKIRIPRHLKQTYIRRVGEAVNLVIPFQGKPRPELTWKKDGAEIDKNQINIRNSETDTIIFIRKAERSHSGKYDLQVKVDKFVETASIDIQIIDRPGPPQIVKIEDVWGENVALTWTPPKDDGNAAITGYTIQKADKKSMEWFTVIEHYHRTSATITELVIGNEYYFRVFSENMCGLSEDATMTKESAVIARDGKIYKNPVYEDFDFSEAPMFTQPLVNTYAIAGYNATLNCSVRGNPKPKITWMKNKVAIVDDPRYRMFSNQGVCTLEIRKPSPYDGGTYCCKAVNDLGTVEIECKLEVKVIAQ

SEQ ID NO: 20339 - protein, 202 aa, Homo sapiens
MSILKVKKAFFALVTNGVRAAPLWDSKKQSFVGMLTITDFINILHRYYKSALVQIYELEEHKIETWREVYLQDSFKPLVCISPNARSLSSPSQSSCPSLWKSYRLAPMPILLWFALPPPSMWLWGFLYSIESQPCQWWMRRNLAAEKTYNNLDVSVTKALQHRSHYFEGVLKCYLHETLETIINRLVEAEVHRLVVVDENDV

SEQ ID NO: 20340 - protein, 161 aa, Homo sapiens
MFLISSSVHGSDEHGRLLRRTLMRYVNLTSLLIFRSVSTAVYKRFPTMDHVVEAGFMTTDERKLFNHLKSPHLKYWVPFIWFGNLATKARNEGRIRDSVDLQSLMTEMNRYRSWCSLLFGYDWVGIPLVYTQVAEQLINPFGEDDDDFETNWCIDRNLQVS

SEQ ID NO: 20341 - protein, 213 aa, Homo sapiens
MATETVELHKLKLAELKQECLARGLETKGIKQDLIHRLQAYLEEHAEEEANEEDVLGDETEEEETKPIELPVKEEEPPEKTVDVAAEKKVVKITSEIPQTERMQKRAERFNVPVSLESKKAARAARFGISSVPTKGLSSDNKPMVNLDKLKERAQRFGLNVSSISRKSEDDEKLKKRKERFGIVTSSAGTGTTEDTEVKIYLERFIDLEGKLE

SEQ ID NO: 20342 - protein, 397 aa, Homo sapiens
MNCEREQLRGNQEAAAAPDTMAQPYASAQFAPPQNGIPAEYTAPHPHPAPEYTGQTTVPEHTLNLYPPAQTHSEQSPADTSAQTVSGTATQTDDAAPTDGQPQTQPSENTENKSQPKRLHVSNIPFRFRDPDLRQMFGQFGKILDVEIIFNERGSKGFGFVTFENSADADRAREKLHGTVVEGRKIEVNNATARVMTNKKTVNPYTNGWKLNPVVGAVYSPEFYAGTVLLCQANQEGSSMYSAPSSLVYTSAMPGFPYPAATAAAAYRGAHLRGRGRTVYNTFRAAAPPPPIPAYGGVVYQDGFYGADIYGGYAAYRYAQPTPATAAAYSDSYGRVYAADPYHHALAPAPTYGVGAMNAFAPLTDAKTRSHADDVGLVLSSLQASIYRGGYNRFAPY

SEQ ID NO: 20343 - protein, 107 aa, Homo sapiens
MHWDPTLCLCSAGREGKALSLCNYFESQNVDFRGKKVIELGAGTGIVGILAALQGAYGLVRETEDDVIEQELWRGMRGACGHALSMSTMTPWESIKGSSVRGGCYHH

SEQ ID NO: 20344 - protein, 296 aa, Homo sapiens
MDLVLKRCLLHLAVIGALLAVGATKVPRNQDWLGVSRQLRTKAWNRQLYPEWTEAQRLDCWRGGQVSLKVSNDGPTLIGANASFSIALNFPGSQKVLPDGQVIWVNNTIINGSQVWGGQPVYPQETDDACIFPDGGPCPSGSWSQKRSFVYVWKTWVPGTTDGHRPTAEAPNTTAGQVPTTEVVGTTPGQAPTAEPSGTTSVQVPTTEVISTAPVQMPTAESTAAQVTTTEWVETTARELPIPEPEGPDASSIMSTESITGSLGPLLDGTATLRLVKRQVPLDCVLYRYGSFSVTL

SEQ ID NO: 20345 - protein, 370 aa, Homo sapiens
MNCEREQLRGNQEAAAAPDTMAQPYASAQFAPPQNGIPAEYTAPHPHPAPEYTGQTTVPEHTLNLYPPAQTHSEQSPADTSAQTVSGTATQTDDAAPTDGQPQTQPSENTENKSQPKRLHVSNIPFRFRDPDLRQMFGQFGKILDVEIIFNERGSKGFGFVTFENSADADRAREKLHGTVVEGRKIEVNNATARVMTNKKTVNPYTNGWKLNPVVGAVYSPEFYAVPGFPYPAATAAAAYRGAHLRGRGRTVYNTFRAAAPPPPIPAYGGVVYQDGFYGADIYGGYAAYRYAQPTPATAAAYSDSYGRVYAADPYHHALAPAPTYGVGAMNAFAPLTDAKTRSHADDVGLVLSSLQASIYRGGYNRFAPY

SEQ ID NO: 20346 - protein, 974 aa, Homo sapiens
IAIKQKLIDELENSQKRLQTLKKQYEEKLMMLQHKIRDTQLERDQVLQNLGSVESYSEEKAKKVRSEYEKKLQAMNKELQRLQAAQKEHARLLKNQSQYEKQLKKLQQDVMEMKKTKVRLMKQMKEEQEKARLTESRRNREIAQLKKDQRKRDHQLRLLEAQKRNQEVVLRRKTEEVTALRRQVRPMSDKVAGKVTRKLSSSDAPAQDTGSSAAAVETDASRTGAQQKMRIPVARVQALPTPATNGNRKKYQRKGLTGRVFISKTARMKWQLLERRVTDIIMQKMTISNMEADMNRLLKQREELTKRREKLSKRREKIVKENGEGDKNVANINEEMESLTANIDYINDSISDCQANIMQMEEAKEEGETLDVTAVINACTLTEARYLLDHFLSMGINKGLQAAQKEAQIKVLEGRLKQTEITSATQNQLLFHMLKEKAELNPELDALLGHALQDLDSVPLENVEDSTDEDAPLNSPGSEGSTLSSDLMKLCGEVKPKNKARRRTTTQMELLYADSSELASDTSTGDASLPGPLTPVAEGQEIGMNTETSGTSAREKELSPPPGLPSKIGSISRQSSLSEKKIPEPSPVTRRKAYEKAEKSKAKEQKQSDESDSSLSEVHRGIINPFPASKGIRAFPLQCIHIAEGHTKAVLCVDSTDDLLFTGSKDRTCKVWNLVTGQEIMSLGGHPNNVVSVKYCNYTSLVFTVSTSYIKVWDIRDSAKCIRTLTSSGQVTLGDACSASTSRTVAIPSGENQINQIALNPTGTFLYAASGNAVRMWDLKRFQSTGKLTGHLGPVMCLTVDQISSGQDLIITGSKDHYIKMFDVTEGALGTVSPTHNFEPPHYDGIEALTIQGDNLFSGSRDNGIKKWDLTQKDLLQQVPNAHKDWVCALGVVPDHPVLLSGCRGGILKVWNMDTFMPVGEMKGHDSPINAICVNSTHIFTAADDRTVRIWKARNLQDGQISDTGDLGEDIASN

SEQ ID NO: 20347 - protein, 208 aa, Homo sapiens
MDVCATSRTDREIKVTLVFEHVDQDLRTYLDKAPPPGLPAETIKDLMRQFLRGLDFLHANCIVHRDLKPENILVTSGGTVKLADFGLARIYSYQMALTPVVVTLWYRAPEVLLQSTYATPVDMWSVGCIFAEMFRRKPLFCGNSEADQLGKIFDLIGLPPEDDWPRDVSLPRGAFPPRGPRPVQSVVPEMEESGAQLLLEMLTFNPHK

SEQ ID NO: 20348 - protein, 568 aa, Homo sapiens
MLIDERLRCEHHKANYQTLKAEHTRLQNEHVKLQNELKHLFNEKQTQQEKLQLLLEELRGELVEKTKDLEEMKLQILTPQKLELLRAQIQQELETPMRERFRNLDEEVEKYRAVYNKLRYEHTFLKSEFEHQKEEYARILDEGKIKYESEIARLEEDKEELRNQLLNVDLTKDSKRVEQLAREKVYLCQKLKGLEAEVAELKAEKENSEAQVENAQRIQVRQLAEMQATVRSLEAEKQSANLRAERLEKELQSSSEQNTFLINKLHKAEREINTLSSKVKELKHSNKLEITDIKLETARAKSELERERNKIQSELDGLQSDNEILKAAVEHHKVLLVEKDRELIRKVQAAKEEGYQKLVVLQDEKLELENRLADLEKMKVEHDVWRQSEKDQYEEKLRASQMAEEITRKELQSVRLKLQQQIVTIENAEKEKNENSDLKQQISSLQIQVTSLAQSENDLLNSNQMLKEMVERLKQECRNFRSQAEKAQLEAEKTLEEKQIQWLEEKHKLHERITDREEKYNQAKEKLQRAAIAQKKLEQDLELGCPSVTDTYRESVFPPPPLKRDLLK

SEQ ID NO: 20349 - protein, 207 aa, Homo sapiens
MSTVICMKQREEEFLLTIRPFANRMQKSPCYIPIVSSATLWDRSTPSAKHIPCYERTSVPCSRFINHMKNFSESPKFRSLHFLNFPVFPERTQNSMACKRLLHTCQYIVPRCSVSTVSFDEESYEEFRSSPAPSSETDEAPLIFTARGETEERARGAPKQAWNSSFLEQLVKKPNWAHSVNPVHLEAQGIHISRHTRPKGQPLSSPK

SEQ ID NO: 20350 - protein, 460 aa, Homo sapiens
MMWQCHLSAQDYRYYPVDGYSLLKRFPLHPLTGPRCPVQTVGQWLESIGLPQYENHLMANGFDNVQFMGSNVMEDQDLLEIGILNSGHRQRILQAIQLLPKMRPIGHDGYHPTSVAEWLDSIELGDYTKAFLINGYTSMDLLKKIWEVELINVLKINLIGHRKRILASLGDRLHDDPPQKPPRSITLREPSGNHTPPQLSPSLSQSTYTTGGSLDVPHIIMQGDARRRRNENYFDDIPRSKLERQMAQTGDWGEPSITLRPPNEATASTPVQYWQHHPEKLIFQSCDYKAFYLGSMLIKELRGTESTQDACAKMRANCQKSTEQMKKVPTIILSVSYKGVKFIDATNKNIIAEHEIRNISCAAQDPEDLSTFAYITKDLKSNHHYCHVFTAFDVNLAYEIILTLGQAFEVAYQLALQARKGGHSSTLPESFENKPSKPIPKPRVSIRKSVPFCFKADRPI

SEQ ID NO: 20351 - protein, 575 aa, Homo sapiens
MASATEDPVLERYFKGHKAAITSLDLSPNGKQLGAGRARELGSRRLSDLQKNTEDLSRPLYKKPPADSRALGEWGKASKLQLNEDELKQQEELIERYAINIYLSDRISLHRHIEDKRMYECKSQKFNYRTLPTTSVIIAFYNEAWSTLLRTIHSVLETSPAVLLKEIILVDDLSDRVYLKTQLETYISNLDRVRLIRTNKREGLVRARLIGATFATGDVLTFLDCHCECNSGWLEPLLERIGRDETAVVCPVIDTIDWNTFEFYMQIGEPMIGGFDWRLTFQWHSVPKQERDRRISRIDPIRSPTMAGGLFAVSKKYFQYLGTYDTGMEVWGGENLELSFRVWQCGGKLEIHPCSHVGHVFPKRAPYARPNFLQNTARAAEVWMDEYKEHFYNRNPPARKEAYGDISERKLLRERLRCKSFDWYLKNVFPNLHVPEDRPGWHGAIRSRGISSECLDYNSPDNNPTGANLSLFGCHGQGGNQFFEYTSNKEIRFNSVTELCAEVPEQKNYVGMQNCPKDGFPVPANIIWHFKEDGTIFHPHSGLCLSAYRTPEGRPDVQMRTCDALDKNQIWSFEK

SEQ ID NO: 20352 - protein, 1236 aa, Homo sapiens
MMCEVMPTINEDTPMSQRGSQSSGSDSDSHFEQLMVNMLDERDRLLDTLRETQESLSLAQQRLQDVIYDRDSLQRQLNSALPQDIESLTGGLAGSKGADPPEFAALTKELNACREQLLEKEEEISELKAERNNTRLLLEHLECLVSRHERSLRMTVVKRQAQSPSGVSSEVEVLKALKSLFEHHKALDEKVRERLRVSLERVSALEEELAAANQEIVALREQNVHIQRKMASSEGSTESEHLEGMEPGQKVHEKRLSNGSIDSTDETSQIVELQELLEKQNYEMAQMKERLAALSSRVGEVEQEAETARKDLIKTEEMNTKYQRDIREAMAQKEDMEERITTLEKRYLSAQRESTSIHDMNDKLENELANKEAILRQMEEKNRQLQERLELAEQKLQQTMRKAETLPEVEAELAQRIAALTKAEERHGNIEERMRHLEGQLEEKNQELQRARQREKMNEEHNKRLSDTVDRLLTESNERLQLHLKERMAALEEKNVLIQESETFRKNLEESLHDKERLAEEIEKLRSELDQLKMRTGSLIEPTIPRTHLDTSAELRYSVGSLVDSQSDYRTTKVIRRPRRGRMGVRRDEPKVKSLGDHEWNRTQQIGVLSSHPFESDTEMSDIDDDDRETIFSSMDLLSPSGHSDAQTLAMMLQEQLDAINKEIRLIQEEKESTELRAEEIENRVASVSLEGLNLARVHPGTSITASVTASSLASSSPPSGHSTPKLTPRSPAREMDRMGVMTLPSDLRKHRRKIAVVEEDGREDKATIKCETSPPPTPRALRMTHTLPSSYHNDARSSLSVSLEPESLGLGSANSSQDSLHKAPKKKGIKSSIGRLFGKKEKARLGQLRGFMETEAAAQESLGLGKLGTQAEKDRRLKKKHELLEEARRKGLPFAQWDGPTVVAWLELWLGMPAWYVAACRANVKSGAIMSALSDTEIQREIGISNPLHRLKLRLAIQEMVSLTSPSAPPTSRTKESEEGSWAQCPVFLQTLAYGDMNHEWIGNEWLPSLGLPQYRSYFMECLVDARMLDHLTKKDLRVHLKMVDSFHRTSLQYGIMCLKRLNYDRKELERRREASQHEIKDVLVWSNDRVIRWIQAIGLREYANNILESGVHGSLIALDENFDYSSLALLLQIPTQNTQARQILEREYNNLLALGTERRLDESDDKNFRRGSTWRRQFPPREVHGISMMPGSSETLPAGFRLTTTSGQSRKMTTDVASSRLQRLDNSTVRTYSC

SEQ ID NO: 20353 - protein, 979 aa, Homo sapiens
MSVCTLSVPVSSLSPGRRCNTFSDSGILGCVPINSNTDEEDVVEEKMVAEGVNKEAKQPAKKKRKKGLRIKGKRRRKKLILAKKFSKDLGSGRPVADAPALLASNDPEQDEESLFESNIEKQIYLPSTRAKTSIVWHFFHVDPQYTWRAICNLCEKSVSRGKPGSHLGTSTLQRHLQARHSPHWTRANKFGVASGEEDFTLDVSLSPSSGSNGSFEYIPTDPLDDNRMGKKHDKSASDALRAERGRFLIKSNIVKHALIPGTRAKTSAVWNFFYTDPQHISRAVCNICKRSVSRGRPGSHLGTSTLQRHLQATHPIHWAVANKDSGAVANGLDEAETERSDLLSDTLHGEKSTGSQDLTAEDLSDSDSDEPMLEVENRSESPIPVAEQGTLMRAQERETTCCGNPVSSHISQAIIQMIVEDMHPYNYFSTPAFQRFMQIVAPDYRLPSETYFFTKAVPQLYDCVREKIFLTLENVQSQKIHLTVDIWTHDPSTDYFIVTVHWVSLETASFLNNGRIPDFRKWAVLCVTGLAKDCLITNILQELNDQIGLWLSPNFLIPSFIVSDNSSNVVHAIKDGGFTHVPCFLHCLNMVIQDFFCEHKSIENMLVAARKTCHHFSHSVKARQILQEFQNDHQLPWKNLKQDETGHWISTFYMLKWLLEHCYSVHHSLGRASGVVLTSLQWTLMTYVCDILKPFEEATQKVSVKTAGLNQVLPLIHHLLLSLQKLREDFQVRGITQALNLVDSLSLKLETDTLLSAMLKSKPCILATLLDPCFKNSLEDFFPQGADLETYKQFLAEEVCNYMESSPEICQIPTSEASCPSVTVGADSFTSSLKEGTSSSGSVDSSAVDNVALGSKSFMFPSAVAVVDEYFKEKYSEFSGGDDPLIYWQRKISIWPALTQVAIQYLSCPMCSWQSECIFTKNSHFHPKQIMSLDFDNIEQLMFLKMNLKNVNYDYSTLVLSWDPEQNEVVQSSEKEILP

SEQ ID NO: 20354 - protein, 273 aa, Homo sapiens
MSIRVTQKSYKVSTSGPRAFSSRSYTSGPGSRISSSSFSRVGSSNFRGGLGGGYGGASGMGGITAVTVNQSLLSPLVLEVDPNIQAVRTQEKEQIKTLNNKFASFIDKVRFLEQQNKMLETKWSLLQQQKTARSNMDNMFESYINNLRRQLETLGQEKLKLEAELGNMQGLVEDFKNKYEDEINKRTEMENEFVLIKKDVDEAYMNKVELESRLEGLTDEINFLRQLYEEEIRELQSQISDTSVVLSMDNSRSLDMDSIIAEVKAQYEDIANR

SEQ ID NO: 20355 - protein, 1123 aa, Homo sapiens
MPEPTKKEENEVPAPAPPPEEPSKEKEAGTTPAKDWTLVETPPGEEQAKQNANSQLSILFIEKPQGGTVKVGEDITFIAKVKAEDLLRKPTIKWFKGKWMDLASKAGKHLQLKETFERHSRVYTFEMQIIKAKDNFAGNYRCEVTYKDKFDSCSFDLEVHESTGTTPNIDIRSAFKRSGEGQEDAGELDFSGLLKRREVKQQEEEPQVDVWELLKNAKPSEYEKIAFQYGITDLRGMLKRLKRMRREEKKSAAFAKILDPAYQVDKGGRVRFVVELADPKLEVKWYKNGQEIRPSTKYIFEHKGCQRILFINNCQMTDDSEYYVTAGDEKCSTELFVREPPIMVTKQLEDTTAYCGERVELECEVSEDDANVKWFKNGEEIIPGPKSRYRIRVEGKKHILIIEGATKADAAEYSVMTTGGQSSAKLSVDLKPLKILTPLTDQTVNLGKEICLKCEISENIPGKWTKNGLPVQESDRLKVVHKGRIHKLVIANALTEDEGDYVFAPDAYNVTLPAKVHVIDPPKIILDGLDADNTVTVIAGNKLRLEIPISGEPPPKAMWSRGDKAIMEGSGRIRTESYPDSSTLVIDIAERDDSGVYHINLKNEAGEAHASIKVKVVDFPDPPVAPTVTEVGDDWCIMNWEPPAYDGGSPILGYFIERKKKQSSRWMRLNFDLCKETTFEPKKMIEGVAYEVRIFAVNAIGISKPSMPSRPFVPLAVTSPPTLLTVDSVTDTTVTMRWRPPDHIGAAGLDGYVLEYCFEGTEDWIVANKDLIDKTKFTITGLPTDAKIFVRVKAVNAAGASEPKYYSQPILVKEIIEPPKIRIPRHLKQTYIRRVGEAVNLVIPFQGKPRPELTWKKDGAEIDKNQINIRNSETDTIIFIRKAERSHSGKYDLQVKVDKFVETASIDIQIIDRPGPPQIVKIEDVWGENVALTWTPPKDDGNAAITGYTIQKADKKSMEWFTVIEHYHRTSATITELVIGNEYYFRVFSENMCGLSEDATMTKESAVIARDGKIYKNPVYEDFDFSEAPMFTQPLVNTYAIAGYNATLNCSVRGNPKPKITWMKNKVAIVDDPRYRMFSNQGVCTLEIRKPSPYDGGTYCCKAVNDLGTVEIECKLEVKVIAQ

SEQ ID NO: 20356 - protein, 232 aa, Homo sapiens
RQNCPFLAGETESLADIVLWGALYPLLQDPAYLPEELSALHSWFQTLSTQEPCQRAAETVLKQQGVLALRPYLQKQPQPSPAEGRAVTNEPEEEELATLSEEEIAMAVTAWEKGLESLPPLRPQQNPVYSRLRQWNTLYLCGTDEYGTATETKALEEGLTPQEICDKYHIIHADIYRWFNISFDIFGRTTTPQQTKITQDIFQQLLKRGFVLQDTVEQLRCEHCARFLADRF

SEQ ID NO: 20357 - protein, 1440 aa, Homo sapiens
MYPNWGRYGGSSHYPPPPVPPPPPVALPEASPGPGYSSSTTPAAPSSSGFMSFREQHLAQLQQLQQMHQKQMQCVLQPHHLPPPPLPPPPVMPGGGYGDWQPPPPPMPPPPGPALSYQKQQQYKHQMLHHQRDGPPGLVPMELESPPESPPVPPGSYMPPSQSYMPPPQPPPSYYPPTSSQPYLPPAQPSPSQSPPSQSYLAPTPSYSSSSSSSQSYLSHSQSYLPSSQASPSRPSQGHSKSQLLAPPPPSAPPGNKTTVQQEPLESGAKNKSTEQQQAAPEPDPSTMTPQEQQQYWYRQHLLSLQQRTKVHLPGHKKGPVVAKDTPEPVKEEVTVPATSQVPESPSSEEPPLPPPNEEVPPPLPPEEPQSEDPEEDARLKQLQAAAAHWQQHQQHRVGFQYQGIMQKHTQLQQILQQYQQIIQPPPHIQTMSVDMQLRHYEMQQQQFQHLYQEWEREFQLWEEQLHSYPHKDQLQEYEKQWKTWQGHMKATQSYLQEKVNSFQNMKNQYMGNMSMPPPFVPYSQMPPPLPTMPPPVLPPSLPPPVMPPALPATVPPPGMPPPVMPPSLPTSVPPPGMPPSLSSAGPPPVLPPPSLSSAGPPPVLPPPSLSSTAPPPVMPLPPLSSATPPPGIPPPGVPQGIPPQLTAAPVPPASSSQSSQVPEKPRPALLPTPVSFGSAPPTTYHPPLQSAGPSEQVNSKAPLSKSALPYSSFSSDQGLGESSAAPSQPITAVKDMPVRSGGLLPDPPRSSYLESPRGPREQKEQLQKMKDFGSEPQMADHLPPQESRLQNTSSRPGMYPPPGSYRPPPPMGKPPGSIVRPSAPPARSSVPVTRPPVPIPPPPPPPPLPPPPPVIKPQTSAVEQERWDEDSFYGLWDTNDEQGLNSEFKSETAAIPSAPVLPPPPVHSSIPPPGPVPMGMPPMSKPPPVQQTVDYGHGRDISTNKVEQIPYGERITLRPDPLPERSTFETEHAGQRDRYDRERDREPYFDRQSNVIADHRDFKRDRETHRDRDRDRGVIDYDRDRFDRERRPRDDRAQSYRDKKDHSSSRRGGFDRPSYDRKSDRPVYEGPSMFGGERRTYPEERMPLPAPSLSHQPPPAPRVEKKPESKNVDDILKPPGRESRPERIVVIMRGLPGSGKTHVAKLIRDKEVEFGGPAPRVLSLDDYFITEVEKEEKDPDSGKKVKKKVMEYEYEAEMEETYRTSMFKTFKKTLDDGFFPFIILDAINDRVRHFDQFWSAAKTKGFEVYLAEMSADNQTCGKRNIHGRKLKEINKMADHWETAPRHMMRLDIRSLLQDAAIEEVEMEDFDANIEEQKEEKKDAEEEESELGYIPKSKWEMDTSEAKLDKLDGLRTGTKRKRDWEAIASRMEDYLQLPDDYDTRASEPGKKRVRWADLEEKKDADRKRAIGFVVGQTDWEKITDESGHLAEKALNRTKYI

SEQ ID NO: 20358 - protein, 531 aa, Homo sapiens
MDSVAFEDVAVNFTQEEWALLDPSQKNLYREVMQETLRNLTSIGKKWNNQYIEDEHQNPRRNLRRLIGERLSESKESHQHGEVLTQVPDDTLKKKTPGVQSYESSVCGEIGIGLSSLNRHLRAFSYSSSLAIHGRTHTGEKPYECKECGKAFRFPSSVRRHERIHSAKKPYECKQCGKAFSFPSSVRRHERIHSAKKPYECKQCGKALSYLVSFQTHMRMHTGERPHKCNICGKAFFSPSSLKRHEKSHTGEKRYKCKQCDKAFNCPSSFQYHERTHSGEKPYECTQCRKAFRSVKYLRVHERKHTGEKPYECKLCGKGFISSTSFRYHEKTHTGEKPYECKKCVKAFSFVKDLRIHERTHTGEKPFECKQCGKTFTSSNSFHYHERTHTGEKPYECKQCGKAFRSASVLQKHIRTHTGEKPYGCKQCGKVFRVASQLKMHERTHTGEKPYECKQCGKAFISSNSIRYHKRTHTGEKPYKCKQCGKAFISSNSFLYHERIHTGEKPYECKQCGKAFRSASILQKHVRTHAG

SEQ ID NO: 20359 - protein, 1903 aa, Homo sapiens
MEANDHFNFTGLPPAPAASGLKPSPSSGEGLYTNGSPMNFPQQGKSLNGDVNVNGLSTVSHTTTSGILNSAPHSSSTSHLHHPSVAYDCLWNYSQYPSANPGSNLKDPPLLSQFSGGQYPLNGILGGSRQPSSPSHNTNLRAGSQEFWANGTQSPMGLNFDSQELYDSFPDQNFEVMPNGPPSFFTSPQTSPMLGSSIQTFAPSQEVGSGIHPDEAAEKEMTSVVAENGTGLVGSLELEEEQPELKMCGYNGSVPSVESLHQEVSVLVPDPTVSCLDDPSHLPDQLEDTPILSEDSLEPFNSLAPEPVSGGLYGIDDTELMGAEDKLPLEDSPVISALDCPSLNNATAFSLLADDSQTSTSIFASPTSPPVLGESVLQDNSFDLNNGSDAEQEEMETQSSDFPPSLTQPAPDQSSTIQLHPATSPAVSPTTSPAVSLVVSPAASPEISPEVCPAASTVVSPAVFSVVSPASSAVLPAVSLEVPLTASVTSPKASPVTSPAAAFPTASPANKDVSSFLETTADVEEITGEGLTASGSGDVMRRRIATPEEVRLPLQHGWRREVRIKKGSHRWQGETWYYGPCGKRMKQFPEVIKYLSRNVVHSVRREHFSFSPRMPVGDFFEERDTPEGLQWVQLSAEEIPSRIQAITGKRGRPRNTEKAKTKEVPKVKRGRGRPPKVKITELLNKTDNRPLKKLEAQETLNEEDKAKIAKSKKKMRQKVQRGECQTTIQGQARNKRKQETKSLKQKEAKKKSKAEKEKGKTKQEKLKEKVKREKKEKVKMKEKEEVTKAKPACKADKTLATQRRLEERQRQQMILEEMKKPTEDMCLTDHQPLPDFSRVPGLTLPSGAFSDCLTIVEFLHSFGKVLGFDPAKDVPSLGVLQEGLLCQGDSLGEVQDLLVRLLKAALHDPGFPSYCQSLKILGEKVSEIPLTRDNVSEILRCFLMAYGVEPALCDRLRTQPFQAQPPQQKAAVLAFLVHELNGSTLIINEIDKTLESMSSYRKNKWIVEGRLRRLKTVLAKRTGRSEVEMEGPEECLGRRRSSRIMEETSGMEEEEEEESIAAVPGRRGRRDGEVDATASSIPELERQIEKLSKRQLFFRKKLLHSSQMLRAVSLGQDRYRRRYWVLPYLAGIFVEGTEGNLVPEEVIKKETDSLKVAAHASLNPALFSMKMELAGSNTTASSPARARGRPRKTKPGSMQPRHLKSPVRGQDSEQPQAQLQPEAQLHAPAQPQPQLQLQLQSHKGFLEQEGSPLSLGQSQHDLSQSAFLSWLSQTQSHSSLLSSSVLTPDSSPGKLDPAPSQPPEEPEPDEAESSPDPQALWFNISAQMPCNAAPTPPPAVSEDQPTPSPQQLASSKPMNRPSAANPCSPVQFSSTPLAGLAPKRRAGDPGEMPQSPTGLGQPKRRGRPPSKFFKQMEQRYLTQLTAQPVPPEMCSGWWWIRDPEMLDAMLKALHPRGIREKALHKHLNKHRDFLQEVCLRPSADPIFEPRQLPAFQEGIMSWSPKEKTYETDLAVLQWVEELEQRVIMSDLQIRGWTCPSPDSTREDLAYCEHLSDSQEDITWRGRGREGLAPQRKTTNPLDLAVMRLAALEQNVERRYLREPLWPTHEVVLEKALLSTPNGAPEGTTTEISYEITPRIRVWRQTLERCRSAAQVCLCLGQLERSIAWEKSVNKVTCLVCRKGDNDEFLLLCDGCDRGCHIYCHRPKMEAVPEGDWFCTVCLAQQVEGEFTQKPGFPKRGQKRKSGYSLNFSEGDGRRRRVLLRGRESPAAGPRYSEEGLSPSKRRRLSMRNHHSDLTFCEIILMEMESHDAAWPFLEPVNPRLVSGYRRIIKNPMDFSTMRERLLRGGYTSSEEFAADALLVFDNCQTFNEDDSEVGKAGHIMRRFFESRWEEFYQGKQANL

SEQ ID NO: 20360 - protein, 450 aa, Homo sapiens
MMWQCHLSAQDYRYYPVDGYSLLKRFPLHPLTGPRCPVQTVGQWLESIGLPQYENHLMANGFDNVQFMGSNVMEDQDLLEIGILNSGHRQRILQAIQLLPKMRPIGHDGYHPTSVAEWLDSIELGDYTKAFLINGYTSMDLLKKIWEVELINVLKINLIGHRKRILASLGDRLHDDPPQKPPRSITLRSSVCEIWTNQNAGFPFSAIHQVHNTGDWGEPSITLRPPNEATASTPVQYWQHHPEKLIFQSCDYKAFYLGSMLIKELRGTESTQDACAKMRANCQKSTEQMKKVPTIILSVSYKGVKFIDATNKNIIAEHEIRNISCAAQDPEDLSTFAYITKDLKSNHHYCHVFTAFDVNLAYEIILTLGQAFEVAYQLALQARKGGHSSTLPESFENKPSKPIPKPRVSIRKSVQIDPSEQKTLANLPWIVEPGQEAKRGINTKYETTIF

SEQ ID NO: 20361 - protein, 177 aa, Homo sapiens
MMDLRNTPAKSLDKFIEDYLLPDTCFRMQINHAIDIICGFLKERCFRGSSYPVCVSKVVKGGSSGKGTTLRGRSDADLVVFLSPLTTFQDQLNRRGEFIQEIRRQLEACQRERAFSVKFEVQAPRWGNPRALSFVLSSLQLGEGVEFDVLPAFDALGESSQLLFLPLPISEQKSPTV

SEQ ID NO: 20362 - protein, 627 aa, Homo sapiens
MKMWLLVSHLVIISITTCLAEFTWYRRYGHGVSEEDKGFGPIFEEQPINTIYPEESLEGKVSLNCRARASPFPVYKWRMNNGDVDLTSDRYSMVGGNLVINNPDKQKDAGIYYCLASNNYGMVRSTEATLSFGYLDPFPPEERPEVRVKEGKGMVLLCDPPYHFPDDLSYRWLLNEFPVFITMDKRRFVSQTNGNLYIANVEASDKGNYSCFVSSPSITKSVFSKFIPLIPIPERTTKPYPADIVVQFKDVYALMGQNVTLECFALGNPVPDIRWRKVLEPMPSTAEISTSGAVLKIFNIQLEDEGIYECEAENIRGKDKHQARIYVQAFPEWVEHINDTEVDIGSDLYWPCVATGKPIPTIRWLKNGYAYHKGELRLYDVTFENAGMYQCIAENTYGAIYANAELKILALAPTFEMNPMKKKILAAKGGRVIIECKPKAAPKPKFSWSKGTEWLVNSSRILIWEDGSLEINNITRNDGGIYTCFAENNRGKANSTGTLVITDPTRIILAPINADITVGENATMQCAASFDPALDLTFVWSFNGYVIDFNKENIHYQRNFMLDSNGELLIRNAQLKHAGRYTCTAQTIVDNSSASADLVVRGKNRKGGEKNMVDSFLPVCASLPPTW

SEQ ID NO: 20363 - protein, 2479 aa, Homo sapiens
MPPNINWKEIMKVDPDDLPRQEELADNLLISLSKVEVNELKSEKQENVIHLFRITQSLMKMKAQEVELALEEVEKAGEEQAKFENQLKTKVMKLENELEMAQQSAGGRDTRFLRNEICQLEKQLEQKDRELEDMEKELEKEKKVNEQLALRNEEAENENSKLRRENKRLKKKNEQLCQDIIDYQKQIDSQKETLLSRRGEDSDYRSQLSKKNYELIQYLDEIQTLTEANEKIEVQNQEMRKNLEESVQEMEKMTDEYNRMKAIVHQTDNVIDQLKKENDHYQLQVQELTDLLKSKNEEDDPIMVAVNAKVEEWKLILSSKDDEIIEYQQMLHNLREKLKNAQLDADKSNVMALQQGIQERDSQIKMLTEQVEQYTKEMEKNTCIIEDLKNELQRNKGASTLSQQTHMKIQSTLDILKEKTKEAERTAELAEADAREKDKELVEALKRLKDYESGVYGLEDAVVEIKNCKNQIKIRDREIEILTKEINKLELKISDFLDENEALRERVGLEPKTMIDLTEFRNSKHLKQQQYRAENQILLKEIESLEEERLDLKKKIRQMAQERGKRSATSGLTTEDLNLTENISQGDRISERKLDLLSLKNMSEAQSKNEFLSRELIEKERDLERSRTVIAKFQNKLKELVEENKQLEEGMKEILQAIKEMQKDPDVKGGETSLIIPSLERLVNAIESKNAEGIFDASLHLKAQVDQLTGRNEELRQELRESRKEAINYSQQLAKANLKIDHLEKETSLLRQSEGSNVVFKGIDLPDGIAPSSASIINSQNEYLIHLLQELENKEKKLKNLEDSLEDYNRKFAVIRHQQSLLYKEYLSEKETWKTESKTIKEEKRKLEDQVQQDAIKVKEYNNLLNALQMDSDEMKKILAENSRKITVLQVNEKSLIRQYTTLVELERQLRKENEKQKNELLSMEAEVCEKIGCLQRFKEMAIFKIAALQKVVDNSVSLSELELANKQYNELTAKYRDILQKDNMLVQRTSNLEHLECENISLKEQVESINKELEITKEKLHTIEQAWEQETKLGNESSMDKAKKSITNSDIVSISKKITMLEMKELNERQRAEHCQKMYEHLRTSLKQMEERNFELETKFAELTKINLDAQKVEQMLRDELADSVSKAVSDADRQRILELEKNEMELKVEVSKLREISDIARRQVEILNAQQQSRDKEVESLRMQLLDYQAQSDEKSLIAKLHQHNVSLQLSEATALGKLESITSKLQKMEAYNLRLEQKLDEKEQALYYARLEGRNRAKHLRQTIQSLRRQFSGALPLAQQEKFSKTMIQLQNDKLKIMQEMKNSQQEHRNMENKTLEMELKLKGLEELISTLKDTKGAQKVINWHMKIEELRLQELKLNRELVKDKEEIKYLNNIISEYERTISSLEEEIVQQNKFHEERQMAWDQREVDLERQLDIFDRQQNEILNAAQKFEEATGSIPDPSLPLPNQLEIALRKIKENIRIILETRATCKSLEEKLKEKESALRLAEQNILSRDKVINELRLRLPATAEREKLIAELGRKEMEPKSHHTLKIAHQTIANMQARLNQKEEVLKKYQRLLEKAREEQREIVKKHEEDLHILHHRLELQADSSLNKFKQTAWDLMKQSPTPVPTNKHFIRLAEMEQTVAEQDDSLSSLLVKLKKVSQDLERQREITELKVKEFENIKLQLQENHEDEVKKVKAEVEDLKYLLDQSQKESQCLKSELQAQKEANSRAPTTTMRNLVERLKSQLALKEKQQKALSRALLELRAEMTAAAEERIISATSQKEAHLNVQQIVDRHTRELKTQVEDLNENLLKLKEALKTSKNRENSLTDNLNDLNNELQKKQKAYNKILREKEEIDQENDELKRQIKRLTSGLQGKPLTDNKQSLIEELQRKVKKLENQLEGKVEEVDLKPMKEKNAKEELIRWEEGKKWQAKIEGIRNKLKEKEGEVFTLTKQLNTLKDLFAKADKEKLTLQRKLKTTGMTVDQVLGIRALESEKELEELKKRNLDLENDILYMRAHQALPRDSVVEDLHLQNRYLQEKLHALEKQFSKDTYSKPSISGIESDDHCQREQELQKENLKLSSENIELKFQLEQANKDLPRLKNQVRDLKEMCEFLKKEKAEVQRKLGHVRGSGRSGKTIPELEKTIGLMKKVVEKVQRENEQLKKASGILTSEKMANIEQENEKLKAELEKLKAHLGHQLSMHYESKTKGTEKIIAENERLRKELKKETDAAEKLRIAKNNLEILNEKMTVQLEETGKRLQFAESRGPQLEGADSKSWKSIVVTRMYETKLKELETDIAKKNQSITDLKQLVKEATEREQKVNKYNEDLEQQIKILKHVPEGAETEQGLKRELQVLRLANHQLDKEKAELIHQIEANKDQSGAESTIPDADQLKEKIKDLETQLKMSDLEKQHLKEEIKKLKKELENFDPSFFEEIEDLKYNYKEEVKKNILLEEKVKKLSEQLGVELTSPVAASEEFEDEEESPVNFPIY

SEQ ID NO: 20364 - protein, 290 aa, Homo sapiens
MDLVLKRCLLHLAVIGALLAVGATKGGQVSLKVSNDGPTLIGANASFSIALNFPGSQKVLPDGQVIWVNNTIINGSQVWGGQPVYPQETDDACIFPDGGPCPSGSWSQKRSFVYVWKTWEGIESAEILQAVPSGEGDAFELTVSCQGGLPKEACMEISSPGCQPPAQRLCQPVLPSPACQLVLHQILKGGSGTYCLNVSLADTNSLAVVSTQLIMPGQEAGLGQVPLIVGILLVLMAVVLASLIYRRRLMKQDFSVPQLPHSSSHWLRLPRIFCSCPIGENSPLLSGQQV

SEQ ID NO: 20365 - protein, 925 aa, Homo sapiens
MPGEATETVPATEQELPQPQAETAVLPMSSALSVTAALGQPGPTLPPPCSPAPQQCPLSAANQASPFPSPSTIASTPLEVPFPQSSSGTALPLGTAPEAPTFLPNLIGPPISPAALALASPMIAPTLKGTPSSSAPLALVALAPHSVQKSSAFPPNLLTSPPSVAVAESGSVITLSAPIAPSEPKTNLNKVPSEVVPNPKGTPSPPCIVSTVPYHCVTPMASIQSGVASLPQTTPTTTLAIASPQVKDTTISSVLISPQNPGSLSLKGPVSPPAALSLSTQSLPVVTSSQKTAGPNTPPDFPISLGSHLAPLHQSSFGSVQLLGQTGPSALSDPTVKTISVDHSSTGASYPSQRSVIPPLPSRNEVVPATVAAFPVVAPSVDKGPSTISSITCSPSGSLNVATSFSLSPTTSLILKSSPNATYHYPLVAQMPVSSVGTTPLVVTNPCTIAAAPTTTFEVATCVSPPMSSGPISNIEPTSPAALVMAPVAPKEPSTQVATTLRIPVSPPLPDPEDLKNLPSSVLVKFPTQKDLQTVPASLEGAPFSPAQAGLTTKKDPTVLPLVQAAPKNSPSFQSTSSSPEIPLSPEATLAKKSLGEPLPIVAAFPLESADPAGVAPTTAKAAAFEKVLPKPESASVSAAPSPPVSLPLAPSPVPTLPPKQQFLPSSPGLVLESPSKPLAPADEDELLPLIPPEPISGGVPFQSVLVNMPTPKSAGIPVPTPSAKQPVTKNNKGSGTESDSDESVPELEEQDSTQATTQQAQLAAAAEIDEEPVSKAKQSRSEKKARKAMSKLGLRQVTGVTRVTIRKSKNILFVITKPDVYKSPASDTYIVFGEAKIEDLSQQAQLAAAEKFKVQGEAVSNIQENTQTPTVQEESEEEEVDETGVEVKDIELVMSQANVSRAKAVRALKNNSNDIVNAIMELTM

SEQ ID NO: 20366 - protein, 232 aa, Homo sapiens
NVQGLSAEEIRNGNLKAILGLFFSLSRYKQQQHHQQQYYQSLVELQQRVTHASPPSEASQAKTQQDMQSRLPGPSRVPAAGSSSKVQGASNLNRRSQSFNSIDKNKPPNYANGNEKDSSKGPQSSSGVNGNVQPPSTAGQPPASAIPSPSASKPWRSKSMNVKHSATSTMLTVKQSSTATSPTPSSDRLKPPVSEGVKTAPSGQKSMLEKFKLVNARTALRPPQPPSSGPSD

SEQ ID NO: 20367 - protein, 147 aa, Homo sapiens
MSRQSSVSFRSGGSRSFSTASAITPSVSRTSFTSVSRSGGGGGGGFGRVSLAGACGVGGYGFGGGAGSGFGFGGGAGGGFGLGGGAGFGGGFGGPGFPVCPPGGIQEVTVNQSLLTPLNLQIDPSIQRVRTEEREQIKTLNNKFASF

SEQ ID NO: 20368 - protein, 2127 aa, Homo sapiens
MEAEFYMVILTCLIFRNSEGFQIVHVQKQQCLFKNEKVVVGSCNRTIQNQQWMWTEDEKLLHVKSALCLAISNSSRGPSRSAILDRCSQAPRWTCYDQEGFLEVENASLFLQKQGSRVVVKKARKYLHSWMKIDVNKEGKLVNESLCLQKAGLGAEVSVRSTRNTAPPQILTTFNAVPDGLVFLIRNTTEAFIRNAAENYSQNSSERQHPNLHMTGITDTSWVLSTTQPFSSTTEETGLAEPERCNFTLAESKASSHSVSIQWRILGSPCNFSLIYSSDTLGAALCPTFRIDNTTYGCNLQDLQAGTIYNFRIISLDEERTVVLQTDPLPPARFGVSKEKTTSTSLHVWWTPSSGKVTSYEVQLFDENNQKIQGVQIQESTSWNEYTFFNLTAGSKYNIAITAVSGGKRSFSVYTNGSTVPSPVKDIGISTKANSLLISWSHGSGNVERYRLMLMDKGILVHGGVVDKHATSYAFHGLTPGYLYNLTVMTEAAGLQNYRWKLVRTAPMEVSNLKVTNDGSLTSLKVKWQRPPGNVDSYNITLSHKGTIKESRVLAPWITETHFKELVPGRLYQVTVSCVSGELSAQKMAVGRTFPDKVANLEANNNGRMRSLVVSWSPPAGDWEQYRILLFNDSVVLLNITVGKEETQYVMDDTGLVPGRQYEVEVIVESGNLKNSERCQGRTVPLAVLQLRVKHANETSLSIMWQTPVAEWEKYIISLADRDLLLIHKSLSKDAKEFTFTDLVPGRKYMATVTSISGDLKNSSSVKGRTVPAQVTDLHVANQGMTSSLFTNWTQAQGDVEFYQVLLIHENVVIKNESISSETSRYSFHSLKSGSLYSVVVTTVSGGISSRQVVVEGRTVPDKVQGVSVSNSARSDYLRVSWVHATGDFDHYEVTIKNKNNFIQTKSIPKSENECVFVQLVPGRLYSVTVTTKSGQYEANEQGNGRTIPEPVKDLTLRNRSTEDLHVTWSGANGDVDQYEIQLLFNDMKVFPPFHLVNTATEYRFTSLTPGRQYKILVLTISGDVQQSAFIEGFTVPSAVKNIHISPNGATDSLTVNWTPGGGDVDSYTVSAFRHSQKVDSQTIPKHVFEHTFHRLEAGEQYQIMIASVSGSLKNQINVVGRTVPASVQGVIADNAYSSYSLIVSWQKAAGVAERYDILLLTENGILLRNTSEPATTKQHKFEDLTPGKKYKIQILTVSGGLFSKEAQTEGRTVPAAVTDLRITENSTRHLSFRWTASEGELSWYNIFLYNPDGNLQERAQVDPLVQSFSFQNLLQGRMYKMVIVTHSGELSNESFIFGRTVPASVSHLRGSNRNTTDSLWFNWSPASGDFDFYELILYNPNGTKKENWKDKDLTEWRFQGLVPGRKYVLWVVTHSGDLSNKVTAESRTAPSPPSLMSFADIANTSLAITWKGPPDWTDYNDFELQWLPRDALTVFNPYNNRKSEGRIVYGLRPGRSYQFNVKTVSGDSWKTYSKPIFGSVRTKPDKIQNLHCRPQNSTAIACSWIPPDSDFDGYSIECRKMDTQEVEFSRKLEKEKSLLNIMMLVPHKRYLVSIKVQSAGMTSEVVEDSTITMIDRPPPPPPHIRVNEKDVLISKSSINFTVNCSWFSDTNGAVKYFTVVVREADGSDELKPEQQHPLPSYLEYRHNASIRVYQTNYFASKCAENPNSNSKSFNIKLGAEMESLGGKCDPTQQKFCDGPLKPHTAYRISIRAFTQLFDEDLKEFTKPLYSDTFFSLPITTESEPLFGAIEGVSAGLFLIGMLVAVVALLICRQKVSHGRERPSARLSIRRDRPLSVHLNLGQKGNRKTSCPIKINQFEGHFMKLQADSNYLLSKEYEELKDVGRNQSCDIALLPENRGKNRYNNILPYDATRVKLSNVDDDPCSDYINASYIPGNNFRREYIVTQGPLPGTKDDFWKMVWEQNVHNIVMVTQCVEKGRVKCDHYWPADQDSLYYGDLILQMLSESVLPEWTIREFKICGEEQLDAHRLIRHFHYTVWPDHGVPETTQSLIQFVRTVRDYINRSPGAGPTVVHCSAGVGRTGTFIALDRILQQLDSKDSVDIYGAVHDLRLHRVHMVQTECQYVYLHQCVRDVLRARKLRSEQENPLFPIYENVNPEYHRDPVYSRH

SEQ ID NO: 20369 - protein, 452 aa, Homo sapiens
MSTAVLENPGLGRKLSDFGQETSYIEDNCNQNGAISLIFSLKEEVGALAKVLRLFEENDVNLTHIESRPSRLKKDEYEFFTHLDKRSLPALTNIIKILRHDIGATVHELSRDKKKDTVPWFPRTIQELDRFANQILSYGAELDADHPGFKDPVYRARRKQFADIAYNYRHGQPIPRVEYMEEEKKTWGTVFKTLKSLYKTHACYEYNHIFPLLEKYCGFHEDNIPQLEDVSQFLQTCTGFRLRPVAGLLSSRDFLGGLAFRVFHCTQYIRHGSKPMYTPEPDICHELLGHVPLFSDRSFAQFSQEIGLASLGAPDEYIEKLATIYWFTVEFGLCKQGDSIKAYGAGLLSSFGELQYCLSEKPKLLPLELEKTAIQNYTVTEFQPLYYVAESFNDAKEKVRNFAATIPRPFSVRYDPYTQRIEVLDNTQQLKILADSINSEIGILCSALQKIK

SEQ ID NO: 20370 - protein, 892 aa, Homo sapiens
MSVPDSGPRPPAAPAPFPPGPPMMPPPFMPPPGIPPPFPPMGLPPMSQRPPAIPPMPPGILPPMLPPMGAPPPLTQIPGMVPPMMPGMLMPAVPVTAATAPGADTASSAVAGTGPPRALWSEHVAPDGRIYYYNADDKQSVWEKPSVLKSKAELLLSQCPWKEYKSDTGKPYYYNNQSKESRWTRPKDLDDLEVLVKQEAAGKQQQQLPQTLQPQPPQPQPDPPPVPPGPTPVPTGLLEPEPGGSEDCDVLEATQPLEQGFLQQLEEGPSSSGQHQPQQEEEESKPEPERSGLSWSNREKAKQAFKELLRDKAVPSNASWEQAMKMVVTDPRYSALPKLSEKKQAFNAYKAQREKEEKEEARLRAKEAKQTLQHFLEQHERMTSTTRYRRAEQTFGELEVWAVVPERDRKEVYDDVLFFLAKKEKEQAKQLRRRNIQALKSILDGMSSVNFQTTWSQAQQYLMDNPSFAQDHQLQNMDKEDALICFEEHIRALEREEEEERERARLRERRQQRKNREAFQTFLDELHETGQLHSMSTWMELYPAVSTDVRFANMLGQPGSTPLDLFKFYVEELKARFHDEKKIIKDILKDRGFCVEVNTAFEDFAHVISFDKRAAALDAGNIKLTFNSLLEKAEAREREREKEEARRMRRREAAFRSMLRQAVPALELGTAWEEVRERFVCDSAFEQITLESERIRLFREFLQVLETECQHLHTKGRKHGRKGKKHHHKRSHSPSGSESEEEELPPPSLRPPKRRRRNPSESGSEPSSSLDSVESGGAALGGRGSPSSHLLGADHGLRKAKKPKKKTKKRRHKSNSPESETDPEEKAGKESDEKEQEQDKDRELQQAELPNRSPGFGIKKEKTGWDTSESELSEGELERRRRTLLQQLDDHQ

SEQ ID NO: 20371 - protein, 201 aa, Homo sapiens
MATSRYEPVAEIGVGAYGTVYKARDPHSGHFVALKSVRVPNGGGGGGGLPISTVREVALLRRLEAFEHPNVVRLMDVCATSRTDREIKVTLVFEHVDQDLRTYLDKAPPPGLPAETIKDLMRQFLRGLDFLHANCIVHRDLKPENILVTSGGTVKLADFGLARIYSYQMALTPVTRACCVAQAGLQWHDHSSLQLQPPGLK

SEQ ID NO: 20372 - protein, 191 aa, Homo sapiens
MNGKRNGEGGKRWKWKGTGVPVRSGDATFPKAMDNVTVRQGESATLRCTIDNRVTRVAWLNRSTILYAGNDKWCLDPRVVLLSNTQTQYSIEIQNVDVYDEGPYTCSVQTDNHPKTSRVHLIVQVSPKIVEISSDISINEGNNISLTCIATGRPEPTVTWRHISPKAVGFVSEDEYLEIQGITREQSGDYE

SEQ ID NO: 20373 - protein, 944 aa, Homo sapiens
MVVTTSARGGGGDRTPSRRRGCGLAPAGAAALLAGASCLCYGRSLQGEFVHDDVWAIVNNPDVRPGAPLRWGIFTNDFWGKGMAENTSHKSYRPLCVLTFKLNIFLTGMNPFYFHAVNIILHCLVTLVLMYTCDKTVFKNRGLAFVTALLFAVHPIHTEAVAGIVGRADVLACLLFLLAFLSYNRSLDQGCVGGSFPSTVSPFFLLLSLFLGTCAMLVKETGITVFGVCLVYDLFSLSNKQDKSSNGALCPRSPQQPGSPQPSSLPGHPHRENGKQQRFPHKGAWGGCHSPLPPEPKSSGFPVSPRAVWSMMRYLRASSNRNFLLTMRPFLKRAILVLSYVLVILYFRLWIMGGSMPLFSEQDNPASFSPYILTRFLTYSYLLAFNVWLLLAPVTLCYDWQVGSIPLVETIWDMRNLATIFLAVVMALLSLHCLAAFKRLEHKEVLVGLLFLVFPFIPASNLFFRVGFVVAERVLYMPSMGYCILFVHGLSKLCTWLNRCGATTLIVSTVLLLLLFSWKTVKQNEIWLSRESLFRSGVQTLPHNAKVHYNYANFLKDQGRNKEAIYHYRTALKLYPRHASALNNLGTLTRDTAEAKMYYQRALQLHPQHNRALFNLGNLLKSQEKKEEAITLLKDSIKYGPEFADAYSSLASLLAEQERFKEAEEIYQTGIKNCPDSSDLHNNYGVFLVDTGLPEKAVAHYQQAIKLSPSHHVAMVNLGRLYRSLGENSMAEEWYKRALQVAHKAEILSPLGALYYNTGRYEEALQIYQEAAALQPSQRELRLALAQVLAVMGQTKEAEKMTNHIVSEETGCLECYRLLSAIYSKQENHDKALDAIDKALQLKPKDPKVISELFFTKGNQLREQNLLDKAFESYRVAVQLNPDQAQAWMNMGGIQHIKGKYVSARAYYERALQLVPDSKLLKENLAKLDRLEKRLQEVREKDQT

SEQ ID NO: 20374 - protein, 1750 aa, Homo sapiens
MARAWQHPFLNVFRHFRVDEWKRSAKQGDVAVVTDKTLKGAVYRIRGSVSAANYIQLPKSSTQSLGLTGRYLYVLFRPLPSKHFVIHLDVSSKDNQVIRVSFSNLFKEFKSTATWLQFPLVLEARTPQRDLVGLAPSGARWTCLQLDLQDVLLVYLNRCYGHLKSIRLCASLLVRNLYTSDLCFEPAISGAQWAKLPVTPMPREMAFPVPKGESWHDRYIHVRFPSESLKVPSKPIEKSCSPPEAVLLGPGPQPLPCPVASSKPVRFSVSPVVQTPSPTASGRAALAPRPFPEVSLSQERSDASNADGPGFHSLEPWAQLEASDIHTAAAGTHVLTHESAEVPVARTGSCEGFLPDPVLRLKGVIGFGGHGTRQALWTPDGAAVVYPCHAVIVVLLVDTGEQRFFLGHTDKVSALALDGSSSLLASAQARAPSVMRLWDFQTGRCLCLFRSPMHVVCSLSFSDSGALLCGVGKDHHGRTMVVAWGTGQVGLGGEVVVLAKAHTDFDVQAFRVTFFDETRMASCGQGSVRLWRLRGGVLRSCPVDLGEHHALQFTDLAFKQARDGCPEPSAAMLFVCSRSGHILEIDCQRMVVRHARRLLPTRTPGGPHPQKQTFSSGPGIAISSLSVSPAMCAVGSEDGFLRLWPLDFSSVLLEAEHEGPVSSVCVSPDGLRVLSATSSGHLGFLDTLSRVYHMLARSHTAPVLALAMEQRRGQLATVSQDRTVRIWDLATLQQLYDFTSSEDAPCAVTFHPTRPTFFCGFSSGAVRSFSLEAAEVLVEHTCHRGAVTGLTATPDGRLLFSSCSQGSLAQYSCADPQWHVLRVAADMVCPDAPASPSALAVSRDGRLLAFVGPSRCTVTVMGSASLDELLRVDIGTLDLASSRLDSAMAVCFGPAALGHLLVSTSSNRVVVLDAVSGRIIRELPGVHPEPCPSLTLSEDARFLLIAAGRTIKVWDYATQASPGPQVYIGHSEPVQAVAFSPDQQQVLSAGDAVFLWDVLAPTESDQSFPGAPPACKTGPGAGPLEDAASRASELPRQQVPKPCQASPPRLGVCARPPEGGDGARDTRNSGAPRTTYLASCKAFTPARVSCSPHSAKGTCPPPASGGWLRLKAVVGYSGNGRANMVWRPDTGFFAYTCGRLVVVEDLHSGAQQHWSGHSAEISTLALSHSAQVLASASGRSSTTAHCQIRVWDVSGGLCQHLIFPHSTTVLALAFSPDDRLLVTLGDHDGRTLALWGTATYDLVSSTRLPEPVHGVAFNPWDAGELTCVGQGTVTFWLLQQRGADISLQVRREPVPEAVGAGELTSLCYGAPPLLYCGTSSGQVCVWDTRAGRCFLSWEADDGGIGLLLFSGSRLVSGSSTGRLRLWAVGAVSELRCKGSGARSSSVFMEHELVLDGAVVSASFDDSVDMGVVGTTAGTLWFVSWAEGTSTRLISGHRSKVNEVVFSPGESHCATCSEDGSVRVWALASMELVIQFQVLNQSCLCLAWSPPCCGRPEQQRLAAGYGDGSLRIFSVSRTAMELKMHPHPVALTTVAFSTDGQTVLSGDKDGLVAVSHPCTGTTFRVLSDHQGAPISTICVTCKECEDLGVEGTDLWLAASGDQRVSVWASDWLRNHCELVDWLSFPMPATTETQGHLPPSLAAFCPWDGALLMYVGPGVYKEVIIYNLCQKQVVEKIPLPFFAMSLSLSPGTHLLAVGFAECMLRLVDCAMGTAQDFAGHDNAVHLCRFTPSARLLFTAARNEILVWEVPGL

SEQ ID NO: 20375 - protein, 1163 aa, Homo sapiens
MDAKARNCLLQHREALEKDIKTSYIMDHMISDGFLTISEEEKVRNEPTQQQRAAMLIKMILKKDNDSYVSFYNALLHEGYKDLAALLHDGIPVVSSSSGKDSVSGITSYVRTVLCEGGVPQRPVVFVTRKKLVNAIQQKLSKLKGEPGWVTIHGMAGCGKSVLAAEAVRDHSLLEGCFPGGVHWVSVGKQDKSGLLMKLQNLCTRLDQDESFSQRLPLNIEEAKDRLRILMLRKHPRSLLILDDVWDSWVLKAFDSQCQILLTTRDKSVTDSVMGPKYVVPVESSLGKEKGLEILSLFVNMKKADLPEQAHSIIKECKGSPLVVSLIGALLRDFPNRWEYYLKQLQNKQFKRIRKSSSYDYEALDEAMSISVEMLREDIKDYYTDLSILQKDVKVPTKVLCILWDMETEEVEDILQEFVNKSLLFCDRNGKSFRYYLHDLQVDFLTEKNCSQLQDLHKKIITQFQRYHQPHTLSPDQEDCMYWYNFLAYHMASAKMHKELCALMFSLDWIKAKTELVGPAHLIHEFVEYRHILDEKDCAVSENFQEFLSLNGHLLGRQPFPNIVQLGLCEPETSEVYQQAKLQAKQEVDNGMLYLEWINKKNITNLSRLVVRPHTDAVYHACFSEDGQRIASCGADKTLQVFKAETGEKLLEIKAHEDEVLCCAFSTDDRFIATCSVDKKVKIWNSMTGELVHTYDEHSEQVNCCHFTNSSHHLLLATGSSDCFLKLWDLNQKECRNTMFGHTNSVNHCRFSPDDKLLASCSADGTLKLWDATSANERKSINVKQFFLNLEDPQEDMEVIVKCCSWSADGARIMVAAKNKIFLWNTDSRSKVADCRGHLSWVHGVMFSPDGSSFLTSSDDQTIRLWETKKVCKNSAVMLKQEVDVVFQENEVMVLAVDHIRRLQLINGRTGQIDYLTEAQVSCCCLSPHLQYIAFGDENGAIEILELVNNRIFQSRFQHKKTVWHIQFTADEKTLISSSDDAEIQVWNWQLDKCIFLRGHQETVKDFRLLKNSRLLSWSFDGTVKVWNIITGNKEKDFVCHQGTVLSCDISHDATKFSSTSADKTAKIWNVSNGELLHLCAPLSEEGAATHGGWVTDLCFSPDGKMLISAGGYIKWWNVVTGESSQTFYTNGTNLKKIHVSPDFKTYVTVDNLGILYILQTLE

SEQ ID NO: 20376 - protein, 1248 aa, Homo sapiens
MDAKARNCLLQHREALEKDIKTSYIMDHMISDGFLTISEEEKVRNEPTQQQRAAMLIKMILKKDNDSYVSFYNALLHEGYKDLAALLHDGIPVVSSSSGKDSVSGITSYVRTVLCEGGVPQRPVVFVTRKKLVNAIQQKLSKLKGEPGWVTIHGMAGCGKSVLAAEAVRDHSLLEGCFPGGVHWVSVGKQDKSGLLMKLQNLCTRLDQDESFSQRLPLNIEEAKDRLRILMLRKHPRSLLILDDVWDSWVLKAFDSQCQILLTTRDKSVTDSVMGPKYVVPVESSLGKEKGLEILSLFVNMKKADLPEQAHSIIKECKGSPLVVSLIGALLRDFPNRWEYYLKQLQNKQFKRIRKSSSYDYEALDEAMSISVEMLREDIKDYYTDLSILQKDVKVPTKVLCILWDMETEEVEDILQEFVNKSLLFCDRNGKSFRYYLHDLQVDFLTEKNCSQLQDLHKKIITQFQRYHQPHTLSPDQEDCMYWYNFLAYHMASAKMHKELCALMFSLDWIKAKTELVGPAHLIHEFVEYRHILDEKDCAVSENFQEFLSLNGHLLGRQPFPNIVQLGLCEPETSEVYQQAKLQAKQEVDNGMLYLEWINKKNITNLSRLVVRPHTDAVYHACFSEDGQRIASCGADKTLQVFKAETGEKLLEIKAHEDEVLCCAFSTDDRFIATCSVDKKVKIWNSMTGELVHTYDEHSEQVNCCHFTNSSHHLLLATGSSDCFLKLWDLNQKECRNTMFGHTNSVNHCRFSPDDKLLASCSADGTLKLWDATSANERKSINVKQFFLNLEDPQEDMEVIVKCCSWSADGARIMVAAKNKIFLFDIHTSGLLGEIHTGHHSTIQYCDFSPQNHLAVVALSQYCVELWNTDSRSKVADCRGHLSWVHGVMFSPDGSSFLTSSDDQTIRLWETKKVCKNSAVMLKQEVDVVFQENEVMVLAVDHIRRLQLINGRTGQIDYLTEAQVSCCCLSPHLQYIAFGDENGAIEILELVNNRIFQSRFQHKKTVWHIQFTADEKTLISSSDDAEIQVWNWQLDKCIFLRGHQETVKDFRLLKNSRLLSWSFDGTVKVWNIITGNKEKDFVCHQGTVLSCDISHDATKFSSTSADKTAKIWSFDLLLPLHELRGHNGCVRCSAFSVDSTLLATGDDNGEIRIWNVSNGELLHLCAPLSEEGAATHGGWVTDLCFSPDGKMLISAGGYIKWWNVVTGESSQTFYTNGTNLKKIHVSPDFKTYVTVDNLGILYILQTLE

SEQ ID NO: 20377 - protein, 1120 aa, Homo sapiens
MPEPTKKEDWTLVETPPGEEQAKQNANSQLSILFIEKPQGGTVKVGEDITFIAKVKAEDLLRKPTIKWFKGKWMDLASKAGKHLQLKETFERHSRVYTFEMQIIKAKDNFAGNYRCEVTYKDKFDSCSFDLEVHESTGTTPNIDIRSAFKRSGEGQEDAGELDFSGLLKRREVKQQEEEPQVDVWELLKNAKPSEYEKIAFQYGITDLRGMLKRLKRMRREEKKSAAFAKILDPAYQVDKGGRVRFVVELADPKLEVKWYKNGQEIRPSTKYIFEHKGCQRILFINNCQMTDDSEYYVTAGDEKCSTELFVREPPIMVTKQLEDTTAYCGERVELECEVSEDDANVKWFKNGEEIIPGPKSRYRIRVEGKKHILIIEGATKADAAEYSVMTTGGQSSAKLSVDLKPLKILTPLTDQTVNLGKEICLKCEISENIPGKWTKNGLPVQESDRLKVVHKGRIHKLVIANALTEDEGDYVFAPDAYNVTLPAKVHVIDPPKIILDGLDADNTVTVIAGNKLRLEIPISGEPPPKAMWSRGDKAIMEGSGRIRTESYPDSSTLVIDIAERDDSGVYHINLKNEAGEAHASIKVKVVDFPDPPVAPTVTEVGDDWCIMNWEPPAYDGGSPILGYFIERKKKQSSRWMRLNFDLCKETTFEPKKMIEGVAYEVRIFAVNAIGISKPSMPSRPFVPLAVTSPPTLLTVDSVTDTTVTMRWRPPDHIGAAGLDGYVLEYCFEGTEDWIVANKDLIDKTKFTITGLPTDAKIFVRVKAVNAAGASEPKYYSQPILVKEIIEPPKIRIPRHLKQTYIRRVGEAVNLVIPFQGKPRPELTWKKDGAEIDKNQINIRNSETDTIIFIRKAERSHSGKYDLQVKVDKFVETASIDIQIIDRPGPPQIVKIEDVWGENVALTWTPPKDDGNAAITGYTIQKADKKSMEWFTVIEHYHRTSATITELVIGNEYYFRVFSENMCGLSEDATMTKESAVIARDGKIYKNPVYEDFDFSEAPMFTQPLVNTYAIAGYNATLNCSVRGNPKPKITWMKNKVAIVDDPRYRMFSNQGVCTLEIRKPSPYDGGTYCCKAVNDLGTVEIECKLEVKVIYQGVNTPGQPVFLEGQQQSLHNKDF

SEQ ID NO: 20378 - protein, 185 aa, Homo sapiens
METFDPTELPELLKLYYRRLFPYSQYYRWLNYGGVIKNYFQHREFSFTLKDDIYIRYQSFNNQSDLEKEMQKMNPYKIDIGAVYSHRPNQHNTVKLGAFQAQEKELVFDIDMTDYDDVRRCCSSADICPKCWTLMTMAIRIIDRALKGKTLDLSIVSGYILEGEVFIVGSVMNQLENCLLQYVLG

SEQ ID NO: 20379 - protein, 140 aa, Homo sapiens
YIFGFIGASSATMLIFILPAVFYLKLVKKETFRSPQKVGEITGRFQRRLPVISPGTCRRGKSLFLSRMVVYVFKIKPVVHISTQVLLEQCEMMKVYFCCFTSRIRVTACNNHQIVLFPLPSPHPAPPKKVPNICILRTSN

SEQ ID NO: 20380 - protein, 196 aa, Homo sapiens
MLEPALEDSSSFSPLDSSLPEDIPVFTAAAAATPVPSVVLTRSPPMELQPPVSPQQSECNPVGALQELVVQKGWRLPEYTVTQESGPAHRKEFTMTCRVERFIEIGSGTSKKLAKRNAAAKMLLRVHTVPLDARDGNEVEPDDDHFSIGVGSRLDGLRNRGPGCTWDSLRNSVGEKILSLRSCSLGSLGALGPACC

SEQ ID NO: 20381 - protein, 510 aa, Homo sapiens
MMWQCHLSAQDYRYYPVDGYSLLKRFPLHPLTGPRCPVQTVGQWLESIGLPQYENHLMANGFDNVQFMGSNVMEDQDLLEIGILNSGHRQRILQAIQLLPKMRPIGHDGYHPTSVAEWLDSIELGDYTKAFLINGYTSMDLLKKIWEVELINVLKINLIGHRKRILASLGDRLHDDPPQKPPRSITLREPSGNHTPPQLSPSLSQSTYTTGGSLDVPHIIMQGDARRRRNENYFDDIPRSKLERQMAQSSVCEIWTNQNAGFPFSAIHQVHNTGDWGEPSITLRPPNEATASTPVQYWQHHPEKLIFQSCDYKAFYLGSMLIKELRGTESTQDACAKMRANCQKSTEQMKKVPTIILSVSYKGVKFIDATNKNIIAEHEIRNISCAAQDPEDLSTFAYITKDLKSNHHYCHVFTAFDVNLAYEIILTLGQAFEVAYQLALQARKGGHSSTLPESFENKPSKPIPKPRVSIRKSVQIDPSEQKTLANLPWIVEPGQEAKRGINTKYETTIF

SEQ ID NO: 20382 - protein, 426 aa, Homo sapiens
MMWQCHLSAQDYRYYPVDGYSLLKRFPLHPLTGPRCPVQTVGQWLESIGLPQYENHLMANGFDNVQFMGSNVMEDQDLLEIGILNSGHRQRILQAIQLLPKMRPIGHDGYHPTSVAEWLDSIELGDYTKAFLINGYTSMDLLKKIWEVELINVLKINLIGHRKRILASLGDRLHDDPPQKPPRSITLRTGDWGEPSITLRPPNEATASTPVQYWQHHPEKLIFQSCDYKAFYLGSMLIKELRGTESTQDACAKMRANCQKSTEQMKKVPTIILSVSYKGVKFIDATNKNIIAEHEIRNISCAAQDPEDLSTFAYITKDLKSNHHYCHVFTAFDVNLAYEIILTLGQAFEVAYQLALQARKGGHSSTLPESFENKPSKPIPKPRVSIRKSVQIDPSEQKTLANLPWIVEPGQEAKRGINTKYETTIF

SEQ ID NO: 20383 - protein, 333 aa, Homo sapiens
MLTLTRIRTVSYEVRSTFLFISVLEFAVGFLTNAFVFLVNFWDVVKRQALSNSDCVLLCLSISRLFLHGLLFLSAIQLTHFQKLSEPLNHSYQAIIMLWMIANQANLWLAACLSLLYCSKLIRFSHTFLICLASWVSRKISQMLLGIILCSCICTVLCVWCFFSRPHFTVTTVLFMNNNTRLNWQIKDLNLFYSFLFCYLWSVPPFLLFLVSSGMLTVSLGRHMRTMKVYTRNSRDPSLEAHIKALKSLVSFFCFFVISSCAAFISVPLLILWRDKIGVMVCVGIMAACPSGHAAILISGNAKLRRAVMTILLWAQSSLKVRADHKADSRTLC

SEQ ID NO: 20384 - protein, 520 aa, Homo sapiens
MIARQQCVRGGPRGFSCGSAIVGGGKRGAFSSVSMSGGAGRCSSGGFGSRSLYNLRGNKSISMSVAGSRQGACFGGAGGFGTGGFGGGFGGSFSGKGGPGFPVCPAGGIQEVTINQSLLTPLHVEIDPEIQKVRTEEREQIKLLNNKFASFIDKVQFLEQQNKVLETKWNLLQQQTTTTSSKNLEPLFETYLSVLRKQLDTLGNDKGRLQSELKTMQDSVEDFKTKYEEEINKRTAAENDFVVLKKDVDAAYLNKVELEAKVDSLNDEINFLKVLYDAELSQMQTHVSDTSVVLSMDNNRNLDLDSIIAEVRAQYEEIAQRSKAEAEALYQTKVQQLQISVDQHGDNLKNTKSEIAELNRMIQRLRAEIENIKKQCQTLQVSVADAEQRGENALKDAHSKRVELEAALQQAKEELARMLREYQELMSVKLALDIEIATYRKLLEGEEYRMSGECQSAVSISVVSGSTSTGGISGGLGSGSGFGLSSGFGSGSGSGFGFGGSVSGSSSSKIISTTTLNKRR

SEQ ID NO: 20385 - protein, 158 aa, Homo sapiens
MSYVVTKTKAINGKYHRFLGRHFPRFYVLYTIFMKVPPRRHQVSFPRYYFHSTFCQLPGLLANRGTHPAIHDILALRECFSNHPLGMNQLQALHVKALSRAMLLTSYLPPPLLRHRLKTHTTVIHQLDKALAKLGIGQLTAQEVKSACYLRGLNSTHI

SEQ ID NO: 20386 - protein, 156 aa, Homo sapiens
MSKSESPKEPEQLRKLFIGGLSFETTDESLRSHFEQWGTLTDCVVMRDPNTKRSRGFGFVTYATVEEVDAAMNARPHKVDGRVVEPKRAVSREDSQRPGAHLTVKKIFVGGFGGSRGGGGYGGSGDGYNGFGNDGSNFGGGGSYNDFGNYNNQSSN

SEQ ID NO: 20387 - protein, 693 aa, Homo sapiens
MEVNCLTLKDLISPRQPRLDFAVEDGENAQKENIFVDRSRMAPKTPIKNEPIDLSKQKKFTPERNPITPVKFVDRQQAEPWTPTANLKMLISAASPDIRDREKKKGLFRPIENKDDAFTDSLQLDVVGDSAVDEFEKQRPSRKQKSLGLLCQKFLARYPSYPLSTEKTTISLDEVAVSLGVERRRIYDIVNVLESLHLVSRVAKNQYGWHGRHSLPKTLRNLQRLGEEQKYEEQMAYLQQKELDLIDYKFGERKKDGDPDSQEQQLLDFSEPDCPSSSANSRKDKSLRIMSQKFVMLFLVSKTKIVTLDVAAKILIEESQDAPDHSKFKTKVRRLYDIANVLTSLALIKKVHVTEERGRKPAFKWIGPVDFSSSDEELVDVSASVLPELKRETYGQIQVCAKQKLARHGSFNTVQASERIQRKVNSEPSSPYREEQGSGGYSLEIGSLAAVYRQKIEDNSQGKAFASKRVVPPSSSLDPVAPFPVLSVDPEYCVNPLAHPVFSVAQTDLQAFSMQNGLNGQVDVSLASAASAVESLKPALLAGQPLVYVPSASLFMLYGSLQEGPASGSGSERDDRSSEAPATVELSSAPSAQKRLCEERKPQEEDEPATKRQSREYEDGPLSLVMPKKPSDSTDLASPKTMGNRASIPLKDIHVNGQLPAAEEISGKATANSLVSSEWGNPSRNTDVEKPSK

SEQ ID NO: 20388 - protein, 344 aa, Homo sapiens
MEAARPFAREWRAQSLPLAVGGVLKLRLCELWLLLLGSSLNARFLPDEEDVDFINEYVNLHNELRGDVIPRGSNLRFMTWDVALSRTARAWGKKCLFTHNIYLQDVQMVHPKFYGIGENMWVGPENEFTASIAIRSWHAEKKMYNFENGSCSGDCSNYIQLVWDHSYKVGCAVTPCSKIGHIIHAAIFICNYAPGGTLTRRPYEPGIFCTRCGRRDKCTDFLCSNADRDQATYYRFWYPKWEMPRPVVCDPLCTFILLLRILCFILCVITVLIVQSQFPNILLEQQMIFTPEESEAGNEEEEKEEEKKEKEEMEMEIMEMEEEKEEREEEEEETQKEKMEEEEK

SEQ ID NO: 20389 - protein, 125 aa, Homo sapiens
MKSHRCYDLIPTSSKLVVFDTSLQVKKAFFALVTNGVRAAPLWDSKKQSFVGMLTITDFINILHRYYKSALVQIYELEEHKIETWREVYLQDSFKPLVCISPNASLFDAVSSLIRNKIHRLPVID

SEQ ID NO: 20390 - protein, 164 aa, Homo sapiens
MQPPLDLKQILPFPLEPAPTLGLFSNYSTMDPVQKAVLSHTFGGPLLKTKRPVISCNICQIRFNSQSQAEAHYKGNRHARRVKGIEAAKTRGREPGVREPGDPAPPGSTPTNGDGVAPRPVSMENGLGPAPGSPEKQPGSPSPPSIPETGQGVTKGEGGTPAPA

SEQ ID NO: 20391 - protein, 69 aa, Homo sapiens
MKSHRCYDLIPTSSKLVVFDTSLQVKKAFFALVTNGVRAAPLWDSKKQSFVGMLTITDFINILHRYYKS

SEQ ID NO: 20392 - protein, 637 aa, Homo sapiens
MIAELVSSALGLALYLNTLSADFCYDDSRAIKTNQDLLPETPWTHIFYNDFWGTLLTHSGSHKSYRPLCTLSFRLNHAIGGLNPWSYHLVNVLLHAAVTGLFTSFSKILLGDGYWTFMAGLMFASHPIHTEAVAGIVGRADVGASLFFLLSLLCYIKHCSTRGYSARTWGWFLGSGLCAGCSMLWKEQGVTVLAVSAVYDVFVFHRLKIKQILPTIYKRKNLSLFLSISLLIFWGSSLLGARLYWMGNKPPSFSNSDNPAADSDSLLTRTLTFFYLPTKNLWLLLCPDTLSFDWSMDAVPLLKTVCDWRNLHTVAFYTGLLLLAYYGLKSPSVDRECNGKTVTNGKQNANGHSCLSDVEYQNSETKSSFASKVENGIKNDVSQRTQLPSTENIVVLSLSLLIIPFVPATNLFFYVGFVIAERVLYIPSMGFCLLITVGARALYVKVQKRFLKSLIFYATATLIVFYGLKTAIRNGDWQNEEMLYRSGIKVNPAKAWGNLGNVLKSQSKISEAESAYRNALYYRSNMADMLYNLGLLLQENSRFAEALHYYKLAIGSRPTLASAYLNTGIILMNQGRTEEARRTFLKCSEIPDENLKDPHAHKSSVTSCLYNLGKLYHEQGHYEVWPMPLCPFPSPLF

SEQ ID NO: 20393 - protein, 259 aa, Homo sapiens
MATAAQGPLSLLWGWLWSERFWLPENVSWADLEGPADGYGYPRGRHILSVFPLAAGIFFVRLLFERFIAKPCALCIGIEDSGPYQAQPNAILEKVFISITKYPDKKRLEGLSKQLDWNVRKIQCWFRHRRNQDKPPTLTKFCESMWRFTFYLCIFCYGIRFLWSSPWFWDIRQCWHNYPFQDFLIMFVHHLVTIGLISFSYINNMVRVGTLIMCLHDVSDFLLEAAKLANYAKYQRLCDTLFVIFSAVFMVTRLGIYPF

SEQ ID NO: 20394 - protein, 690 aa, Homo sapiens
MTDTVFSNSSNRWMYPSDRPLQSKLQAGWSVHPGGQPDRQRKQEELTDEEKEIINRVIARAEKMEEMEQERIGRLVDRLENMRKNVAGDGVNRCILCGEQLGMLGSACVVCEDCKKNVCTKCGVETNNRLHSVWLCKICIEQREVWKRSGAWFFKGFPKQVLPQPMPIKKTKPQQPVSEPAAPEQPAPEPKHPARAPARGDSEDRRGPGQKTGPDPASAPGRGNYGPPVRRASEARMSSSSRDSESWDHSGGAGDSSRSPAGLRRANSVQASRPAPGSVQSPAPPQPGQPGTPGGSRPGPGPAGRFPDQKPEVAPSDPGTTAPPREERTGGVGGYPAVGAREDRMSHPSGPYSQASAAAPQPAAARQPPPPEEEEEEANSYDSDEATTLGALEFSLLYDQDNSSLQCTIIKAKGLKPMDSNGLADPYVKLHLLPGASKSNKLRTKTLRNTRNPIWNETLVYHGITDEDMQRKTLRISVCDEDKFGHNEFIGETRFSLKKLKPNQRKNFNICLERVIPMKRAGTTGSARGMALYEEEQVERVGDIEERGKILVSLMYSTQQGGLIVGIIRCVHLAAMDANGYSDPFVKLWLKPDMGKKAKHKTQIKKKTLNPEFNEEFFYDIKHSDLAKKSLDISVWDYDIGKSNDYIGGCQLGISAKGERLKHWYECLKNKDKKIERWHQLQNENHVSSD

SEQ ID NO: 20395 - protein, 629 aa, Homo sapiens
MGKIENNERVILNVGGTRHETYRSTLKTLPGTRLALLASSEPPGDCLTTAGDKLQPSPPPLSPPPRAPPLSPGPGGCFEGGAGNCSSRGGRASDHPGGGREFFFDRHPGVFAYVLNYYRTGKLHCPADVCGPLFEEELAFWGIDETDVEPCCWMTYRQHRDAEEALDIFETPDLIGGDPGDDEDLAAKRLGIEDAAGLGGPDGKSGRWRRLQPRMWALFEDPYSSRAARFIAFASLFFILVSITTFCLETHEAFNIVKNKTEPVINGTSVVLQYEIETDPALTYVEGVCVVWFTFEFLVRIVFSPNKLEFIKNLLNIIDFVAILPFYLEVGLSGLSSKAAKDVLGFLRVVRFVRILRIFKLTRHFVGLRVLGHTLRASTNEFLLLIIFLALGVLIFATMIYYAERVGAQPNDPSASEHTQFKNIPIGFWWAVVTMTTLGYGDMYPQTWSGMLVGALCALAGVLTIAMPVPVIVNNFGMYYSLAMAKQKLPRKRKKHIPPAPQASSPTFCKTELNMACNSTQSDTCLGKDNRLLEHNRSVLSGDDSTGSEPPLSPPERLPIRRSSTRDKNRRGETCFLLTTGDYTCASDGGIRKVLYRIYHGLLTAEKGTVEFSHTKDYTGNRLLLLNVP

SEQ ID NO: 20396 - protein, 799 aa, Homo sapiens
KDTPSYQSMTSLHTSSESIDLPLSHHGSLSGLTTGTHEVQSLLMRTGSVRSTLSERYTPSSRQANQEEGKEWLRSHSTGGLQDTGNQSPLVSPSAMSSSAAGKYHFSNLVSPTNLSQFNLPGPSMMRSNSIPAQDSSFDLYDDSQLCGSATSLEERPRAISHSGSFRDSMEEVHGSSLSLVSSTSSLYSTAEEKAHSEQIHKLRRELVASQEKVATLTSQLSANAHLVAAFEKSLGNMTGRLQSLTMTAEQKESELIELRETIEMLKAQNSAAQAAIQGALNGPDHPPKDLRIRRQHSSESVSSINSATSHSSIGSGNDADSKKKKKKNWLRSSFKQAFGKKKSTKPPSSHSDIEELTDSSLPASPKLPHNAGDCGSASMKPSQSASAICECTEAEAEIILQLKSELREKELKLTDIRLEALSSAHHLDQIREAMNRMQNEIEILKAENDRLKAETGNTAKPTRPPSESSSSTSSSSSRQSLGLSLNNLNITEAVSSDILLDDAGDATGHKDGRSVKIIVSISKGYGRAKDQKSQAYLIGSIGVSGKTKWDVLDGVIRRLFKEYVFRIDTSTSLGLSSDCIASYCIGDLIRSHNLEVPELLPCGYLVGDNNIITVNLKGVEENSLDSFVFDTLIPKPITQRYFNLLMEHHRIILSGPSGTGKTYLANKLAEYVITKSGRKKTEDAIATFNVDHKSSKELQQYLANLAEQCSADNNGVELPVVIILDNLHHVGSLSDIFNGFLNCKYNKCPYIIGTMNQGVSSSPNLELHHNFRWVLCANHTEPVKGFLGRYLRRKLIEI

SEQ ID NO: 20397 - protein, 443 aa, Homo sapiens
MYDDSYVPGFEDSEAGSADSYTSRPSLDSDVSLEEDRESARREVESQAQQQLERAKKYSNDWWIGRLVKEGGDIAFIPSPQRLESIRLKQEQKARRSGNPSSLSDIGNRRSPPPSLAKQKQKQAEHVPPYDVVPSMRPVVLVGPSLKGYEVTDMMQKALFDFLKHRFDGRISITRVTADLSLAKRSVLNNPGKRTIIERSSARSSIAEVQSEIERIFELAKSLQLVVLDADTINHPAQLAKTSLAPIIVFVKVSSPKVLQRLIRSRGKSQMKHLTVQMMAYDKLVQCPPESFDVILDENQLEDACEHLAEYLEVYWRATHHPAPGPGLLGPPSAIPGLQNQQLLGERGEEHSPLERDSLMPSDEASESSRQAWTGSSQRSSRHLEEDYADAYQDLYQPHRQHTSGLPSANGHDPQDRLLAQDSEHNHSDRNWQRNRPWPKDSY

SEQ ID NO: 20398 - protein, 95 aa, Homo sapiens
MMAGMKIQLVCMLLLAFSSWSLCSDSEEEMKALEADFLTNMHTSKLIQEDILDTGNDKNGKEEVIKRKIPYILKRQLYENKPRRPYILKRDSYYY

SEQ ID NO: 20399 - protein, 333 aa, Homo sapiens
MVPGEEPARELMAVLLTPRFRRLVSQNELPGPGLNGPSSRNRRDGFCRKRRTGVHLCQVLMNHKVFEPVGMKKLFKKEKELEFEDSNISLYRFLGNKSSYDCCKRQKDAENEFNETLRPGYEMISNPLAQEIGEERIEELIHTINGNPALCPNITVQKPFLRLSKEGVSFYTAITSDKTDVWKEQTLLCLLQLIHLPFLDNILEPPVKTQNLQLNKEEDLVITNTCLDRELIPSLCLPEIDNWLNAAIECLEYFPDQLIVTVSQQLMQNRNEETRLNSQKKILFDVIAKYYAQERDCLLTDEYFDIHSGIIELLENEKRAEALEATQLYLRLL

SEQ ID NO: 20400 - protein, 1504 aa, Homo sapiens
MWVAKWLTGLLYHLSLFITRSWEVDFHPRQEALVRTLTSYEVVIPERVNEFGEVFPQSHHFSRQKRSSEALEPMPFRTHYRFTAYGQLFQLNLTADASFLAAGYTEVHLGTPERGAWESDAGPSDLRHCFYRGQVNSQEDYKAVVSLCGGLTGTFKGQNGEYFLEPIMKADGNEYEDGHNKPHLIYRQDLNNSFLQTLKYCSVSESQIKETSLPFHTYSNMNEDLNVMKERVLGHTSKNVPLKDERRHSRKKRLISYPRYIEIMVTADAKVVSAHGSNLQNYILTLMSIVATIYKDPSIGNLIHIVVVKLVMIHREEEGPVINFDGATTLKNFCSWQQTQNDLDDVHPSHHDTAVLITREDICSSKEKCNMLGLSYLGTICDPLQSCFINEEKGLISAFTIAHELGHTLGVQHDDNPRCKEMKVTKYHVMAPALSFHMSPWSWSNCSRKYVTEFLDTGYGECLLDKPDEEIYNLPSELPGSRYDGNKQCELAFGPGSQMCPHINICMHLWCTSTEKLHKGCFTQHVPPADGTDCGPGMHCRHGLCVNKETETRPVNGEWGPWEPYSSCSRTCGGGIESATRRCNRPEPRNGGNYCVGRRMKFRSCNTDSCPKGTQDFREKQCSDFNGKHLDISGIPSNVRWLPRYSGIGTKDRCKLYCQVAGTNYFYLLKDMVEDGTPCGTETHDICVQGQCMAAGCDHVLNSSAKIDKCGVCGGDNSSCKTITGVFNSSHYGYNVVVKIPAGATNVDIRQYSYSGQPDDSYLALSDAEGNFLFNGNFLLSTSKKEINVQGTRTVIEYSGSNNAVERINSTNRQEKELILQVLCVGNLYNPDVHYSFNIPLEERSDMFTWDPYGPWEGCTKMCQGLQRRNITCIHKSDHSVVSDKECDHLPLPSFVTQSCNTDCELRWHVIGKSECSSQCGQGYRTLDIHCMKYSIHEGQTVQVDDHYCGDQLKPPTQELCHGNCVFTRWHYSEWSQCSRSCGGGERSRESYCMNNFGHRLADNECQELSRVTRENCNEFSCPSWAASEWSECLVTCGKGTKQRQVWCQLNVDHLSDGFCNSSTKPESLSPCELHTCASWQVGPWGPCTTTCGHGYQMRDVKCVNELASAVLEDTECHEASRPSDRQSCVLTPCSFISKLETALLPTVLIKKMAQWRHGSWTPCSVSCGRGTQARYVSCRDALDRIADESYCAHLPRPAEIWDCFTPCGEWQAGDWSPCSASCGHGKTTRQVLCMNYHQPIDENYCDPEVRPLMEQECSLAACPPAHSHFPSSPVQPSYYLSTNLPLTQKLEDNENQVVHPSVRGNQWRTGPWGSCSSSCSGGLQHRAVVCQDENGQSASYCDAASKPPELQQCGPGPCPQWNYGNWGECSQTCGGGIKSRLVICQFPNGQILEDHNCEIVNKPPSVIQCHMHACPADVSWHQEPWTSEDLKVKLLPQRTIILWELMKNIFCHGKHSHMYLINVVTDHLLYPRHCDPETIETYFLSLWSLQFTWGDLKYYKNSL

SEQ ID NO: 20401 - protein, 375 aa, Homo sapiens
MEMQQNCSISCFWETQPLGCVKISCIFYHSKPRNINGLFLPPSSNITLQKEIQEGIPLQSQSQEPLKPQENISRPIHHPLVLKTNFEEEEEVDEQNDASSLWTKTPEEIEEKRAIKEMCYKSGEYYRFHTPPDILSSKSMTPTAEKQLEKPLENGSELQEGDSLTVPTKLSQYERQGEIKTSLHGKPKTDIAAFENGGGDCYVPQRVIFLGVDESEALTEEKEITISKCSNTKVNDVQPVKKPHFKGVKKRKWIYDEPQNFPNSGMQRAVQAPRPQNKMSYHRNNKNRNAENASYIHVQRDAVRTVALNAPSRSRPTHGSYNKVHANREPKPNLSPDKYTSTSYNDSAWRKRIPFSKTYSKSEKIYPEPRRNGSK

SEQ ID NO: 20402 - protein, 302 aa, Homo sapiens
RNTPAKSLDKFIEDYLLPDTCFRMQINHAIDIICGFLKERCFRGSSYPVCVSKVVKGGSSGKGTTLRGRSDADLVVFLSPLTTFQDQLNRRGEFIQEIRRQLEACQRERAFSVKFEVQAPRWGNPRALSFVLSSLQLGEGVEFDVLPAFDALGQLTGGYKPNPQIYVKLIEECTDLQKEGEFSTCFTELQRDFLKQRPTKLKSLIRLVKHWYQNCKKKLGKLPPQYALELLTVYAWERGSMKTHFNTAQGFRTVLELVINYQQLCIYWTKYYDFKNPIIEKYLRRQLTKPRYAIPTWLSSPM

SEQ ID NO: 20403 - protein, 1583 aa, Homo sapiens
MEAEFYMVILTCLIFRNSGFQIVHVQKQQCLFKNEKVVVGSCNRTIQNQQWMWTEDEKLLHVKSALCLAISNSSRGPSRSAILDRCSQAPRWTCYDQEGFLEVENASLFLQKQGSRVVVKKARKYLHSWMKIDVNKEGKLVNESLCLQKAGLGAEVSVRSTRNTAPPQILTTFNAVPDGLVFLIRNTTEAFIRNAAENYSQNSSERQHPNLHMTGITDTSWVLSTTQPFSSTTEETGLAEPERCNFTLAESKASSHSVSIQWRILGSPCNFSLIYSSDTLGAALCPTFRIDNTTYGCNLQDLQAGTIYNFRIISLDEERTVVLQTDPLPPARFGVSKEKTTSTSLHVWWTPSSGKVTSYEVQLFDENNQKIQGVQIQESTSWNEYTFFNLTAGSKYNIAITAVSGGKRSFSVYTNGSTVPSPVKDIGISTKANSLLISWSHGSGNVERYRLMLMDKGILVHGGVVDKHATSYAFHGLTPGYLYNLTVMTEAAGLQNYRWKLVRTAPMEVSNLKVTNDGSLTSLKVKWQRPPGNVDSYNITLSHKGTIKESRVLAPWITETHFKELVPGRLYQVTVSCVSGELSAQKMAVGRTFPDKVANLEANNNGRMRSLVVSWSPPAGDWEQYRILLFNDSVVLLNITVGKEETQYVMDDTGLVPGRQYEVEVIVESGNLKNSERCQGRTVPLAVLQLRVKHANETSLSIMWQTPVAEWEKYIISLADRDLLLIHKSLSKDAKEFTFTDLVPGRKYMATVTSISGDLKNSSSVKGRTVPAQVTDLHVANQGMTSSLFTNWTQAQGDVEFYQVLLIHENVVIKNESISSETSRYSFHSLKSGSLYSVVVTTVSGGISSRQVVVEGRTVPSSVSGVTVNNSGRNDYLSVSWLLAPGDVDNYEVTLSHDGKVVQSLVIAKSVRECSFSSLTPGRLYTVTITTRSGKYENHSFSQERTVPDKVQGVSVSNSARSDYLRVSWVHATGDFDHYEVTIKNKNNFIQTKSIPKSENECVFVQLVPGRLYSVTVTTKSGQYEANEQGNGRTIPEPVKDLTLRNRSTEDLHVTWSGANGDVDQYEIQLLFNDMKVFPPFHLVNTATEYRFTSLTPGRQYKILVLTISGDVQQSAFIEGFTVPSAVKNIHISPNGATDSLTVNWTPGGGDVDSYTVSAFRHSQKVDSQTIPKHVFEHTFHRLEAGEQYQIMIASVSGSLKNQINVVGRTVPASVQGVIADNAYSSYSLIVSWQKAAGVAERYDILLLTENGILLRNTSEPATTKQHKFEDLTPGKKYKIQILTVSGGLFSKEAQTEGRTVPAAVTDLRITENSTRHLSFRWTASEGELSWYNIFLYNPDGNLQERAQVDPLVQSFSFQNLLQGRMYKMVIVTHSGELSNESFIFGRTVPASVSHLRGSNRNTTDSLWFNWSPASGDFDFYELILYNPNGTKKENWKDKDLTEWRFQGLVPGRKYVLWVVTHSGDLSNKVTAESRTAPSPPSLMSFADIANTSLAITWKGPPDWTDYNDFELQWLPRDALTVFNPYNNRKSEGRIVYGLRPGRSYQFNVKTVSGDSWKTYSKPIFGSVRTSMTCFATLISQME

SEQ ID NO: 20404 - protein, 681 aa, Homo sapiens
MESMLNKLKSTVTKVTADVTSAVMGNPVTREFDVGRHIASGGNGLAWKIFNGTKKSTKQEVAVFVFDKKLIDKYQKFEKDQIIDSLKRGVQQLTRLRHPRLLTVQHPLEESRDCLAFCTEPVFASLANVLGNWENLPSPISPDIKDYKLYDVETKYGLLQVSEGLSFLHSSVKMVHGNITPENIILNKSGAWKIMGFDFCVSSTNPSEQEPKFPCKEWDPNLPSLCLPNPEYLAPEYILSVSCETASDMYSLGTVMYAVFNKGKPIFEVNKQDIYKSFSRQLDQLSRLGSSSLTNIPEEVREHVKLLLNVTPTVRPDADQMTKIPFFDDVGAVTLQYFDTLFQRDNLQKSQFFKGLPKVLPKLPKRVIVQRILPCLTSEFVNPDMVPFVLPNVLLIAEECTKEEYVKLILPELGPVFKQQEPIQILLIFLQKMDLLLTKTPPDEIKNSVLPMVYRALEAPSIQIQELCLNIIPTFANLIDYPSMKNALIPRIKNACLQTSSLAVRVNSLVCLGKILEYLDKWFVLDDILPFLQQIPSKEPAVLMGILGIYKCTFTHKKLGITKEQLAGKVLPHLIPLSIENNLNLNQFNSFISVIKEMLNRLESEHKTKLEQLHIMQEQQKSLDIGNQMNVSEEMKVTNIGNQQIDKVFNNIGADLLTGSESENKEDGLQNKHKRASLTLE

SEQ ID NO: 20405 - protein, 466 aa, Homo sapiens
NSEFKSETAAIPSAPVLPPPPVHSSIPPPGPVPMGMPPMSKPPPVQQTVDYGHGRDISTNKVEQIPYGERITLRPDPLPERSTFETEHAGQRDRYDRERDREPYFDRQSNVIADHRDFKRDRETHRDRDRDRGVIDYDRDRFDRERRPRDDRAQSYRDKKDHSSSRRGGFDRPSYDRKSDRPVYEGPSMFGGERRTYPEERMPLPAPSLSHQPPPAPRVEKKPESKNVDDILKPPGRESRPERIVVIMRGLPGSGKTHVAKLIRDKEVEFGGPAPRVLSLDDYFITEVEKEEKDPDSGKKVKKKVMEYEYEAEMEETYRTSMFKTFKKTLDDGFFPFIILDAINDRVRHFDQFWSAAKTKGFEVYLAEMSADNQTCGKRNIHGRKLKEINKMADHWETAPRHMMRLDIRSLLQDAAIEEVEMEDFDANIEEQKEEKKDAEEEESELVGDRPTTLNSVSLLKFLKKV

SEQ ID NO: 20406 - protein, 935 aa, Homo sapiens
MIRIFPDFSVQVTAAAAGGAAAGVPAGAGMGRAGAAANGTPQNVQGITSYQQRLQALRKEKSRDAARSRRGKENFEFYELAKLLPLPAAITSQLDKASIIRLTISYLKMRDFANQGDPPWNLRMEGPPPNTSVKVIGAQRRRSPSALAIEVFEAHLGSHILQSLDGFVFALNQEGKFLYISETVSIYLGLSQVELTGSSVFDYVHPGDHVEMAEQLGMKLPPGRGLLSQGTAEDGASSASSSSQSETPEPVESTSPSLLTTDNTLERSFFIRMKSTLTKRGVHIKSSGYKVIHITGRLRLRVSLSHGRTVPSQIMGLVVVAHALPPPTINEVRIDCHMFVTRVNMDLNIIYCENRISDYMDLTPVDIVGKRCYHFIHAEDVEGIRHSHLDLLNKGQCVTKYYRWMQKNGGYIWIQSSATIAINAKNANEKNIIWVNYLLSNPEYKDTPMDIAQLPHLPEKTSESSETSDSESDSKDTSEDNENSKSDEKGNQSENSEDPEPDRKKSGNACDNDMNCNDDGHSSSNPDSRDSDDSFEHSDFENPKAGEDGFGALGAMQIKVERYVESESDLRLQNCESLTSDSAKDSDSAGEAGAQASSKHQKRKKRRKRQKGGSASRRRLSSASSPGGLDAGLVEPPRLLSSPNSASVLKIKTEISEPINFDNDSSIWNYPPNREISRNESPYSMTKPPSSEHFPSPQGGGGGGGGGGGLHVAIPDSVLTPPGADGAAARKTQFGASATAALAPVASDPLSPPLSASPRDKHPGNGGGGGGGGGGAGGGGPSASNSLLYTGDLEALQRLQAGNVVLPLVHRVTGTLAATSTAAQRVYTTGTIRYAPAEVTLAMQSNLLPNAHAVNFVDVNSPGFGLDPKTPMEMLYHHVHRLNMSGPFGGAVSAASLTQMPAGNVFTTAEGLFSTLPFPVYSNGIHAAQTLERKE

SEQ ID NO: 20407 - protein, 387 aa, Homo sapiens
MVPGEEPARELMAVLLTPRFRRLVSQNELPGPGLNGPSSRNRRDGFCRKRRTGCSGPFQATQLWDGIIHSLQAQVEIKRRRHHLQTYKDCFTGSDAVDVVLSHLMQNTCLSSNDISCLKGVHLCQVLMNHKVFEPVGMKKLFKKEKELEFEDSNISLYRFLGNKSSYDCCKRQKDAENEFNETLRPGYEMISNPLAQEIGEERIEELIHTINGNPALCPNITVQKPFLRLSKEDVWKEQTLLCLLQLIHLPFLDNILEPPVKTQNLQLNKEEDLVITNTCLDRELIPSLCLPEIDNWLNAAIECLEYFPDQLIVTVSQQLMQNRNEETRLNSQKKILFDVIAKYYAQERDCLLTDEYFDIHSGIIELLENEKRAEALEATQLYLRLL

SEQ ID NO: 20408 - protein, 577 aa, Homo sapiens
MDPGAGSETSLTVNEQVIVMSGHETIRVLEVGVDAQLPAEEESKGLEGVAAEGSQSGDPAEASQAAGEAGPDNLGSSAEATVTPGDPSEPCHCHCHLQPSPKPASGIADPDATGCTSCPPGQVAGQQGLAVWTIPTATVAALPGLTAASPTGGVFKPPLAGLQAAAVLNTALPAPVQAAAPVQASSTAQPRPPAQPQTLFQTQPLLQTTPAILPQPTAATAAAPTPKPVDTPPQITVQPAGFAFSPGIISAASLGGQTQILGSLTTAPVITSAIPSMPGISSQILTNAQGQVIGTLPWVVNSASVAAPAPAQSLQVQAVTPQLLLNAQGQVIATLASSPLPPPVAVRKPSTPESPAKSEVQPIQPTPTVPQPAVVIASPAPAAKPSASAPIPITCSETPTVSQLVSKPHTPSLDEDGINLEEIREFAKNFKIRRLSLGLTQTQVGQALTATEGPAYSQSAICRFEKLDITPKSAQKLKPVLEKWLNEAELRNQEGQQNLMEFVGGEPSKKRKRRTSFTPQAIEALNAYFEKNPLPTGQEITEIAKELNYDREVVRVWFCNRRQTLKNTSKLNVFQIP

SEQ ID NO: 20409 - protein, 244 aa, Homo sapiens
AKLSRAEQRMNRLDQCYCERTCTMKGTTYREFESWIDGCKNCTCLNGTIQCETLICPNPDCPLKSALAYVDGKCSICQFQGRTYFEGERNTVYSSSGVCVLYECKDQTMKLVESSGCPALDCPESHQITLSHSCCKVCKGYDFCSERHNCMENSICRNLNDRAVCSCRDGFRALREDNAYCEDIDECAEGRHYCRENTMCVNTPGSFMCICKTGYIRIDDYSCTEHDECITNQHNCDENALCFN

SEQ ID NO: 20410 - protein, 152 aa, Homo sapiens
EPLETEGATRSMLSSFLPPVPSLPSDPPEHFPLRKTVSEPNLKLRYKPKKSLERRKNPLLRKESAPPSLRRRPAETLGDSSPSSSSTPASGCSSPNDSEHGPNPILGSEALLGQRLRLQETSVAPFALPTVSLLPAITLGLPAPARALMPRC

SEQ ID NO: 20411 - protein, 1237 aa, Homo sapiens
MDAKARNCLLQHREALEKDIKTSYIMDHMISDGFLTISEEEKVRNEPTQQQRAAMLIKMILKKDNDSYVSFYNALLHEGYKDLAALLHDGIPVVSSSSVRTVLCEGGVPQRPVVFVTRKKLVNAIQQKLSKLKGEPGWVTIHGMAGCGKSVLAAEAVRDHSLLEGCFPGGVHWVSVGKQDKSGLLMKLQNLCTRLDQDESFSQRLPLNIEEAKDRLRILMLRKHPRSLLILDDVWDSWVLKAFDSQCQILLTTRDKSVTDSVMGPKYVVPVESSLGKEKGLEILSLFVNMKKADLPEQAHSIIKECKGSPLVVSLIGALLRDFPNRWEYYLKQLQNKQFKRIRKSSSYDYEALDEAMSISVEMLREDIKDYYTDLSILQKDVKVPTKVLCILWDMETEEVEDILQEFVNKSLLFCDRNGKSFRYYLHDLQVDFLTEKNCSQLQDLHKKIITQFQRYHQPHTLSPDQEDCMYWYNFLAYHMASAKMHKELCALMFSLDWIKAKTELVGPAHLIHEFVEYRHILDEKDCAVSENFQEFLSLNGHLLGRQPFPNIVQLGLCEPETSEVYQQAKLQAKQEVDNGMLYLEWINKKNITNLSRLVVRPHTDAVYHACFSEDGQRIASCGADKTLQVFKAETGEKLLEIKAHEDEVLCCAFSTDDRFIATCSVDKKVKIWNSMTGELVHTYDEHSEQVNCCHFTNSSHHLLLATGSSDCFLKLWDLNQKECRNTMFGHTNSVNHCRFSPDDKLLASCSADGTLKLWDATSANERKSINVKQFFLNLEDPQEDMEVIVKCCSWSADGARIMVAAKNKIFLFDIHTSGLLGEIHTGHHSTIQYCDFSPQNHLAVVALSQYCVELWNTDSRSKVADCRGHLSWVHGVMFSPDGSSFLTSSDDQTIRLWETKKVCKNSAVMLKQEVDVVFQENEVMVLAVDHIRRLQLINGRTGQIDYLTEAQVSCCCLSPHLQYIAFGDENGAIEILELVNNRIFQSRFQHKKTVWHIQFTADEKTLISSSDDAEIQVWNWQLDKCIFLRGHQETVKDFRLLKNSRLLSWSFDGTVKVWNIITGNKEKDFVCHQGTVLSCDISHDATKFSSTSADKTAKIWSFDLLLPLHELRGHNGCVRCSAFSVDSTLLATGDDNGEIRIWNVSNGELLHLCAPLSEEGAATHGGWVTDLCFSPDGKMLISAGGYIKWWNVVTGESSQTFYTNGTNLKKIHVSPDFKTYVTVDNLGILYILQTLE

SEQ ID NO: 20412 - protein, 231 aa, Homo sapiens
MQPPLDLKQILPFPLEPAPTLGLFSNYSTMDPVQKAVLSHTFGGPLLKTKRPVISCNICQIRFNSQSQAEAHYKGNRHARRVKGIEAAKTRGREPGVREPGDPAPPGSTPTNGDGVAPRPVSMENGLGPAPGSPEKQPGSPSPPSIPETGQGVTKGEGGTPAPASLPGGSKEEEEKAKRLLYCALCKVAVNSLSQLEAHNKGTKHKTILEARSGLGPIKAYPRLGPPTPGE

SEQ ID NO: 20413 - protein, 221 aa, Homo sapiens
MVTFVCRVHESSPAQLAGLTPGDTIASVNGLNVEGIRHREIVDIIKASGNVLRLETLYGTSIRKAELEARLQYLKQTLYEKWGEYRSLMVQEQRLVHGLVVKDPSIYDTLESVRSCLYGAGLLPGSLPFGPLLAVPGRPRGGARRARGDADDAVYHTCFFGDSEPPALPPPPPPARAFGPGPAETPAVGPGPGPRAALSRSASVRCAGPGGGGGGGAPGAL

SEQ ID NO: 20414 - protein, 208 aa, Homo sapiens
MVRAQNKKKKKSGGFQSMGLSYPVFKGIMKKGYKVPTPIQRKTIPVILDGKDVVAMARTGSGKTACFLLPMFERLKTHSAQTGARALILSPTRELALQTLKFTKELGKFTGLKTALILGGDRMEDQFAALHENPDIIIATPGRLVHVAVEMSLKLQSVEYVVFDEADRLFEMGFAEQLQEIIARLPGGHQTVLFSATLPKLLVEFARA

SEQ ID NO: 20415 - protein, 814 aa, Homo sapiens
MVLRRMHRPRSCSYQLLLEHQRPSCIQGLRWTPLTNSEESLDFSESLEQASTERVLRAGRQLHRHLLATCPNLIRDRKYHLRLYRQCCSGRELVDGILALGLGVHSRSQVVGICQVLLDEGALCHVKHDWAFQDRDAQFYRFPGPEPEPVRTHEMEEELAEAVALLSQRGPDALLTVALRKPPGQRTDEELDLIFEELLHIKAVAHLSNSVKRELAAVLLFEPHSKAGTVLFSQGDKGTSWYIIWKGSVNVVTHGKGLVTTLHEGDDFGQLALVNDAPRAATIILREDNCHFLRVDKQDFNRIIKDVEAKTMRLEEHGKVVLVLERASQGAGPSRPPTPGRNRYTVMSGTPEKILELLLEAMGPDSSAHDPTETFLSDFLLTHRVFMPSAQLCAALLHHFHVEPAGGSEQERSTYVCNKRQQILRLVSQWVALYGSMLHTDPVATSFLQKLSDLVGRDTRLSNLLREQWPERRRCHRLENGCGNASPQMKARNLPVWLPNQDEPLPGSSCAIQVGDKDAIGLQPDARGVATSLGLNERLFVVNPQEVHELIPHPDQLGPTVGSAEGLDLVSAKDLAGQLTDHDWSLFNSIHQVELIHYVLGPQHLRDVTTANLERFMRRFNELQYWVATELCLCPVPGPRAQLLRKFIKLAAHNSAISRLAHTWERLPHKVRKLYSALERLLDPSWNHRVYRLALAKLSPPVIPFMPLLLKDMTFIHEGNHTLVENLINFEKMRMMARAARMLHHCRSHNPVPLSPLRSRVSHLHEDSQVARISTCSEQSLSTRSPASTWAYVQQLKVIDNQRELSRLSRELEP

SEQ ID NO: 20416 - protein, 921 aa, Homo sapiens
MRANDALQVLGLLFSLARGSEVGNSQAVCPGTLNGLSVTGDAENQYQTLYKLYERCEVVMGNLEIVLTGHNADLSFLQWIREVTGYVLVAMNEFSTLPLPNLRVVRGTQVYDGKFAIFVMLNYNTNSSHALRQLRLTQLTEILSGGVYIEKNDKLCHMDTIDWRDIVRDRDAEIVVKDNGRSCPPCHEVCKGRCWGPGSEDCQTLTKTICAPQCNGHCFGPNPNQCCHDECAGGCSGPQDTDCFACRHFNDSGACVPRCPQPLVYNKLTFQLEPNPHTKYQYGGVCVASCPHNFVVDQTSCVRACPPDKMEVDKNGLKMCEPCGGLCPKACEGTGSGSRFQTVDSSNIDGFVNCTKILGNLDFLITGLNGDPWHKIPALDPEKLNVFRTVREITGYLNIQSWPPHMHNFSVFSNLTTIGGRSLYNRGFSLLIMKNLNVTSLGFRSLKEISAGRIYISANRQLCYHHSLNWTKVLRGPTEERLDIKHNRPRRDCVAEGKVCDPLCSSGGCWGPGPGQCLSCRNYSRGGVCVTHCNFLNGEPREFAHEAECFSCHPECQPMEGTATCNGSGSDTCAQCAHFRDGPHCVSSCPHGVLGAKGPIYKYPDVQNECRPCHENCTQGCKGPELQDCLGQTLVLIGKTHLTMALTVIAGLVVIFMMLGGTFLYWRGRRIQNKRAMRRYLERGESIEPLDPSEKANKVLARIFKETELRKLKVLGSGVFGTVHKGVWIPEGESIKIPVCIKVIEDKSGRQSFQAVTDHMLAIGSLDHAHIVRLLGLCPGSSLQLVTQYLPLGSLLDHVRQHRGALGPQLLLNWGVQIAKGMYYLEEHGMVHRNLAARNVLLKSPSQVQVADFGVADLLPPDDKQLLYSEAKTPIKWMALESIHFGKYTHQSDVWSYGQCIWMPSLPSLAPVSNLPFETPS

SEQ ID NO: 20417 - protein, 391 aa, Homo sapiens
MKSWQLIAVVGDALQDIKADCNTCVEIEDRKVSRQQMNCEREQLRGNQEAAAAPDTMAQPYASAQFAPPQNGIPAEYTAPHPHPAPEYTGQTTVPEHTLNLYPPAQTHSEQSPADTSAQTVSGTATTDDAAPTDGQPQTQPSENTENKSQPKRLHVSNIPFRFRDPDLRQMFGGFGFVTFENSADADRAREKLHGTVVEGRKIEVNNATARVMTNKKTVNPYTNGWKLNPVVGAVYSPEFYAGTVLLCQANQEGSSMYSAPSSLVYTSAMPGFPYPAATAAAAYRGAHLRGRGRTVYNTFRAAAPPPPIPAYGGVVYQDGFYGADIYGGYAAYRYAQPTPATAAAYSDRNQFVFVAADEISCNTSAVTDEFMLPTPTTTHLLQPPPTALVP

SEQ ID NO: 20418 - protein, 472 aa, Homo sapiens
MGSKMNLIEHSHLPTTDEFSFSENLFGVLTEQVAGPLGQNLEVEPYSQYSNVQFPQVQPQISSSSYYSNLGFYPQQPEEWYSPGIYELRRMPAETLYQGETEVAEMPVTKKPRMGASAGRIKGDELCVVCGDRASGYHYNALTCEGCKGFFRRSITKNAVYKCKNGGNCVMDMYMRRKCQECRLRKCKEMGMLAECLLTEIQCKSKRLRKNVKQHADQTVNEDSEGRDLRQVTSTTKSCREKTELTPDQQTLLHFIMDSYNKQRMPQEITNKILKEEFSAEENFLILTEMATNHVQVLVEFTKKLPGFQTLDHEDQIALLKGSAVEAMFLRSAEIFNKKLPSGHSDLLEERIRNSGISDEYITPMFSFYKSIGELKMTQEEYALLTAIVILSPDRQYIKDREAVEKLQEPLLDVLQKLCKIHQPENPQHFACLLGRLTELRTFNHHHAEMLMSWRVNDHKFTPLLCEIWDVQ

SEQ ID NO: 20419 - protein, 805 aa, Homo sapiens
MAKSSSLNVRVVEGRALPAKDVSGSSDPYCLVKVDDEVVARTATVWRSLGPFWGEEYTVHLPLDFHQLAFYVLDEDTVGHDDIIGKISLSREAITADPRGIDSWINLSRVDPDAEVQGEICLSVQMLEDGQGRCLRCHVLQARDLAPRDISGTSDPFARVFWGSQSLETSTIKKTRFPHWDEVLELREMPGAPSPLRVELWDWDMVGKNDFLGMVEFSPKTLQQKPPKGWFRLLPFPRAEEDSGGNLGALRVKVRLIEDRVLPSQCYQPLMELLMESVQGPAEEDTASPLALLEELTLGDCRQDLATKLVKLFLGRGLAGRFLDYLTRREVARTMDPNTLFRSNSLASKSMEQFMKLVGMPYLHEVLKPVISRVFEEKKYMELDPCKMDLGRTRRISFKGALSEEQMRETSLGLLTGYLGPIVDAIVGSVGRCPPAMRLAFKQLHRRVEERFPQAEHQDVKYLAISGFLFLRFFAPAILTPKLFDLRDQHADPQTSRSLLLLAKAVQSIGNLGQQLGQGKELWMAPLHPFLLQCVSRVRDFLDRLVDVDGDEEAGVPARALFPPSAIVREGYLLKRKEEPAGLATRFAFKKRYVWLSGETLSFSKSPEWQMCHSIPVSHIRAVERVDEGAFQLPHVMQVVTQDGTGALHTTYLQCKNVNELNQWLSALRKASAPNPNKLAACHPGAFRSARWTCCLQAERSAAGCSRTHSAVTLGDWSDPLDPDAEAQTVYRQLLLGRDQLRLKLLEDSNMDTTLEADTGACPEVLARQRAATARLLEVLADLDRAHEEFQQQERGKAALGPLGP

SEQ ID NO: 20420 - protein, 764 aa, Homo sapiens
MLAQESYPKKRNYTMEIVPSASLDTFPSENENFLCDLMDTAVTKKPCSLEIARAPSPRTDNASEVAVTTPGTSNHRNSSTGPTPDCSPPSPDTALKNIVKVIRPQPKQRTSIVSSLDFHRMNHNQEYFEINTSTGCTSFTASPPASPPTSSVGTTEVKNEGTNHTDDLSRQDDNDPPKEYDPGQFAGLLHGSSPACESPENPFHLYGKREQCEKGQDEVSLANSPLPFKQSPIENNSEPLVKKIKPKVVSRTIFHKKSNQLENHTIVGTRSTRSGSRNGDQWVMNAGGFVERACTLGRIRSLPKALIDMHLSKSVSKSDSDLIAYPSNEKTSRVNWSESSTAEHSSKGNSERTPSFTSEWEEIDKIMSSIDVGINNELKEMNGPRCPVQTVGQWLESIGLPQYENHLMANGFDNVQFMGSNVMEDQDLLEIGILNSGHRQRILQAIQLLPKMRPIGHDGYHPTSVAEWLDSIELGDYTKAFLINGYTSMDLLKKIWEVELINVLKINLIGHRKRILASLGDRLHDDPPQKPPRSITLRTGDWGEPSITLRPPNEATASTPVQYWQHHPEKLIFQSCDYKAFYLGSMLIKELRGTESTQDACAKMRANCQKSTEQMKKVPTIILSVSYKGVKFIDATNKNIIAEHEIRNISCAAQDPEDLSTFAYITKDLKSNHHYCHVFTAFDVNLAYEIILTLGQAFEVAYQLALQARKGGHSSTLPESFENKPSKPIPKPRVSIRKSVDLLHASHTGQEPSERHTEEALRKF

SEQ ID NO: 20421 - protein, 516 aa, Homo sapiens
MANPVPVQRSHLQGPILRLRYMVKQLENGEINIEELKKNLEYTASLLEAVYIDETRQILDTEDELQELRSDAVPSEVRDWLASTFTQQARAKGRRAEEKPKFRSIVHAVQAGIFVERMFRRTYTSVGPTYSTAVLNCLKNLDLWCFDVFSLNQAADDHALRTIVFELLTRHNLISRFKIPTVFLMSFLDALETGYGKYKNPYHNQIHAADVTQTVHCFLLRTGMVHCLSEIELLAIIFAAAIHDYEHTGTTNSFHIQTKSECAIVYNDRSVLENHHISSVFRLMQDDEMNIFINLTKDEFVELRALVIEMVLATDMSCHFQQVKTMKTALQQLERIDKPKALSLLLHAADISHPTKQWLVHSRWTKALMEEFFRQGDKEAELGLPFSPLCDRTSTLVAQSQIGFIDFIVEPTFSVLTDVAEKSVQPLADEDSKSKNQPSFQWRQPSLDVEVGDPNPDVVSFRSTWVKRIQENKQKWKERAASGITNQMSIDELSPCEEEAPPSPAEDEHNQNGNLD

SEQ ID NO: 20422 - protein, 974 aa, Homo sapiens
MHSPGAGCPRPCADTPGPQPQPMDLRVGQRPPVEPPPEPTLLALQRPQRLHHHLFLAGLQQQRSVEPMRLSMDTPMPELQVGPQEQELRQLLHKDKSKRSAVASSVVKQKLAEVILKKQQAALERTVHPNSPGIPYRTLEPLETEGATRSMLSSFLPPVPSLPSDPPEHFPLRKTVSEPNLKLRYKPKKSLERRKNPLLRKESAPPSLRRRPAETLGDSSPSSSSTPASGCSSPNDSEHGPNPILGSEALLGQRLRLQETSVAPFALPTVSLLPAITLGLPAPARADSDRRTHPTLGPRGPILGSPHTPLFLPHGLEPEAGGTLPSRLQPILLLDPSGSHAPLLTVPGLGPLPFHFAQSLMTTERLSGSGLHWPLSRTRSEPLPPSATAPPPPGPMQPRLEQLKTHVQVIKRSAKPSEKPRLRQIPSAEDLETDGGGPGQVVDDGLEHRELGHGQPEARGPAPLQQHPQVLLWEQQRLAGRLPRGSTGDTVLLPLAQGGHRPLSRAQSSPAAPASLSAPEPASQARVLSSSETPARTLPFTTGLIYDSVMLKHQCSCGDNSRHPEHAGRIQSIWSRLQERGLRSQCECLRGRKASLEELQSVHSERHVLLYGTNPLSRLKLDNGKLAGLLAQRMFVMLPCGGVGVDTDTIWNELHSSNAARWAAGSVTDLAFKVASRELKNGFAVVRPPGHHADHSTAMGFCFFNSVAIACRQLQQQSKASKILIVDWDVHHGNGTQQTFYQDPSVLYISLHRHDDGNFFPGSGAVDEVGAGSGEGFNVNVAWAGGLDPPMGDPEYLAAFRIVVMPIAREFSPDLVLVSAGFDAAEGHPAPLGGYHVSAKCFGYMTQQLMNLAGGAVVLALEGGHDLTAICDASEACVAALLGNRVDPLSEEGWKQKPNLNAIRSLEAVIRVHSKYWGCMQRLASCPDSWVPRVPGADKEEVEAVTALASLSVGILAEDRPSEQLVEEEEPMNL

SEQ ID NO: 20423 - protein, 1081 aa, Homo sapiens
MLESRKAIAPSRRKAELTGIKWRRYNFGGHGDCGPIISAPAQDDPILLSFIRCLQANLLCVWRRDVKPDCKELWIFWWGDEPNLVGVIHHELQVVEEGLWENGLSYECRTLLFKAIHNLLERCLMDKNFVRIGKWFVRPYEKDEKPVNKSEHLSCAFTFFLHGESNVCTSVEIAQHQPIYLINEEHIHMAQSSPAPFQVLVSPYGLNGTLTGQAYKMSDPATRKLIEEWQYFYPMVLKKKEESKEEDELGYDDDFPVAVEVIVGGVRMVYPSAFVLISQNDIPVPQSVASAGGHIAVGQQGLGSVKDPSNCGMPLTPPTSPEQAILGESGGMQSAASHLVSQDGGMITMHSPKRSGKIPPKLHNHMVHRVWKECILNRTQSKRSQMSTPTLEEEPASNPATWDFVDPTQRVSCSCSRHKLLKRCAVGPNRPPTVSQPGFSAGPSSSSSLPPPASSKHKTAERQEKGDKLQKRPLIPFHHRPSVAEELCMEQDTPGQKLGLAGIDSSLEVSSSRKYDKQMAVPSRNTSKQMNLNPMDSPHSPISPLPPTLSPQPRGQETESLDPPSVPVNPALYGNGLELQQLSTLDDRTVLVGQRLPLMAEVSETALYCGIRPSNPESSEKWWHSYRLPPSDDAEFRPPELQGERCDAKMEVNSESTALQRLLAQPNKRFKIWQDKQPQLQPLHFLDPLPLSQQPGDSLGEVNDPYTFEDGDIKYIFTANKKCKQGTEKDSLKKNKSEDGFGTKDVTTPGHSTPVPDGKNAMSIFSSATKTDVRQDNAAGRAGSSSLTQVTDLAPSLHDLDNIFDNSDDDELGAVSPALRSSKMPAVGTEDRPLGKDGRAAVPYPPTVADLQRMFPTPPSLEQHPAFSPVMNYKDGISSETVTALGMMESPMVSMVSTQLTEFKMEVEDGLGSPKPEEIKDFSYVHKVPSFQPFVGSSMFAPLKMLPSHCLLPLKIPDACLFRPSWAIPPKIEQLPMPPAATFIRDGYNNVPSVGSLADPDYLNTPQMNTPVTLNSAAPASNSGAGVLPSPATPRFSVPTPRTPRTPRTPRGGGTASGQGSVKYDSTDQGSPASTPSTTRP

SEQ ID NO: 20424 - protein, 40 aa, Homo sapiens
DVEIATYRRLLEGEECSLGGRQRCHVWRSWWRLGEHLWTR

SEQ ID NO: 20425 - protein, 253 aa, Homo sapiens
PTLGLFSNYSTMDPVQKAVLSHTFGGPLLKTKRPVISCNICQIRFNSQSQAEAHYKGNRHARRVKGIEAAKTRGREPGVREPGDPAPPGSTPTNGDGVAPRPESHSVAQARVQWHNLSSLQPPPPRFKRFSCLSLLSSWDYRHLPPHPVSMENGLGPAPGSPEKQPGSPSPPSIPETGQGVTKGEGGTPAPASLPGGSKEEEEKAKRLLYCALCKVAVNSLSQLEAHNKGTKHKTILEARSGLGPIKAYPRLG

SEQ ID NO: 20426 - protein, 613 aa, Homo sapiens
VEVNELKSEKQENVIHLFRITQSLMKMKAQEVELALEEVEKAGEEQAKFENQLKTKVMKLENELEMAQQSAGGRDTRFLRNEICQLEKQLEQKDRELEDMEKELEKEKKVNEQLALRNEEAENENSKLRRENKRLKKKNEQLCQDIIDYQKQIDSQKETLLSRRGEDSDYRSQLSKKNYELIQYLDEIQTLTEANEKIEVQNQEMRKNLEESVQEMEKMTDEYNRMKAIVHQTDNVIDQLKKENDHYQLQVQELTDLLKSKNEEDDPIMVAVNAKVEEWKLILSSKDDEIIEYQQMLHNLREKLKNAQLDADKSNVMALQQGIQERDSQIKMLTEQVEQYTKEMEKNTCIIEDLKNELQRNKGASTLSQQTHMKIQSTLDILKEKTKEAERTAELAEADAREKDKELVEALKRLKDYESGVYGLEDAVVEIKNCKNQIKIRDREIEILTKEINKLELKISDFLDENEALRERVGLEPKTMIDLTEFRNSKHLKQQQYRAENQILLKEIESLEEERLDLKKKIRQMAQERGKRSATSGLTTEDLNLTENISQGDRISERKLDLLSLKNMSEAQSKNEFLSRELIEKERDLERSRTVIAKFQNKCYRIKECRRNL

SEQ ID NO: 20427 - protein, 248 aa, Homo sapiens
MTCVEQDKLGQAFEDAFEVLRQHSTGDLQYSPDYRNYLALINHRPHVKGNSSCYGVLPTEEPVYNWRTVINSAADFYFEGNIHQSLQNITENQLVQPTLLQQKGGKGRKKLRLFEYLHESLYNPEMASCIQWVDKTKGIFQFVSKNKEKLAELWGKRKGNRKTMTYQKMARALRNYGRSGEITKIRRKLTYQFSEAILQRLSPSYFLGKEIFYSQCVQPDQEYLSLNNWNANYNYTYANYHELNHHDC

SEQ ID NO: 20428 - protein, 164 aa, Homo sapiens
MLAMDTCKHVGQLQLAQDHSSLNPQKWHCVDCNTTESIWACLSCSHVACGRYIEEHALKHFQESSHPVALEVNEMYVFCYLCDDYVLNDNTTGDLKLLRRTLSAIKSQNYHCTTRSGRFLRSMGTGDDSYFLHDGAQSLLQSEDQLYTALWHRRRILMGKIFRT

SEQ ID NO: 20429 - protein, 475 aa, Homo sapiens
ARSHTAPVLALAMEQRRGQLATVSQDRTVRIWDLATLQQLYDFTSSEDAPCAVTFHPTRPTFFCGFSSGAVRSFSLEAAEVLVEHTCHRGAVTGLTATPDGRLLFSSCSQGSLAQYSCADPQWHVLRVAADMVCPDAPASPSALAVSRDGRLLAFVGPSRCTVTVMGSASLDELLRVDIGTLDLASSRLDSAMAVCFGPAALGHLLVSTSSNRVVVLDAVSGRIIRELPGVHPEPCPSLTLSEDARFLLIAAGRTIKVWDYATQASPGPQVYIGHSEPVQAVAFSPDQQQVLSAGDAVFLWDVLAPTESDQSFPGAPPACKTGPGAGPLEDAASRASELPRQQVPKPCQASPPRLGVCARPPEGGDGHLPASRQRWVAASEGCRRLQREWAGQHGLEAGHRLLCLHVRPPGGGGGPALWRPAALVRPLCGDLHAGPQPQCPGPGLCLGPKQHDRPLSDPRLGRVWRPLPASHFPP

SEQ ID NO: 20430 - protein, 75 aa, Homo sapiens
MNQRKLDHEVKTLQVQAAQFAKQTGQWIGMVENFNQALKEIGDVENWARSIELDMRTIATALEYVYKGQLQSAPS

SEQ ID NO: 20431 - protein, 320 aa, Homo sapiens
MSKSESPKEPEQLRKLFIGGLSFETTDESLRSHFEQWGTLTDCVVMRDPNTKRSRGFGFVTYATVEEVDAAMNARPHKVDGRVVEPKRAVSREDSQRPGAHLTVKKIFVGGIKEDTEEHHLRDYFEQYGKIEVIEIMTDRGSGKKRGFAFVTFDDHDSVDKIVIQKYHTVNGHNCEVRKALSKQEMASASSSQRGRSGSGNFGGGRGGGFGGNDNFGRGGNFSGRGGFGGSRGGGGYGGSGDGYNGFGNDGSNFGGGGSYNDFGNYNNQSSNFGPMKGGNFGGRSSGPYGGGGQYFAKPRNQGGYGGSSSSSSYGSGRRF

SEQ ID NO: 20432 - protein, 126 aa, Homo sapiens
MRANDALQVLGLLFSLARGSEVGNSQAVCPGTLNGLSVTGDAENQYQTLYKLYERCEVVMGNLEIVLTGHNADLSFLQWIREVTGYVLVAMNEFSTLPLPNLRVVRGTQVYDGKFAIFVMLNYNTN

SEQ ID NO: 20433 - protein, 496 aa, Homo sapiens
MLAMDTCKHVGQLQLAQDHSSLNPQKWHCVDCNTTESIWACLSCSHVACGRYIEEHALKHFQESSHPVALEVNEMYVFCYLCDDYVLNDNTTGDLKLLRRTLSAIKSQNYHCTTRSGRFLRSMGTGDDSYFLHDGAQSLLQSEDQLYTALWHRRRILMGKIFRTWFEQSPIGRKKQEEPFQEKIVVKREVKKRRQELEYQVKAELESMPPRKSLRLQGLAQSTIIEIVSVQVPAQTPASPAKDKVLSTSENEISQKVSDSSVKRRPIVTPGVTGLRNLGNTCYMNSVLQVLSHLLIFRQCFLKLDLNQWLAMTASEKTRSCKHPPVTDTVVYQMNECQEKDTGFVCSRQSSLSSGLSGGASKGRKMELIQPKEPTSQYISLCHELHTLFQVMWSGKWALVSPFAMLHSVWRLIPAFRGYAQQDAQEFLCELLDKIQRELETTGTSLPALIPTSQRKLIKQVLNVVNNIFHGQLLSQQSVEGFPPNQLYSQKPRNNL

SEQ ID NO: 20434 - protein, 892 aa, Homo sapiens
MACLHETRTPSPSFGGFVSTLSEASMRKLDPDTSDCTPEKDLTPTQCVLRDVVPLGGQGGGGPSPSPGGEPPPEPFANSVLQLHEQDAGGPGGAAGSPESRASRVRADEVRLQCQSGSGFLEGLFGCLRPVWTMIGKAYSTEHKQQQEDLWEVPFEEILDLQWVGSGAQGAVFLGRFHGEEVAVKKVRDLKETDIKHLRKLKHPNIITFKGVCTQAPCYCILMEFCAQGQLYEVLRAGRPVTPSLLVDWSMGIAGGMNYLHLHKIIHRDLKSPNMLITYDDVVKISDFGTSKELSDKSTKMSFAGTVAWMAPEVIRNEPVSEKVDIWSFGVVLWELLTGEIPYKDVDSSAIIWGVGSNSLHLPVPSSCPDGFKILLRQCWNSKPRNRPSFRQILLHLDIASADVLSTPQETYFKSQAEWREEVKLHFEKIKSEGTCLHRLEEELVMRRREELRHALDIREHYERKLERANNLYMELNALMLQLELKERELLRREQALERRCPGLLKPHPSRGLLHGNTMEKLIKKRNVPQKLSPHSKRPDILKTESLLPKLDAALSGVGLPGCPKGPPSPGRSRRGKTRHRKASAKGSCGDLPGLRTAVPPHEPGGPGSPGGLGGGPSAWEACPPALRGLHHDLLLRKMSSSSPDLLSAALGSRGRGATGGAGDPGSPPPARGDTPPSEGSAPGSTSPDSPGGAKGEPPPPVGPGEGVGLLGTGREGTSGRGGSRAGSQHLTPAALLYRAAVTRSQKRGISSEEEEGEVDSEVELTSSQRWPQSLNMRQSLSTFSSENPSDGEEGTASEPSPSGTPEVGSTNTDERPDERSDDMCSQGSEIPLDPPPSEVIPGPEPSSLPIPHQELLRERGPPNSEDSDCDSTELDNSNSVDALRPPASLPP

SEQ ID NO: 20435 - protein, 587 aa, Homo sapiens
MRPRGLPPLLVVLLGCWASVSAQTDATPAVTTEGLNSTEAALATFGTFPSTRPPGTPRAPGPSSGPRPTPVTDVAVLCVCDLSPAQCDINCCCDPDCSSVDFSVFSACSVPVVTGDSQFCSQKAVIYSLNFTANPPQRVFELVDQINPSIFCIHITNYKPALSFINPEVPDENNFDTLMKTSDGFTLNAESYVSFTTKLDIPTAAKYEYGVPLQTSDSFLRFPSSLTSSLCTDNNPAAFLVNQAVKCTRKINLEQCEEIEALSMAFYSSPEILRVPDSRKKVPITVQSIVIQSLNKTLTRREDTDVLQPTLVNAGHFSLCVNVVLEVKYSLTYTDAGEVTKADLSFVLGTVSSVVVPLQQKFEIHFLQENTQPVPLSGNPGYVVGLPLAAGFQPHKGSGIIQTTNRYGQLTILHSTTEQDCLALEGVRTPVLFGYTMQSGCKLRLTGALPCQLVAQKVKSLLWGQGFPDYVAPFGNSQAQDMLDWVPIHFITQSFNRKDSCQLPGALVIEVKWTKYGSLLNPQAKIVNVTANLISSSFPEANSGNERTILISTAVTFVDVSAPAEAGFRAPPAINARLPFNFFFPFV

SEQ ID NO: 20436 - protein, 82 aa, Homo sapiens
MKSHRCYDLIPTSSKLVVFDTSLQVKKAFFALVTNGVRAAPLWDSKKQSFVGMLTITDFINILHRYYKSALVQIYELEEHKI

SEQ ID NO: 20437 - protein, 531 aa, Homo sapiens
HLSKSVSKSDSDLIAYPSNEKTSRVNWSESSTAEHSSKGNSERTPSFTSEWEEIDKIMSSIDVGINNELKEMNGETTRPRCPVQTVGQWLESIGLPQYENHLMANGFDNVQFMGSNVMEDQDLLEIGILNSGHRQRILQAIQLLPKMRPIGHDGYHPTSVAEWLDSIELGDYTKAFLINGYTSMDLLKKIWEVELINVLKINLIGHRKRILASLGDRLHDDPPQKPPRSITLREPSGNHTPPQLSPSLSQSTYTTGGSLDVPHIIMQGDARRRRNENYFDDIPRSKLERQMAQTGDWGEPSITLRPPNEATASTPVQYWQHHPEKLIFQSCDYKAFYLGSMLIKELRGTESTQDACAKMRANCQKSTEQMKKVPTIILSVSYKGVKFIDATNKNIIAEHEIRNISCAAQDPEDLSTFAYITKDLKSNHHYCHVFTAFDVNLAYEIILTLGQAFEVAYQLALQARKGGHSSTLPESFENKPSKPIPKPRVSIRKSVQIDPSEQKTLANLPWIVEPGQEAKRGINTKYETTIF

SEQ ID NO: 20438 - protein, 910 aa, Homo sapiens
MDVVGENEALQQFFEAQGANGTLENPALDTSLLEEFLGNDFDLGALQRQLPDTPPYSASDSCSPPQVKGACYPTLRPTAGRTPAPFLHPTAAPAMPPMHPLQSTSGMGDSCQIHGGFHSCHSNASHLATPLDQSVSSHLGIGCSYPQQPLCHSPGASLPPTKKRKCTQALEDSGECRVWACHCRPMTSRSRSSEVQDPDSEGQNRMPTDQCSPALKWQPCHSVPWHSLLNSHYEKLPDVGYRVVTDKGFNFSPADEAFVCQKKNHFQITIHIQVWGSPKFVETEMGLKPIEMFYLKVFGTKVEATNQIIAIEQSQADRSKKIFNPVKIDLLADQVTKVTLGRLHFSETTANNMRKKGKPNPDQRYFMLVVGLYAANQDQFYLLSAHISERIIVRASNPGQFENDSDALWQRGQVPESIVCHGRVGINTDAPDEALVVCGNMKVMGTIMHPSDSRAKQNIQEVDTNEQLKRIAQMRIVEYDYKPEFASAMGINTAHQTGMIAQEVQEILPRAVREVGDVTCGNGETLENFLMVDKDQIFMENVGAVKQLCKLTNNLEERIEELEIWNRKLARLKRLSSWKSSASEASTISKSSRAVSASSPRRAVHKKNNKVYFSGKRQACPNWVFQTLVITLIAVMAFCALTIVALYILSLKDQDRRVPNLPPSNITSSQEPALLPTASSSAPNTSLVTTPASLQVPEITFCEILPCQETYCCPIRGMKEVSSSPVQRQSEEKEFHQRRWSEDKSKSVLARNALSGPDWESDWIDTTISSIQIMEIQQIIDHQYCIQSLQCGSGNYNYNIPVNKHTPTNVKFSLEINTTEPLIVFQCKFTLGNICFHSKRGTKGLESHREISQEMTQGYQHIWSLPVAPFSDSMFHFRVAAPDLADCSTDPYFAGIFFTDYFFYFYRRCA

SEQ ID NO: 20439 - protein, 191 aa, Homo sapiens
MLLFVEVASKGTGLNPNAKVWQEIAPGNTDATPVTHGTESSWHEIAATSGAHPEGNAELSEDICKEYEVMYSSSCETTRNTTGIEESTDGMILGPEDLSYQIYDVSESNSAVSTEDLKECLKKQLEFCFSRENLSKDLYLISQMDSDQFIPIWTVANMEEIKKLTTDPDLILEVLRSSPMVQVDEKGEKVR

SEQ ID NO: 20440 - protein, 378 aa, Homo sapiens
MSTVEEDSDTVTVETVNSVTLTQDTEGNLILHCPQNEADEIDSEDSIEPPHKRLCLSSEDDQSIDDSTPCISVVALPLSENDQSFEVTMTATTEVADDEVTEGTVTQIQILQNEQLDEISPLGNEEVSAVSQAWFTTKEDKDSLTNKGHKWKQGMWSKEEIDILMNNIERYLKARGIKDATEIIFEMSKDERKDFYRTIAWGLNRPLFAVYRRVLRMYDDRNHVGKYTPEEIEKLKELRIKHGNDWATIGAALGRSASSVKDRCRLMKDTCNTGKWTEEEEKRLAEVVHELTSTEPGDIVTQGVSWAAVAERVGTRSEKQCRSKWLNYLNWKQSGGTEWTKEDEINLILSGFSAHAKYQIEGVETEVLSISTEQDSRT

SEQ ID NO: 20441 - protein, 314 aa, Homo sapiens
MLMNYSSATEFYLLGFPGSEELHHILFAIFFFFYLVTLMGNTVIIMIVCVDKRLQSPMYFFLGHLSALEILVTTIIVPVMLWGLLLPGMQTIYLSACVVQLFLYLAVGTTEFALLGAMAVDRYVAVCNPLRYNIIMNRHTCNFVVLVSWVFGFLFQIWPVYVMFQLTYCKSNVVNNFFCDRGQLLKLSCNNTLFTEFILFLMAVFVLFGSLIPTIVSNAYIISTILKIPSSSGRRKSFSTCASHFTCVVIGYGSCLFLYVKPKQTQAADYNWVVSLMVSVVTPFLNPFIFTLRNDKVIEALRDGVKRCCQLFRN

SEQ ID NO: 20442 - protein, 360 aa, Homo sapiens
MMDLRNTPAKSLDKFIEDYLLPDTCFRMQINHAIDIICGFLKERCFRGSSYPVCVSKVVKGGSSGKGTTLRGRSDADLVVFLSPLTTFQDQLNRRGEFIQEIRRQLEACQRERAFSVKFEVQAPRWGNPRALSFVLSSLQLGEGVEFDVLPAFDALGQLTGGYKPNPQIYVKLIEECTDLQKEGEFSTCFTELQRDFLKQRPTKLKSLIRLVKHWYQNCKKKLGKLPPQYALELLTVYAWERGSMKTHFNTAQGFRTVLELVINYQQLCIYWTKYYDFKNPIIEKYLRRQLTKPRPVILDPADPTGNLGGGDPKGWRQLAQEAEAWLNYPCFKNWDGSPVSSWILLVNLTLVGRRNYTNN

SEQ ID NO: 20443 - protein, 655 aa, Homo sapiens
QREELTKRREKLSKRREKIVKENGEGDKNVANINEEMESLTANIDYINDSISDCQANIMQMEEAKEEGETLDVTAVINACTLTEARYLLDHFLSMGINKGLQAAQKEAQIKVLEGRLKQTEITSATQNQLLFHMLKEKAELNPELDALLGHALQENVEDSTDEDAPLNSPGSEGSTLSSDLMKLCGEVKPKNKARRRTTTQMELLYADSSELASDTSTGDASLPGPLTPVAEGQEIGMNTETSGTSAREKELSPPPGLPSKIGSISRQSSLSEKKIPEPSPVTRRKAYEKAEKSKAKEQKQGIINPFPASKGIRAFPLQCIHIAEGHTKAVLCVDSTDDLLFTGSKDRTCKVWNLVTGQEIMSLGGHPNNVVSVKYCNYTSLVFTVSTSYIKVWDIRDSAKCIRTLTSSGQVTLGDACSASTSRTVAIPSGENQINQIALNPTGTFLYAASGNAVRMWDLKRFQSTGKLTGHLGPVMCLTVDQISSGQDLIITGSKDHYIKMFDVTEGALGTVSPTHNFEPPHYDGIEALTIQGDNLFSGSRDNGIKKWDLTQKDLLQQVPNAHKDWVCALGVVPDHPVLLSGCRGGILKVWNMDTFMPVGEMKGHDSPINAICVNSTHIFTAADDRTVRIWKARNLQDGQISDTGDLGEDIASN

SEQ ID NO: 20444 - protein, 351 aa, Homo sapiens
MATAAQGPLSLLWGWLWSERFWLPENVSWADLEGPADGYGYPRGRHILSVFPLAAGIFFVRLLFERFIAKPCALCIGIEDSGPYQAQPNAILEKVFISITKYPDKKRLEGLSKQLDWNVRKIQCWFRHRRNQDKPPTLTKFCESMWRFTFYLCIFCYGIRFLWSSPWFWDIRQCWHNYPFQPLSSGLYHYYIMELAFYWSLMFSQFTDIKRKDFLIMFVHHLVTIGLISFSYINNMVRVGTLIMCLHDVSDFLLEAAKLANYAKYQRLCDTLFVIFSAVFMVTRLGIYPFCFSVLFYSTFANRTQEPYCPAFTLACADLLWTLIGPLLPQTVFLARSDPDSEYPAWLASQD

SEQ ID NO: 20445 - protein, 312 aa, Homo sapiens
MRKHTAITTFILLGLTEDPQLQVLLFMFLFITYMLSVTGKLTIIALTMLDPHLKTPMYFFLQNLSFLEISFTATCVPRFLYSISTGNKIITYNACVIQLFFADLFGVTEFFLLATMSYDRYVAICKPLHYMAIMSNKVCKTMVICCWMAALMIILPPLSLGFHLEFCDSNVINHFGCDALPILKIPCSDTSLIEQMVVASAVLTFIITLVCVVLSYTYIIRTILKFPSVQQKKKAFSTCSSHITVVSITYGSCIFIYIKPSAKEEVNINKGVSVLISSISPMLNSFIYTLRNEQVKQAFHDSLKKIAFRLKK

SEQ ID NO: 20446 - protein, 692 aa, Homo sapiens
MALVTLQRSPTPSAASSSASNSELEAGSEEDRKLNLSLSESFFMVKGAALFLQQGSSPQGQRSLQHPHKHAGDLPQHLQVMINLLRCEDRIKLAVRLESAWADRVRYMVVVYSSGRQDTEENILLGVDFSSKESKSCTIGMVLRLWSDTKIHLDGDGGFSVSTAGRMHIFKPVSVQAMWSALQVLHKACEVARRHNYFPGGVALIWATYYESCISSEQSCINEWNAMQDLESTRPDSPALFVDKPTEGERTERLIKAKLRSIMMSQDLENVTSKEIRNELEKQMNCNLKELKEFIDNEMLLILGQMDKPSLIFDHLYLGSEWNASNLEELQGSGVDYILNVTREIDNFFPGLFAYHNIRVYDEETTDLLAHWNEAYHFINKAKRNHSKCLVHCKMGVSRSASTVIAYAMKEFGWPLEKAYNYVKQKRSITRPNAGFMRQLSEYEGILDASKQRHNKLWRQQTDSSLQQPVDDPAGPGDFLPETPDGTPESQLPFLDDAAQPGLGPPLPCCFRRLSDPLLPSPEDETGSLVHLEDPEREALLEEAAPPAEVHRPARQPQQGSGLCEKDVKKKLEFGSPKGRSGSLLQVEETEREEGLGAGRWGQLPTQLDQNLLNSENLNNNSKRSCPNGMEVGRARPAGWHTPSLPSHSNWPTSASVVGTTGTRHHTQLIFFYCLLWAPSSHLQGPEGSFTG

SEQ ID NO: 20447 - protein, 708 aa, Homo sapiens
MSKRLRSSEVCADCSGPDPSWASVNRGTFLCDECCSVHRSLGRHISQVRHLKHTPWPPTLLQMVETLYNNGANSIWEHSLLDPASIMSGRRKANPQDKVHPNKAEFIRAKYQMLAFVHRLPCRDDDSVTAKDLSKQLHSSVRTGNLETCLRLLSLGAQANFFHPEKGNTPLHVASKAGQILQAELLAVYGADPGTQDSSGKTPVDYARQGGHHELAERLVEIQYELTDRLAFYLCGRKPDHKNGQHFIIPQMADSLDLSELAKAAKKKLQSLSNHLFEELAMDVYDEVDRRETDAVWLATQNHSALVTETTVVPFLPVNPEYSSTRNQGRQKLARFNAHEFATLVIDILSDAKRRQQGSSLSGSKDNVELILKTINNQHSVESQDNDQPDYDSVASDEDTDLETTASKTNRQKLQTLQSENSNLRKQATTNVYQVQTGSEYTDTSNHSSLKRRPSARGSRPMSMYETGSGQKPYLPMGEASRPEESRMRLQPFPAHIGRSALVTSSSSLPSFPSTLSWSRDESARRASRLEKQNSTPESDYDNTPNDMEPDGMGSSRKGRQRSMVWPGDGLVPDTAEPHVAPSPTLPSTEDVIRKTEQITKNIQELLRAAQENKHDSYIPCSERIHVAVTEMAALFPKKPKSDMVRTSLRLLTSSAYRLQSECKKTLPGDPGSPTDVQLVTQQVIQCAYDIAKAAKQLVTITTKENNN

SEQ ID NO: 20448 - protein, 344 aa, Homo sapiens
MDLVLKRCLLHLAVIGALLAVGATKVPRNQDWLGVSRQLRTKAWNRQLYPEWTEAQRLDCWRGGQVSLKVSNDGPTLIGANASFSIALNFPGSQKVLPDGQVIWVNNTIINGSQVWGGQPVYPQETDDACIFPDGGPCPSGSWSQKRSFVYVWKTWDQVPFSVSVSQLRALDGGNKHFLRNQPLTFALQLHDPSGYLAEADLSYTWDFGDSSGTLISRALVVTHTYLEPGPVTAQVVLQAAIPLTSCGSSPVPGTTDGHRPTAEAPNTTAGQVPTTEVVGTTPGQAPTAEPSGTTSVQVPTTEVISTAPVQMPTAESTGMTPEKVPVSEVMGTTLAEMSTPEAT

SEQ ID NO: 20449 - protein, 96 aa, Homo sapiens
MEMQQNCSISCFWETQPLGCVKISCIFYHSKPRNINGLFLPPSSNITLQKEIQEGIPLQSQSQEPLKPQENISRPIHHPLVLKTNFEEEEEVDEQN

SEQ ID NO: 20450 - protein, 1271 aa, Homo sapiens
MFSSVSHSGESSFTYRAYCTEFIEASEISALIRQKRHELELSWFPDTLPGIGRIGFIPWNVETEVLPLISSVLPRTIFPTSTISFEHFGTSCKGYALAHTQEGEEKKQTSGTSNTRGSRRKPAMTTPTRRSTRNTRAETASQSQRSPISDNSGCDAPGNSNPSLSVPSSAESEKQTRQAPKRKSVRRGRKPPLLKKKLRSSVAAPEKSSSNDSVDEETAESDTSPVLEKEHQPDVDSSNICTVQTHVENQSANCLKSCNEQIEESEKHTANYDTEERVGSSSSESCAQDLPVLVGEEGEVKKLENTGIEANVLCLESEISENILEKGGDPLEKQDQISGLSQSEVKTDVCTVHLPNDFPTCLTSESKVYQPVSCPLSDLSENVESVVNEEKITESSLVEITEHKDFTLKTEELIESPKLESSEGEIIQTVDRQSVKSPEVQLLGHVETEDVEIIATCDTFGNEDFNNIQDSENNLLKNNLLNTKLEKSLEEKNESLTEHPRSTELPKTHIEQIQKHFSEDNNEMIPMECDSFCSDQNESEVEPSVNADLKQMNENSVTHCSENNMPSSDLADEKVETVSQPSESPKDTIDKTKKPRTRRSRFHSPSTTWSPNKDTPQEKKRPQSPSPRRETGKESRKSQSPSPKNESARGRKKSRSQSPKKDIARERRQSQSRSPKRDTTRESRRSESLSPRRETSRENKRSQPRVKDSSPGEKSRSQSRERESDRDGQRRERERRTRKWSRSRSHSRSPSRCRTKSKSSSFGRIDRDSYSPRWKGRWANDGWRCPRGNDRYRKNDPEKQNENTRKEKNDIHLDADDPNSADKHRNDCPNWITEKINSGPDPRTRNPEKLKESHWEENRNENSGNSWNKNFGSGWVSNRGRGRGNRGRGTYRSSFAYKDQNENRWQNRKPLSGNSNSSGSESFKFVEQQSYKRKSEQEFSFDTPADRSGWTSASSWAVRKTLPADVQNYYSRRGRNSSGPQSGWMKQEEETSGQDSSLKDQTNQQVDGSQLPINMMQPQMNVMQQQMNAQHQPMNIFPYPVGVHAPLMNIQRNPFNIHPQLPLHLHTGVPLMQVATPTSVSQGLPPPPPPPPPSQQVNYIASQPDGKQLQGIPSSSHVSNNMSTPVLPAPTAAPGNTGMVQGPSSGNTSSSSHSKASNAAVKLAESKVSVAVEASADSSKTDKKLQIQEKAAQEVKLAIKPFYQNKDITKEEYKEIVRKAVDKVCHSKSGEVNSTKVANLVKAYVDKYKYSRKGSQKKTLEEPVSTEKNIG

SEQ ID NO: 20451 - protein, 134 aa, Homo sapiens
MGKEEIPRPTLTSVKTLLYTKEFPQTVKVPRNQDWLGVSRQLRTKAWNRQLYPEWTEAQRLDCWRGGQVSLKVSNDGPTLIGANASFSIALNFPGSQKVLPDGQVIWVNNTIINGSQVWGGQPVYPQETDDACI

SEQ ID NO: 20452 - protein, 280 aa, Homo sapiens
MSILKVKKAFFALVTNGVRAAPLWDSKKQSFVGMLTITDFINILHRYYKSALVQIYELEEHKIETWREVYLQDSFKPLVCISPNASLFDAVSSLIRNKIHRLPVIDPESGNTLYILTHKRILKFLKLFITEFPKPEFMSKSLEELQIGTYANIAMVRTTTPVYVALGIFVQHRVSALPVVDEKGRVVDIYSKFDVINLAAEKTYNNLDVSVTKALQHRSHYFEGVLKCYLHETLETIINRLVEAEVHRLVVVDENDVVKGIVSLSDILQALVLTGGEKKP

SEQ ID NO: 20453 - protein, 352 aa, Homo sapiens
MVVSTFTDMDTFPNNFPPGGDSGLTGSQSEFQKMLIDERLRCEHHKANYQTLKAEHTRLQNEHVKLQNELKHLFNEKQTQQEKLQLLLEELRGELVEKTKDLEEMKLQILTPQKLELLRAQIQQELETPMRERFRNLDEEVEKYRAVYNKLRYEHTFLKSEFEHQKEEYARILDEGKIKYESEIARLEEDKEELRNQLLNVDLTKDSKRVEQLAREKVYLCQKLKGLEAEVAELKAEKENSEAQVENAQRIQVRQLAEMQATVRSLEAEKQSANLRAERLEKELQSSSEQNTFLINKLHKAEREINTLSSKVKELKHSNKLEITDIKLETARAKSELERERNKIQSELDGNM

SEQ ID NO: 20454 - protein, 903 aa, Homo sapiens
MAPTKPSFQQDPSRRERLQALRKEKSRDAARSRRGKENFEFYELAKLLPLPAAITSQLDKASIIRLTISYLKMRDFANQGDPPWNLRMEGPPPNTSVKVIGAQRRRSPSALAIEVFEAHLGSHILQSLDGFVFALNQEGKFLYISETVSIYLGLSQVELTGSSVFDYVHPGDHVEMAEQLGMKLPPGRGLLSQGTAEDGASSASSSSQSETPEPVESTSPSLLTTDNTLERSFFIRMKSTLTKRGVHIKSSGYKVIHITGRLRLRVSLSHGRTVPSQIMGLVVVAHALPPPTINEVRIDCHMFVTRVNMDLNIIYCENRISDYMDLTPVDIVGKRCYHFIHAEDVEGIRHSHLDLLNKGQCVTKYYRWMQKNGGYIWIQSSATIAINAKNANEKNIIWVNYLLSNPEYKDTPMDIAQLPHLPEKTSESSETSDSESDSKDTSGITEDNENSKSDEKGNQSENSEDPEPDRKKSGNACDNDMNCNDDGHSSSNPDSRDSDDSFEHSDFENPKAGEDGFGALGAMQIKVERYVESESDLRLQNCESLTSDSAKDSDSAGEAGAQASSKHQKRKKRRKRQKGGSASRRRLSSASSPGGLDAGLVEPPRLLSSPNSASVLKIKTEISEPINFDNDSSIWNYPPNREISRNESPYSMTKPPSSEHFPSPQGGGGGGGGGGGLHVAIPDSVLTPPGADGAAARKTQFGASATAALAPVASDPLSPPLSASPRDKHPGNGGGGGGGGGGAGGGGPSASNSLLYTGDLEALQRLQAGNVVLPLVHRVTGTLAATSTAAQRVYTTGTIRYAPAEVTLAMQSNLLPNAHAVNFVDVNSPGFGLDPKTPMEMLYHHVHRLNMSGPFGGAVSAASLTQMPAGNVFTTAEGLFSTLPFPVYSNGIHAAQTLERKED

SEQ ID NO: 20455 - protein, 121 aa, Homo sapiens
MMAAAPIQQNGTHTGVPIDLDPPDSRKRPLEAPPEAGSTKRTNTGEDGQYFLKVLIPSYAAGSIIGKGGQTIVQLQKETGATIKLSKSKDFYPGADSCRRNCTWCCTEGISPLCHLQSETD

SEQ ID NO: 20456 - protein, 170 aa, Homo sapiens
MATSRYEPVAEIGVGAYGTVYKARDPHSGHFVALKSVRVPNGGGGGGGLPISTVREVALLRRLEAFEHPNVVRLMDVCATSRTDREIKVTLVFEHVDQDLRTYLDKAPPPGLPAETIKDLMRQFLRGLDFLHANCIVHRDLKPENILVTSGGTVKLADFGLARIYSYQMA

SEQ ID NO: 20457 - protein, 299 aa, Homo sapiens
MKSHRCYDLIPTSSKLVVFDTSLQVKKAFFALVTNGVRAAPLWDSKKQSFVGMLTITDFINILHRYYKSALVQIYELEEHKIETWREVYLQDSFKPLVCISPNASLFDAVSSLIRNKIHRLPVIDPESGNTLYILTHKRILKFLKLFITEFPKPEFMSKSLEELQIGTYANIAMVRTTTPVYVALGIFVQHRVSALPVVDEKGRVVDIYSKFDVINLAAEKTYNNLDVSVTKALQHRSHYFEGVLKCYLHETLETIINRLVEAEVHRLVVVDENDVVKGIVSLSDILQALVLTGGEKKP

SEQ ID NO: 20458 - protein, 425 aa, Homo sapiens
MGSKMNLIEHSHLPTTDEFSFSENLFGVLTEQVAGPLGQNLEVEPYSQYSNVQFPQVQPQISSSSYYSNLGFYPQQPEEWYSPGIYELRRMPAETLYQGETEVAEMPVTKKPRMGASAGRIKGDELCVVCGDRASGYHYNALTCEGCKGLLTEIQCKSKRLRKNVKQHADQTVNEDSEGRDLRQVTSTTKSCREKTELTPDQQTLLHFIMDSYNKQRMPQEITNKILKEEFSAEENFLILTEMATNHVQVLVEFTKKLPGFQTLDHEDQIALLKGSAVEAMFLRSAEIFNKKLPSGHSDLLEERIRNSGISDEYITPMFSFYKSIGELKMTQEEYALLTAIVILSPDRQYIKDREAVEKLQEPLLDVLQKLCKIHQPENPQHFACLLGRLTELRTFNHHHAEMLMSWRVNDHKFTPLLCEIWDVQ

SEQ ID NO: 20459 - protein, 414 aa, Homo sapiens
MMWQCHLSAQDYRYYPVDGYSLLKRFPLHPLTGPRCPVQTVGQWLESIGLPQYENHLMANGFDNVQFMGSNVMEDQDLLEIGILNSGHRQRILQAIQLLPKMRPIGHDGYHPTSVAEWLDSIELGDYTKAFLINGYTSMDLLKKIWEVELINVLKINLIGHRKRILASLGDRLHDDPPQKPPRSITLRTGDWGEPSITLRPPNEATASTPVQYWQHHPEKLIFQSCDYKAFYLGSMLIKELRGTESTQDACAKMRANCQKSTEQMKKVPTIILSVSYKGVKFIDATNKNIIAEHEIRNISCAAQDPEDLSTFAYITKDLKSNHHYCHVFTAFDVNLAYEIILTLGQAFEVAYQLALQARKGGHSSTLPESFENKPSKPIPKPRVSIRKSVDLLHASHTGQEPSERHTEEALRKF

SEQ ID NO: 20460 - protein, 1206 aa, Homo sapiens
MTSAAEIKKPPVAPKPKFVVANNKPAPPPIAPKPDIVISSVPQSTKKMKPAIAPKPKVLKTSPVREIGQSPSRKIMLNLEGHKQELAESTDNFNCKYEGNQSNDYISPMCSCSSECIHKLGHRENLCVKQLVLEPLEMNENLENSKIDETLTIKTRSKCDLYGEKAKNQGGVVLKASVLEEELKDALIHQMPPFISAQKHRPTDSPEMNGGCNSNGQFRIEFADLSPSPSSFEKVPDHHSCHLQLPSDECEHFETCQDDSEKSNNCFQSSELEALENGKRSTLISSDGVSKKSEVKDLGPLEIHLVPYTPKFPTPKPRKTRTARLLRQKCVDTPSESTEEPGNSDSSSSCLTENSLKINKISVLHQNVLCKQEQVDKMKLGNKSELNMESNSDAQDLVNSQKAMCNETTSFEKMAPSFDKDSNLSSDSTTVDGSSMSLAVDEGTGFIRCTVSMSLPKQLKLTCNEHLQSGRNLGVSAPQMQKESVIKEENSLRIVPKKPQRHSLPATGVLKKAASEELLEKSSYPSSEEKSSEKSLERNHLQHLCAQNRGVSSSFDMPKRASEKPVWKLPHPILPFSGNPEFLKSVTVSSNSEPSTALTKPRAKSLSAMDVEKCTKPCKDSTKKNSFKKLLSMKLSICFMKSDFQKFWSKSSQLGDTTTGHLSSGEQKGIESDWQGLLVGEEKRSKPIKAYSTENYSLESQKKRKKSRGQTSAANGLRAESLDDQMLSRESSSQAPYKSVTSLCAPEYENIRHYEEIPEYENLPFIMAIRKTQELEWQNSSSMEDADANVYEVEEPYEAPDGQLQLGPRHQHSSSGASQEEQNDLGLGDLPSDEEEIINSSDEDDVSSESSKGEPDPLEDKQDEDNGMKSKVHHIAKEIMSSEKVFVDVLKLLHIDFRDAVAHASRQLGKPVIEDRILNQILYYLPQLYELNRDLLKELEERMLHWTEQQRIADIFVKKGPYLKMYSTYIKEFDKNIALLDEQCKKNPGFAAVVREFEMSPRCANLALKHYLLKPVQRIPQYRLLLTDYLKNLIEDAGDYRDTQDALAVVIEVANHANDTMKQGDNFQKLMQIQYSLNGHHEIVQPGRVFLKEGILMKLSRKVMQPRMFFLFNDALLYTTPVQSGMYKLNNMLSLAGMKVRKPTQEAYQNELKIESVERSFILSASSATERDEWLEAISRAIEEYAKKRITFCPSRSLDEADSENK

SEQ ID NO: 20461 - protein, 160 aa, Homo sapiens
MELSEKYKLDKESYPVFYLFRDGDFENPVPYTGAVKVGAIQRWLKGQGVYLGMPGCLPVYDALAGEFIRASGVEARQALLKQGQDNLSSVKETQKKWAEQYLKIMGKILDQGEDFPASEMTRIARLIEKNKMSDGKKEELQKSLNILTAFQKKGAEKEEL

SEQ ID NO: 20462 - protein, 114 aa, Homo sapiens
MCIAEIDLIPRDRPFVCAPSSKTGSVTTTYCCNQDHCNKIELPTTGLPLLVQRTIARTIVLQESIGKGRFGEVWRGKWRGEEVAVKIFSSREERSWFREAEIYQTVMLRHENIL

SEQ ID NO: 20463 - protein, 264 aa, Homo sapiens
PEEDSSKKSLKTKKPQQILLPEKINEQLALLETHLLKLTKQYVTSELSGGEDPIFLYPVVLNWSVKGAVKEVMKFKQKPRFLEFFTQVMLKCMNEEKFHLMVEVTTPVHDFLKRRNESLLGLIKVKYKDSALNKKANKSLKFKAAVMEIGRSAEMQQRIRSKKKETLRDFIFKNPAISEMVAHERNRRTSVRKAAQRYLMDYLNPLILSYVKRKRFHRLSLEEMPWRAQMNLYLAGAHFNLVLQKLWECTKMKFGTSHMMVRHF

SEQ ID NO: 20464 - protein, 906 aa, Homo sapiens
MVVTTSARGGGGDRTPSRRRGCGLAPAGAAALLAGASCLCYGRSLQGEFVHDDVWAIVNNPDVRPGAPLRWGIFTNDFWGKGMAENTSHKSYRPLCVLTFKLNIFLTGMNPFYFHAVNIILHCLVTLVLMYTCDKTVFKNRGLAFVTALLFAVHPIHTEAVAGIVGRADVLACLLFLLAFLSYNRSLDQGCVGGSFPSTVSPFFLLLSLFLGTCAMLVKETGITVFGVCLVYDLFSLSNKQDKSSNGALCPRSPQQPGSPQPSSLPGHPHRENGKQQRFPHKGAWGGCHSPLPPEPKSSGFPVSPRAVWSMMRYLRASSNRNFLLTMRPFLKRAILVLSYVLVILYFRLWIMGGSMPLFSEQDNPASFSPYILTRFLTYSYLLAFNVWLLLAPVTLCYDWQVGSIPLVETIWDMRNLATIFLAVVMALLSLHCLAAFKRLEHKEVLVGLLFLVFPFIPASNLFFRVGFVVAERVLYMPSMGYCILFVHGLSKLCTWLNRCGATTLIVSTVLLLLLFSWKTVKQNEIWLSRESLFRLYPRHASALNNLGTLTRDTAEAKMYYQRALQLHPQHNRALFNLGNLLKSQEKKEEAITLLKDSIKYGPEFADAYSSLASLLAEQERFKEAEEIYQTGIKNCPDSSDLHNNYGVFLVDTGLPEKAVAHYQQAIKLSPSHHVAMVNLGRLYRSLGENSMAEEWYKRALQVAHKAEILSPLGALYYNTGRYEEALQIYQEAAALQPSQRELRLALAQVLAVMGQTKEAEKMTNHIVSEETGCLECYRLLSAIYSKQENHDKALDAIDKALQLKPKDPKVISELFFTKGNQLREQNLLDKAFESYRVAVQLNPDQAQAWMNMGGIQHIKGKYVSARAYYERALQLVPDSKLLKENLAKLDRLEKRLQEVREKDQT

SEQ ID NO: 20465 - protein, 158 aa, Homo sapiens
MRRNPFGVDICCRKGSRSPLQELYNPIQLELSNTAVLHQMRRDQVTDTCRANSATSRKRRVLTPNDLKHLVVDEDHELIYCYVPKVACTNWKRLMMVLTGRGKYSDPMEIPANEAHVSANLKTLNQYSIPEINHRLKSYMKFLFVREPFERLVSAYRN

SEQ ID NO: 20466 - protein, 28 aa, Homo sapiens
MLTITDFINILHRYYKSALVQIYELEEH

SEQ ID NO: 20467 - protein, 356 aa, Homo sapiens
MASLTAYDKDVSSGSYNLSSATTGSYYSCVSQITIGYDVAGPVAIGLTHWKNPYVQGRPTLPSDLPLFVSKDAGIPVYHRSFTRKTDQATPLSCPASLSITPVPSYSSSSQETLSQDTTGLSLSIHGAEKRLQIHQRRSVASRPASRRRLPVVRHSSLPPGRRSIKMEASSSGITNGKTKVFHPEGGVDLQGYQLDMQILPDGPKSDVDFSEILNAIQEMAKDVNILFDELEAVSSPCKDDDSLLHPGNLTSTSDDASRLEAGGETVPERNKSNGLYFRDGKCRIDYILVYRKSNPQTEKREVFERNIRAEGLQMEKESSLINSDIIFVKLHAPWEVLGRYAEQMNVRMPFSSNCN

SEQ ID NO: 20468 - protein, 251 aa, Homo sapiens
NSVYTSFMKSHRCYDLIPTSSKLVVFDTSLQVKKAFFALVTNGVRAAPLWDSKKQSFVGMLTITDFINILHRYYKSALVQIYELEEHKIETWREVYLQDSFKPLVCISPNARSLSSPSQSSCPSLWKSYRLAPMPILLWFALPPPSMWLWGFLYSIESQPCQWWMRRNLAAEKTYNNLDVSVTKALQHRSHYFEGVLKCYLHETLETIINRLVEAEVHRLVVVDENDVVKGIVSLSDILQALVLTGGEKKP

SEQ ID NO: 20469 - protein, 613 aa, Homo sapiens
MKDSGDSKDQQLMVALRVRPISVAELEEGATLIAHKVDEQMVVLMDPMEDPDDILRAHRSREKSYLFDVAFDFTATQEMVYQATTKSLIEGVISGYNATVFAYGPTGCGKTYTMLGTDQEPGIYVQTLNDLFRAIEETSNDMEYEVSMSYLEIMQLLMKGNRQRTQEPTAANQTSSRSHAVLQVTVRQRSRVKNILQEVRQGRLFMIDLAGSERASQTQNRGQRMKEGAHINRSLLALGNCINALSDKGSNKYINYRDSKLTRLLKDSLGGNSRTVMIAHISPASSAFEESRNTLTYAGRAKNIKTRVKQNLLNVSYHIAQYTSIIADLRGEIQRLKRKIDEQTGRGQARGRQDRGDIRHIQAEVQLHSGQGEKAGMGQLREQLASAFQEQMDVRRRLLELENRAMEVQIDTSRHLLTIAGWKHEKSRRALKWREEQRKECYAKDDSEKDSDTGDDQPDILEPPEVAAARESIAALVDEQKQLRKQKLALEQRCRELRARGRRLEETLPRRIGSEEQREVLSLLCRVHELEVENTEMQSHALLRDGALRHRHEAVRRLEQHRSLCDEIIQGQRQIIDDYNLAVPQRLEELYEVYLRELEEGSLEQATIMDQVA

SEQ ID NO: 20470 - protein, 116 aa, Homo sapiens
MGNLEIVLTGHNADLSFLQWIREVTGYVLVAMNEFSTLPLPNLRVVRGTQVYDGKFAIFVMLNYNTNSSHALRQLRLTQLTEILSGGVYIEKNDKLCHMDTIDWRDIVRDRDAEIV

SEQ ID NO: 20471 - protein, 135 aa, Homo sapiens
EDYKDRLKSGEHLNPDQLEAVEKYEEVLHNLEFAKELQKTFSGLSLDLLKAQKKAQRREHMLKLEAEKKKLRTILQVQYVLQNLTQEHVQKDFKGGLNGAVYLPSKELDYLIKFSKLTCPERNESLRQTLEGSTV

SEQ ID NO: 20472 - protein, 324 aa, Homo sapiens
MFSSVAHLARANPFNTPHLQLVHDGLGDLRSSSPGPTGQPRRPRNLAAAAVEEYSCEFGSAKYYALCGFGGVLSCGLTHTAVVPLDLVKCRMQVDPQKYKGIFNGFSVTLKEDGVRGLAKGWAPTFLGYSMQGLCKFGFYEVFKVLYSNMLGEENTYLWRTSLYLAASASAEFFADIALAPMEAAKVRIQTQPGYANTLRDAAPKMYKEEGLKAFYKGVAPLWMRQIPYTMMKFACFERTVEALYKFVVPKPRSECSKPEQLVVTFVAGYIGVWKGLFARIIMIGTLTALQWFIYDSVKVYFRLPRPPPPEMPESLKKKLGLTQ

SEQ ID NO: 20473 - protein, 397 aa, Homo sapiens
MFKFHQMKHIFEILDKMRCLRKRSTVSFLGVLVIFLLFMNLYIEDSYVLEGDKQLIRETSTHQLNSERYVHTFKDLSNFSGAINVTYRYLAATPLQRKRYLTIGLSSVKRKKGNYLLETIKSIFEQSSYEELKEISVVVHLADFNSSWRDAMVQDITQKFAHHIIAGRLMVIHAPEEYYPILDGLKRNYNDPEDRVKFRSKQNVDYAFLLNFCANTSDYYVMLEDDVRCSKNFLTAIKKVIASLEGTYWVTLEFSKLGYIGKLYHSHDLPRLAHFLLMFYQEMPCDWLLTHFRGLLAQKNVIRFKPSLFQHMGYYSSYKGTENKLKDDDFEEESFDIPDNPPASLYTNMNVFENYEASKAYSSVDEYFWGKPPSTGDVFVIVFENPIIIKKIKVNTG

SEQ ID NO: 20474 - protein, 203 aa, Homo sapiens
MATSRYEPVAEIGVGAYGTVYKARDPHSGHFVALKSVRVPNGGGGGGGLPISTVREVALLRRLEAFEHPNVVRLMDVCATSRTDREIKVTLVFEHVDQDLRTYLDKAPPPGLPAETIKDLMRQFLRGLDFLHANCIVHRDLKPENILVTSGGTVKLADFGLARIYSYQMALTPVVVTLWYRAPEVLLQSTYATPVDMWSVGCI

SEQ ID NO: 20475 - protein, 1688 aa, Homo sapiens
MSGTSSPEAVKKLLENMQSDLRALSLECKKKFPPVKEAAESGIIKVKTIAARNTEILAALKENSSEVVQPFLMGCGTKEPKITQLCLAAIQRLMSHEVVSETAAGNIINMLWQLMENSLEELKLLQTVLVLLTTNTVVHDEALSKAIVLCFRLHFTKDNITNNTAAATVRQVVTVVFERMVAEDERHRDIIEQPVLVQGNSNRRSVSTLKPCAKDAYMLFQDLCQLVNADAPYWLVGMTEMTRTFGLELLESVLNDFPQVFLQHQEFSFLLKERVCPLVIKLFSPNIKFRQGSSTSSSPAPVEKPYFPICMRLLRVVSVLIKQFYSLLVTECEIFLSLLVKFLDADKPQWLRAVAVESIHRFCVQPQLLRSFCQSYDMKQHSTKVFRDIVNALGSFIQSLFLVPPTGNPATSNQAGNNNLGGSVSAPANSGMVGIGGGVTLLPAFEYRGTWIPILTITVQGSAKATYLEMLDKVEPPTIPEGYAMSVAFHCLLDLVRGITSMIEGELGELETECQTTTEEGSSPTQSTEQQDLQSTSDQMDKEIVSRAVWEEMVNACWCGLLAALSLLLDASTDEAATENILKAELTMAALCGRLGLVTSRDAFITAICKAYSVQGQSVMMISPSSESHQQVVAVGQPLAVQPQGTVMLTSKNIQCMRTLLNLAHCHGAVLGTSWQLVLATLQHLVWILGLKPSSGGALKPGRAVEGPSTVLTTAVMTDLPVISNILSRLFESSQYLDDVSLHHLINALCSLSLEAMDMAYGNNKEPSLFAVAKLLETGLVNMHRIEILWRPLTGHLLEVCQHPNSRMREWGAEALTSLIKAGLTFNHDPPLSQNQRLQLLLLNPLKEMSNINHPDIRLKQLECVLQILQSQGDSLGPGWPLVLGVMGAIRNDQGESLIRTAFQCLQLVVTDFLPTMPCTCLQIVVDVAGSFGLHNQELNISLTSIGLLWNISDYFFQRGETIEKELNKEEAAQQKQAEEKGVVLNRPFHPAPPFDCLWLCLYAKLGELCVDPRPAVRKSAGQTLFSTIGAHGTLLQHSTWHTVIWKVLFHLLDRVRESSTTADKEKIESGGGNILIHHSRDTAEKQWAETWVLTLAGVARIFNTRRYLLQPLGDFSRAWDVLLDHIQSAALSKNNEVSLAALKSFQEILQIVSPVRDSDKPETPPVVNVPVPVLIGPISGMSRPFVRTDSIGEKLGRYSSSEPPIVTDELEDLNLWWAAWNTWYRIGSESTKPPITFDKLTFIPSQPFLTALIQIFPALYQHIKTGFNMDDLQKLGVILHSAISVPISSDASPFILPSYTEAVLTSLQEAVLTALDVLQKAICVGPENMQIMYPAIFDQLLAFVEFSCKPPQYGQLETKHIANAKYNQAEWVALNYVPFAERSLEVVVDLYQKTACHKAVVNEKVLQNIIKTLRVPLSLKYSCPSESTWKLAVSSLLRVLSIGLPVARQHASSGKFDSMWPELANTFEDFLFTKSIPPDNLSIQEFQRNENIDVEVVQLISNEILPYANFIPKEFVGQIMTMLNKGSIHSQSSSFTEAEIDIRLREEFSKMCFETLLQFSFSNKVTTPQEGYISRMALSVLLKRSQDVLHRYIEDERLSGKCPLPRQQVTEIIFVLKAVSTLIDSLKKTQPENVDGNTWAQVIALYPTLVECITCSSSEVCSALKEALVPFKDFMQPPASRVQNGES

SEQ ID NO: 20476 - protein, 1192 aa, Homo sapiens
MSRGAGALQRRTTTYLISLTLVKLESVPPPPPSPSAAAAGAAGARGSETGDPGSPRGAEEPGKKRHERLFHRQDALWISTSSAGTGGAEPPALSPAPASPARPVSPAPGRRLSLWAVPPGPPLSGGLSPDPKPGGAPTSSRRPLLSSPSWGGPEPEGRAGGGIPGSSSPHPGTGSRRLKVAPPPPAPKPCKTVTTSGAKAGGGKGAGSRLSWPESEGKPRVKGSKSSAGTGASVSAAATAAAAGGGGSTASTSGGVGAGAGARGKLSPRKGKSKTLDNSDLHPGPPAGSPPPLTLPPTPSPATAVTAASAQPPGPAPPITLEPPAPGLKRGREGGRASTRDRKMLKFISGIFTKSTGGPPGSGPLPGPPSLSSGSGSRELLGAELRASPKAVINSQEWTLSRSIPELRLGVLGDARSGKSSLIHRFLTGSYQVLEKTESEQYKKEMLVDGQTHLVLIREEAGAPDAKFSGWADAVIFVFSLEDENSFQAVSRLHGQLSSLRGEGRGGLALALVGTQDRISASSPRVVGDARARALCADMKRCSYYETCATYGLNVDRVFQEVAQKVVTLRKQQQLLAACKSLPSSPSHSAASTPVAGQASNGGHTSDYSSSLPSSPNVGHRELRAEAAAVAGLSTPGSLHRAAKRRTSLFANRRGSDSEKRSLDSRGETTGSGRAIPIKQSFLLKRSGNSLNKEWKKKYVTLSSNGFLLYHPSINDYIHSTHGKEMDLLRTTVKVPGKRPPRAISAFGPSASINGLVKDMSTVQMGEGLEATTPMPSPSPSPSSLQPPPDQTSKHLLKPDRNLARALSTDCTPSGDLSPLSREPPPSPMVKKQRRKKLTTPSKTEGSAGQAEAKRKMWKLKSFGSLRNIYKAEENFEFLIVSSTGQTWHFEAASFEERDAWVQAIESQILASLQCCESSKVKLRTDSQSEAVAIQAIRNAKGNSICVDCGAPNPTWASLNLGALICIECSGIHRNLGTHLSRVRSLDLDDWPRELTLVLTAIGNDTANRVWESDTRGRAKPSRDSSREERESWIRAKYEQLLFLAPLSTSEEPLGRQLWAAVQAQDVATVLLLLAHARHGPLDTSVEDPQLRSPLHLAAELAHVVITQLLLWYGADVAARDAQGRTALFYARQAGSQLCADILLQHGCPGEGGSAATTPSAATTPSITATPSPRRRSSAASVGRADAPVALV

SEQ ID NO: 20477 - protein, 638 aa, Homo sapiens
MGKIENNERVILNVGGTRHETYRSTLKTLPGTRLALLASSEPPGDCLTTAGDKLQPSPPPLSPPPRAPPLSPGPGGCFEGGAGNCSSRGGRASDHPGGGREFFFDRHPGVFAYVLNYYRTGKLHCPADVCGPLFEEELAFWGIDETDVEPCCWMTYRQHRDAEEALDIFETPDLIGGDPGDDEDLAAKRLGIEDAAGLGGPDGKSGRWRRLQPRMWALFEDPYSSRAARFIAFASLFFILVSITTFCLETHEAFNIVKNKTEPVINGTSVVLQYEIETDPALTYVEGVCVVWFTFEFLVRIVFSPNKLEFIKNLLNIIDFVAILPFYLEVGLSGLSSKAAKDVLGFLRVVRFVRILRIFKLTRHFVGLRVLGHTLRASTNEFLLLIIFLALGVLIFATMIYYAERVGAQPNDPSASEHTQFKNIPIGFWWAVVTMTTLGYGDMYPQTWSGMLVGALCALAGVLTIAMPVPVIVNNFGMYYSLAMAKQKLPRKRKKHIPPAPQASSPTFCKTELNMACNSTQSDTCLGKDNRLLEHNRSVLSGDDSTGSEPPLSPPERLPIRRSSTRDKNRRGETCFLLTTGDYTCASDGGIRKGYEKSRSLNNIAGLAGNALRLSPVTSPYNSPCPLRRSRSPIPSIL

SEQ ID NO: 20478 - protein, 160 aa, Homo sapiens
CNYFESQNVDFRGKKVIELGAGTGIVGILAALQGWVSSASVAPAKAHILCWAPSVCLGLQQGAPHEAAAENRLLLCKLQESSGDLWRGPQTDGVLLCGPGRRAMSCVVFACTVMRLLIGRYILRNGVVRRFWLMHIIEYLHKPRWYIVLQPGLYGIASCS

SEQ ID NO: 20479 - protein, 1037 aa, Homo sapiens
MMEGNGTENSCSRTRGWLQQDNDAKPWLWKFSNCFSRPEQTLPHSPQTKEYMENKKVAVELKDVPSPLHAGSKLFPAVPLPDIRSLQQPKIQLSSVPKVSCCAHCPNEPSTSPMRFGGGGGGSGGTSSLIHPGALLDSQSTRTITCQVGSGFAFQSASSLQNASARNNLAGIASDFPSMCLESNLSSCKHLPCCGKLHFQSCHGNVHKLHQFPSLQGCTSAGYFPCSDFTSGAPGHLEEHISQSELTPHLCTNSLHLNVVPPVCLKGSLYCEDCLNKPARNSIIDAAKVWPNIPPPNTQPAPLAVPLCNGCGTKGTGKETTLLLATSLGKAASKFGSPEVAVAGQVLENLPPIGVFWDIENCSVPSGRSATAVVQRIREKFFKGHREAEFICVCDISKENKEVIQELNNCQVTVAHINATAKNAADDKLRQSLRRFANTHTAPATVVLVSTDVNFALELSDLRHRHGFHIILVHKNQASEALLHHANELIRFEEFISDLPPRLPLKMPQCHTLLYVYNLPANKDGKSVSNRLRRLSDNCGGKVLSITGCSAILRFINQDSAERAQKRMENEDVFGNRIIVSFTPKNRELCETKSSNAIADKVKSPKKLKNPKLCLIKDASEQSSSAKATPGKGSQANSGSATKNTNVKSLQELCRMESKTGHRNSEHQQGHLRLVVPTHGNSSAAVSTPKNSGVAEPVYKTSQKKENLSARSVTSSPVEKKDKEETVFQVSYPSAFSKLVASRQVSPLLASQSWSSRSMSPNLLNRASPLAFNIANSSSEADCPDPFANGADVQVSNIDYRLSRKELQQLLQEAFARHGKVKSVELSPHTDYQLKAVVQMENLQDAIGAVNSLHRYKIGSKKILVSLATGAASKSLSLLSAETMSVLQDAPACCLPLFKFTDIYEKKFGHKLNVSDLYKLTDTVAIREQGNGRLVCLLPSSQARQSPLGSSQSHDGSSTNCSPIIFEELEYHEPVCRQHCSNKDFSEHEFDPDSYKIPFVILSLKTFAPQVHSLLQTHEGTVPLLRPLASAFEESCR

SEQ ID NO: 20480 - protein, 768 aa, Homo sapiens
METGLGAPLFKAWLLISVWGLGVDPSLQIDVLTELELGESTTGVRQVPGLHNGTKAFLFQDTPRSIKASTATAEQFFQKLRNKHEFTILVTLKQTHLNSGVILSIHHLDHRYLELESSGHRNEVRLHYRSGSHRPHTEVFPYILADDKWHKLSLAISASHLILHIDCNKIYERVVEKPSTDLPLGTTFWLGQRNNAHGYFKGIMQDVQLLVMPQGFIAQCPDLNRTCPTCNDFHGLVQKIMELQDILAKTSAKLSRAEQRMNRLDQCYCERTCTMKGTTYREFESWIDGCKNCTCLNGTIQCETLICPNPDCPLKSALAYVDGKCCKECKSICQFQGRTYFEGERNTVYSSSGVCVLYECKDQTMKLVESSGCPALDCPESHQITLSHSCCKVCKGYDFCSERHNCMENSICRNLNDRAVCSCRDGFRALREDNAYCEDIDECAEGRHYCRENTMCVNTPGSFMCICKTGYIRIDDYSCTEHDECITNQHNCDENALCFNTVGGHNCVCKPGYTGNGTTCKAFCKDGCRNGGACIAANVCACPQGFTGPSCETDIDECGTGRHSCANDTICFNLDGGYDCRCPHGKNCTGDCIHDGKVKHNGQIWVLENDRCSVCSCQNGFVMCRRMVCDCENPTVDLFCCPECDPRLSSQCLHQNGETLYNSGDTWVQNCQQCRCLQGEVDCWPLPCPDVECEFSILPENECCPRCVTDPCQADTIRNDITKTCLDEMNVVRFTGSSWIKHGTECTLCQCKNGHICCSVDPQCLQEL

SEQ ID NO: 20481 - protein, 1251 aa, Homo sapiens
MMCEVMPTINEDTPMSQRGSQSSGSDSDSHFEQLMVNMLDERDRLLDTLRETQESLSLAQQRLQDVIYDRDSLQRQLNSALPQDIESLTGGLAGSKGADPPEFAALTKELNACREQLLEKEEEISELKAERNNTRLLLEHLECLVSRHERSLRMTVVKRQAQSPSGVSSEVEVLKALKSLFEHHKALDEKVRERLRVSLERVSALEEELAAANQEIVALREQNVHIQRKMASSEGSTESEHLEGMEPGQKVHEKRLSNGSIDSTDETSQIVELQELLEKQNYEMAQMKERLAALSSRVGEVEQEAETARKDLIKTEEMNTKYQRDIREAMAQKEDMEERITTLEKRYLSAQRESTSIHDMNDKLENELANKEAILRQMEEKNRQLQERLELAEQKLQQTMRKAETLPEVEAELAQRIAALTKAEERHGNIEERMRHLEGQLEEKNQELQRARQREKMNEEHNKRLSDTVDRLLTESNERLQLHLKERMAALEEKNVLIQESETFRKNLEESLHDKERLAEEIEKLRSELDQLKMRTGSLIEPTIPRTHLDTSAELRYSVGSLVDSQSDYRTTKVIRRPRRGRMGVRRDEPKVKSLGDHEWNRTQQIGVLSSHPFESDTEMSDIDDDDRETIFSSMDLLSPSGHSDAQTLAMMLQEQLDAINKEIRLIQEEKESTELRAEEIENRVASVSLEGLNLARVHPGTSITASVTASSLASSSPPSGHSTPKLTPRSPAREMDRMGVMTLPSDLRKHRRKIAVVEEDGREDKATIKCETSPPPTPRALRMTHTLPSSYHNDARSSLSVSLEPESLGLGSANSSQDSLHKAPKKKGIKSSIGRLFGKKEKARLGQLRGFMETEAAAQESLGLGKLGTQAEKDRRLKKKHELLEEARRKGLPFAQWDGPTVVAWLELWLGMPAWYVAACRANVKSGAIMSALSDTEIQREIGISNPLHRLKLRLAIQEMVSLTSPSAPPTSRTPSGNVWVTHEEMENLAAPAKTKESEEGSWAQTLAYGDMNHEWIGNEWLPSLGLPQYRSYFMECLVDARMLDHLTKKDLRVHLKMVDSFHRTSLQYGIMCLKRLNYDRKELERRREASQHEIKDVLVWSNDRVIRWIQAIGLREYANNILESGVHGSLIALDENFDYSSLALLLQIPTQNTQARQILEREYNNLLALGTERRLDESDDKNFRRGSTWRRQFPPREVHGISMMPGSSETLPAGFRLTTTSGQSRKMTTDVASSRLQRLDNSTVRTYSC

SEQ ID NO: 20482 - protein, 1344 aa, Homo sapiens
MKSSGPVERLLRALGRRDSSRAASRPRKAEPHSFREKVFRKKPPVCAVCKVTIDGTGVSCRVCKVATHRKCEAKVTSACQALPPVELRRNTAPVRRIEHLGSTKSLNHSKQRSTLPRSFSLDPLMERRWDLDLTYVTERILAAAFPARPDEQRHRGHLRELAHVLQSKHRDKYLLFNLSEKRHDLTRLNPKVQDFGWPELHAPPLDKLCSICKAMETWLSADPQHVVVLYCKGNKGKLGVIVSAYMHYSKISAGADQALATLTMRKFCEDKVATELQPSQRRYISYFSGLLSGSIRMNSSPLFLHYVLIPMLPAFEPGTGFQPFLKIYQSMQLVYTSGVYHIAGPGPQQLCISLEPALLLKGDVMVTCYHKGGRGTDRTLVFRVQFHTCTIHGPQLTFPKDQLDEAWTDERFPFQASVEFVFSSSPEKIKGSTPRNDPSVSVDYNTTEPAVRWDSYENFNQHHEDSVDGSLTHTRGPLDGSPYAQVQRPPRQTPPAPSPEPPPPPMLSVSSDSGHSSTLTTEPAAESPGRPPPTAAERQELDRLLGGCGVASGGRGAGRETAILDDEEQPTVGGGPHLGVYPGHRPGLSRHCSCRQGYREPCGVPNGGYYRPEGTLERRRLAYGGYEGSPQGYAEASMEKRRLCRSLSEGLYPYPPEMGKPATGDFGYRAPGYREVVILEDPGLPALYPCPACEEKLALPTAALYGLRLEREAGEGWASEAGKPLLHPVRPGHPLPLLLPACGHHHAPMPDYSCLKPPKAGEEGHEGCSYTMCPEGRKLSYEIPTEEGGDRYPLPGHLASAGPLASAESLEPVSWREGPSGHSTLPRSPRDAPCSASSELSGPSTPLHTSSPVQGKESTRRQDTRSPTSAPTQRLSPGEALPPVSQAGTGKAPELPSGSGPEPLAPSPVSPTFPPSSPSDWPQERSPGGHSDGASPRSPVPTTLPGLRHAPWQGPRGPPDSPDGSPLTPVPSQMPWLVASPEPPQSSPTPAFPLAASYDTNGLSQPPLPEKRHLPGPGQQPGPWGPEQASSPARGISHHVTFAPLLSDNVPQTPEPPTQESQSNVKFVQDTSKFWYKPHLSRDQAIALLKDKDPGAFLIRDSHSFQGAYGLALKVATPPPSAQPWKGDPVEQLVRHFLIETGPKGVKIKGCPSEPYFGSLSALVSQHSISPISLPCCLRIPSKDPLEETPEAPVPTNMSTAADLLRQGAACSVLYLTSVETESLTGPQAVARASSAALSCSPRPTPAVVHFKVSAQGITLTDNQRKLFFRRHYPVNSITFSSTDPQDRRWTNPDGTTSKIFGFVAKKPGSPWENVCHLFAELDPDQPAGAIVTFITKVLLGQRK

SEQ ID NO: 20483 - protein, 1312 aa, Homo sapiens
MKSSGPVERLLRALGRRDSSRAASRPRKAEPHSFREKVFRKKPPVCAVCKVTIDGTGVSCRVCKVATHRKCEAKVTSACQALPPVELRRNTAPVRRIEHLGSTKSLNHSKQRSTLPRSFSLDPLMERRWDLDLTYVTERILAAAFPARPDEQRHRGHLRELAHVLQSKHRDKYLLFNLSEKRHDLTRLNPKVQDFGWPELHAPPLDKLCSICKAMETWLSADPQHVVVLYCKGNKGKLGVIVSAYMHYSKISAGADQALATLTMRKFCEDKVATELQPSQRRYISYFSGLLSGSIRMNSSPLFLHYVLIPMLPAFEPGTGFQPFLKIYQSMQLVYTSGVYHIAGPGPQQLCISLEPALLLKGDVMVTCYHKGGRGTDRTLVFRVQFHTCTIHGPQLTFPKDQLDEAWTDERFPFQASVEFVFSSSPEKIKGSTPRNDPSVSVDYNTTEPAVRWDSYENFNQHHEDSVDGSLTHTRGPLDGSPYAQVQRPPRQTPPAPSPEPPPPPMLSVSSDSGHSSTLTTEPAAESPGRPPPTAAERQELDRLLGGCGVASGGRGAGRETAILDDEEQPTVGGGPHLGVYPGHRPGLSRHCSCRQGYREPCGVPNGGYYRPEGTLERRRLAYGGYEGSPQGYAEASMEKRRLCRSLSEGLYPYPPEMGKPATGDFGYRAPGYREVVILEDPGLPALYPCPACEEKLALPTAALYGLRLEREAGEGWASEAGKPLLHPVRPGHPLPLLLPACGHHHAPMPDYSCLKPPKAGEEGHEGCSYTMCPEESLEPVSWREGPSGHSTLPRSPRDAPCSASSELSGPSTPLHTSSPVQGKESTRRQDTRSPTSAPTQRLSPGEALPPVSQAGTGKAPELPSGSGPEPLAPSPVSPTFPPSSPSDWPQERSPGGHSDGASPRSPVPTTLPGLRHAPWQGPRGPPDSPDGSPLTPVPSQMPWLVASPEPPQSSPTPAFPLAASYDTNGLSQPPLPEKRHLPGPGQQPGPWGPEQASSPARGISHHVTFAPLLSDNVPQTPEPPTQESQSNVKFVQDTSKFWYKPHLSRDQAIALLKDKDPGAFLIRDSHSFQGAYGLALKVATPPPSAQPWKGDPVEQLVRHFLIETGPKGVKIKGCPSEPYFGSLSALVSQHSISPISLPCCLRIPSKDPLEETPEAPVPTNMSTAADLLRQGAACSVLYLTSVETESLTGPQAVARASSAALSCSPRPTPAVVHFKVSAQGITLTDNQRKLFFRRHYPVNSITFSSTDPQDRRWTNPDGTTSKIFGFVAKKPGSPWENVCHLFAELDPDQPAGAIVTFITKVLLGQRK

SEQ ID NO: 20484 - protein, 662 aa, Homo sapiens
MAANVGSMFQYWKRFDLQQLQRELDATATVLANRQDESEQSRKRLIEQSREFKKNTPEIDALSKRSKEAEAAFLNVYKRLIDVPDPVPALDLGQQLQLKVQRLHDIETENQKLRETLEEYNKEFAEVKNQEVTIKALKEKIREYEQTLKNQAETIALEKEQKLQNDFAEKERKLQETQMSTTSKLEEAEHKVQSLQTALEKTRTELFDLKTKYDEETTAKADEIEMIMTDLERANQRAEVAQREAETLREQLSSANHSLQLASQIQKAPDVEQAIEVLTRSSLEVELAAKEREIAQLVEDVQRLQASLTKLRENSASQISQLEQQLSAKNSTLKQLEEKLKGQADYEEVKKELNILKSMEFAPSEGAGTQDAAKPLEVLLLEKNRSLQSENAALRISNSDLSGRCAELQVRITEAVATATEQRELIARLEQDLSIIQSIQRPDAEGAAEHRLEKIPEPIKEATALFYGPAAPASGALPEGQVDSLLSIISSQRERFRARNQELEAENRLAQHTLQALQSELDSLRADNIKLFEKIKFLQSYPGRGSGSDDTELRYSSQYEERLDPFSSFSKRERQRKYLSLSPWDKATLSMGRLVLSNKMARTIGFFYTLFLHCLVFLVLYKLAWSESMERDCATFCAKKFADHLHKFHENDNGAAAGDLWQ

SEQ ID NO: 20485 - protein, 1739 aa, Homo sapiens
MMEGNGTENSCSRTRGWLQQDNDAKPWLWKFSNCFSRPEQTLPHSPQTKEYMENKKVAVELKDVPSPLHAGSKLFPAVPLPDIRSLQQPKIQLSSVPKVSCCAHCPNEPSTSPMRFGGGGGGSGGTSSLIHPGALLDSQSTRTITCQVGSGFAFQSASSLQNASARNNLAGIASDFPSMCLESNLSSCKHLPCCGKLHFQSCHGNVHKLHQFPSLQGCTSAGYFPCSDFTSGAPGHLEEHISQSELTPHLCTNSLHLNVVPPVCLKGSLYCEDCLNKPARNSIIDAAKVWPNIPPPNTQPAPLAVPLCNGCGTKGTGKETTLLLATSLGKAASKFEVAVAGQVLENLPPIGVFWDIENCSVPSGRSATAVVQRIREKFFKGHREAEFICVCDISKENKEVIQELNNCQVTVAHINATAKNAADDKLRQSLRRFANTHTAPATVVLVSTDVNFALELSDLRHRHGFHIILVHKNQASEALLHHANELIRFEEFISDLPPRLPLKMPQCHTLLYVYNLPANKDGKSVSNRLRRLSDNCGGKVLSITGCSAILRFINQDSAERAQKRMENEDVFGNRIIVSFTPKNRELCETKSSNAIADKVKSPKKLKNPKLCLIKDASEQSSSAKATPGKGSQANSGSATKNTNVKSLQELCRMESKTGHRNSEHQQGHLRLVVPTHGNSSAAVSTPKNSGVAEPVYKTSQKKENLSARSVTSSPVEKKDKEETVFQVSYPSAFSKLVASRQVSPLLASQSWSSRSMSPNLLNRASPLAFNIANSSSEADCPDPFANGADVQVSNIDYRLSRKELQQLLQEAFARHGKVKSVELSPHTDYQLKAVVQMENLQDAIGAVNSLHRYKIGSKKILVSLATGAASKSLSLLSAETMSVLQDAPACCLPLFKFTDIYEKKFGHKLNVSDLYKLTDTVAIREQGNGRLVCLLPSSQARQSPLGSSQSHDGSSTNCSPIIFEELEYHEPVCRQHCSNKDFSEHEFDPDSYKIPFVILSLKTFAPQVHSLLQTHEGTVPLLSFPDCYIAEFGDLEVVQENQGGVPLEHFITCVPGVNIATAQNGIKVVKWIHNKPPPPNTDPWLLRSKSPVGNPQLIQFSREVIDLLKSQPSCVIPISHFIPSYHHHFAKQCRVSDYGYSKLIELLEAVPHVLQILGMGSKRLLTLTHRAQVKRFTQDLLKLLKSQASKQVIVREFSQAYHWCFSKDWDVTEYGVCELIDIVSEIPDTTICLSQQDNEMVICIPKRERTQDEIERTKQFSKDVVDLLRHQPHFRMPFNKFIPSYHHHFGRQCKLAYYGFTKLLELFEAIPDTLQVLECGEEKILTLTEVERFKALAAQFVKLLRSQKDNCLMMTDLLTEYAKTFGYTFRLQDYDVSSISALTQKLCHVVKVADIESGRQIQLINRKSLRSLTAQLLVLLMSWEGTTHLSVEELKRHYESTHNTPLNPCEYGFMTLTELLKSLPYLVEVFTNDKMEECVKLTSLYLFAKNVRSLLHTYHYQQIFLHEFSMAYTKYVGETLQPKTYGHSSVEELLGAIPQVVWIKGHGHKRIVVLKNDMKSRLSSLSLSPANHENQPSEGERILEVPESHTASELKLGADGSGPSHTEQELLRLTDDSPVDLLCAPVPSCLPSPQLRPDPVILQSADLIQFEERPQEPSEIMILNQEEKMEIPIPGKSKTLTSDSSSSCISAAVPVPPCPSSETSESLLSKDPVESPAKKQPKNRVKLAANFSLAPITKL

SEQ ID NO: 20486 - protein, 963 aa, Homo sapiens
MATAAETSASEPEAESKAGPKADGEEDEVKAARTRRKVLSRAVAAATYKTMGPAWDQQEEGVSESDGDEYAMASSAESSPGEYEWEYDEEEEKNQLEIERLEEQLSINVYDYNCHVDLIRLLRLEGELTKVRMARQKMSEIFPLTEELWLEWLHDEISMAQDGLDREHVYDLFEKAVKDYICPNIWLEYGQYSVGGIGQKGGLEKVRSVFERALSSVGLHMTKGLALWEAYREFESAIVEAARLEKVHSLFRRQLAIPLYDMEATFAEYEEWSEDPIPESVIQNYNKALQQLEKYKPYEEALLQAEAPRLAEYQAYIDFEMKIGDPARIQLIFERALVENCLVPDLWIRYSQYLDRQLKVKDLVLSVHNRAIRNCPWTVALWSRYLLAMERHGVDHQVISVTFEKALNAGFIQATDYVEIWQAYLDYLRRRVDFKQDSSKELEELRAAFTRALEYLKQEVEERFNESGDPSCVIMQNWARIEARLCNNMQKARELWDSIMTRGNAKYANMWLEYYNLERAHGDTQHCRKALHRAVQCTSDYPEHVCEVLLTMERTEGSLEDWDIAVQKTETRLARVNEQRMKAAEKEAALVQQEEEKAEQRKRARAEKKALKKKKKIRGPEKRGADEDDEKEWGDDEEEQPSKRRRVENSIPAAGETQNVEVAAGPAGKCAAVDVEPPSKQKEKAASLKRDMPKVLHDSSKDSITVFVSNLPYSMQEPDTKLRPLFEACGEVVQIRPIFSNRGDFRGYCYVEFKEEKSALQALEMDRKSVEGRPMFVSPCVDKSKNPDFKVFRYSTSLEKHKLFISGLPFSCTKEELEEICKAHGTVKDLRLVTNRAGKPKGLAYVEYENESQASQAVMKMDGMTIKENIIKVAISNPPQRKVPEKPETRKAPGGPMLLPQTYGARGKGRTQLSLLPRALQRPSAAAPQAENGPAAAPAVAAPAATEAPKMSNADFAKLFLRK

SEQ ID NO: 20487 - protein, 132 aa, Homo sapiens
MDVCATSRTDREIKVTLVFEHVDQDLRTYLDKAPPPGLPAETIKDLMRQFLRGLDFLHANCIVHRDLKPENILVTSGGTVKLADFGLARIYSYQMALTPVVVTLWYRAPEVLLQSTYATPVDMWSVGCIFAE

SEQ ID NO: 20488 - protein, 1245 aa, Homo sapiens
MAVRKKDGGPNVKYYEAADTVTQFDNVRLWLGKNYKKYIQAEPPTNKSLSSLVVQLLQFQEEVFGKHVSNAPLTKLPIKCFLDFKAGGSLCHILAAAYKFKSDQGWRRYDFQNPSRMDRNVEMFMTIEKSLVQNNCLSRPNIFLCPEIEPKLLGKLKDIIKRHQGTVTEDKNNASHVVYPVPGNLEEEEWVRPVMKRDKQVLLHWGYYPDSYDTWIPASEIEASVEDAPTPEKPRKVHAKWILDTDTFNEWMNEEDYEVNDDKNPVSRRKKISAKTLTDEVNSPDSDRRDKKGGNYKKRKRSPSPSPTPEAKKKNAKKGPSTPYTKSKRGHREEEQEDLTKDMDEPSPVPNVEEVTLPKTVNTKKDSESAPVKGGTMTDLDEQEDESMETTGKDEDENSTGNKGEQTKNPDLHEDNVTEQTHHIIIPSYAAWFDYNSVHAIERRALPEFFNGKNKSKTPEIYLAYRNFMIDTYRLNPQEYLTSTACRRNLAGDVCAIMRVHAFLEQWGLINYQVDAESRPTPMGPPPTSHFHVLADTPSGLVPLQPKTPQGRQVDADTKAGRKGKELDDLVPETAKGKPELQTSASQQMLNFPDKGKEKPTDMQNFGLRTDMYTKKNVPSKSKAAASATREWTEQETLLLLEALEMYKDDWNKVSEHVGSRTQDECILHFLRLPIEDPYLEDSEASLGPLAYQPIPFSQSGNPVMSTVAFLASVVDPRVASAAAKSALEEFSKMKEEVPTALVEAHVRKVEEAAKVTGKADPAFGLESSGIAGTTSDEPERIEESGNDEARVEGQATDEKKEPKEPREGGGAIEEEAKEKTSEAPKKDEEKGKEGDSEKESEKSDGDPIVDPEKEKEPKEGQEEVLKEVVESEGERKTKVERDIGEGNLSTAAAAALAAAAVKAKHLAAVEERKIKSLVALLVETQMKKLEIKLRHFEELETIMDREREALEYQRQQLLADRQAFHMEQLKYAEMRARQQHFQQMHQQQQQPPPALPPGSQPIPPTGAAGPPAVHGLAVAPASVVPAPAGSGAPPGSLGPSEQIGQAGSTAGPQQQQPAGAPQPGAVPPGVPPPGPHGPSPFPNQQTPPSMMPGAVPGSGHPGVAGNAPLGLPFGMPPPPPPPAPSIIPFGSLADSISINLPAPPNLHGHHHHLPFAPGTLPPPNLPVSMANPLHPNLPATTTMPSSLPLGPGLGSAAAQSPAIVAAVQGNLLPSASPLPDPGTPLPPDPTAPSPGTVTPVPPPQ

SEQ ID NO: 20489 - protein, 511 aa, Homo sapiens
MNGVSWSQDLQEGISAWFGPPASTPASTMSIRVTQKSYKVSTSGPRAFSSRSYTSGPGSRISSSSFSRVGSSNFRGGLGGGYGGASGMGGITAVTVNQSLLSPLVLEVDPNIQAVRTQEKEQIKTLNNKFASFIDKVRFLEQQNKMLETKWSLLQQQKTARSNMDNMFESYINNLRRQLETLGQEKLKLEAELGNMQGLVEDFKNKYEDEINKRTEMENEFVLIKKDVDEAYMNKVELESRLEGLTDEINFLRQLYEEEIRELQSQISDTSVVLSMDNSRSLDMDSIIAEVKAQYEDIANRSRAEAESMYQIKYEELQSLAGKHGDDLRRTKTEISEMNRNISRLQAEIEGLKGQRASLEAAIADAEQRGELAIKDANAKLSELEAALQRAKQDMARQLREYQELMNVKLALDIEIATYRKLLEGEESRLESGMQNMSIHTKTTSGYAGGLSSAYGGLTSPGLSYSLGSSFGSGAGSSSFSRTSSSRAVVVKKIETRDGKLVSESSDVLPK

SEQ ID NO: 20490 - protein, 90 aa, Homo sapiens
MSTVICMKQREEEFLLTIRPFANRMQKSPCYIPIVSSATLWDRSTPSAKHIPCYERTSVPCSRFINHMKNFSESPKFRSLHFLNFPGPFH

SEQ ID NO: 20491 - protein, 407 aa, Homo sapiens
MRLLAWLIFLANWGGARAEPGKFWHIADLHLDPDYKVSKDPFQVCPSAGSQPVPDAGPWGDYLCDSPWALINSSIYAMKEIEPEPDFILWTGDDTPHVPDEKLGEAAVLEIVERLTKLIREVFPGAFYCEKLPGPSGAGRIVVLNTNLYYTSNALTADMADPGQQFQWLEDVLTDASKAGDMVYIVGHVPPGFFEKTQNKAWFREGFNEKYLKVVRKHHRVIAGQFFGHHHTDSFRMLYDDAGVPISAMFITPGVTPWKTTLPGVVNGANNPAIRVFEYDRATLSLKDMVTYFMNLSQANAQGTPRWELEYQLTEAYGVPDASAHSMHTVLDRIAGDQSTLQRYYVYNSVSYSAGVCDEACSMQHVCAMRQVDIDAYTTCLYASGTTPVPQLPLLLMALLGLCTLVL

SEQ ID NO: 20492 - protein, 932 aa, Homo sapiens
TITAFVEPFVILLILVANAIVGVWQERNAENAIEALKEYEPEMGKVYRQDRKSVQRIKAKDIVPGDIVEIAGESVSVIKHTDPVPDPRAVNQDKKNMLFSGTNIAAGKAMGVVVATGVNTEIGKIRDEMVATEQERTPLQQKLDEFGEQLSKVISLICIAVWIINIGHFNDPVHGGSWIRGAIYYFKIAVALAVAAIPEGLPAVITTCLALGTRRMAKKNAIVRSLPSVETLGCTSVICSDKTGTLTTNQMSVCRMFILDRVEGDTCSLNEFTITGSTYAPIGEVHKDDKPVNCHQYDGLVELATICALCNDSALDYNEAKGVYEKVGEATETALTCLVEKMNVFDTELKGLSKIERANACNSVIKQLMKKEFTLEFSRDRKSMSVYCTPNKPSRTSMSKMFVKGAPEGVIDRCTHIRVGSTKVPMTSGVKQKIMSVIREWGSGSDTLRCLALATHDNPLRREEMHLEDSANFIKYETNLTFVGCVGMLDPPRIEVASSVKLCRQAGIRVIMITGDNKGTAVAICRRIGIFGQDEDVTSKAFTGREFDELNPSAQRDACLNARCFARVEPSHKSKIVEFLQSFDEITAMTGDGVNDAPALKKAEIGIAMGSGTAVAKTASEMVLADDNFSTIVAAVEEGRAIYNNMKQFIRYLISSNVGEVVCIFLTAALGFPEALIPVQLLWVNLVTDGLPATALGFNPPDLDIMNKPPRNPKEPLISGWLFFRYLAIGCYVGAATVGAAAWWFIAADGGPRVSFYQLSHFLQCKEDNPDFEGVDCAIFESPYPMTMALSVLVTIEMCNALNSLSENQSLLRMPPWENIWLVGSICLSMSLHFLILYVEPLPLIFQITPLNVTQWLMVLKISLPVILMDETLKFVARNYLEPGKECVQPATKSCSFSACTDGISWPFVLLIMPLVIWVYSTDTNFSDMFWS

SEQ ID NO: 20493 - protein, 145 aa, Homo sapiens
MQPPLDLKQILPFPLEPAPTLGLFSNYSTMDPVQKAVLSHTFGGPLLKTKRPVISCNICQIRFNSQSQAEAHYKGNRHARRVKGIEAAKTRGREPGVREPGDPAPPGSTPTNGDGVAPRPVSMENGLGPAPGSPEKQPGSPSPPS

SEQ ID NO: 20494 - protein, 252 aa, Homo sapiens
MTLLPSKGGDTIASVNGLNVEGIRHREIVDIIKASGNVLRLETLYGTSIRKAELEARLQYLKQTLYEKWGEYRSLMVQEQRLVHGLVVKDPSIYDTLESVRSCLYGAGLLPGSLPFGPLLAVPGRPRGGARRARGDADDAVYHTCFFGDSEPPALPPPPPPARAFGPGPAETPAVGPGPGPRAALSRSASVRCAGPGGGGGGGAPGALWTEAREQALCGPGLRKTKYRSFRRRLLKFIPGLNRSLEEEESQL

SEQ ID NO: 20495 - protein, 943 aa, Homo sapiens
MVKFLVENGANINQPDNEGWIPLHAAASCGYLDIAEFLIGQGAHVGAVNSEGDTPLDIAEEEAMEELLQNEVNRQGVDIEAARKEEERIMLRDARQWLNSGHINDVRHAKSGGTALHVAAAKGYTEVLKLLIQAGYDVNIKDYDGWTPLHAAAHWGKEEACRILVDNLCDMEMVNKVGQTAFDVADEDILGYLEELQKKQNLLHSEKRDKKSPLIESTANMDNNQSQKTFKNKETLIIEPEKNASRIESLEQEKVDEEEEGKKDESSCSSEEDEEDDSESEAETDKTKPLASVTNANTSSTQAAPVAVTTPTVSSGQATPTSPIKKFPTTATKISPKEEERKDESPATWRLGLRKTGSYGALAEITASKEGQKEKDTAGVTRSASSPRLSSSLDNKEKEKDSKGTRLAYVAPTIPRRLASTSDIEEKENRDSSSLRTSSSYTRRKWEDDLKKNSSVNEGSTYHKSCSFGRRQDDLISSSVPSTTSTPTVTSAAGLQKSLLSSTSTTTKITTGSSSAGTQSSTSNRLWAEDSTEKEKDSVPTAVTIPVAPTVVNAAASTTTLTTTTAGTVSSTTEVRERRRSYLTPVRDEESESQRKARSRQARQSRRSTQGVTLTDLQEAEKTIGRSRSTRTREQENEEKEKEEKEKQDKEKQEEKKESETSREDEYKQKYSRTYDETYQRYRPVSTSSSTTPSSSLSTMSSSLYASSQLNRPNSLVGITSAYSRGITKENEREGEKREEEKEGEDKSQPKSIRERRRPREKRRSTGVSFWTQDSDENEQEQQSDTEEGSNKKETQTDSISRYETSSTSAGDRYDSLLGRSGSYSYLEERKPYSSRLEKDDSTDFKKLYEQILAENEKLKAQLHDTNMELTDLKLQLEKATQRQERFADRSLLEMEKRERRALERRISEMEEELKMLPDLKADNQRLKDENGALIRVISKLSK

SEQ ID NO: 20496 - protein, 187 aa, Homo sapiens
GKKEKARLGQLRGFMETEAAAQESLGLGKLGTQAEKDRRLKKNTSGHELLEEARRKGLPFAQWDGPTVVAWLELWLGMPAWYVAACRANVKSGAIMSALSDTEIQREIGISNPLHRLKLRLAIQEMVSLTSPSAPPTSRTKESEEGSWAQCPVFLQTLAYGDMNHEWIGNEWLPSLGLPQYRSYFME

SEQ ID NO: 20497 - protein, 686 aa, Homo sapiens
MKPSWLQCRKVTSAGGLGGPLPGSSPARGAGAALRALVVPGPRGGLGGRGCRALSSGSGSEYKTHFAASVTDPERFWGKAAEQISWYKPWTKTLENKHSPSTRWFVEGMLNICYNAVDRHIENGKGDKIAIIYDSPVTNTKATFTYKEVLEQVSKLAGVLVKHGIKKGDTVVIYMPMIPQAMYTMLACARIGAIHSLIFGGFASKELSSRIDHVKPKVVVTASFGIEPGRRVEYVPLVEEALKIGQHKPDKILIYNRPNMEAVPLAPGRDLDWDEEMAKAQSHDCVPVLSEHPLYILYTSGTTGLPKGVIRPTGGYAVMLHWSMSSIYGLQPGEVWWAASDLGWVVGHSYICYGPLLHGNTTVLYEGKPVGTPDAGAYFRVLAEHGVAALFTAPTAIRAIRQQDPGAALGKQYSLTRFKTLFVAGERCDVETLEWSKNVFRVPVLDHWWQTETGSPITASCVGLGNSKTPPPGQAGKSVPGYNVMILDDNMQKLKARCLGNIVVKLPLPPGAFSGLWKNQEAFKHLYFEKFPGYYDTMDAGYMDEEGYLYVMSRVDDVINVAGHRISAGAIEESILSHGTVADCAVVGKEDPLKGHVPLALCVLRKDINATEEQVLEEIVKHVRQNIGPVAAFRNAVFVKQLPKTRSGKIPRSALSAIVNGKPYKITSTIEDPSIFGHVEEMLKQA

SEQ ID NO: 20498 - protein, 562 aa, Homo sapiens
MFLISSSVHGSDEHGRLLRRTLMRYVNLTSLLIFRSVSTAVYKRFPTMDHVVEAGFMTTDERKLFNHLKSPHLKYWVPFIWFGNLATKARNEGRIRDSVDLQSLMTEMNRYRSWCSLLFGYDWVGIPLVYTQVVTLAVYTFFFACLIGRQFLDPTKGYAGHDLDLYIPIFTLLQFFFYAGWLKVAEQLINPFGEDDDDFETNWCIDRNLQVSLLAVDEMHMSLPKMKKDIYWDDSAARPPYTLAAADYCIPSFLGSTVQMGLSGSDFPDEEWLWDYEKHGHRHSMIRRVKRFLSAHEHPSSPRRRSYRRQTSDSSMFLPRDDLSPARDLLDVPSRNPPRASPTWKKSCFPEGSPTLHFSMGELSTIRETSQTSTLQSLTPQSSVRTSPIKMPLVPEVLITAAEAPVPTSGGYHHDSATSILSSEFTGVQPSKTEQQQGPMGSILSPSEKETPPGGPSPQTVSASAEENIFNCEEDPGDTFLKRWSLPGFLGSSHTSLGNLSPDPMSSQPALLIDTETSSEISGINIVAGSRVSSDMLYLMENLDTKETDIIELNKETEESPK

SEQ ID NO: 20499 - protein, 1247 aa, Homo sapiens
MMCEVMPTINEDTPMSQRGSQSSGSDSDSHFEQLMVNMLDERDRLLDTLRETQESLSLAQQRLQDVIYDRDSLQRQLNSALPQDIESLTGGLAGSKGADPPEFAALTKELNACREQLLEKEEEISELKAERNNTRLLLEHLECLVSRHERSLRMTVVKRQAQSPSGVSSEVEVLKALKSLFEHHKALDEKVRERLRVSLERVSALEEELAAANQEIVALREQNVHIQRKMASSEGSTESEHLEGMEPGQKVHEKRLSNGSIDSTDETSQIVELQELLEKQNYEMAQMKERLAALSSRVGEVEQEAETARKDLIKTEEMNTKYQRDIREAMAQKEDMEERITTLEKRYLSAQRESTSIHDMNDKLENELANKEAILRQMEEKNRQLQERLELAEQKLQQTMRKAETLPEVEAELAQRIAALTKAEERHGNIEERMRHLEGQLEEKNQELQRARQREKMNEEHNKRLSDTVDRLLTESNERLQLHLKERMAALEEKNVLIQESETFRKNLEESLHDKERLAEEIEKLRSELDQLKMRTGSLIEPTIPRTHLDTSAELRYSVGSLVDSQSDYRTTKVIRRPRRGRMGVRRDEPKVKSLGDHEWNRTQQIGVLSSHPFESDTEMSDIDDDDRETIFSSMDLLSPSGHSDAQTLAMMLQEQLDAINKEIRLIQEEKESTELRAEEIENRVASVSLEGLNLARVHPGTSITASVTASSLASSSPPSGHSTPKLTPRSPAREMDRMGVMTLPSDLRKHRRKIAVVEEDGREDKATIKCETSPPPTPRALRMTHTLPSSYHNDARSSLSVSLEPESLGLGSANSSQDSLHKAPKKKGIKSSIGRLFGKKEKARLGQLRGFMETEAAAQESLGLGKLGTQAEKDRRLKKKHELLEEARRKGLPFAQWDGPTVVAWLELWLGMPAWYVAACRANVKSGAIMSALSDTEIQREIGISNPLHRLKLRLAIQEMVSLTSPSAPPTSRTPSGNVWVTHEEMENLAAPAKTKESEEGSWAQCPVFLQTLAYGDMNHEWIGNEWLPSLGLPQYRSYFMECLVDARMLDHLTKKDLRVHLKMVDSFHRTSLQYGIMCLKRLNYDRKELERRREASQHEIKDVLVWSNDRVIRWIQAIGLREYANNILESGVHGSLIALDENFDYSSLALLLQIPTQNTQARQILEREYNNLLALGTERRLDESDDKNFRRGSTWRRQFPPREVHGISMMPGSSETLPAGFRLTTTSGQSRKMTTDDGVFSVYST

SEQ ID NO: 20500 - protein, 245 aa, Homo sapiens
MDIPLDLSSSAGSGKRRRRGNLPKESVQILRDWLYEHRYNAYPSEQEKALLSQQTHLSTLQVCNWFINARRRLLPDMLRKDGKDPNQFTISRRGAKISETSSVESVMGIKNFMPALEETPFHSCTAGPNPTLGRPLSPKPSSPGSVLARPSVICHTTVTALKDVPFSLCQSVGVGQNTDIQQIAAKNFTDTSLMYPEDTCKSGPSTNTQSGLFNTPPPTPPDLNQDFSGFQLLVDVALKRAAEME

SEQ ID NO: 20501 - protein, 898 aa, Homo sapiens
MDVVGENEALQQFFEAQGANGTLENPALDTSLLEEFLGNDFDLGALQRQLPDTPPYSASDSCSPPQVKGACYPTLRPTAGRTPAPFLHPTAAPAMPPMHPLQSTSGMGDSCQIHGGFHSCHSNASHLATPLDQSVSSHLGIGCSYPQQPLCHSPGASLPPTKKRKCTQALEDSGECRVWACHCRPMTSRSRSSEVQDPDSEGQNRMPTDQCSPALKWQPCHSVPWHSLLNSHYEKLPDVGYRVVTDKGFNFSPADEAFVCQKKNHFQITIHIQVWGSPKFVETEMGLKPIEMFYLKVFGTKVEATNQIIAIEQSQADRSKKIFNPVKIDLLADQVTKVTLGRLHFSETTANNMRKKGKPNPDQRYFMLVVGLYAANQDQFYLLSAHISERIIVRASNPGQFENDSDALWQRGQVPESIVCHGRVGINTDAPDEALVVCGNMKVMGTIMHPSDSRAKQNIQEVDTNEQLKRIAQMRIVEYDYKPEFASAMGINTAHQTGMIAQEVQEILPRAVREVGDVTCGNGETLENFLMVDKDQIFMENVGAVKQLCKLTNNLEERIEELEIWNRKLARLKRLSSWKSSASEASTISKSSRAVSASSPRRAVHKKNNKVYFSGKRQACPNWVFQTLVITLIAVMAFCLKDQDRRVPNLPPSNITSSQEPALLPTASSSAPNTSLVTTPASLQVPEITFCEILPCQETYCCPIRGMKEVSSSPVQRQSEEKEFHQRRWSDKSKSVLARNALSGPDWESDWIDTTISSIQIMEIQQIIDHQYCIQSLQCGSGNYNYNIPVNKHTPTNVKFSLEINTTEPLIVFQCKFTLGNICFHSKRGTKGLESHREISQEMTQGYQHIWSLPVAPFSDSMFHFRVAAPDLADCSTDPYFAGIFFTDYFFYFYRRCA

SEQ ID NO: 20502 - protein, 198 aa, Homo sapiens
MILYRLKERFQLSLRQDKEKNQEIHLSPITLQPALSEAKTVHSMVQPEQAPKVLNVVVDPQGRGAPEIKATTATSVCPSPFKMKPIGLQERRGSNVSLTLDMSSLGNIEPFVSIPTPREKVAMEYLQSASRILTRSQLRDVVASSHLLQSEFMEIPMNFVDPKEIDIPRHGTKNRYKTILPNPLSRVCLRPKNVTDSL

SEQ ID NO: 20503 - protein, 1248 aa, Homo sapiens
MGKDQELLEAARTGNVALVEKLLSGRKGGILGGGSGPLPLSNLLSIWRGPNVNCTDSSGYTALHHAALNGHKDIVLKLLQYEASTNVADNKGYFPIHLAAWKGDVEIVKILIHHGPSHSRVNEQNNENETALHCAAQYGHSEVVAVLLEELTDPTIRNSKLETPLDLAALYGRLRVVKMIISAHPNLMSCNTRKHTPLHLAARNGHKAVVQVLLEAGMDVSCQTEKGSALHEAALFGKVDVVRVLLETGIDANIKDSLGRTVLDILKEHPSQKSLQIATLLQEYLEGVGRSTVLEEPVQEDATQETHISSPVESPSQKTKSETVTGELSKLLDEIKLCQEKDYSFEDLCHTISDHYLDNLSKISEEELGKNGSQSVRTSSTINLSPGEVEEEDDDENTCGPSGLWEALTPCNGCRNLGFPMLAQESYPKKRNYTMEIVPSASLDTFPSENENFLCDLMDTAVTKKPCSLEIARAPSPRTDNASEVAVTTPGTSNHRNSSTGPTPDCSPPSPDTALKNIVKVIRPQPKQRTSIVSSLDFHRMNHNQEYFEINTSTGCTSFTASPPASPPTSSVGTTEVKNEGTNHTDDLSRQDDNDPPKEYDPGQFAGLLHGSSPACESPENPFHLYGKREQCEKGQDEVSLANSPLPFKQSPIENNSEPLVKKIKPKVVSRTIFHKKSNQLENHTIVGTRSTRSGSRNGDQWVMNAGGFVERACTLGRIRSLPKALIDMHLSKSVSKSDSDLIAYPSNEKTSRVNWSESSTAEHSSKGNSERTPSFTSEWEEIDKIMSSIDVGINNELKEMNGETTRPRCPVQTVGQWLESIGLPQYENHLMANGFDNVQFMGSNVMEDQDLLEIGILNSGHRQRILQAIQLLPKMRPIGHDGYHPTSVAEWLDSIELGDYTKAFLINGYTSMDLLKKIWEVELINVLKINLIGHRKRILASLGDRLHDDPPQKPPRSITLREPSGNHTPPQLSPSLSQSTYTTGGSLDVPHIIMQGDARRRRNENYFDDIPRSKLERQMAQTGDWGEPSITLRPPNEATASTPVQYWQHHPEKLIFQSCDYKAFYLGSMLIKELRGTESTQDACAKMRANCQKSTEQMKKVPTIILSVSYKGVKFIDATNKNIIAEHEIRNISCAAQDPEDLSTFAYITKDLKSNHHYCHVFTAFDVNLAYEIILTLGQAFEVAYQLALQARKGGHSSTLPESFENKPSKPIPKPRVSIRKSVDLLHASHTGQEPSERHTEEALRKF

SEQ ID NO: 20504 - protein, 111 aa, Homo sapiens
MLAMDTCKHVGQLQLAQDHSSLNPQKWHCVDCNTTESIWACLSCSHVACGRYIEEHALKHFQESSHPVALEVNEMYVFCYLCDDYVLNDNTTGDLKLLRRTLSAIKSQNYH

SEQ ID NO: 20505 - protein, 161 aa, Homo sapiens
MKSHRCYDLIPTSSKLVVFDTSLQVKKAFFALVTNGVRAAPLWDSKKQSFVGMLTITDFINILHRYYKSALVQIYELEEHKIETWREVYLQDSFKPLVCISPNASLFDAVSSLIRNKIHRLPVIDPESGNTLYILTHKRILKFLKLFITEFPKPEFMSKSL

SEQ ID NO: 20506 - protein, 259 aa, Homo sapiens
AEAKPKFLSKAEREAEALKRRQQEVEERQRMLEEERKKRKQFQDLGRKMLEDPQERERRERRERMERETNGNEDEEGRQKIREEKDKSKELHAIKERYLGGIKKRRRTRHLNDRKFVFEWDASEDTSIDYNPLYKERHHPHQEAPGRDHLCLTQHSSCGLRASPKLPDACFSEPSHPSFQVLTLGIWGLRKTIQLPSPDPQVRRPACGAAKGEDDAVGGRESKLPQLLGPVLPFFALGLHWAISSCQAMGAASWHCSPD

SEQ ID NO: 20507 - protein, 282 aa, Homo sapiens
MAKQQEQDPTNLYISNLPLSMDEQELEGMLKPFGQVISTRILRDTSGTSRGVGFARMESTEKCEAIITHFNGKYIKTPPGVPAPSDPLLCKFADGGPKKRQNQGKFVQNGRAWPRNADMGVMALTYDPTTALQNGFYPAPYNITPNRMLAQSALSPYLSSPVSSYQRVTQTSPLQVPNPSWMHHHSYLMQPSGSVLTPGMDHPISLQPASMMGPLTQQLGHLSLSSTGTYMPTAAAMQGAYISQYTPVPSSSVSVEESSGQQNQVAVDAPSEHGVYSFQFNK

SEQ ID NO: 20508 - protein, 474 aa, Homo sapiens
RLLKNQSQYEKQLKKLQQDVMEMKKTKVRLMKQMKEEQEKARLTESRRNREIAQLKKDQRKRDHQLRLLEAQKRNQEVVLRRKTEEVTALRRQVRPMSDKVAGKVTRKLSSSDAPAQDTGSSAAAVETDASRTGAQQKMRIPVARVQALPTPATNGNRKKYQRKGLTGRVFISKTARMKWQLLERRVTDIIMQKMTISNMEADMNRLLKQREELTKRREKLSKRREKIVKENGEGDKNVANINEEMESLTANIDYINDSISDCQANIMQMEEAKEEGETLDVTAVINACTLTEARYLLDHFLSMGINKGLQAAQKEAQIKVLEGRLKQTEITSATQNQLLFHMLKEKAELNPELDALLGHALQENVEDSTDEDAPLNSPGSEGSTLSSDLMKLCGEVKPKNKARRRTTTQMELLYADSSELASDTSTGDASLPGPLTPVAEGQEIGMNTETSGTSAREKELSPPPGLPSKIGSM

SEQ ID NO: 20509 - protein, 189 aa, Homo sapiens
MTPEFDEEVVFEVRPVGRTCRSEDGGKSARENSPLYQYLQDLGHTDFEICSSLSPKTEKCTTEGQQKPPTRVLPKQGILLKVAETIKSWIFFSQCNKKDDLLHKLDIGFRLDSLHTILQQEVLLQEDVELIELLDPSILSAGQSQQQENGHLPTLCSLATPNIWDLSMLFAFISLLVMLPTWWIVSSWL

SEQ ID NO: 20510 - protein, 1141 aa, Homo sapiens
MPEPTKKEENEVPAPAPPPEEPSKEKEAGTTPAKDWTLVETPPGEEQAKQNANSQLSILFIEKPQGGTVKVGEDITFIAKVKAEDLLRKPTIKWFKGKWMDLASKAGKHLQLKETFERHSRVYTFEMQIIKAKDNFAGNYRCEVTYKDKFDSCSFDLEVHESTGTTPNIDIRSAFKRSGEGQEDAGELDFSGLLKRREVKQQEEEPQVDVWELLKNAKPSEYEKIAFQYGITDLRGMLKRLKRMRREEKKSAAFAKILDPAYQVDKGGRVRFVVELADPKLEVKWYKNGQEIRPSTKYIFEHKGCQRILFINNCQMTDDSEYYVTAGDEKCSTELFVREPPIMVTKQLEDTTAYCGERVELECEVSEDDANVKWFKNGEEIIPGPKSRYRIRVEGKKHILIIEGATKADAAEYSVMTTGGQSSAKLSVDLKPLKILTPLTDQTVNLGKEICLKCEISENIPGKWTKNGLPVQESDRLKVVHKGRIHKLVIANALTEDEGDYVFAPDAYNVTLPAKVHVIDPPKIILDGLDADNTVTVIAGNKLRLEIPISGEPPPKAMWSRGDKAIMEGSGRIRTESYPDSSTLVIDIAERDDSGVYHINLKNEAGEAHASIKVKVVDFPDPPVAPTVTEVGDDWCIMNWEPPAYDGGSPILGYFIERKKKQSSRWMRLNFDLCKETTFEPKKMIEGVAYEVRIFAVNAIGISKPSMPSRPFVPLAVTSPPTLLTVDSVTDTTVTMRWRPPDHIGAAGLDGYVLEYCFEGSTSAKQSDENGEAAYDLPAEDWIVANKDLIDKTKFTITGLPTDAKIFVRVKAVNAAGASEPKYYSQPILVKEIIEPPKIRIPRHLKQTYIRRVGEAVNLVIPFQGKPRPELTWKKDGAEIDKNQINIRNSETDTIIFIRKAERSHSGKYDLQVKVDKFVETASIDIQIIDRPGPPQIVKIEDVWGENVALTWTPPKDDGNAAITGYTIQKADKKSMEWFTVIEHYHRTSATITELVIGNEYYFRVFSENMCGLSEDATMTKESAVIARDGKIYKNPVYEDFDFSEAPMFTQPLVNTYAIAGYNATLNCSVRGNPKPKITWMKNKVAIVDDPRYRMFSNQGVCTLEIRKPSPYDGGTYCCKAVNDLGTVEIECKLEVKVIAQ

SEQ ID NO: 20511 - protein, 115 aa, Homo sapiens
MGNLEIVLTGHNADLSFLQWIREVTGYVLVAMNEFSTLPLPNLRVVRGTQVYDGKFAIFVMLNYNTNSSHALRQLRLTQLTEILSGGVYIEKNDKLCHMDTIDWRDIVRDRDAEI

SEQ ID NO: 20512 - protein, 675 aa, Homo sapiens
MAVLFPLSSCGWAAISLFLSAQSCYSASKQCQSQSPSCRLPGARISGDWSRRTKWRSHRLPRPGPVVRSEAGRDKGGVRGGGVAAAWGWCCRFPSCCSCASPEDTFSVVWFGVGPGMEGHAKGRQSHRCLWRLGEGGGDLRSVPYGDDFCMSFGNCPRDLCGAGIFGKGKGFLVFRLTPQVLVMNRIRIHVLPTNRGRITPVPRSQEPLSCAFTHRPCSHPRLEGQEFCIKHILEDKNAPFKQCSYISTKNGKRCPNAAPKPEKKDGVSFCAEHVRRNALALHAQMKKTNPGPVGETLLCQLSSYAKTELGSQTPESSRSEASRILDEDSWSDGEQEPITVDQTWRGDPDSEADSIDSDQEDPLKHAGVYTAEEVALIMREKLIRLQSLYIDQFKRLQHLLKEKKRRYLHNRKVEHEALGSSLLTGPEGLLAKERENLKRLKCLRRYRQRYGVEALLHRQLKERRMLATDGAAQQAHTTRSSQRCLAFVDDVRCSNQSLPMTRHCLTHICQDTNQVLFKCCQGSEEVPCNKPVPVSLSEDPCCPLHFQLPPQMYKPEQVLSVPDDLEAGPMDLYLSAAELQPTESLPLEFSDDLDVVGDGMQCPPSPLLFDPSLTLEDHLVKEIAEDPVDILGQMQMAGDGCRSQGSRNSEKASAPLSQSGLATANGKPEPTSIS

SEQ ID NO: 20513 - protein, 504 aa, Homo sapiens
GMGAGPACPLPPLAGGEAFPFPSPEQGLALSGAGFPGMLGALPLPLSLGQPPPSPLLNHSLFGVLTGGGGQPPPEPLLPPPGGPGPPLAPGEPEGPSLLVASLLPPPPSDLLPPPSAPPSNLLASFLPLLALGPTAGDGEGSAEGAGGPSGEPFSGLGDLSPLLFPPLSAPPTLIALNSALLAATLDPPSGTPPQPCVLSAPQPGPPTSSVTTATTDPGASSLGKAPSNSGRPPQLLSPLLGASLLGDLSSLTSSPGALPSLLQPPGPLLSGQLGLQLLPGGGAPPPLSEASSPLACLLQSLQIPPEQPEAPCLPPESPASALEPEPARPPLSALAPPHGSPDPPVPELLTGRGSGKRGRRGGGGLRGINGEARPARGRKPGSRREPGRLALKWGTRGGFNGQMERSPRRTHHWQHNGELAEGGAEPKDPPPPGPHSEDLKVPPGVVRKSRRGRRRKYNPTRNSNSSRQDITLEPSPTARAAVPLPPRARPGRPAKNKRRKLAP

SEQ ID NO: 20514 - protein, 503 aa, Homo sapiens
MMHFKSGLELTELQNMTVPEDDNISNDSNDFTEVENGQINSKFISDRESRRSLTNSHLEKKKCDEYIPGTTSLGMSVFNLSNAIMGSGILGLAFALANTGILLFLVLLTSVTLLSIYSINLLLICSKETGCMVYEKLGEQVFGTTGKFVIFGATSLQNTGAMLSYLFIVKNELPSAIKFLMGKEETFSAWYVDGRVLVVIVTFGIILPLCLLKNLGYLGYTSGFSLSCMVFFLIVVIYKKFQIPCIVPELNSTISANSTNADTCTPKYVTFNSKTVYALPTIAFAFVCHPSVLPIYSELKDRSQKKMQMVSNISFFAMFVMYFLTAIFGYLTFYDNVQSDLLHKYQSKDDILILTVRLAVIVAVILTVPVLFFTVRSSLFELAKKTKFNLCRHTVVTCILLVVINLLVIFIPSMKDIFGVVGVTSANMLIFILPSSLYLKITDQDGDKGTQRIWLFLFLQFPVQPCWLSECIILLPAALSLNMLKRKELIILCSLDSGFSNLY

SEQ ID NO: 20515 - protein, 1035 aa, Homo sapiens
MIAHKQKKTKKKRAWASGQLSTDITTSEMGLKSLSSNSIFDPDYIKELVNDIRKFSHMLLYLKEAIFSDCFKEVIHIRLEELLRVLKSIMNKHQNLNSVDLQNAAEMLTAKVKAVNFTEVNEENKNDLFQEVFSSIETLAFTFGNILTNFLMGDVGNDSLLRLPVSRETKSFENVSVESVDSSSEKGNFSPLELDNVLLKNTDSIELALSYAKTWSKYTKNIVSWVEKKLNLELESTRNMVKLAEATRTNIGIQEFMPLQSLFTNALLNDIESSHLLQQTIAALQANKFVQPLLGRKNEMEKQRKEIKELWKQEQNKMLEAENALKKAKLLCMQRQDEYEKAKSSMFRAEEEHLSSSGGLAKNLNKQLEKKRRLEEEALQKVEEANELYKVCVTNVEERRNDLENTKREILAQLRTLVFQCDLTLKAVTVNLFHMQHLQAASLADSLQSLCDSAKLYDPGQEYSEFVKATNSTEEEKVDGNVNKHLNSSQPSGFGPANSLEDVVRLPDSSNKIEEDRCSNSADITGPSFIRSWTFGMFSDSESTGGSSESRSLDSESISPGDFHRKLPRTPSSGTMSSADDLDEREPPSPSETGPNSLGTFKKTLMSKAALTHKFRKLRSPTKCRDCEGIVVFQGVECEECLLVCHRKCLENLVIICGHQKLPGKIHLFGAEFTQVAKKEPDGIPFILKICASEIENRALCLQGIYRVCGNKIKTEKLCQALENGMHLVDISEFSSHDICDVLKLYLRQLPEPFILFRLYKEFIDLAKEIQHVNEEQETKKNSLEDKKWPNMCIEINRILLKSKDLLRQLPASNFNSLHFLIVHLKRVVDHAEENKMNSKNLGVIFGPSLIRPRPTTAPITISSLAEYSNQARLVEFLITYSQKIFDGSLQPQDVMCSIGVVDQGCFPKPLLSPEERDIERSMKSLFFSSKEDIHTSESESKIFERATSFEESERKQNALGKCDACLSDKAQLLLDQEAESASQKIEDGKTPKPLSLKSDRSTNNVERHTPRTKIRPETLIQNYRVLHLQYVFCC

SEQ ID NO: 20516 - protein, 4284 aa, Homo sapiens
MGLLLVFPLIQSQSRTDPSLCNITAEVLLNCLRDCQPLSLTKEPADCLNGIETLLCSWLEETSDTGRHIPHKQKENAAAALVALACARGSLKTFVHTVHLLQKQTDLGSLPVADVLYRLLLLEGGPGSPSCLLGGKHIVSWGYEDMLPAPDSNTGSSSENKDADLGRCLTADGLYLYTTNSVGRGVSKLGSGLHGTLRGFVYCRNEELEPGWVAFGSGSLLHRPVSFDNKPHSLFQVIDQNTLQVCQVVPMPANHLPIGSTMSTVHLSSDGTYFYWIWSPASLNEKTPKGHSVFMDIFELVVENGVFVANPLQERTILMRKEGESAKSINEMLLSRLSRYRASPSATLAALTGSTISNTLKEDQAANTSCGLPLKMLRKTPIYTCGTYLVMLVPPPGGSGSSATRSLFGGTSGLSSLKILASSLVYNISDGQFTSRADLIDAAGSSLGRGALVPGLGACYDTVNNMLWTCSNDYIDQWCNPGNQAFHYVCQRLGVSHIITEPKEEAITTNEVINQLLHHVGAMCIHQLNLLATNPNLPITSVLGKQHPIEAHHLSSICDIMEKAMVNGDTCIIRCILVVFQVVFKFFFSPQTERNRDIIRRSGLLLWQLLMAPKDQICPEIQKEVCLAISSGLNILYPGETEINNLLKLVLTEGERNSGLSQLRDVILTNLAEQLQNNRFGSDEDDHYRLNDELLHYILKIVVRESCILITKCQTVSKDDFQKLLSTVPAASSCLRYLMAVQNHLLSNTILIKPDENDDSDSSLQGETLKVQELKVSILALATQILTGCDEVLEMLQQVTTALINSDIADREQRLKGLEQVTKATMLGHLLPVLLTSLMHPNLQTLIMADALMPQLVQLVLYTSQTALLLKTQCPVFAEVGCSPCGAPDQKCRLFPDERMLEEKEEPGFLTGLKIPAPWAAGKTVETVHPVRDNYKFKETVHIPGARCLYLRFDSRCSSQYDYDKLVIYAGPNTNSRKVAEYGGNTLGYGSRSVLGTGWPKDLVKCISPPSLNFKVEGDTVTFSFEMRSGREHNTPDKAMWGFACTVRAQESSEDVSGGLPFLVDLALGLSVLACSMLRILYNGPEITKEEEACQELLRSKLLQRCQWQVEANGVISPALTPSPSPLPLTIEEDREFTYPSDVLVPPVGNYFDLPRIRLPPGIMIKLREISGRARPQFRPSIKEVIQPDVMEEMVVSCVIKHLNLVDALQSLINFQYQEEHAEEYDLLCKIMGETFKKLNAMERQLQSVAELEQKWQSEVDDAMQGKLENNMPFFYDYHFNENKMKELELLCSMKEVSFDGNDLENMVLSLREKFLQEVNSLIQKPSHPLAKTKTLVKSLMNRAELLLHVTIAAQSGLTRSISGTPAETPACKSASETKVISHAVRQPVFLRSMSAPSDLEMIGNEDLEFTRANQRRRHVTSHRSSSFTLLQSLAIEDSRDKPTYSVLLGQLFAFIGTNPDQAVSSSSFLLAAQTRWRRGNTRKQALVHMRELLTAAVRVGGVTHLVGPVTMVLQGGPRIEELTCGGMVEQVQEAFGETMTSVVSLCARYPIACANSIGLLCTIPYTRSEEKCLVRSGLVQLMDRLCSLSNQTESSSSEKQTKKQKVATMAWAAFQVLANRCVEWEKEEGGSTEAVHSGLARQVSSLLTNHLARATECCGNQAAGNDALQDVLSLLNDLSRSHIGKAILSQPACVSKLLSLLLDQRPSPKLVLIILQLCRAALPLMSVEDCGNVELPPWSYSVPSLNSEQEDPSDPASKIASLLLAKLADYVVPGCQTVLSPTASEPDTTLTKTSPKNSLKGDKDPGEESEAVDGKLSIFIHKREDQSSHEVLQPLLSSSEGRPFRLGTGANMEKVVKMDRDMTKGGCCEVITEEAAAALRKATKWAQSGLIVSIGPPVESINPETVSGLSTGDKKKTAQTSICRERNSELARTDPVRPFISGHVANSMAAEVIALLHSLLMAPESNAAQIWTTTAEKVLSRALMYIPQLGKYAESILENGSSSGRKLAKLQRIARQAVAALCALGGFKETIKIGSEVQVLGRGISGSIGVVASINEQEGIATVRFPPIDCRKTSQASDTLTIPLSRLCVPRSEALPLHKLSITEKVVQAVQSMLLPQEGSLSIHTSLPATGDGSAPVMAVVRLLAEIRTRACLVMAQLLEDSLFCEEFIQQCPAAVEVLNLVAQECSAGERLAVVEVQCERLRMLYRDCARPPPPPLQADRRQPKEITWSPSRVFPPVRACMFSSHLTSVTFLADPSAGGGLPRGTFIYATSPLPVQAPSFYWEIEIVSYGDTDDDTGPIVSFGFTTEAEKRDGAWTNPVGTCLFHNNGRAVHYNGSSLLQWKSVRLDVTLSPGDVAGIGWERTEGTPPPPGQPAKGRVYFTYCGQRLSPYLEDVSGGMWPVVHIQKKNTKTRANFGSRPFAYAEGQAHRNAADLCTDLAEEISANFEALPFAMASDSDNDAGTSIASDPGTHGPPCRIAAVATAQQQYDSDTSCHYKVELSYENFITSGPDPHPPPIADDESDDDDDDDIPQEDHYALLVKAWETKVFPTIRRRFRNEAERKSGLDQIKGALQLGMVDIARQTVEFLYEENGGIPRDLYLPTIEDIKDEANKFTIDKVRKGLTVVTRSPDSNNVASSAVGTALPKFAIRGMLKTFGLHGVVLDVDSVNELVQVETYLRSEGVLVRYWYPIDMLERPPAGYRRTATNGLVTLDNTNLQIHRELLRCEAALARLYCRMALLNIFAPKLPHLFTRLFHIPAIRDITLEHLQLLSNQLLAPPLPDGTISSSSILLAQSLQHCIHSQNCSATDLFYQGNSQTVREWLNVAITRTLHQGEESLLELTKQICSFLQTAPEQFPSEEFPISESKVNMDVNFPGAAFVVVSCKESQSGFRKDSSLYKAPWARVLVYGLGHKVKRNGQLNLIEAACYPRDASPANTGLAPPPTADQYPSVVLSTDRVHIKLGVSPPPGAVLVLHSLPLEFPLAMAFAEQLLSWKSEDSEGKSEDEPDTIPTSVLLQVVELLGNFLWTTDMAACVKELVFHLLAELLRTVHTLEQRRHPAGLSSSIALQLNPCLAMLMALQSELHKLYDEETQNWVSGGACGGSGGAAAGDQGRFSTYFHALMEGCLAVAEVTLPTNMSVTASGVTSATAPNLSDSSSSSSSSPGQTPQSPSLLSKRKKVKMKREKASSSGKRQSSRTVDSDPTVLSIGGSKPEDMLWFHRALTLLIILRHLTRKDPQGLGVTSDAIADACQALVGPTAHSRLLVISGIPTHLDEGVVRGAIRKACNAHGGVFKDEIYIPLQEEDTKKPKDKAEGGDGKVEPEKTLAFPGTDSMEVSTSSSLTPAMSISASASTSQASICSSQGISQTVSDLSVDPLPAGLELPIPPGLLEPHAVSSQESLDISLCSTGSLGSLGSLGEPLDNAETASVSDMGSMYTVTSLDNQPLAARPIKGFAVVEIRSRAKIEKIRASLFNNNDLIGLSSLDGEDELMEMSTEEILTVSVVNQSLFDTQGSPGLEDYFNDKSIKGEKLVPGAREVLTEIFKSCAHSEQTLSLTPAKPIRVSDIYLSKEQINSQTPGNLLHLFFTNVRPPKKVLEDQLTQILRKYGVPKPKFDKSKYSKAGKEQHPVKVVSTKRPITKPPAKDKAVLNSVSRTALSEKKPTVKPKSPEKSKPDEKDPEKSPTKKQEVPEEKYLTLEGFHKFVIDRARQDIRSVWRAILSCGYDLHFERCACIDVRHAQKASRKWTLEMDVALVQYINQLCRHLAITPARLHPHEVYLDPADAADPRVACLLNVPIESLRLRFALLQSLNTTLETFFLPLVELRQTPMYTHSIAALLKEAKGLIFYDTKVTVMNRVLNATVQRTADHAAPEITLDPLEIVGGEIRASENSYFCQAARQLASVPSSQLCVKLASGGDPTYAFNIRFTGEEVHGTSGSFRHFLWQVCKELQSSSLSLLLLCPSSAVNKNKGKYILTPSPITYGEEQLLHFLGQLLGIAIRADVPLPLDLLPSFWKTLVGEPLDPEQDLQEADILTYNYVKKFESINDETELEALCAEIASQHLATESPDSPNKPCCRFTYLTMTGEEVELCSRGRHILVAWENKDIYAAAIRSLRLRELQNVECVTAVRAGLGSIIPLQLLTMLSPLEMELRTCGLPYINLEFLKAHTMYQVGLMETDQHIEFFWGALEMFTQEELCKFIKFACNQERIPFTCPCKDGGPDTAHVPPYPMKIAPPDGTAGSPDSRYIRVETCMFMIKLPQYSSLEIMLEKLRCAIHYREDPLSG

SEQ ID NO: 20517 - protein, 1148 aa, Homo sapiens
MTTPTRRSTRNTRAETASQSQRSPISDNSGCDAPGNSNPSLSVPSSAESEKQTRQAPKRKSVRRGRKPPLLKKKLRSSVAAPEKSSSNDSVDEETAESDTSPVLEKEHQPDVDSSNICTVQTHVENQSANCLKSCNEQIEESEKHTANYDTEERVGSSSSESCAQDLPVLVGEEGEVKKLENTGIEANVLCLESEISENILEKGGDPLEKQDQISGLSQSEVKTDVCTVHLPNDFPTCLTSESKVYQPVSCPLSDLSENVESVVNEEKITESSLVEITEHKDFTLKTEELIESPKLESSEGEIIQTVDRQSVKSPEVQLLGHVETEDVEIIATCDTFGNEDFNNIQDSENNLLKNNLLNTKLEKSLEEKNESLTEHPRSTELPKTHIEQIQKHFSEDNNEMIPMECDSFCSDQNESEVEPSVNADLKQMNENSVTHCSENNMPSSDLADEKVETVSQPSESPKDTIDKTKKPRTRRSRFHSPSTTWSPNKDTPQEKKRPQSPSPRRETGKESRKSQSPSPKNESARGRKKSRSQSPKKDIARERRQSQSRSPKRDTTRESRRSESLSPRRETSRENKRSQPRVKDSSPGEKSRSQSRERESDRDGQRRERERRTRKWSRSRSHSRSPSRCRTKSKSSSFGRIDRDSYSPRWKGRWANDGWRCPRGNDRYRKNDPEKQNENTRKEKNDIHLDADDPNSADKHRNDCPNWITEKINSGPDPRTRNPEKLKESHWEENRNENSGNSWNKNFGSGWVSNRGRGRGNRGRGTYRSSFAYKDQNENRWQNRKPLSGNSNSSGSESFKFVEQQSYKRKSEQEFSFDTPADRSGWTSASSWAVRKTLPADVQNYYSRRGRNSSGPQSGWMKQEEETSGQDSSLKDQTNQQVDGSQLPINMMQPQMNVMQQQMNAQHQPMNIFPYPVGVHAPLMNIQRNPFNIHPQLPLHLHTGVPLMQVATPTSVSQGLPPPPPPPPPSQQVNYIASQPDGKQLQGIPSSSHVSNNMSTPVLPAPTAAPGNTGMVQGPSSGNTSSSSHSKASNAAVKLAESKVSVAVEASADSSKTDKKLQIQEKAAQEVKLAIKPFYQNKDITKEEYKEIVRKAVDKVCHSKSGEVNSTKVANLVKAYVDKYKYSRKGSQKKTLEEPVSTEKNIG

SEQ ID NO: 20518 - protein, 296 aa, Homo sapiens
MSEPPVYCNLVDLRRCPRSPPPGPACPLLQRLDAWEQHLDPNSGRCFYINSLTGCKSWKPPRRSRSETNPGSMEGTQTLKRNNDVLQPQAKGFRSDTGTPEPLDPQGSLSLSQRTSQLDPPALQAPRPLPQLLDDPHEVEKSGLLNMTKIAQGGRKLRKNWGPSWVVLTGNSLVFYREPPPTAPSSGWGPAGSRPESSVDLRGAALAHGRHLSSRRNVLHIRTIPGHEFLLQSDHETELRAWHRALRTVIERLDRENPLELRLSGSGPAELSAGEDEEEESELVSKPLLRLSSRRS

SEQ ID NO: 20519 - protein, 1595 aa, Homo sapiens
FQHLYQEWEREFQLWEEQLHSYPHKDQLQEYEKQWKTWQGHMKATQSYLQEKVNSFQNMKNQYMGNMSMPPPFVPYSQMPPPLPTMPPPVLPPSLPPPVMPPALPATVPPPGMPPPVMPPSLPTSVPPPGMPPSLSSAGPPPVLPPPSLSSAGPPPVLPPPSLSSTAPPPVMPLPPLSSATPPPGIPPPGVPQGIPPQLTAAPVPPASSSQSSQVPEKPRPALLPTPVSFGSAPPTTYHPPLQSAGPSEQVNSKAPLSKSALPYSSFSSDQGLGESSAAPSQPITAVKDMPVRSGGLLPDPPRSSYLESPRGPRFDGPRRFEDLGSRCEGPRPKGPRFEGNRPDGPRPRYEGHPAEGTKSKWGMIPRGPASQFYITPSTSLSPRQSGPQWKGPKPAFGQQHQQQPKSQAEPLSGNKEPLADTSSNQQKNFKMQSAAFSIAADVKDVKAAQSNENLSDSQQEPPKSEVSEGPVEPSNWDQNVQSMETQIDKAQAVTQPVPLANKPVPAQSTFPSKTGGMEGGTAVATSSLTADNDFKPVGIGLPHSENNQDKGLPRPDNRDNRLEGNRGNSSSYRGPGQSRMEDTRDKGLVNRGRGQAISRGPGLVKQEDFRDKMMGRREDSREKMNRGEGSRDRGLVRPGSSREKVPGGLQGSQDRGAAGSRERGPPRRAGSQERGPLRRAGSRERIPPRRAGSRERGPPRGPGSRERGLGRSDFGRDRGPFRPEPGDGGEKMYPYHRDEPPRAPWNHGEERGHEEFPLDGRNAPMERERLDDWDRERYWRECERDYQDDTLELYNREDRFSAPPSRSHDGDRRGPWWDDWERDQDMDEDYNREMERDMDRDVDRISRPMDMYDRSLDNEWDRDYGRPLDEQESQFRERDIPSLPPLPPLPPLPPLDRYRDDRWREERNREHGYDRDFRDRGELRIREYPERGDTWREKRDYVPDRMDWERERLSDRWYPSDVDRHSPMAEHMPSSHHSSEMMGSDASLDSDQGLGGVMVLSQRQHEIILKAAQELKMLREQKEQLQKMKDFGSEPQMADHLPPQESRLQNTSSRPGMYPPPGSYRPPPPMGKPPGSIVRPSAPPARSSVPVTRPPVPIPPPPPPPPLPPPPPVIKPQTSAVEQERWDEDSFYGLWDTNDEQGLNSEFKSETAAIPSAPVLPPPPVHSSIPPPGPVPMGMPPMSKPPPVQQTVDYGHGRDISTNKVEQIPYGERITLRPDPLPERSTFETEHAGQRDRYDRERDREPYFDRQSNVIADHRDFKRDRETHRDRDRDRGVIDYDRDRFDRERRPRDDRAQSYRDKKDHSSSRRGGFDRPSYDRKSDRPVYEGPSMFGGERRTYPEERMPLPAPSLSHQPPPAPRVEKKPESKNVDDILKPPGRESRPERIVVIMRGLPGSGKTHVAKLIRDKEVEFGGPAPRVLSLDDYFITEVEKEEKDPDSGKKVKKKVMEYEYEAEMEETYRTSMFKTFKKTLDDGFFPFIILDAINDRVRHFDQFWSAAKTKGFEVYLAEMSADNQTCGKRNIHGRKLKEINKMADHWETAPRHMMRLDIRSLLQDAAIEEVEMEDFDANIEEQKEEKKDAEEEESELTSWMA

SEQ ID NO: 20520 - protein, 143 aa, Homo sapiens
MRYVNLTSLLIFRSVSTAVYKRFPTMDHVVEAGFMTTDERKLFNHLKSPHLKYWVPFIWFGNLATKARNEGRIRDSVDLQSLMTEMNRYRSWCSLLFGYDWVGIPLVYTQVAEQLINPFGEDDDDFETNWCIDRNLQLWTKCT

SEQ ID NO: 20521 - protein, 446 aa, Homo sapiens
MNTLSLPLNIRRGGSDTNLNFDVPDGILDFHKVKLTADSLKQKILKVTEQIKIEQTSRDGNVAEYLKLVNNADKQQAGRIKQVFEKKNQKSAHSIAQLQKKLEQYHRKLREIEQNGASRSSKDISKDHLKDIHRSLKDAHVKSRTAPHCMESSKSGMPGVSLTPPVFVFNKSREFANLIRNKFGSADNIAHLKNSLEEFRPEASARAYGGSATIVNKPKYGSDDECSSGTSGSADSNGNQSFGAGGASTLDSQGKLAVILEELREIKDTQAQLAEDIEALKVQFKREYGFISQTLQEERYRYERLEDQLHDLTDLHQHETANLKQELASIEEKVAYQAYERSRDIQEALESCQTRISKLELHQQEQQALQTDTVNAKVLLGRCINVILAFMTVILVCVSTIAKFVSPMMKSRCHILGTFFAVTLLAIFCKNWDHILCAIERMIIPR

SEQ ID NO: 20522 - protein, 137 aa, Homo sapiens
MKALIVLGLVLLSVTVQGKVFERCELARTLKRLGMDGYRGISLANWMCLAKWESGYNTRATNYNAGDRSTDYGIFQINSRYWCNDGKTPGAVNACHLSCSGWHGEIVVKTEMSVSMFKVVECNSRIFLLQLILSLSH

SEQ ID NO: 20523 - protein, 141 aa, Homo sapiens
MNCRSEVLEVSVEGRQVEEAMLAVLHTVLLHRSTGKFHYKKEGTYSIGTVGTQDVDCDFIDFTYVRVSSEELDRALRKVVGEFKDALRNSGGDGLGQMSLEFYQKKKSRWPFSDECIPWEVWTVKVHVVALATEQERQICR

SEQ ID NO: 20524 - protein, 104 aa, Homo sapiens
MKALIVLGLVLLSVTVQGKVFERCELARTLKRLGMDGYRGISLANWMCLAKWESGYNTRATNYNAGDRSTDYGIFQINSRYWCNDGKTPGAVNACHLSCSGKTS

SEQ ID NO: 20525 - protein, 347 aa, Homo sapiens
MKPALLEVMRMNRICRMVLATCLGSFILVIFYFQIMRRNPFGVDICCRKGSRSPLQELYNPIQLELSNTAVLHQMRRDQVTDTCRANSATSRKRRVLTPNDLKHLVVDEDHELIYCYVPKVACTNWKRLMMVLTGRGKYSDPMEIPANEAHVSANLKTLNQYSIPEINHRLKSYMKFLFVREPFERLVSAYRNKFTQKYNISFHKRYGTKIIKRQRKNATQEALRKGDDVKFEEFVAYLIDPHTQREEPFNEHWQTVYSLCHPCHIHYDLVGKYETLEEDSNYVLQLAGVGSYLKFPTYAKSTRTTDEMTTEFFQNISSEHQTQLYEVYKLDFLMFNYSVPSYLKLE

SEQ ID NO: 20526 - protein, 612 aa, Homo sapiens
MAAETLLSSLLGLLLLGLLLPASLTGGVGSLNLEELSEMRYGIEILPLPVMGGQSQSSDVVIVSSKYKQRYECRLPAGAIHFQREREEETPAYQGPGIPELLSPMRDAPCLLKTKDWWTYEFCYGRHIQQYHMEDSEIKGEVLYLGYYQSAFDWDDETAKASKQHRLKRYHSQTYGNGSKCDLNGRPREAEVRFLCDEGAGISGDYIDRVDEPLSCSYVLTIRTPRLCPHPLLRPPPSAAPQAILCHPSLQPEEYMAYVQRQADSKQYGDKIIEELQDLGPQVWSETKSGVAPQKMAGASPTKDDSKDSDFWKMLNEPEDQAPGGEEVPAEEQDPSPEAADSASGAPNDFQNNVQVKVIRSPADLIRFIEELKGGTKKGKPNIGQEQPVDDAAEVPQREPEKERGDPERQREMEEEEDEDEDEDEDEDERQLLGEFEKELEGILLPSDRDRLRSEVKAGMERELENIIQETEKELDPDGLKKESERDRAMLALTSTLNKLIKRLEEKQSPELVKKHKKKRVVPKKPPPSPQPTGKIEIKIVRPWAEGTEEGARWLTDEDTRNLKEIFFNILVPGAEEAQKERQRQKELESNYRRVWGSPGGEGTGDLDEFDF

SEQ ID NO: 20527 - protein, 394 aa, Homo sapiens
MGPRCPVQTVGQWLESIGLPQYENHLMANGFDNVQFMGSNVMEDQDLLEIGILNSGHRQRILQAIQLLPKMRPIGHDGYHPTSVAEWLDSIELGDYTKAFLINGYTSMDLLKKIWEVELINVLKINLIGHRKRILASLGDRLHDDPPQKPPRSITLRTGDWGEPSITLRPPNEATASTPVQYWQHHPEKLIFQSCDYKAFYLGSMLIKELRGTESTQDACAKMRANCQKSTEQMKKVPTIILSVSYKGVKFIDATNKNIIAEHEIRNISCAAQDPEDLSTFAYITKDLKSNHHYCHVFTAFDVNLAYEIILTLGQAFEVAYQLALQARKGGHSSTLPESFENKPSKPIPKPRVSIRKSVIDPSEQKTLANLPWIVEPGQEAKRGINTKYETTIF

SEQ ID NO: 20528 - protein, 575 aa, Homo sapiens
MDLVLKRCLLHLAVIGALLAVGATKGSQVWGGQPVYPQETDDACIFPDGGPCPSGSWSQKRSFVYVWKTWGQYWQVLGGPVSGLSIGTGRAMLGTHTMEVTVYHRRGSRSYVPLAHSSSAFTITDQVPFSVSVSQLRALDGGNKHFLRNQPLTFALQLHDPSGYLAEADLSYTWDFGDSSGTLISRALVVTHTYLEPGPVTAQVVLQAAIPLTSCGSSPVPGTTDGHRPTAEAPNTTAGQVPTTEVVGTTPGQAPTAEPSGTTSVQVPTTEVISTAPVQMPTAESTGMTPEKVPVSEVMGTTLAEMSTPEATGMTPAEVSIVVLSGTTAAQVTTTEWVETTARELPIPEPEGPDASSIMSTESITGSLGPLLDGTATLRLVKRQVPLDCVLYRYGSFSVTLDIVQGIESAEILQAVPSGEGDAFELTVSCQGGLPKEACMEISSPGCQPPAQRLCQPVLPSPACQLVLHQILKGGSGTYCLNVSLADTNSLAVVSTQLIMPGQEAGLGQVPLIVGILLVLMAVVLASLIYRRRLMKQDFSVPQLPHSSSHWLRLPRIFCSCPIGENSPLLSGQQV

SEQ ID NO: 20529 - protein, 434 aa, Homo sapiens
MCIAEIDLIPRDRPFVCAPSSKTGSVTTTYCCNQDHCNKIELPTTVKSSPGLGPVELAAVIAGPVCFVCISLMLMVYICHNRTVIHHRVPNEEDPSLDRPFISEGTTLKDLIYDMTTSGSGSGLPLLVQRTIARTIVLQESIGKGRFGEVWRGKWRGEEVAVKIFSSREERSWFREAEIYQTVMLRHENILGFIAADNKDNGTWTQLWLVSDYHEHGSLFDYLNRYTVTVEGMIKLALSTASGLAHLHMEIVGTQGKPAIAHRDLKSKNILVKKNGTCCIADLGLAVRHDSATDTIDIAPNHRVGTKRYMAPEVLDDSINMKHFESFKRADIYAMGLVFWEIARRCSIGGIHEDYQLPYYDLVPSDPSVEEMRKVVCEQKLRPNIPNRWQSCEALRVMAKIMRECWYANGAARLTALRIKKTLSQLSQQEGIKM

SEQ ID NO: 20530 - protein, 299 aa, Homo sapiens
ANMDNNQSQKTFKNKETLIIEPEKNASRIESLEQEKVDEEEEGKKDESSCSSEEDEEDDSESEAETDKTKPLASVTNANTSSTQAAPVAVTTPTVSSGQATPTSPIKKFPTTATKISPKEEERKDESPATWRLGLRKTGSYGALAEITASKEGQKEKDTAGVTRSASSPRLSSSLDNKEKEKDSKGTRLAYVAPTIPRRLASTSDIEEKENRDSSSLRTSSSYTRRKWEDDLKKNSSVNEGSTYHKRSYLTPVRDEESESQRKARSRQARQSRRSTQGVTLTDLQEAEKTIGRSRSTRT

SEQ ID NO: 20531 - protein, 306 aa, Homo sapiens
MHNLYSITGYPDPPGTMEEEEEDDDYENSTPPYKDLPPKPGTMEEEEEDDDYENSTPPYKDLPPKPGTMEEEEEDDDYENSTPPYKDLPPKPGSSAPPRPPRAAKETEKPPLPCKPRNMTGLDLAAVTCPPPQLAVNLEPSPLQPSLAATPVPWLNQRSGGPGCCQKRWMVYLCLLVVTSLFLGCLGLTVTLIKYQELMEELRMLSFQQMTWRTNMTGMAGLAGLKHDIARVRADTNQSLVELWGLLDCRRITCPEGWLPFEGKCYYFSPSTKSWDEARMFCQENYSHLVIINSFAEHLLGARGTQ

SEQ ID NO: 20532 - protein, 219 aa, Homo sapiens
MDPMELRNVNIEPDDESSSGESAPDSYIGIGNSEKAAMSSQFANEDTESQKFLTNGFLGKKKLADYADEHHPGTTSFGMSSFNLSNAIMGSGILGLSYAMANTGIILFIIMLLAVAILSLYSVHLLLKTAKEGGSLIYEKLGEKAFGWPGKIGAFVSITMQNIGAMSSYLFIIKYELPEVIRAFMGLEENTGEWYLNGNYLIIFVSVGIILPLSLLKNL

SEQ ID NO: 20533 - protein, 643 aa, Homo sapiens
MDDIADRMRMDAGEVTLVNHNSVFKTHLLPQTGFPEDQLSLSDQQILSSRQGHLDRSFTCSTRSAAYNPSYYSDNPSSDSFLGSGDLRTFGQSANGQWRNSTPSSSSSLQKSRNSRSLYLETRKTSSGLSNSFAGKSNHHCHVSAYEKSFPIKPVPSPSWSGSCRRSLLSPKKTQRRHVSTAEETVQEEEREIYRQLLQMVTGKQFTIAKPTTHFPLHLSRCLSSSKNTLKDSLFKNGNSCASQIIGSDTSSSGSASILTNQEQLSHSVYSLSSYTPDVAFGSKDSGTLHHPHHHHSVPHQPDNLAASNTQSEGSDSVILLKVKDSQTPTPSSTFFQAELWIKELTSVYDSRARERLRQIEEQKALALQLQNQRLQEREHSVHDSVELHLRVPLEKEIPVTVVQETQKKGHKLTDSEDEFPEITEEMEKEIKNVFRNGNQDEVLSEAFRLTITRKDIQTLNHLNWLNDEIINFYMNMLMERSKEKGLPSVHAFNTFFFTKLKTAGYQAVKRWTKKVDVFSVDILLVPIHLGVHWCLAVVDFRKKNITYYDSMGGINNEACRILLQYLKQESIDKKRKEFDTNGWQLFSKKSQIPQQMNGSDCGMFACKYADCITKDRPINFTQQHMPYFRKRMVWEILHRKLL

SEQ ID NO: 20534 - protein, 190 aa, Homo sapiens
MNCRSEVLEVSVEGRQVEEAMLAVLHTVLLHRSTGKFHYKKEGTYSIGTVGTQDVDCDFIDFTYVRVSSEELDRALRKVVGEFKDALRNSGGDGLGQMSLEFYQKKKSRWPFSDECIPWEVWTVKVHVVALATEQERQICREKVGEKLCEKIINIVEVMNRHEYLPKMPTQSEVDNVFDTGLRDVQPYLY

SEQ ID NO: 20535 - protein, 391 aa, Homo sapiens
VPDSPARTPQPPEMNPLSAVNMFQKQNSKPSVPVSIPKSKEKQGRPPGALVPASSLKGGNLGSMSVRSKLPNSPAASSHPKLKSSKGITKKPQAPSNNASSSLASLNPVGKNTSSPALPRTAPCISESPRKCISSPNTPKAKVIPAQNSADLPESTLLPNKCSGKTQPKYLKHNHISSRDNAVSHLAAHSNSSSKCPKLPKANIPVRPKPSFQSSAKMTKTSSKTIATGLGTQSQPSDGAPQAKPVPAQKLKSALNLNQPVSVSSVSPVKATQKSKDKNIVSATKKQPQNKSAFQKTGPSSLKSPGRTPLSIVSLPQSSTKTQTAPKSAQTVAKSQHSTKGPPRSGKTPASIRKPPSSVKDADSGDKKPTAKKKEDDDHYFVMTGSKKPRK

SEQ ID NO: 20536 - protein, 145 aa, Homo sapiens
MLTITDFINILHRYYKSALVQIYELEEHKIETWREVYLQDSFKPLVCISPNASLFDAVSSLIRNKIHRLPVIDPESGNTLYILTHKRILKFLKLFITEFPKPEFMSKSLEELQIGTYANIAMVRTTTPVYVALGIFVQHRVSALP

SEQ ID NO: 20537 - protein, 623 aa, Homo sapiens
MVIGIPLFFLELSVGQRIRRGSIGVWNYISPKLGGIGFASCVVCYFVALYYNVIIGWSLFYFSQSFQQPLPWDQCPLVKNASHTFVEPECEQSSATTYYWYREALNISSSISESGGLNWKMTICLLAAWVMVCLAMIKGIQSSGKIIYFSSLFPYVVLICFLIRAFLLNGSIDGIRHMFTPKLEIMLEPKVWREAATQVFFALGLGFGGVIAFSSYNKRDNNCHFDAVLVSFINFFTSVLATLVVFAVLGFKANVINEKCITQNSETIMKFLKMGNISQDIIPHHINLSTVTAEDYHLVYDIIQKVKEEEFPALHLNSCKIEEELNKAVQGTGLAFIAFTEAMTHFPASPFWSVMFFLMLVNLGLGSMFGTIEGIVTPIVDTFKVRKEILTVICCLLAFCIGLIFVQRSGNYFVTMFDDYSATLPLLIVVILENIAVCFVYGIDKFMEDLKDMLGFAPSRYYYYMWKYISPLMLLSLLIASVVNMGLSPPGYNAWIEDKASEEFLSYPTWGLVVCVSLVVFAILPVPVVFIVRRFNLIDDSSGNLASVTYKRGRVLKEPVNLEGDDTSLIHGKIPSEMPSPNFGKNIYRKQSGSPTLDTAPNGRYGIGYLMADIMPDMPESDL

SEQ ID NO: 20538 - protein, 416 aa, Homo sapiens
MASLSLAPVNIFKAGADEERAETARLTSFIGAIAIGDLVKSTLGPKGMDKILLSSGRDASLMVTNDGATILKNIGVDNPAAKVLVDMSRVQDDEVGDGTTSVTVLAAELLREAESLIAKKIHPQTIIAGWREATKAAREALLSSAVDHGSDEVKFRQDLMNIAGTTLSSKLLTHHKDHFTKLAVEAVLRLKGSGNLEAIHIIKKLGGSLADSYLDEGFLLDKKIGVNQPKRIENAKILIANTGMDTDKIKIFGSRVRVDSTAKVAEIEHAEKEKMKEKVERILKHGINCFINRQLIYNYPEQLFGAAGVMAIEHADFAGVERLALVTGGEIASTFDHPELVKLGSCKLIEEVMIGEDKLIHFSGVALGEACTIVLRGATQQILDEAERSLHDALCVLAQTVKDSRTVYGGVANHHS

SEQ ID NO: 20539 - protein, 304 aa, Homo sapiens
MSYVVTKTKAINGKYHRFLGRHFPRFYVLYTIFMKGLQMLWADAKKARRIKTNMWKHNIKFHQLPYREMEHLRQFRQDVTKCLFLGIISIPPFANYLVFLLMYLFPRQLLIRHFWTPKQQTDFLDIYHAFRKQSHPEIISYLEKVIPLISDAGLRWRLTDLCTKIQRGTHPAIHDILALRECFSNHPLGMNQLQALHVKALSRAMLLTSYLPPPLLRHRLKTHTTVIHQLDKALAKLGIGQLTAQEVKSACYLRGLNSTHIGEDRCRTWLGEWLQISCSLKEAELSLLLHNVVLLSTNYLGTRR

SEQ ID NO: 20540 - protein, 327 aa, Homo sapiens
METFDPTELPELLKLYYRRLFPYSQYYRWLNYGGGDGVIKNYFQHREFSFTLKDDIYIRYQSFNNQSDLEKEMQKMNPYKIDIGAVYSHRPNQHNTVKLGAFQAQEKELVFDIDMTDYDDVRRCCSSADICPKCWTLMTMAIRIIDRALKEDFGFKHRLWVYSGRRGVHCWVCDESVRKLSSAVRSGIVEYLSLVKGGQDVKKKVHLSEKIHPFIRKSINIIKKYFEEYALVNQDILENKESWDKILALVPETIHDELQQSFQKSHNSLQRWEHLKKVASRYQNNIKNDKYGPWLEWEIMLQYCFPRLDINVSKGINHLLKSPFSVH

SEQ ID NO: 20541 - protein, 146 aa, Homo sapiens
QYGWSGNMERIMKAQAYQTGKDISTNYYASQKKTFEINPRHPLIRDMLRRIKEDEDDKTVLDLAVVLFETATLRSGYLLPDTKAYGDRIERMLRLSLNIDPDAKVEEEPEEEPEETAEDTTEDTEQDEDEEMDVGTDEEEETAKMS

SEQ ID NO: 20542 - protein, 484 aa, Homo sapiens
MKSSRNMNRSEKNYMELRLLLQTKEDYEALIKSLKVLLAELDEKILQMEKKIANQKQIFAKMQEANNPRKLQKQIHILETRLNLVTVHFDKMLTTNAKLRKEIEDLRFEKAAYDNVYQQLQHCLLMEKKTMNLAIEQSSQAYEQRVEAMARMAAMKDRQKKDTSQYNLEIRELERLYAHESKLKSFLLVKLNDRNEFEEQAKREEALKAKKHVKKNRGESFESYEVAHLRLLKLAESGNLNQLIEDFLAKEEKNFARFTYVTELNNDMEMMHKRTQRIQDEIILLRSQQKLSHDDNHSVLRQLEDKLRKTTEEADMYESKYGEVSKTLDLLKNSVEKLFKKINCDATKILVQLGETGKVTDINLPQYFAIIEKKTNDLLLLETYRRILEVEGAEAEIPPPFINPFWGGSALLKPPEPIKVIPPVLGADPFSDRLDDVEQPLDHSSLRQLVLDNYILKENRSKEVRGDSLPEKVDDFRSRKKVTM

SEQ ID NO: 20543 - protein, 180 aa, Homo sapiens
MGKKLYICPPSRWSPPSLGQGYVTCPSPQGDLAVICWSSEFSFIQSPHHTLQYLPENPAPAIRISAWFGPPASTPASTMSIRVTQKSYKVSTSGPRAFSSRSYTSGPGSRISSSSFSRVGSSNFRGGLGGGYGGASGMGGITAVTVNQSLLSPLVLEVDPNIQAVRTQEKEQIKTLNNKF

SEQ ID NO: 20544 - protein, 806 aa, Homo sapiens
MAKSSSLNVRVVEGRALPAKDVSGSSDPYCLVKVDDEVVARTATVWRSLGPFWGEEYTVHLPLDFHQLAFYVLDEDTVGHDDIIGKISLSREAITADPRGIDSWINLSRVDPDAEVQGEICLSVQMLEDGQGRCLRCHVLQARDLAPRDISGTSDPFARVFWGSQSLETSTIKKTRFPHWDEVLELREMPGAPSPLRVELWDWDMVGKNDFLGMVEFSPKTLQQKPPKGWFRLLPFPRAEEDSGGNLGALRVKVRLIEDRVLPSQCYQPLMELLMESVQGPAEEDTASPLALLEELTLGDCRQDLATKLVKLFLGRGLAGRFLDYLTRREVARTMDPNTLFRSNSLASKSMEQFMKLVGMPYLHEVLKPVISRVFEEKKYMELDPCKMDLGRTRRISFKGALSEEQMRETSLGLLTGYLGPIVDAIVGSVGRCPPAMRLAFKQLHRRVEERFPQAEHQQDVKYLAISGFLFLRFFAPAILTPKLFDLRDQHADPQTSRSLLLLAKAVQSIGNLGQQLGQGKELWMAPLHPFLLQCVSRVRDFLDRLVDVDGDEEAGVPARALFPPSAIVREGYLLKRKEEPAGLATRFAFKKRYVWLSGETLSFSKSPEWQMCHSIPVSHIRAVERVDEGAFQLPHVMQVVTQDGTGALHTTYLQCKNVNELNQWLSALRKASAPNPNKLAACHPGAFRSARWTCCLQAERSAAGCSRTHSAVTLGDWSDPLDPDAEAQTVYRQLLLGRDQLRLKLLEDSNMDTTLEADTGACPEVLARQRAATARLLEVLADLDRAHEEFQQQERGKAALGPLGP

SEQ ID NO: 20545 - protein, 83 aa, Homo sapiens
MMDLRNTPAKSLDKFIEDYLLPDTCFRMQINHAIDIICGFLKERCFRGSSYPVCVSKVVKCKKKLGKLPPQYALELLTVYAWE

SEQ ID NO: 20546 - protein, 1232 aa, Homo sapiens
MMCEVMPTINEDTPMSQRGSQSSGSDSDSHFEQLMVNMLDERDRLLDTLRETQESLSLAQQRLQDVIYDRDSLQRQLNSALPQEFAALTKELNACREQLLEKEEEISELKAERNNTRLLLEHLECLVSRHERSLRMTVVKRQAQSPSGVSSEVEVLKALKSLFEHHKALDEKVRERLRVSLERVSALEEELAAANQEIVALREQNVHIQRKMASSEGSTESEHLEGMEPGQKVHEKRLSNGSIDSTDETSQIVELQELLEKQNYEMAQMKERLAALSSRVGEVEQEAETARKDLIKTEEMNTKYQRDIREAMAQKEDMEERITTLEKRYLSAQRESTSIHDMNDKLENELANKEAILRQMEEKNRQLQERLELAEQKLQQTMRKAETLPEVEAELAQRIAALTKAEERHGNIEERMRHLEGQLEEKNQELQRARQREKMNEEHNKRLSDTVDRLLTESNERLQLHLKERMAALEEKNVLIQESETFRKNLEESLHDKERLAEEIEKLRSELDQLKMRTGSLIEPTIPRTHLDTSAELRYSVGSLVDSQSDYRTTKVIRRPRRGRMGVRRDEPKVKSLGDHEWNRTQQIGVLSSHPFESDTEMSDIDDDDRETIFSSMDLLSPSGHSDAQTLAMMLQEQLDAINKEIRLIQEEKESTELRAEEIENRVASVSLEGLNLARVHPGTSITASVTASSLASSSPPSGHSTPKLTPRSPAREMDRMGVMTLPSDLRKHRRKIAVVEEDGREDKATIKCETSPPPTPRALRMTHTLPSSYHNDARSSLSVSLEPESLGLGSANSSQDSLHKAPKKKGIKSSIGRLFGKKEKARLGQLRGFMETEAAAQESLGLGKLGTQAEKDRRLKKNTSGHELLEEARRKGLPFAQWDGPTVVAWLELWLGMPAWYVAACRANVKSGAIMSALSDTEIQREIGISNPLHRLKLRLAIQEMVSLTSPSAPPTSRTPSGNVWVTHEEMENLAAPAKTKESEEGSWAQCPVFLQTLAYGDMNHEWIGNEWLPSLGLPQYRSYFMECLVDARMLDHLTKKDLRVHLKMVDSFHRTSLQYGIMCLKRLNYDRKELERRREASQHEIKDVLVWSNDRVIRWIQAIGLREYANNILESGVHGSLIALDENFDYSSLALLLQIPTQNTQARQILEREYNNLLALGTERRLDESDDKNFRRGSTWRRQFPPREVHGISMMPGSSETLPAGFRLTTTSGQSRKMTTDDGVFSVYST

SEQ ID NO: 20547 - protein, 56 aa, Homo sapiens
MNQTDKNQQEIPSYLNDEPPEESYSVNPGWSAMARSWPTATSASWVQAVLLPQPPK

SEQ ID NO: 20548 - protein, 1742 aa, Homo sapiens
MMEGNGTENSCSRTRGWLQQDNDAKPWLWKFSNCFSRPEQTLPHSPQTKEYMENKKVAVELKDVPSPLHAGSKLFPAVPLPDIRSLQQPKIQLSSVPKVSCCAHCPNEPSTSPMRFGGGGGGSGGTSSLIHPGALLDSQSTRTITCQVGSGFAFQSASSLQNASARNNLAGIASDFPSMCLESNLSSCKHLPCCGKLHFQSCHGNVHKLHQFPSLQGCTSAGYFPCSDFTSGAPGHLEEHISQSELTPHLCTNSLHLNVVPPVCLKGSLYCEDCLNKPARNSIIDAAKVWPNIPPPNTQPAPLAVPLCNGCGTKGTGKETTLLLATSLGKAASKFGSPEVAVAGQVLENLPPIGVFWDIENCSVPSGRSATAVVQRIREKFFKGHREAEFICVCDISKENKEVIQELNNCQVTVAHINATAKNAADDKLRQSLRRFANTHTAPATVVLVSTDVNFALELSDLRHRHGFHIILVHKNQASEALLHHANELIRFEEFISDLPPRLPLKMPCHTLLYVYNLPANKDGKSVSNRLRRLSDNCGGKVLSITGCSAILRFINQDSAERAQKRMENEDVFGNRIIVSFTPKNRELCETKSSNAIADKVKSPKKLKNPKLCLIKDASEQSSSAKATPGKGSQANSGSATKNTNVKSLQELCRMESKTGHRNSEHQQGHLRLVVPTHGNSSAAVSTPKNSGVAEPVYKTSQKKENLSARSVTSSPVEKKDKEETVFQVSYPSAFSKLVASRQVSPLLASQSWSSSRSMSPNLLNRASPLAFNIANSSSEADCPDPFANGADVQVSNIDYRLSRKELQQLLQEAFARHGKVKSVELSPHTDYQLKAVVQMENLQDAIGAVNSLHRYKIGSKKILVSLATGAASKSLSLLSAETMSVLQDAPACCLPLFKFTDIYEKKFGHKLNVSDLYKLTDTVAIREQGNGRLVCLLPSSQARQSPLGSSQSHDGSSTNCSPIIFEELEYHEPVCRQHCSNKDFSEHEFDPDSYKIPFVILSLKTFAPQVHSLLQTHEGTVPLLSFPDCYIAEFGDLEVVQENQGGVPLEHFITCVPGVNIATAQNGIKVVKWIHNKPPPPNTDPWLLRSKSPVGNPQLIQFSREVIDLLKSQPSCVIPISHFIPSYHHHFAKQCRVSDYGYSKLIELLEAVPHVLQILGMGSKRLLTLTHRAQVKRFTQDLLKLLKSQASKQVIVREFSQAYHWCFSKDWDVTEYGVCELIDIVSEIPDTTICLSQQDNEMVICIPKRERTQDEIERTKQFSKDVVDLLRHQPHFRMPFNKFIPSYHHHFGRQCKLAYYGFTKLLELFEAIPDTLQVLECGEEKILTLTEVERFKALAAQFVKLLRSQKDNCLMMTDLLTEYAKTFGYTFRLQDYDVSSISALTQKLCHVVKVADIESGRQIQLINRKSLRSLTAQLLVLLMSWEGTTHLSVEELKRHYESTHNTPLNPCEYGFMTLTELLKSLPYLVEVFTNDKMEECVKLTSLYLFAKNVRSLLHTYHYQQIFLHEFSMAYTKYVGETLQPKTYGHSSVEELLGAIPQVVWIKGHGHKRIVVLKNDMKSRLSSLSLSPANHENQPSEGERILEVPESHTASELKLGADGSGPSHTEQELLRLTDDSPVDLLCAPVPSCLPSPQLRPDPVILQSADLIQFEERPQEPSEIMILNQEEKMEIPIPGKSKTLTSDSSSSCISAAVPVPPCPSSETSESLLSKDPVESPAKKQPKNRVKLAANFSLAPITKL

SEQ ID NO: 20549 - protein, 243 aa, Homo sapiens
MALSRVCWARSAVWGSAVTPGHFVTRRLQLGRSGLAWGAPRYLFPRQLLIRHFWTPKQQTDFLDIYHAFRKQSHPEIISYLEKVIPLISDAGLRWRLTDLCTKIQRGTHPAIHDILALRECFSNHPLGMNQLQALHVKALSRAMLLTSYLPPPLLRHRLKTHTTVIHQLDKALAKLGIGQLTAQEVKSACYLRGLNSTHIGEDRCRTWLGEWLQISCSLKEAELSLLLHNVVLLSTNYLGTRR

SEQ ID NO: 20550 - protein, 1257 aa, Homo sapiens
MMCEVMPTINEDTPMSQRGSQSSGSDSDSHFEQLMVNMLDERDRLLDTLRETQESLSLAQQRLQDVIYDRDSLQRQLNSALPQDIESLTGGLAGSKGADPPEFAALTKELNACREQLLEKEEEISELKAERNNTRLLLEHLECLVSRHERSLRMTVVKRQAQSPSGVSSEVEVLKALKSLFEHHKALDEKVRERLRVSLERVSALEEELAAANQEIVALREQNVHIQRKMASSEGSTESEHLEGMEPGQKVHEKRLSNGSIDSTDETSQIVELQELLEKQNYEMAQMKERLAALSSRVGEVEQEAETARKDLIKTEEMNTKYQRDIREAMAQKEDMEERITTLEKRYLSAQRESTSIHDMNDKLENELANKEAILRQMEEKNRQLQERLELAEQKLQQTMRKAETLPEVEAELAQRIAALTKAEERHGNIEERMRHLEGQLEEKNQELQRARQREKMNEEHNKRLSDTVDRLLTESNERLQLHLKERMAALEEKNVLIQESETFRKNLEESLHDKERLAEEIEKLRSELDQLKMRTGSLIEPTIPRTHLDTSAELRYSVGSLVDSQSDYRTTKVIRRPRRGRMGVRRDEPKVKSLGDHEWNRTQQIGVLSSHPFESDTEMSDIDDDDRETIFSSMDLLSPSGHSDAQTLAMMLQEQLDAINKEIRLIQEEKESTELRAEEIENRVASVSLEGLNLARVHPGTSITASVTASSLASSSPPSGHSTPKLTPRSPAREMDRMGVMTLPSDLRKHRRKIAVVEEDGREDKATIKCETSPPPTPRALRMTHTLPSSYHNDARSSLSVSLEPESLGLGSANSSQDSLHKAPKKKGIKSSIGRLFGKKEKARLGQLRGFMETEAAAQESLGLGKLGTQAEKDRRLKKKHELLEEARRKGLPFAQWDGPTVVAWLELWLGMPAWYVAACRANVKSGAIMSALSDTEIQREIGISNPLHRLKLRLAIQEMVSLTSPSAPPTSRTPSGNVWVTHEEMENLAAPAKTKESEEGSWAQCPVFLQTLAYGDMNHEWIGNEWLPSLGLPQYRSYFMECLVDARMLDHLTKKDLRVHLKMVDSFHRTSLQYGIMCLKRLNYDRKELERRREASQHEIKDVLVWSNDRVIRWIQAIGLREYANNILESGVHGSLIALDENFDYSSLALLLQIPTQNTQARQILEREYNNLLALGTERRLDESDDKNFRRGSTWRRQFPPREVHGISMMPGSSETLPAGFRLTTTSGQSRKMTTDVASSRLQRLDNSTVRTYSC

SEQ ID NO: 20551 - protein, 1374 aa, Homo sapiens
MTSAAEIKKPPVAPKPKFVVANNKPAPPPIAPKPDIVISSVPQSTKKMKPAIAPKPKVLKTSPVREIGQSPSRKIMLNLEGHKQELAESTDNFNCKYEGNQSNDYISPMCSCSSECIHKLGHRENLCVKQLVLEPLEMNENLENSKIDETLTIKTRSKCDLYGEKAKNQGGVVLKASVLEEELKDALIHQMPPFISAQKHRPTDSPEMNGGCNSNGQFRIEFADLSPSPSSFEKVPDHHSCHLQLPSDECEHFETCQDDSEKSNNCFQSSELEALENGKRSTLISSDGVSKKSEVKDLGPLEIHLVPYTPKFPTPKPRKTRTARLLRQKCVDTPSESTEEPGNSDSSSSCLTENSLKINKISVLHQNVLCKQEQVDKMKLGNKSELNMESNSDAQDLVNSQKAMCNETTSFEKMAPSFDKDSNLSSDSTTVDGSSMSLAVDEGTGFIRCTVSMSLPKQLKLTCNEHLQSGRNLGVSAPQMQKESVIKEENSLRIVPKKPQRHSLPATGVLKKAASEELLEKSSYPSSEEKSSEKSLERNHLQHLCAQNRGVSSSFDMPKRASEKPVWKLPHPILPFSGNPEFLKSVTVSSNSEPSTALTKPRAKSLSAMDVEKCTKPCKDSTKKNSFKKLLSMKLSICFMKSDFQKFWSKSSQLGDTTTGHLSSGEQKGIESDWQGLLVGEEKRSKPIKAYSTENYSLESQKKRKKSRGQTSAANGLRAESLDDQMLSRESSSQAPYKSVTSLCAPEYENIRHYEEIPEYENLPFIMAIRKTQELEWQNSSSMEDADANVYEVEEPYEAPDGQLQLGPRHQHSSSGASQEEQNDLGLGDLPSDEEEIINSSDEDDVSSESSKGEPDPLEDKQDEDNGMKSKVHHIAKEIMSSEKVFVDVLKLLHIDFRDAVAHASRQLGKPVIEDRILNQILYYLPQLYELNRDLLKELEERMLHWTEQQRIADIFVKKGPYLKMYSTYIKEFDKNIALLDEQCKKNPGFAAVVREFEMSPRCANLALKHYLLKPVQRIPQYRLLLTDYLKNLIEDAGDYRDTQDALAVVIEVANHANDTMKQGDNFQKLMQIQYSLNGHHEIVQPGRVFLKEGILMKLSRKVMQPRMFFLFNDALLYTTPVQSGMYKLNNMLSLAGMKVRKPTQEAYQNELKIESVERSFILSASSATERDEWLEAISRAIEEYAKKRITFCPSRSLDEADSENKEEVSPLGSKAPIWIPDTRATMCMICTSEFTLTWRRHHCRACGKIVCQACSSNKYGLDYLKNQPARVCEHCFQELQKLDHQHSPRIGSPGNHKSPSSALSSVLHSIPSGRKQKKIPAALKEVSANTEDSSMSGYLYRSKGNKKPWKHFWFVIKNKVLYTYAASEVRSEI

SEQ ID NO: 20552 - protein, 645 aa, Homo sapiens
MTDTVFSNSSNRWMYPSDRPLQSNDKEQRLVDRLENMRKNVAGDGVNRCILCGEQLGMLGSACVVCEDCKKNVCTKCGVETNNRLHSVWLCKICIEQREVWKRSGAWFFKGFPKQVLPQPMPIKKTKPQQPVSEPAAPEQPAPEPKHPARAPARGDSEDRRGPGQKTGPDPASAPGRGNYGPPVRRASEARMSSSSRDSESWDHSGGAGDSSRSPAGLRRANSVQASRPAPGSVQSPAPPQPGQPGTPGGSRPGPGPAGRFPDQKPEVAPSDPGTTAPPREERTGGVGGYPAVGAREDRMSHPSGPYSQASAAAPQPAAARQPPPPEEEEEEANSYDSDEATTLGALEFSLLYDQDNSSLQCTIIKAKGLKPMDSNGLADPYVKLHLLPGASKSNKLRTKTLRNTRNPIWNETLVYHGITDEDMQRKTLRISVCDEDKFGHNEFIGETRFSLKKLKPNQRKNFNICLERVIPMKRAGTTGSARGMALYEEEQVERVGDIEERGKILVSLMYSTQQGGLIVGIIRCVHLAAMDANGYSDPFVKLWLKPDMGKKAKHKTQIKKKTLNPEFNEEFFYDIKHSDLAKKSLDISVWDYDIGKSNDYIGGCQLGISAKGERLKHWYECLKNKDKKIERWHQLQNENHVSSD

SEQ ID NO: 20553 - protein, 471 aa, Homo sapiens
MSKRLRSSEVCADCSGPDPSWASVNRGTFLCDECCSVHRSLGRHISQVRHLKHTPWPPTLLQMVETLYNNGANSIWEHSLLDPASIMSGRRKANPQDKVHPNKAEFIRAKYQMLAFVHRLPCRDDDSVTAKDLSKQLHSSVRTGNLETCLRLLSLGAQANFFHPEKGNTPLHVASKAGQILQAELLAVYGADPGTQDSSGKTPVDYARQGGHHELAERLVEIQYELTDRLAFYLCGRKPDHKNGQHFIIPQMADSSLDLSELAKAAKKKLQSLSNHLFEELAMDVYDEVDRRETDAVWLATQNHSALVTETTVVPFLPVNPEYSSTRNQGRQKLARFNAHEFATLVIDILSDAKRRQQGSSLSGSKDNVELILKTINNQHSVESQDNDQPDYDSVASDEDTDLETTASKTNRQKSLDSDLSDGPVTVQEFMEVKNALVASEAKIQQLMKVNNNLSDELRIMQKKLLGKDAN

SEQ ID NO: 20554 - protein, 113 aa, Homo sapiens
EPAPTLGLFSNYSTMDPVQKAVLSHTFGGPLLKTKRPVISCNICQIRFNSQSQAEAHYKGNRHARRVKGIEAAKTRGREPGVREPGDPAPPGSTPTNGDGVAPRPAFRRLVRV

SEQ ID NO: 20555 - protein, 938 aa, Homo sapiens
MGRAGAAANGTPQNVQGITSYQQRITAQHPLPNQSECRKIYRYDGIYCESTYQNLQALRKEKSRDAARSRRGKENFEFYELAKLLPLPAAITSQLDKASIIRLTISYLKMRDFANQGDPPWNLRMEGPPPNTSVKGAQRRRSPSALAIEVFEAHLGSHILQSLDGFVFALNQEGKFLYISETVSIYLGLSQVELTGSSVFDYVHPGDHVEMAEQLGMKLPPGRGLLSQGTAEDGASSASSSSQSETPEPVESTSPSLLTTDNTLERSFFIRMKSTLTKRGVHIKSSGYKVIHITGRLRLRVSLSHGRTVPSQIMGLVVVAHALPPPTINEVRIDCHMFVTRVNMDLNIIYCENRISDYMDLTPVDIVGKRCYHFIHAEDVEGIRHSHLDLLNKGQCVTKYYRWMQKNGGYIWIQSSATIAINAKNANEKNIIWVNYLLSNPEYKDTPMDIAQLPHLPEKTSESSETSDSESDSKDTSGITEDNENSKSDEKGNQSENSEDPEPDRKKSGNACDNDMNCNDDGHSSSNPDSRDSDDSFEHSDFENPKAGEDGFGALGAMQIKVERYVESESDLRLQNCESLTSDSAKDSDSAGEAGAQASSKHQKRKKRRKRQKGGSASRRRLSSASSPGGLDAGLVEPPRLLSSPNSASVLKIKTEISEPINFDNDSSIWNYPPNREISRNESPYSMTKPPSSEHFPSPQGGGGGGGGGGGLHVAIPDSVLTPPGADGAAARKTQFGASATAALAPVASDPLSPPLSASPRDKHPGNGGGGGGGGGGAGGGGPSASNSLLYTGDLEALQRLQAGNVVLPLVHRVTGTLAATSTAAQRVYTTGTIRYAPAEVTLAMQSNLLPNAHAVNFVDVNSPGFGLDPKTPMEMLYHHVHRLNMSGPFGGAVSAASLTQMPAGNVFTTAEGLFSTLPFPVYSNGIHAAQTLERKED

SEQ ID NO: 20556 - protein, 867 aa, Homo sapiens
MEQLNELELLMEKSFWEEAELPAELFQKKVVASFPRTVLSTGMDNRYLVLAVNTVQNKEGNCEKRLVITASQSLENKELCILRNDWCSVPVEPGDIIHLEGDCTSDTWIIDKDFGYLILYPDMLISGTSIASSIRCMRRAVLSETFRSSDPATRQMLIGTVLHEVFQKAINNSFAPEKLQELAFQTIQEIRHLKEMYRLNLSQDEIKQEVEDYLPSFCKWAGDFMHKNTSTDFPQMQLSLPSDNSKDNSTCNIEVVKPMDIEESIWSPRFGLKGKIDVTVGVKIHRGYKTKYKIMPLELKTGKESNSIEHRSQVVLYTLLSQERRADPEAGLLLYLKTGQMYPVPANHLDKRELLKLRNQMAFSLFHRISKSATRQKTQLASLPQIIEEEKTCKYCSQIGNCALYSRAVEQQMDCSSVPIVMLPKIEEETQHLKQTHLEYFSLWCLMLTLESQSKDNKKNHQNIWLMPASEMEKSGSCIGNLIRMEHVKIVCDGQYLHNFQCKHGAIPVTNLMAGDRVIVSGEERSLFALSRGYVKEINMTTVTCLLDRNLSVLPESTLFRLDQEEKNCDIDTPLGNLSKLMENTFVSKKLRDLIIDFREPQFISYLSSVLPHDAKDTVACILKGLNKPQRQAMKKVLLSKDYTLIVGMPGTGKTTTICTLVPAPEQVEKGGVSNVTEAKLIVFLTSIFVKAGCSPSDIGIIAPYRQQLKIINDLLARSIGMVEVNTVDKYQGRDKSIVLVSFVRSNKDGTVGELLKDWRRLNVAITRAKHKLILLGCVPSLNCYPPLEKLLNHLNSEKLISLIFHQENMKVFATYWVTFKENKTLFPLPFHTRAVSPLASAHTENSITIQNLMQYLCFKAQVYRKL

SEQ ID NO: 20557 - protein, 262 aa, Homo sapiens
MNCEREQLRGNQEAAAAPDTMAQPYASAQFAPPQNGIPAEYTAPHPHPAPEYTGQTTVPEHTLNLYPPAQTHSEQSPADTSAQTVSGTATTDDAAPTDGQPQTQPSENTENKSQPKRLHVSNIPFRFRDPDLRQMFGQFGKILDVEIIFNERGSKGFGFVTFENSADADRAREKLHGTVVEGRKIEVNNATARVMTNKKTVNPYTNGWKLNPVVGAVYSPEFYAGTVLLCQANQEGSSMYSAPSSLVYTSAMPGFPYPAATA

SEQ ID NO: 20558 - protein, 1032 aa, Homo sapiens
MAERGGDGGESERFNPGELRMAQQQALRFRGPAPPPNAVMRGPPPLMRPPPPFGMMRGPPPPPRPPFGRPPFDPNMPPMPPPGGIPPPMGPPHLQRPPFMPPPMSSMPPPPGMMFPPGMPPVTAPGTPALPPTEEIWVENKTPDGKVYYYNARTRESAWTKPDGVKVIQQSELTPMLAAQAQVQAQAQAQAQAQAQAQAQAQAQAQAQAQAQAQAQAQAQAQAQAQAQAQAQAQAQAQAQAQVQAQVQAQVQAQAVGASTPTTSSPAPAVSTSTSSSTPSSTTSTTTTATSVAQTVSTPTTQDQTPSSAVSVATPTVSVSTPAPTATPVQTVPQPHPQTLPPAVPHSVPQPTTAIPAFPPVMVPPFRVPLPGMPIPLPGVAMMQIVSCPYVKTVATTKTGVLPGMAPPIVPMIHPQVAIAASPATLAGATAVSEWTEYKTADGKTYYYNNRTLESTWEKPQELKEKEKLEEKIKEPIKEPSEEPLPMETEEEDPKEEPIKEIKEEPKEEEMTEEEKAAQKAKPVATAPIPGTPWCVVWTGDERVFFYNPTTRLSMWDRPDDLIGRADVDKIIQEPPHKKGMEELKKLRHPTPTMLSIQKWQFSMSAIKEEQELMEEINEDEPVKAKKRKRDDNKDIDSEKEAAMEAEIKAARERAIVPLEARMKQFKDMLLERGVSAFSTWEKELHKIVFDPRYLLLNPKERKQVFDQYVKTRAEEERREKKNKIMQAKEDFKKMMEEAKFNPRATFSEFAAKHAKDSRFKAIEKMKDREALFNEFVAAARKKEKEDSKTRGEKIKSDFFELLSNHHLDSQSRWSKVKDKVESDPRYKAVDSSSMREDLFKQYIEKIAKNLDSEKEKELERQARIEASLREREREVQKARSEQTKEIDREREQHKREEAIQNFKALLSDMVRSSDVSWSDTRRTLRKDHRWESGSLLEREEKEKLFNEHIEALTKKKREHFRQLLDETSAITLTSTWKEVKKIIKEDPRCIKFSSSDRKKQREFEEYIRDKYITAKADFRTLLKETKFITYS

SEQ ID NO: 20559 - protein, 77 aa, Homo sapiens
MRFMTLLFLTALAGALVCAYDPEAASAPGSGNHKQMDCLQLQKPPSETAKFLSSSTNLPRREKLVPSAKPPHTRGLV

SEQ ID NO: 20560 - protein, 535 aa, Homo sapiens
MAALLAAAAVRARILQVSSKVKSSPTWYSASSFSSSVPTVKLFIGGKFVESKSDKWIDIHNPATNEVIGRVPQATKAEMDAAIASCKRAFPAWADTSVLSRQQVLLRYQQLIKENLKEIAKLITLEQGKTLADAEGDVFRGLQVVEHACSVTSLMMGETMPSITKDMDLYSYRLPLGVCAGIAPFNFPAMIPLWMFPMAMVCGNTFLMKPSERVPGATMLLAKLLQDSGAPDGTLNIIHGQHEAVNFICDHPDIKAISFVGSNKAGEYIFERGSRHGKRVQANMGAKNHGVVMPDANKENTLNQLVGAAFGAAGQRCMALSTAVLVGEAKKWLPELVEHAKNLRVNAGDQPGADLGPLITPQAKERVCNLIDSGTKEGASILLDGRKIKVKGYENGNFVGPTIISNVKPNMTCYKEEIFGPVLVVLETETLDEAIQIVNNNPYGNGTAIFTTNGATARKYAHLVDVGQVGVNVPIPVPLPMFSFTGSRSSFRGDTNFYGKQGIQFYTQLKTITSQWKEEDATLSSPAVVMPTMGR

SEQ ID NO: 20561 - protein, 285 aa, Homo sapiens
MPFPVTTQGSQQTQPPQKHYGITSPISLAAPKETDCVLTQKLIETLKPFGVFEEEEELQRRILILGKLNNLVKEWIREISESKNLPQSVIENVGGKIFTFGSYRLGVHTKGADIDALCVAPRHVDRSDFFTSFYDKLKLQEEVKDLRAVEEAFVPVIKLCFDGIEIDILFARLALQTIPEDLDLRDDSLLKNLDIRCIRSLNGCRVTDEILHLVPNIDNFRLTLRAIKLWAKRHNIYSNILGFLGGVSWAMLVARTCQLYPNAIASTLVHKFFLVFSKWYVFRLY

SEQ ID NO: 20562 - protein, 943 aa, Homo sapiens
MSHLVDPTSGDLPVRDIDAIPLVLPASKGKNMKTQPPLSRMNREELEDSFFRLREDHMLVKELSWKQQDEIKRLRTTLLRLTAAGRDLRVAEEAAPLSETARRGQKAGWRQRLSMHQRPQMHRLQGHFHCVGPASPRRAQPRVQVGHRQLHTAGAPVPEKPKRGPRDRLSYTAPPSFKEHATNENRGEVASKPSELAHIMASNTMQVEEPPKSPEKMWPKDENFEQRSSLECAQKAAELRASIKEKVELIRLKKLLHERNASLVMTKAQLTEVQEAYETLLQKNQGILSAAHEALLKQVNELRAELKEESKKAVSLKSQLEDVSILQMTLKEFQERVEDLEKERKLLNDNYDKLLESMLDSSDSSSQPHWSNELIAEQLQQQVSQLQDQLDAELEDKRKVLLELSREKAQNEDLKLEVTNILQKHKQEVELLQNAATISQPPDRQSEPATHPAVLQENTQIEPSEPKNQEEKKLSQVLNELQVSHAETTLELEKTRDMLILQRKINVCYQEELEAMMTKADNDNRDHKEKLERLTRLLDLKNNRIKQLEGILRSHDLPTSGDFNLTDPAEKPNGSIQVQLDWKFPYIPPESFLKPEAQTKGKDTKDSSKISSEEEKASFPSQDQMASPEVPIEAGQYRSKRKPPHGGERKEKEHQVVSYSRRKHGKRIGVQGKNRMEYLSLNILNGNTPEQVNYTEWKFSETNSFIGDGFKNQHEEEEMTLSHSALKQKEPLHPVNDKESSEQGSEVSEAQTTDSDDVIVPPMSQKYPKADSEKMCIEIVSLAFYPEAEVMSDENIKQVYVEYKFYDLPLSETETPVSLRKPRAGEEIHFHFSKVIDLDPQEQQGRRRFLFDMLNGQDPDQGHLKFTVVSDPLDEEKKECEEVGYAYLQLWQILESGRDILEQELDIVSPEDLATPIGRLKVSLQAAAVLHAIYKEMTEDLFS

SEQ ID NO: 20563 - protein, 137 aa, Homo sapiens
MAELQEVQITEEKPLLPGQTPEAAKTHSVETPYGSVTFTVYGTPKPKRPAILTYHDVGLNSTVSVRGHAGNHSELCAGSCGCPWNGRGSPCVPFGISVPISGPACRHDPLRPAVPKFLYNNWSWCWSWSLHPGEICS

SEQ ID NO: 20564 - protein, 184 aa, Homo sapiens
MFLSPGEGPATEGGGLGPGEEAPKKKHRRNRTTFTTYQLHQLERAFEASHYPDVYSREELAAKVHLPEVRVQVWFQNRRAKWRRQERLESGSGAVAAPRLPEAPALPFARPPAMSLPLEPWLGPGPPAVPGLPRLLGPGPGLQASFGPHAFAPTFADGFALEEASLRLLAKEHAQALDRAWPPA

SEQ ID NO: 20565 - protein, 504 aa, Homo sapiens
VDVWSLGVILYTLVSGSLPFDGQNLKELRERVLRGKYRIPFYMSTDCENLLKRFLVLNPIKRGTLEQIMKDRWINAGHEEDELKPFVEPELDISDQKRIDIMVGMGYSQEEIQESLSKMKYDEITATYLLLGRKSSEVRPSSDLNNSTGQSPHHKVQRSVSSSQKQRRYSDHAGPAIPSVVAYPKRSQTSTADSDLKEDGISSRKSSGSAVGGKGIAPASPMLGNASNPNKADIPERKKSSTVPSSNTASGGMTRRNTYVCSERTTADRHSVIQNGKENSTIPDQRTPVASTHSISSAATPDRIRFPRGTASRSTFHGQPRERRTATYNGPPASPSLSHEATPLSQTRSRGSTNLFSKLTSKLTRRNMSFRFIKRLPTEYERNGRYEGSSRNVSAEQKDENKEAKPRSLRFTWSMKTTSSMDPGDMMREIRKVLDANNCDYEQRERFLLFCVHGDGHAENLVQWEMEVCKLPRLSLNGVRFKRISGTSIAFKNIASKIANELKL

SEQ ID NO: 20566 - protein, 821 aa, Homo sapiens
MAGSDAEWVTIANNLLFKCHIHLRIHELQDCDANVFIALYQSILGEKVPDLIVIPRSQEDDAHNVQAVIDSLALDYLQVSLSHITGENIVKGDKESIKNLLEIFDGLLEYLTERISETSHEKSETEQYFKESDRGERLEEPESTKESKSSWKRVSFGRCSLSSEMLGPSWDGDEAESTGEIIRLGDTAHTFSLRSNGAQCPNEMLSKKALASPSSKSHEDMLYPPSVLSKSRTSFVEDTETLSVSGIPNARKLGEPIRAAIPLHPPYHPSEPRAPCPIGKEYLHSSHCSPAVNSTGEHTEFSGDLDDGLFLISKLPKGSKWEVYPAQVQGPRTRKPPKGKRNENRATASSCNSPFPQRPRKRLTEQELHDVSEKLSQRLSELDWMLKSALGDRIKEKTDHKEENTGNEEVEDGTEETLSQHSDGIVEYGPKKSRPGLSMRRKPPYRSHSLSPSPVNKHKQFHLERKRQRKPRETDVRQFQAQAFTEAFERELRRHKVQENIGPLRIHEKEEETEKIYRGEAVRKGTPECSQPWKIYSRKTTTQSLRGGLPKPNKAVPMKVSEHSLLPLMLEQFPFLYVSGPTLSKMWKQQIAQVEQLKKEACRENRSKKKLQDEIEEALRRHDLLTTLVKKEYEHNKRLQDFKDCIRRQRLTQSKIKENRQQIVRARKYYDDYRVQLCAKMMRMRTREEMIFKKLFEEGLNIQKQRLRDLRNYAKEKRDEQRRRHQDELDSMENYYKDQFSLLAEAISQEHQELKAREKSQAQTLHKVKRELRSKMEKEIQQLQDMITQNDDDVFFRELEAERFRSRLQLASFQYSKSPSL

SEQ ID NO: 20567 - protein, 119 aa, Homo sapiens
MKIYGEVVFKCENVATLDPINFETPEAYISLPKWNTKRMGSISFDFRTTEPNGLILFTHGKPQERKDARSQKNTKVDFFAVELLDGNLYLLLDMGSGTIKVKATQKKANDGEWYHVDIQ

SEQ ID NO: 20568 - protein, 832 aa, Homo sapiens
MHSPPPRPAPSPGTWESQPARSVRLGGPGGGAGGAGGGRVLECPSIRITSISPTPEPPAALEDNPDAWGDGSPRDYPPPEGFGGYREAGGQGGGAFFSPSPGSSSLSSWSFFSDASDEAALYAACDEVESELNEAASRFGLGSPLPSPRASPRPWTPEDPWSLYGPSPGGRGPEDSWLLLSAPGPTPASPRPASPCGKRRYSSSGTPSSASPALSRRGSLGEEGSEPPPPPPLPLARDPGSPGPFDYVGAPPAESIPQKTRRTSSEQAVALPRSEEPASCNGKLPLGAEESVAPPGGSRKEVAGMDYLAVPSPLAWSKARIGGHSPIFRTSALPPLDWPLPSQYEQLELRIEVQPRAHHRAHYETEGSRGAVKAAPGGHPVVKLLGYSEKPLTLQMFIGTADERNLRPHAFYQVHRITGKMVATASYEAVVSGTKVLEMTLLPENNMAANIDCAGILKLRNSDIELRKGETDIGRKNTRVRLVFRVHVPQGGGKVVSVQAASVPIECSQRSAQELPQVEAYSPSACSVRGGEELVLTGSNFLPDSKVVFIERGPDGKLQWEEEATVNRLQSNEVTLTLTVPEYSNKRVSRPVQVYFYVSNGRRKRSPTQSFRFLPVICKEEPLPDSSLRGFPSASATPFGTDMDFSPPRPPYPSYPHEDPACETPYLSEGFGYGMPPLYPQTGPPPSYRPGLRMFPETRGTTGCAQPPAVSFLPRPFPSDPYGGRGSSFSLGLPFSPPAPFRPPPLPASPPLEGPFPSQSDVHPLPAEGYNKVGPGYGPGEGAPEQEKSRGGYSSGFRDSVPIQGITLEEVSEIIGRDLSGFPAPPGEEPPA

SEQ ID NO: 20569 - protein, 391 aa, Homo sapiens
MFSPWKISMFLSVREDSVPTTASFSADMLNVTLQGPTLNGTFAQSKCPQVEWLGWLNTIQPPFLWVLFVLATLENIFVLSVFCLHKSSCTVAEIYLGNLAAADLILACGLPFWAITISNNFDWLFGETLCRVVNAIISMNLYSSICFLMLVSIDRYLALVKTMSMGRMRGVRWAKLYSLVIWGCTLLLSSPMLVFRTMKEYSDEGHNVTACVISYPSLIWEVFTNMLLNVVGFLLPLSVITFCTMQIMQVLRNNEMQKFKEIQTERRATVLVLVVLLLFIICWLPFQISTFLDTLHRLGILSSCQDERIIDVITQIASFMAYSNSCLNPLVYVIVGKRFRKKSWEVYQGVCQKGGCRSEPIQMENSMGTLRTSISVERQIHKLQDWAGSRQ

SEQ ID NO: 20570 - protein, 1075 aa, Homo sapiens
MLTMSVTLSPLRSQDLDPMATDASPMAINMTPTVEQGEGEEAMKDMDSDQQYEKPPPLHTGADWKIVLHLPEIETWLRMTSERVRDLTYSVQQDSDSKHVDVHLVQLKDICEDISDHVEQIHALLETEFSLKLLSYSVNVIVDIHAVQLLWHQLRVSVLVLRERILQGLQDANGNYTRQTDILQAFSEETKEGRLDSLTEVDDSGQLTIKCSQNYLSLDCGITAFELSDYSPSEDLLSGLGDMTSSQVKTKPFDSWSYSEMEKEFPELIRSVGLLTVAADSISTNGSEAVTEEVSQVSLSVDDKGGCEEDNASAVEEQPGLTLGVSSSSGEALTNAAQPSSETVQQESSSSSHHDAKNQQPVPCENATPKRTIRDCFNYNEDSPTQPTLPKRGLFLKEETFKNDLKGNGGKRQMVDLKPEMSRSTPSLVDPPDRSKLCLVLQSSYPNSPSAASQSYECLHKVGNGNLENTVKFHIKEISSSLGRLNDCYKEKSRLKKPHKTSEEVPPCRTPKRGTGSGKQAKNTKSSAVPNGELSYTSKAIEGPQTNSASTSSLEPCNQRSWNAKLQLQSETSSSPAFTQSSESSVGSDNIMSPVPLLSKHKSKKGQASSPSHVTRNGEVVEAWYGSDEYLALPSHLKQTEVLALKLENLTKLLPQKPRGETIQNIDDWELSEMNSDSEIYPTYHVKKKHTRLGRVSPSSSSDIASSLGESIESGPLSDILSDEESSMPLAGMKKYADEKSERASSSEKNESHSATKSALIQKLMQDIQHQDNYEAIWEKIEGFVNKLDEFIQWLNEAMETTENWTPPKAEMDDLKLYLETHLSFKLNVDSHCALKEAVEEEGHQLLELIASHKAGLKDMLRMIASQWKELQRQIKRQHSWILRALDTIKAEILATDVSVEDEEGTGSPKAEVQLCYLEAQRDAVEQMSLKLYSEQYTSSSKRKEEFADMSKVHSVGSNGLLDFDSEYQELWDWLIDMESLVMDSHDLMMSEEQQQHLYKRYSVEMSIRHLKKTELLSKVEALKKGGVLLPNDLLEKVDSINEKWELLGVFAFLLLFVGYVYIFCVVKYSVRFLI

SEQ ID NO: 20571 - protein, 1904 aa, Homo sapiens
MLNRYRQALETAVNLSVKHSLPLLPGRTVLVYLTDANADRLCPKSNPQGPPLNYALLLIGMMITRAEQVDVVLCGGDTLKTAVLKAEEGILKTAIKLQAQVQEFDENDGWSLNTFGKYLLSLAGQRVPVDRVILLGQSMDDGMINVAKQLYWQRVNSKCLFVGILLRRVQYLSTDLNPNDVTLSGCTDAILKFIAEHGASHLLEHVGQMDKIFKIPPPPGKTGVQSLRPLEEDTPSPLAPVSQQGWRSIRLFISSTFRDMHGERDLLLRSVLPALQARAAPHRISLHGIDLRWGVTEEETRRNRQLEVCLGEVENAQLFVGILGSRYGYIPPSYNLPDHPHFHWAQQYPSGRSVTEMEVMQFLNRNQRLQPSAQALIYFRDSSFLSSVPDAWKSDFVSESEEAARRISELKSYLSRQKGITCRRYPCEWGGVAAGRPYVGGLEEFGQLVLQDVWNMIQKLYLQPGALLEQPVSIPDDDLVQATFQQLQKPPSPARPRLLQDTVQRLMLPHGRLSLVTGQSGQGKTAFLASLVSALQAPDGAKVASLVFFHFSGARPDQGLALTLLRRLCTYLRGQLKEPGALPSTYRSLVWELQQRLLPKSAESLHPGQTQVLIIDGADRLVDQNGQLISDWIPKKLPRCVHLVLSVSSDAGLGETLEQSQGAHVLALGPLEASARARLVREELALYGKRLEESPFNNQRESGRPLYLRLVTDHLRLFTLYEQVSERLRTLPATVPLLLQHILSTLEKEHGPDVLPQALTALEVTRSGLTVDQLHGVLSVWRTLPKGTKSWEEAVAAGNSGDPYPMGPFACLVQSLRSLLGEGPLERPGARLCLPDGPLRTAAKRCYGKRPGLEDTAHILIAAQLWKTCDADASGTFRSCPPEALGDLPYHLLQSGNRGLLSKFLTNLHVVAAHLELGLVSRLLEAHALYASSVPKEEQKLPEADVAVFRTFLRQQASILSQYPRLLPQQAANQPLDSPLCHQASLLSRRWHLQHTLRWLNKPRTMKNQQSSSLSLAVSSSPTAVAFSTNGQRAAVGTANGTVYLLDLRTWQEEKSVVSGCDGISACLFLSDDTLFLTAFDGLLELWDLQHGCRVLQTKAHQYQITGCCLSPDCRLLATVCLGGCLKLWDTVRGQLAFQHTYPKSLNCVAFHPEGQVIATGSWAGSISFFQVDGLKVTKDLGAPGASIRTLAFNVPGGVVAVGRLDSMVELWAWREGARLAAFPAHHGFVAAALFLHAGCQLLTAGEDGKVQVWSGSLGRPRGHLGSLSLSPALSVALSPDGDRVAVGYRADGIRIYKISSGSQGAQGQALDVAVSALAWLSPKVLVSGAEDGSLQGWALKECSLQSLWLLSRFQKPVLGLATSQELLASASEDFTVQLWPRQLLTRPHKAEDFPCGTELRGHEGPVSCCSFSTDGGSLATGGRDRSLLCWDVRTPKTPVLIHSFPACHRDWVTGCAWTKDNLLISCSSDGSVGLWDPESGQRLGQFLGHQSAVSAVAAVEEHVVSVSRDGTLKVWDHQGVELTSIPAHSGPISHCAAAMEPRAAGQPGSELLVVTVGLDGATRLWHPLLVCQTHTLLGHSGPVRAAAVSETSGLMLTASEDGSVRLWQVPKEADDTCIPRSSAAVTAVAWAPDGSMAVSGNQAGELILWQEAKAVATAQAPGHIGALIWSSAHTFFVLSADEKISEWQVKLRKGSAPGNLSLHLNRILQEDLGVLTSLDWAPDGHFLILAKADLKLLCMKPGDAPSEIWSSYTENPMILSTHKEYGIFVLQPKDPGVLSFLRQKESGEFEERLNFDINLENPSRTLISITQAKPESESSFLCASSDGILWNLAKCSPEGEWTTGNMWQKKANTPETQTPGTDPSTCRESDASMDSDASMDSEPTPHLKTRQRRKPSMCYLSCW

SEQ ID NO: 20572 - protein, 504 aa, Homo sapiens
MFYVIGGITVSVVAFFFTIKFLFELAARVVSFLQNEDRERRGDRTIYDYVRGNYLDPRSCKVSWDWKDPYEVGHSMAFRVHLFYKNGQPFPAHRPVGLRVHISHVELAVEIPVTQEVLQEPNSNVVKVAFTVRKAGRYEITVKLGGLNVAYSPYYKIFQPGMVVPSKTKIVCHFSTLVLTCGQPHTLQIVPRDEYDNPTNNSMSLRDEHNYTLSIHELGPQEEESTGVSFEKSVTSNRQTFQVFLRLTLHSRGCFHACISYQNQPINNGEFDIIVLSEDEKNIVERNVSTSGVSIYFEAYLYNATNCSSTPWHLPPMHMTSSQRRPSTAVDEEDEDSPSECHTPEKVKKPKKVYCYVSPKQFSVKEFYLKIIPWRLYTFRVCPGTKFSYLGPDPVHKLLTLVVDDGIQPPVELSCKERNILAATFIRSLHKNIGGSETFQDKVNFFQRELRQVHMKRPHSKVTLKVSRHALLESSLKATRNFSISDWSKNFEVVFQDEEGASQP

SEQ ID NO: 20573 - protein, 970 aa, Homo sapiens
MTQQPQDDFDRSVEDAQAWMKAVQDQLQVNDNTQGPRAALEARLWETEKICQLEPEGRVRVDLVLRMAEALLACCPGDQKPGILARLKDIKAQWEETVTYMTHCHSRIEWVWLHWSEYLLARDEFYRWFQKMMVTLEPHIELQLGLKEKQWQLSHAQVLLHNVDNQAVLLDRLLEEAASLFNRIGDPSVDEDAQKRMKAEYDAVKAKAQKRVDLLEQVAREHEEYQAGVDEFQLWLKAVVEKVNGCLGRNCKLPITQRLSTLQDIAKDFPRGEESLETLEEQSAGVIRNTSPLGAEKITGELEEMRKVLEKLRALWEEEEERLRGLLRSRGAWEQQIKQLEAELSEFRMVLQRLAQEGLQPAAKAGTEDELVAHWRRYSATRAALASEEPRVDRLQAQLKELIVFPHNLKPLSDSVIATIQEYQSLKVKSARLRNAAAVELWQHFQRPLQDLQLWKALAQRLLEVTASLPDLPSLHTFLPQIEAALMESSRLKELLTMLQLKKDLLIGIFGQERATALLEQVAGSMRDRDLLHNSLLQRKSKLQSLLAQHKDFGAAFEPLQRKLLDLQVRVQAEKGLQRDLPGKQAQLSRLQGLQEEGLDLGAQMEAARPLVQENPNHQHKMDQLSSDFQALQRSLEDLVDRCRQSVQEHCTFSHQLLELRQWIVVTTQKLEAHRGEAGPGDAESQEAEFERLVAEFPEKEAQLSLVEAQGWLVMEKSSPEGAAVVQEELRELAESWRALRLLEESLLSLIRNWHLQRMEVDSGKKMVFTNNIPKSGFLINPMDPIPRHRRREEEGSHEDFSQLLRNFGQWLQVENSKLVRIIAMRTSTAEDLRTRKSKLQELEARVPEGQHLFENLLRLGPARGTSDELEDLRYQWMLYKSKLKDSGHLLTQSSPGEPTGFQKTRRWRGLGSLFRRACCVALPLQLLLLLFLLLLFLLPIREEDRSCTLANNFARSFTLMLRYNGPPPT

SEQ ID NO: 20574 - protein, 210 aa, Homo sapiens; identical to SEQ ID NO: 12622

SEQ ID NO: 20575 - protein, 355 aa, Homo sapiens
NDVINAILKQHTEEKEFVEKHFNDLNMKAVEQDEPIPQKPQSAFYYCRLLLSILGMNSWDKRRSFHLLKKNEKLLRELRNLDSRQCRETHKIAVFYVAEGQEDKHSILTNTGGSQAYEDFVAGLGWEVNLTNHCGFMGGLQKNKSTGLTTPYFATSTVEVIFHVSTRMPSDSDDSLTKKLRHLGNDEVHIVWSEHTRDYRRGIIPTEFGDVLIVIYPMKNHMFSIQIMKKPEVPFFGPLFDGAIVNGKVLPIMVRATAINASRALKSLIPLYQNFYEERARYLQTIVQHHLEPTTFEDFAAQVFSPAPYHHLPSDAVERNAVIVLFLPKPPLENIGHLKAPTQRFYPVKLPQQRR

SEQ ID NO: 20576 - protein, 147 aa, Homo sapiens
MIIMVIIFLVLLFWENEVNDEAVMSTLEHLHVDYPQNDVPVPARYCNHMIIQRVIREPDHTCKKEHVFIHERPRKINGICISPKKVACQNLSAIFCFQSETKFKMTVCQLIEGTRYPACRYHYSPTEGFVLVTCDDLRPDSFLGYVK

SEQ ID NO: 20577 - protein, 901 aa, Homo sapiens
MGAASCEDEELEFKLVFGEEKEAPPLGAGGLGEELDSEDAPPCCRLALGEPPPYGAAPIGIPRPPPPRPGMHSPPPRPAPSPGTWESQPARSVRLGGPGGGAGGAGGGRVLECPSIRITSISPTPEPPAALEDNPDAWGDGSPRDYPPPEGFGGYREAGGQGGGAFFSPSPGSSSLSSWSFFSDASDEAALYAACDEVESELNEAASRFGLGSPLPSPRASPRPWTPEDPWSLYGPSPGGRGPEDSWLLLSAPGPTPASPRPASPCGKRRYSSSGTPSSASPALSRRGSLGEEGSEPPPPPPLPLARDPGSPGPFDYVGAPPAESIPQKTRRTSSEQAVALPRSEEPASCNGKLPLGAEESVAPPGGSRKEVAGMDYLAVPSPLAWSKARIGGHSPIFRTSALPPLDWPLPSQYEQLELRIEVQPRAHHRAHYETEGSRGAVKAAPGGHPVVKLLGYSEKPLTLQMFIGTADERNLRPHAFYQVHRITGKMVATASYEAVVSGTKVLEMTLLPENNMAANIDCAGILKLRNSDIELRKGETDIGRKNTRVRLVFRVHVPQGGGKVVSVQAASVPIECSQRSAQELPQVEAYSPSACSVRGGEELVLTGSNFLPDSKVVFIERGPDGKLQWEEEATVNRLQSNEVTLTLTVPEYSNKRVSRPVQVYFYVSNGRRKRSPTQSFRFLPVICKEEPLPDSSLRGFPSASATPFGTDMDFSPPRPPYPSYPHEDPACETPYLSEGFGYGMPPLYPQTGPPPSYRPGLRMFPETRGTTGCAQPPAVSFLPRPFPSDPYGGRGSSFSLGLPFSPPAPFRPPPLPASPPLEGPFPSQSDVHPLPAEGYNKVGPGYGPGEGAPEQEKSRGGYSSGFRDSVPIQGITLEEGGCGTGGCECECVQEIALHVC

SEQ ID NO: 20578 - protein, 669 aa, Homo sapiens
MSGRQRTLFQTWGSSISRSSGTPGCSSGTERPQSPGSSKAPLPAAAEAQLESDDDVLLVAAYEAERQLCLENGGFCTSAGALWIYPTNCPVRDYQLHISRAALFCNTLVCLPTGLGKTFIAAVVMYNFYRWFPSGKVVFMAPTKPLVTQQIEACYQVMGIPQSHMAEMTGSTQASTRKEIWCSKRVLFLTPQVMVNDLSRGACPAAEIKCLVIDEAHKALGNYAYCQVVRELVKYTNHFRILALSATPGSDIKAVQQVITNLLIGQIELRSEDSPDILTYSHERKVEKLIVPLGEELAAIQKTYIQILESFARSLIQRNVLMRRDIPNLTKYQIILARDQFRKNPSPNIVGIQQGIIEGEFAICISLYHGYELLQQMGMRSLYFFLCGIMDGTKGMTRSKNELGRNEDFMKLYNHLECMFARTRSTSANGISAIQQGDKNKKFVYSHPKLKKLEEVVIEHFKSWNAENTTEKKRDETRVMIFSSFRDSVQEIAEMLSQHQPIIRVMTFVGHASGKSTKGFTQKEQLEVVKQFRDGGYNTLVSTCVGEEGLDIGEVDLIICFDSQKSPIRLVQRMGRTGRKRQGRIVIILSEGREERIYNQSQSNKRSIYKAISSNRQVLHFYQRSPRMVPDGINPKLHKMFITHGVYEPEKPSRNLQRKSSIFSYRDGK

SEQ ID NO: 20579 - protein, 2225 aa, Homo sapiens
MNHPFGKEEAASQKQLFGFFCECLRRGEWELAQACVPQLQEGQGDIPKRVEDILQALVVCPNLLRCGQDINPQRVAWVWLLVLEKWLAREKKLLPVVFRRKLEFLLLSEDLQGDIPENILEELYETLTQGAVGHVPDGNPRRESWTPRLSSEAVSVLWDLLRQSPQPAQALLELLLEEDDGTGLCHWPLQNALVDLIRKALRALQGPDSVPPGVVDAIYGALRTLRCPAEPLGVELHLLCEELLEACRTEGSPLREERLLSCLLHKASRGLLSLYGHTYAEKVTEKPPRATASGKVSPDHLDPERAMLALFSNPNPAEAWKVAYFYCLSNNKHFLEQILVTALTLLKEEDFPNLGCLLDREFRPLSCLLVLLGWTHCQSLESAKRLLQTLHRTQGPGCDELLRDACDGLWAHLEVLEWCIQQSSNPIPKRDLLYHLHGGDSHSVLYTLHHLTNLPALREEDVLKLLQKVPAKDPQQEPDAVDAPVPEHLSQCQNLTLYQGFCAMKYAIYALCVNSHQHSQCQDCKDSLSEDLASATEPANDSLSSPGAANLFSTYLARCQQYLCSIPDSLCLELLENIFSLLLITSADLHPEPHLPEDYAEDDDIEGKSPSGLRSPSESPQHIAHPERKSERGSLGVPKTLAYTMPSHVKAEPKDSYPGPHRHSFLDLKHFTSGISGFLADEFAIGAFLRLLQEQLDEISSRSPPEKPKQESQSCSGSRDGLQSRLHRLSKVVSEAQWRHKVVTSNHRSEEQPSRRYQPATRHPSLRRGRRTRRSQADGRDRGSNPSLESTSSELSTSTSEGSLSAMSGRNELHSRLHPHPQSSLIPMMFSPPESLLASCILRGNFAEAHQVLFTFNLKSSPSSGELMFMERYQEVIQELAQVEHKIENQNSDAGSSTIRRTGSGRSTLQAIGSAAAAGMVFYSISDVTDKLLNTSGDPIPMLQEDFWISTALVEPTAPLREVLEDLSPPAMAAFDLACSQCQLWKTCKQLLETAERRLNSSLERRGRRIDHVLLNADGIRGFPVVLQQISKSLNYLLMSASQTKSESVEEKGGGPPRCSITELLQMCWPSLSEDCVASHTTLSQQLDQVLQSLREALELPEPRTPPLSSLVEQAAQKAPEAEAHPVQIQTQLLQKNLGKQTPSGSRQMDYLGTFFSYCSTLAAVLLQSLSSEPDHVEVKVGNPFVLLQQSSSQLVSHLLFERQVPPERLAALLAQENLSLSVPQVIVSCCCEPLALCSSRQSQQTSSLLTRLGTLAQLHASHCLDDLPLSTPSSPRTTENPTLERKPYSSPRDSSLPALTSSALAFLKSRSKLLATVACLGASPRLKVSKPSLSWKELRGRREVPLAAEQVARECERLLEQFPLFEAFLLAAWEPLRGSLQQGQSLAVNLCGWASLSTVLLGLHSPIALDVLSEAFEESLVARDWSRALQLTEVYGRDVDDLSSIKDAVLSCAVACDKEGWQYLFPVKDASLRSRLALQFVDRWPLESCLEILAYCISDTAVQEGLKCELQRKLAELQVYQKILGLQSPPVWCDWQTLRSCCVEDPSTVMNMILEAQEYELCEEWGCLYPIPREHLISLHQKHLLHLLERRDHDKALQLLRRIPDPTMCLEVTEQSLDQHTSLATSHFLANYLTTHFYGQLTAVRHREIQALYVGSKILLTLPEQHRASYSHLSSNPLFMLEQLLMNMKVDWATVAVQTLQQLLVGQEIGFTMDEVDSLLSRYAEKALDFPYPQREKRSDSVIHLQEIVHQAADPETLPRSPSAEFSPAAPPGISSIHSPSLRERSFPPTQPSQEFVPPATPPARHQWVPDETESICMVCCREHFTMFNRRHHCRRCGRLVCSSCSTKKMVVEGCRENPARVCDQCYSYCNKDVPEEPSEKPEALDSSKNESPPYSFVVRVPKADEVEWILDLKEEENELVRSEFYYEQAPSASLCIAILNLHRDSIACGHQLIEHCCRLSKGLTNPEVDAGLLTDIMKQLLFSAKMMFVKAGQSQDLALCDSYISKVDVLNILVAAAYRHVPSLDQILQPAAVTRLRNQLLEAEYYQLGVEVSTKTGLDTTGAWHAWGMACLKAGNLTAAREKFSRCLKPPFDLNQLNHGSRLVQDVVEYLESTVRPFVSLQDDDYFATLRELEATLRTQSLSLAVIPEGKIMNNTYYQECLFYLHNYSTNLAIISFYVRHSCLREALLHLLNKVGHGHSSKRQCLPYSSGLDHSALSGTITP

SEQ ID NO: 20580 - protein, 1208 aa, Homo sapiens
MDLHMMNCELLATCSALGYLEGDTYHKEPDCLESVKDLIRYLRHEDETRDVRQQLGAAQILQSDLLPILTQHHQDKPLFDAVIRLMVNLTQPALLCFGNLPKEPSFRHHFLQVLTYLQAYKEAFASEKAFGVLSETLYELLQLGWEERQEEDNLLIERILLLVRNILHVPADLDQEKKIDDDASAHDQLLWAIHLSGLDDLLLFLASSSAEEQWSLHVLEIVSLMFRDQNPEQLAGVGQGRLAQERSADFAELEVLRQREMAEKKTRALQRGNRHSRFGGSYIVQGLKSIGERDLIFHKGLHNLRNYSSDLGKQPKKVPKRRQAARELSIQRRSALNVRLFLRDFCSEFLENCYNRLMGSVKDHLLREKAQQHDETYYMWALAFFMAFNRAASFRPGLVSETLSVRTFHFIEQNLTNYYEMMLTDRKEAASWARRMHLALKAYQELLATVNEMDISPDEAVRESSRIIKNNIFYVMEYRELFLALFRKFDERCQPRSFLRDLVETTHLFLKMLERFCRSRGNLVVQNKQKKRRKKKKKVLDQAIVSGNVPSSPEEVEAVWPALAEQLQCCAQNSELSMDSVVPFDAASEVPVEEQRAEAMVRIQDCLLAGQAPQALTLLRSAREVWPEGDVFGSQDISPEEEIQLLKQILSAPLPRQQGPEERGAEEEEEEEEEEEEELQVVQVSEKEFNFLDYLKRFACSTVVRAYVLLLRSYQQNSAHTNHCIVKMLHRLAHDLKMEALLFQLSVFCLFNRLLSDPAAGAYKELVTFAKYILGKFFALAAVNQKAFVELLFWKNTAVVREMTEGYGSLDDRSSSRRAPTWSPEEEAHLRELYLANKDVEGQDVVEAILAHLNTVPRTRKQIIHHLVQMGLADSVKDFQRKGTHIVLWTGDQELELQRLFEEFRDSDDVLGHIMKNITAKRSRARIVDKLLALGLVAERRELYKKRQKKLASSILPNGAESLKDFCQEDLEEEENLPEEDSEEEEEGGSEAEQVQGSLVLSNENLGQSLHQEGFSIPLLWLQNCLIRAADDREEDGCSQAVPLVPLTEENEEAMENEQFQQLLRKLGVRPPASGQETFWRIPAKLSPTQLRRAAASLSQPEEEQKLQPELQPKVPGEQGSDEEHCKEHRAQALRALLLAHKKKAGLASPEEEDAVGKEPLKAAPKKRQLLDSDEEQEEDEGRNRAPELGAPGIQKKKRYQIEDDEDD

SEQ ID NO: 20581 - protein, 454 aa, Homo sapiens
MPEFLEDPSVLTKDKLKSELVANNVTLPAGEQRKDVYVQLYLQHLTARNRPPLPAGTNSKGPPDFSSDEEREPTPVLGSGAAAAGRSRAAVGRKATKKTDKPRQEDKDDLDVTELTNEDLLDQLVKYGVNPGPIVGTTRKLYEKKLLKLREQGTESRSSTPLPTISSSAENTRQNGSNDSDRYSDNEEDSKIELKLEKREPLKGRAKTPVTLKQRRVEHNQSYSQAGITETEWTSGSSKGGPLQALTRESTRGSRRTPRKRVETSEHFRIDGPVISESTPIAETIMASSNESLVVNRVTGNFKHASPILPITEFSDIPRRAPKKPLTRAEVGEKTEERRVERDILKEMFPYEASTPTGISASCRRPIKGAAGRPLELSDFRMEESFSSKYVPKYVPLADVKSEKTKKGRSIPVWIKILLFVVVAVFLFLVYQAMETNQVNPFSNFLHVDPRKSN

SEQ ID NO: 20582 - protein, 578 aa, Homo sapiens
MSQEGDYGRWTISSSDESEEEKPKPDKPSTSSLLCARQGAANEPRYTCSEAQKAAHKRKISPVKFSNTDSVLPPKRQKSGSQEDLGWCLSSSDDELQPEMPQKQAEKVVIKKEKDISAPNDGTAQRTENHGAPACHRLKEEEDEYETSGEGQDIWDMLDKGNPFQFYLTRVSGVKPKYNSGALHIKDILSPLFGTLVSSAQFNYCFDVDWLVKQYPPEFRKKPILLVHGDKREAKAHLHAQAKPYENISLCQAKLDIAFGTHHTKMMLLLYEEGLRVVIHTSNLIHADWHQKTQGIWLSPLYPRIADGTHKSGESPTHFKADLISYLMAYNAPSLKEWIDVIHKHDLSETNVYLIGSTPGRFQGSQKDNWGHFRLKKLLKDHASSMPNAESWPVVGQFSSVGSLGADESKWLCSEFKESMLTLGKESKTPGKSSVPLYLIYPSVENVRTSLEGYPAGGSLPYSIQTAEKQNWLHSYFHKWSAETSGRSNAMPHIKTYMRPSPDFSKIAWFLVTSANLSKAAWGALEKNGTQLMIRSYELGVLFLPSAFIGHGYGTFLMSKHRIRMGTCGCPPENLEAL

SEQ ID NO: 20583 - protein, 1015 aa, Homo sapiens
IPNDNISDEPSLCDCDVHKHNQNENLVPNNRVQIHRSPAQNLVGENNHDVDNSDLPVLSTDQDESLLLFEDVNTEFDDVSLSPLNSKSESLPVSDKTAISETPLVSQFLISDELLLDNNSELQDQITRDANSFKSRDQRGVQEEKVKNHEDIFDCSRDLFSVTFDLGFCSPDSDDEILEHTSDSNRPLDDLYGRYLEIKEISDANYVSNQALIPRDHSKNFTSGTVIIPSNEDMQNPNYVHLPLSAAKNEELLSPGYSQFSLPVQKKVMSTPLSKSNTLNSFSKIRKEILKTPDSSKEKVNLQRFKEALNSTFDYSEFSLEKSKSSGPMYLHKSCHSVEDGQLLTSNESEDDEIFRRKVKRAKGNVLNSPEDQKNSEVDSPLHAVKKRRFPINRSELSSSDESENFPKPCSQLEDFKVCNGNARRGIKVPKRQSHLKHVARKFLDDEAELSEEDAEYVSSDENDESENEQDSSLLDFLNDETQLSQAINDSEMRAIYMKSLRSPMMNNKYKMIHKTHKNINIFSQIPEQDETYLEDSFCVDEEESCKGQSSEEEVCVDFNLITDDCFANSKKYKTRRAVMLKEMMEQNCAHSKKKLSRIILPDDSSEEENNVNDKRESNIAVNPSTVKKNKQQDHCLNSVPSGSSAQSKVRSTPRVNPLAKQSKQTSLNLKDTISEVSDFKPQNHNEVQSTTPPFTTVDSQKDCRKFPVPQKRFGHLALMFPMPSASAKRGAHGPQDLADYFGKESWDGSALEDSSTSGASCSKSRPHLAGTHTSLRLPQEGKGTCILVGGHEITSGLEVISSLRAIHGLQVEVCPLNGCDYIVSNRMVVERRSQSEMLNSVNKNKFIEQIQHLQSMFERICVIVEKDREKTGDTSRMFRRTKSYDSLLTTLIGAGIRILFSSCQEETADLLKELSLVEQRKNVGIHVPTVVNSNKSEALQFYLSIPNISYITALNMCHQFSSVKRMANSSLQEISMYAQVTHQKAEEIYRYIHYVFDIQMLPNDLNQDRLKSDI

SEQ ID NO: 20584 - protein, 520 aa, Homo sapiens
MATEGGGKEMNEIKTQFTTREGLYKLLPHSEYSRPNRVPFNSQGSNPVRVSFVNLNDQSGNGDRLCFNVGRELYFYIYKGVRKRLIDKSRVTCVKWVPGSESLFLVAHSSGNMYLYNVEHTCGTTAPHYQLLKQGESFAVHTCKSKSTRNPLLKWTVGEGALNEFAFSPDGKFLACVSQDGFLRVFNFDSVELHGTMKSYFGGLLCVCWSPDGKYIVTGGEDDLVTVWSFVDCRVIARGHGHKSWVSVVAFDPYTTSVEEGDPMEFSGSDEDFQDLLHFGRDRANSTQSRLSKRNSTDSRPVSVTYRFGSVGQDTQLCLWDLTEDILFPHQPLSRARTHTNVMNATSPPAGSNGNSVTTPGNSVPPPLPRSNSLPHSAVSNAGSKSSVMDGAIASGVSKFATLSLHDRKERHHEKDHKRNHSMGHISSKSSDKLNLVTKTKTDPAKTLGTPLCPRMEDVPLLEPLICKKIAHERLTVLIFLEDCIVTACQEGFICTWGRPGKVGSLSSPSQASSPGGTVV

SEQ ID NO: 20585 - protein, 54 aa, Homo sapiens
MGNSASRSDFEWVYTDQPHTQRRKEILGAEDRARVLRPPAAAPLLGEGALGFCV

SEQ ID NO: 20586 - protein, 807 aa, Homo sapiens
MLSGRDLGAPAGSMGAASCEDEELEFKLVFGEEKEAPPLGAGGLGEELDSEDAPPCCRLALGEPPPYGAAPIGIPRPPPPRPGMHSPPPRPAPSPGTWESQPARSVRLGGPGGGAGGAGGGRVLECPSIRITSISPTPEPPAALEDNPDAWGDGSPRDYPPPEGFGGYREAGGQGGGAFFSPSPGSSSLSSWSFFSDASDEAALYAACDEVESELNEAASRFGLGSPLPSPRASPRPWTPEDPWSLYGPSPGGRGPEDSWLLLSAPGPTPASPRPASPCGKRRYSSSGTPSSASPALSRRGSLGEEGSEPPPPPPLPLARDPGSPGPFDYVGAPPAESIPQKTRRTSSEQAVALPRSEEPASCNGKLPLGAEESVAPPGGSRKEVAGMDYLAVPSPLAWSKARIGGHSPIFRTSALPPLDWPLPSQYEQLELRIEVQPRAHHRAHYETEGSRGAVKAAPGGHPVVKLLGYSEKPLTLQMFIGTADERNLRPHAFYQVHRITGKMVATASYEAVVSGTKVLEMTLLPENNMAANIDCAGILKLRNSDIELRKGETDIGRKNTRVRLVFRVHVPQGGGKVVSVQAASVPIECSQRSAQELPQVEAYSPSACSVRGGEELVLTGSNFLPDSKVVFIERGPDGKLQWEEEATVNRLQSNEVTLTLTVPEYSNKRVSRPVQVYFYVSNGRRKRSPTQSFRFLPVICKEEPLPDSSLRGFPSASATPFGTDMDFSPPRPPYPSYPHEDPACETPYLSEGFGYGMPPLYPQTGPPPSYRPGLRMFPETRGTTVSEIIGRDLSGFPAPPGEEPPA

SEQ ID NO: 20587 - protein, 178 aa, Homo sapiens
MAGAEGAAGRQSELEPVVSLVDVLEEDEELENEACAVLGGSDSEKCSYSQGSVKRQALYACSTCTPEGEEPAGICLACSYECHGSHKLFELYTKRNFRCDCGNSKFKNLECKLLPIPDEMIQCVVCEDWFHGRHLGAIPPESGDFQEMVCQACMKRCSFLWAYAAQLAVTKISTEDDG

SEQ ID NO: 20588 - protein, 232 aa, Homo sapiens
TEGSFACSACENGYWVNEDGTACEDLDECAFPGVCPSGVCTNTAGSFSCKDCDGGYRPSPLGDSCEDVDECEDPQSSCLGGECKNTVGSYQCLCPQGFQLANGTVCEDVNECMGEEHCAPHGECLNSHGSFFCLCAPGFVSAEGGTSCQDIDECEDYGDPVCGTWKCENSPGSYRCVLGCQPGFHMAPNGDCIDIDECANDTMCGSHGFCDNTDGSFRCLCDQGFEISPSGW

SEQ ID NO: 20589 - protein, 159 aa, Homo sapiens
MIRHAGAPARGDPTGPVPVVGKGEEEEEEDGMRLCLPANPKNCLPHRRGISILEKLIKTCPVWLQLSLGQAEVARILHRVVAGMFLVRRDSSSKQLVLCVHFPSLNESSAEVLEYTIKEEKSKTYCPSHCGYPRPSLRPAASRTLRPSPTWVWVSGTPR

SEQ ID NO: 20590 - protein, 1392 aa, Homo sapiens
MSSTLHSVFFTLKVSILLGSLLGLCLGLEFMGLPNQWARYLRWDASTRSDLSFQFKTNVSTGLLLYLDDGGVCDFLCLSLVDGRVQLRFSMDCAETAVLSNKQVNDSSWHFLMVSRDRLRTVLMLDGEGQSGELQPQRPYMDVVSDLFLGGVPTDIRPSALTLDGVQAMPGFKGLILDLKYGNSEPRLLGSRGVQMDAEGPCGERPCENGGICFLLDGHPTCDCSTTGYGGKLCSEGLSHLMMSEQGRSKAREENVATFRGSEYLCYDLSQNPIQSSSDEITLSFKTWQRNGLILHTGKSADYVNLALKDGAVSLVINLGSGAFEAIVEPVNGKFNDNAWHDVKVTRNLRQVTISVDGILTTTGYTQEDYTMLGSDDFFYVGGSPSTADLPGSPVSNNFMGCLKEVVYKNNDIRLELSRLARIADTKMKIYGEVVFKCENVATLDPINFETPEAYISLPKWNTKRMGSISFDFRTTEPNGLILFTHGKPQERKDARSQKNTKVDFFAVELLDGNLYLLLDMGSGTIKVKATQKKANDGEWYHVDIQRDGRSGTISVNSRRTPFTASGESEILDLEGDMYLGGLPENRAGLILPTELWTAMLNYGYVGCIRDLFIDGRSKNIRQLAEMQNAAGVKSSCSRMSAKQCDSYPCKNNAVCKDGWNRFICDCTGTGYWGRTCEREASILSYDGSMYMKIIMPMVMHTEAEDVSFRFMSQRAYGLLVATTSRDSADTLRLELDGGRVKLMVNLGKGPETLYAGQKLNDNEWHTVRVVRRGKSLKLTVDDDVAEGTMVGDHTRLEFHNIETGIMTEKRYISVVPSSFIGHLQSLMFNGLLYIDLCKNGDIDYCELKARFGLRNIIADPVTFKTKSSYLSLATLQAYTSMHLFFQFKTTSPDGFILFNSGDGNDFIAVELVKGYIHYVFDLGNGPNVIKGNSDRPLNDNQWHNVVITRDNSNTHSLKVDTKVVTQVINGAKNLDLKGDLYMAGLAQGMYSNLPKLVASRDGFQGCLASVDLNGRLPDLINDALHRSGQIERGCEGPSTTCQEDSCANQGVCMQQWEGFTCDCSMTSYSGNQCNDPGATYIFGKSGGLILYTWPANDRPSTRSDRLAVGFSTTVKDGILVRIDSAPGLGDFLQLHIEQGKIGVVFNIGTVDISIKEERTPVNDGKYHVVRFTRNGGNATLQVDNWPVNEHYPTGNTDNERFQMVKQKIPFKYNRPVEEWLQEKGRQLTIFNTQAQIAIGGKDKGRLFQGQLSGLYYDGLKVLNMAAENNPNIKINGSVRLVGEVPSILGTTQTTSMPPEMSTTVMETTTTMATTTTRKNRSTASIQPTSDDLVSSAECSSDDEDFVECEPSTGRSARSSNAARSLRAALTWTWRLTYTFTPIIFISCVVHS

SEQ ID NO: 20591 - protein, 890 aa, Homo sapiens
MPASISSIFPGPTLLLSCGSEELDSEDAPPCCRLALGEPPPYGAAPIGIPRPPPPRPGMHSPPPRPAPSPGTWESQPARSVRLGGPGGGAGGAGGGRVLECPSIRITSISPTPEPPAALEDNPDAWGDGSPRDYPPPEGFGGYREAGGQGGGAFFSPSPGSSSLSSWSFFSDASDEAALYAACDEVESELNEAASRFGLGSPLPSPRASPRPWTPEDPWSLYGPSPGGRGPEDSWLLLSAPGPTPASPRPASPCGKRRYSSSGTPSSASPALSRRGSLGEEGSEPPPPPPLPLARDPGSPGPFDYVGAPPAESIPQKTRRTSSEQAVALPRSEEPASCNGKLPLGAEESVAPPGGSRKEVAGMDYLAVPSPLAWSKARIGGHSPIFRTSALPPLDWPLPSQYEQLELRIEVQPRAHHRAHYETEGSRGAVKAAPGGHPVVKLLGYSEKPLTLQMFIGTADERNLRPHAFYQVHRITGKMVATASYEAVVSGTKVLEMTLLPENNMAANIDCAGILKLRNSDIELRKGETDIGRKNTRVRLVFRVHVPQGGGKVVSVQAASVPIECSQRSAQELPQVEAYSPSACSVRGGEELVLTGSNFLPDSKVVFIERGPDGKLQWEEEATVNRLQSNEVTLTLTVPEYSNKRVSRPVQVYFYVSNGRRKRSPTQSFRFLPVICKEEPLPDSSLRGFPSASATPFGTDMDFSPPRPPYPSYPHEDPACETPYLSEGFGYGMPPLYPQTGPPPSYRPGLRMFPETRGTTGCAQPPAVSFLPRPFPSDPYGGRGSSFSLGLPFSPPAPFRPPPLPASPPLEGPFPSQSDVHPLPAEGYNKVGPGYGPGEGAPEQEKSRGGYSSGFRDSVPIQGITLEEVSEIIGRDLSGFPAPPGEEPPA

SEQ ID NO: 20592 - protein, 252 aa, Homo sapiens
MAELQEVQITEEKPLLPGQTPEAAKEAELAARILLDQGQTHSVETPYGSVTFTVYGTPKPKRPAILTYHDVGLNYKSCFQPLFQFEDMQEIIQNFVRVHVDAPGMEEGAPVFPLGYQYPSLDQLADMIPCVLQYLNFSTIIGVGVGAGAYILARYALNHPDTVEGLVLINIDPNAKGWMDWAAHKLTGLTSSIPEMILGHLFSQEELSGNSELIQKYRNIITHAPNLDNIELYWNSYNNRRDLNFERGGDIT

SEQ ID NO: 20593 - protein, 1281 aa, Homo sapiens
MPIVMARDLEETASSSEDEEVISQEDHPCIMWTGGCRRIPVLVFHADAILTKDNNIRVIGERYHLSYKIVRTDSRLVRSILTAHGFHEVHPSSTDYNLMWTGSHLKPFLLRTLSEAQKVNHFPRSYELTRKDRLYKNIIRMQHTHGFKAFHILPQTFLLPAEYAEFCNSYSKDRGPWIVKPVASSRGRGVYLINNPNQISLEENILVSRYINNPLLIDDFKFDVRLYVLVTSYDPLVIYLYEEGLARFATVRYDQGAKNIRNQFMHLTNYSVNKKSGDYVSCDDPEVEDYGNKWSMSAMLRYLKQEGRDTTALMAHVEDLIIKTIISAELAIATACKTFVPHRSSCFELYGFDVLIDSTLKPWLLEVNLSPSLACDAPLDLKIKASMISDMFTVVGFVCQDPAQRASTRPIYPTFESSRRNPFQKPQRPVSAQFQSSKAKQRCRPLSASDAEMKNLVGSAREKGPGKLGGSVLGLSMEEIKVLRRVKEENDRRGGFIRIFPTSETWEIYGSYLEHKTSMNYMLATRLFQDRMTADGAPELKIESLNSKAKLHAALYERKLLSLEVRKRRRRSSRLRAMRPKYPVITQPAEMNVKTETESEEEEEVALDNEDEEQEASQEESAGFLRENQAKYTPSLTALVENTPKENSMKVREWNNKGGHCCKLETQELEPKFNLMQILQDNGNLSKMQARIAFSAYLQHVQIRLMKDSGGQTFSASWAAKEDEQMELVVRFLKRASNNLQHSLRMVLPSRRLALLERRRILAHQLGDFIIVYNKETEQMAEKKSKKKVEEEEEDGVNMENFQEFIRQASEAELEEVLTFYTQKNKSASVFLGTHSKISKNNNNYSDSGAKGDHPETIMEEVKIKPPKQQQTTEIHSDKLSRFTTSAEKEAKLVYSNSSSGPTATLQKIPNTHLSSVTTSDLSPGPCHHSSLSQIPSAIPSMPHQPTILLNTVSASASPCLHPGAQNIPSPTGLPRCRSGSHTIGPFSSFQSAAHIYSQKLSRPSSAKAAGSCYLNKHHSGIAKTQKEGEDASLYSKRYNQSMVTAELQRLAEKQAARQYSPSSHINLLTQQVTNLNLATGIINRSSASAPPTLRPIISPSGPTWSTQSDPQAPENHSSSPGSRSLQTGGFAWEGEVENNVYSQATGVVPQHKYHPTAGSYQLQFALQQLEQQKLQSRQLLDQSRARHQAIFGSQTLPNSNLWTMNNGAGCRISSATASGQKPTTLPQKVVPPPSSCASLVPKPPPNHEQVLRRATSQKASNTRFRSSFQNYLWYFFQAVS

SEQ ID NO: 20594 - protein, 226 aa, Homo sapiens
MDWKEVLRRRLATPNTCPNKKKSEQELKDEEMDLFTKYYSEWKGGRKNTNEFYKTIPRFYYRLPAEDEVLLQKLREESRAVFLQRKSRELLDNEELQVGEKAGAKCKQFFTAKVFAKLLHTDSYGRISIMQFFNYVMRKVWLHQTRIGLSLYDVAGQGYLRESDLENYILELIPTLPQLDGLEKSFYSFYVCTAVRKFFFFLDPLRTGKIKIQDILACSFLDDLLE

SEQ ID NO: 20595 - protein, 724 aa, Homo sapiens
MHSPPPRPAPSPGTWESQPARSVRLGGPGGGAGGAGGGRVLECPSIRITSISPTPEPPAALEDNPDAWGDGSPRDYPPPEGFGGYREAGGQGGGAFFSPSPGSSSLSSWSFFSDASDEAALYAACDEVESELNEAASRFGLGSPLPSPRASPRPWTPEDPWSLYGPSPGGRGPEDSWLLLSAPGPTPASPRPASPCGKRRYSSSGTPSSASPALSRRGSLGEEGSEPPPPPPLPLARDPGSPGPFDYVGAPPAESIPQKTRRTSSEQAVALPRSEEPASCNGKLPLGAEESVAPPGGSRKEVAGMDYLAVPSPLAWSKARIGGHSPIFRTSALPPLDWPLPSQYEQLELRIEVQPRAHHRAHYETEGSRGAVKAAPGGHPVVKLLGYSEKPLTLQMFIGTADERNLRPHAFYQVHRITGKMVATASYEAVVSGTKVLEMTLLPENNMAANIDCAGILKLRNSDIELRKGETDIGRKNTRVRLVFRVHVPQGGGKVVSVQAASVPIECSQRSAQELPQVEAYSPSACSVRGGEELVLTGSNFLPDSKVVFIERGPDGKLQWEEEATVNRLQSNEVTLTLTVPEYSNKRVSRPVQVYFYVSNGRRKRSPTQSFRFLPVICKEEPLPDSSLRGFPSASATPFGTDMDFSPPRPPYPSYPHEDPACETPYLSEGFGYGMPPLYPQTGPPPSYRPGLRMFPETRGTTVSEIIGRDLSGFPAPPGEEPPA

SEQ ID NO: 20596 - protein, 104 aa, Homo sapiens
MANKERKKGQADKKNETLKGIRRLRRRHLMTSTSSLASSSLITLWLSIGSKPWRRTIWISRQERRSQSLMTPMKNGGGGKSGRRSDFSLQTSSFGSGLENVCTA

SEQ ID NO: 20597 - protein, 847 aa, Homo sapiens
MAQWEMLQNLDSPFQDQLHQLYSHSLLPVDIRQYLAVWIEDQNWQEAALGSDDSKATMLFFHFLDQLNYECGRCSQDPESLLLQHNLRKFCRDIQDPTQLAEMIFNLLLEEKRILIQAQRAQLEQGEPVLETPVESQQHEIESRILDLRAMMEKLVKSISQLKDQQDVFCFRYKIQAKGKTPSLDPHQTKEQKILQETLNELDKRRKEVLDASKALLGRLTTLIELLLPKLEEWKAQQQKACIRAPIDHGLEQLETWFTAGAKLLFHLRQLLKELKGLSCLVSYQDDPLTKGVDLRNAQVTELLQRLLHRAFVVETQPCMPQTPHRPLILKTGSKFTVRTRLLVRLQEGNESLTVEVSIDRNPPQLQGFRKFNILTSNQKTLTPEKGQSQGLIWDFGYLTLVEQRSGGSGKGSNKGPLGVTEELHIISFTVKYTYQGLKQELKTDTLPVVIISNMNQLSIAWASVLWFNLLSPNLQNQQFFSNPPKAPWSLLGPALSWQFSSYVGRGLNSDQLSMLRNKLFGQNCRTEDPLLSWADFTKRESPPGKLPFWTWLDKILELVHDHLKDLWNDGRIMGFVSRSQERRLLKKTMSGTFLLRFSESSEGGITCSWVEHQDDDKVLIYSVQPYTKEVLQSLPLTEIIRHYQLLTEENIPENPLRFLYPRIPRDEAFGCYYQEKVNLQERRKYLKHRLIVVSNRQVDELQQPLELKPEPELESLELELGLVPEPELSLDLEPLLKAGLDLGPELESVLESTLEPVIEPTLCMVSQTVPEPDQGPVSQPVPEPDLPCDLRHLNTEPMEIFRNCVKIEEIMPNGDPLLAGQNTVDEVYVSRPSHFYTDGPLMPSDF

SEQ ID NO: 20598 - protein, 744 aa, Homo sapiens
MSTRTPLPTVNERDTENHTSHGDGRQEVTSRTSRSGARCRNSIASCADEQPHIGNYRLLKTIGKGNFAKVKLARHILTGREVAIKIIDKTQLNPTSLQKLFREVRIMKILNHPNIVKLFEVIETEKTLYLIMEYASGGEVFDYLVAHGRMKEKEARSKFRQIVSAVQYCHQKRIVHRDLKAENLLLDADMNIKIADFGFSNEFTVGGKLDTFCGSPPYAAPELFQGKKYDGPEVDVWSLGVILYTLVSGSLPFDGQNLKELRERVLRGKYRIPFYMSTDCENLLKRFLVLNPIKRGTLEQIMKDRWINAGHEEDELKPFVEPELDISDQKRIDIMVGMGYSQEEIQESLSKMKYDEITATYLLLGRKSSELDASDSSSSSNLSLAKVRPSSDLNNSTGQSPHHKVQRSVSSSQKQRRYSDHAGPAIPSVVAYPKRSQTSTADSDLKEDGISSRKSSGSAVGGKGIAPASPMLGNASNPNKADIPERKKSSTVPSSNTASGGMTRRNTYVCSERTTADRHSVIQNGKENSTIPDQRTPVASTHSISSAATPDRIRFPRGTASRSTFHGQPRERRTATYNGPPASPSLSHEATPLSQTRSRGSTNLFSKLTSKLTRRLPTEYERNGRYEGSSRNVSAEQKDENKEAKPRSLRFTWSMKTTSSMDPGDMMREIRKVLDANNCDYEQRERFLLFCVHGDGHAENLVQWEMEVCKLPRLSLNGVRFKRISGTSIAFKNIASKIANELKL

SEQ ID NO: 20599 - protein, 596 aa, Homo sapiens
MTQQPQDDFDRSVEDAQAWMKAVQDQLQVNDNTQGPRAALEARLWETEKICQLEPEGRVRVDLVLRMAEALLACCPGDQKPGILARLKDIKAQWEETVTYMTHCHSRIEWVWLHWSEYLLARDEFYRWFQKMMVTLEPHIELQLGLKEKQWQLSHAQVLLHNVDNQAVLLDRLLEEAASLFNRIGDPSVDEDAQKRMKAEYDAVKAKAQKRVDLLEQVAREHEEYQAGVDEFQLWLKAVVEKVNGCLGRNCKLPITQRLSTLQDIAKDFPRGEESLETLEEQSAGVIRNTSPLGAEKITGELEEMRKVLEKLRALWEEEEERLRGLLRSRGAWEQQIKQLEAELSEFRMVLQRLAQEGLQPAAKAGTEDELVAHWRRYSATRAALASEEPRVDRLQAQLKELIVFPHNLKPLSDSVIATIQEYQSLKVKSARLRNAAAVELWQHFQRPLQDLQLWKALAQRLLEVTASLPDLPSLHTFLPQIEAALMESSRLKELLTMLQLKKDLLIGIFGQERATALLEQVAGSMRDRDLLHNSLLQRKSKLQSLLAQHKDFGAAFEPLQRKLLDLQVRVQAEKGLQRDLPGKQAQLSRLQVRGL

SEQ ID NO: 20600 - protein, 747 aa, Homo sapiens
LLQRRIRTGEEITDRTLRTPTRIILDESIIPKKYATVILHCMYTDVVDLSVLHCSPSVGSLSEVQALVAGKPNMTRAEEAMELYHIALFLEFNMLAQEPNLLSGTAHSVNKRGVKRRDLDMEELREILSSLLPFVRIEHILPINSEVLSDAMKRGLISTPPSDMLPTTEGGKSNAWLRQKNAGIYVRPRLFSPYVEEAKSVLDEMMVEQTDLVRLRMVRMSNVPDTLYMVNNAVPQCCHMISHQQISSNQSSPPSVVANEIPVPRLLIMKDMVRRLQELRHTEQVQRAYALNCGEGATVSYEIQIRVLREFGLADAAAELLQNPHKFFPDERFGDESPLLTMRQPGRCRVNSTPPAETMFTDLDSFVAFHPPLPPPPPPYHPPATPIHNQLKAGWKQRPPSQHPSRSFSYPCNHSLFHSRTAPKAGPPPVYLPSVKAAPPDCTSTAGLGRQTVAAAAATTTSTATAAAAAASEKQVRTQPVLNDLMPDIAVGVSTLSLKDRRLPELAVDTELSQSVSEAGPGPPQHLSCIPQRHTHTSRKKHTLEQKTDTRENPQEYPDFYDFSNAACRPSTPALSRRTPSPSQGGYFGPDLYSHNKASPSGLKSAYLPGQTSPKKQEEARREYPLSPDGHLHRQKNEPIHLDVVEQPPQRSDFPLAAPENASTGPAHVRGRTAVETDLTFGLTPNRPSLSACSSEAPEERSGRRLADSESLGHGAQRNTDLEREDSISRGRRSPSKPDFLYKKSAL

SEQ ID NO: 20601 - protein, 197 aa, Homo sapiens
EEVLALLEKVLQSHMSLPATRGYALTALMKLSTRLCGDNKAAILEKMPLVERDGPQADEEAKESKEAAQLSEAAPVPTEPQASQLLDLLDLLDGASGDVQHPPHLDPSPGGALVHLLDLPCVPPPPAPIPDLKVFEREGVQLNLSFIRPPENPALLLITITATNFSEGDVTHFICQAAVPKSLQLQLQAPSGNTVPA

SEQ ID NO: 20602 - protein, 345 aa, Homo sapiens
MILTPIKAYSSPSTTPEARRREPQAPRQPSLMGPESQSPDCKDGAAATGATATPSAGASGGLQPHQLSSCDGELAVAPLPEGDLPGQFTRVMGKVCTQLLVSRPDEENISSYLQLIDKCLIHEAFTETQKKRLLSWKQQVQKLFRSFPRKTLLDISGYRQQRNRGFGQSNSLPTAGSVGGGMGRRNPRQYQIPSRNVPSARLGLLGTSGFVSSNQRNTTATPTIMKQGRQNLWFANPGGSNSMPSRTHSSVQRTRSLPVHTSPQNMLMFQQPGSQVHSGLCLTDLRGWLSLSGAPSMPALTVPKSSQGEFQLPVTEPDINNRLESLCLSMTEHALGDGVDRTSTI

SEQ ID NO: 20603 - protein, 238 aa, Homo sapiens
MPFPVTTQGSQQTQPPQKHYGITSPISLAAPKETDCVLTQKLIETLKPFGVFEEEEELQRRILILGKLNNLVKEWIREISESKNLPQSVIENVGGKIFTFGSYRLGVHTKGADIDALCVAPRHVDRSDFFTSFYDKLKLQEEVKDLRAVEEAFVPVIKLCFDGIEIDILFARLALQTIPEDLDLRDDSLLKNLDIRCIRSLNGMRKPTSFCVLQFLSDISCFYTSFVLKLFIAILLTQ

SEQ ID NO: 20604 - protein, 445 aa, Homo sapiens
MNKLRQSFRRKKDVYVPEASRPHQWQTDEEGVRTGKCSFPVKYLGHVEVDESRGMHICEDAVKRLKATGKKAVKAVLWVSADGLRVVDEKTKDLIVDQTIEKVSFCAPDRNFDRAFSYICRDGTTRRWICHCFMAVKDTGERLSHAVGCAFAACLERKQKREKECGVTATFDASRTTFTREGSFRVTTATEQAEREEIMKQMQDAKKGTEWGQSSGAASPGLFQAGHRRTPSEADRWLEEVSKSVRAQQPQASAAPLQPVLQPPPPTAISQPASPFQGNAFLTSQPVPVGVVPALQPAFVPAQSYPVANGMPYPAPNVPVVGITPSQMVANVFGTAGHPQAAHPHQSPSLVRQQTFPHYEASSATTSPFFKPPAQHLNGSAAFNGVDDGRLASADRHTEVPTGTCPVDPFEAQWAALENKSKQRTNPSPTNPFSSDLQKTFEIEL

SEQ ID NO: 20605 - protein, 118 aa, Homo sapiens
MAELQEVQITEEKPLLPGQTPEAAKEAELAARILLDQGQTHSVETPYGSVTFTVYGTPKPKRPAILTYHDVGLNYKSCFQPLFQFEDMQEIIQNFVRVHVDAPGMEEGAPVFPLGYQY

SEQ ID NO: 20606 - protein, 252 aa, Homo sapiens
KILKLKNLRPQDYANYSCIASVRNVCNIPDKMVSFRLSNKTGGEPAPSLTWVRSFGTLPEKTVLNGGTLTIPAITSDDAGTYSCIANNNVGNPAKKSTNIIVRALKKGRFWITPDPYHKDDNIQIGREVKISCQVEAVPSEELTFSWFKNGRPLRSSERMVITQTDPDVSPGTTNLDIIDLKFTDFGTYTCVASLKGGGISDISIDVNISSSTVPPNLTVPQEKSPLVTREGDTIELQCQVTGKPKPIILWS

SEQ ID NO: 20607 - protein, 3541 aa, Homo sapiens
MEEDIYTNLSKMETVLGQSMSSLPLSYREALERLEQSKALVSNLISTKEELMKLRQILRLLRLRCTENDGICLLKIVSALWEKWLSLLEAAKEWEMWCEELKQEWKFVSEEIEREAIILDNLQEELPEISKTKEAATTEELSELLDCLCQYGENVEKQQLLLTLLLQRIRSIQNVPESSGAVETVPAFQEITSMKERCNKLLQKVQKNKELVQTEIQERHSFTKEIIALKNFFQQTTTSFQNMAFQDHPEKSEQFEELQSILKKGKLTFENIMEKLRIKYSEMYTIVPAEIESQVEECRKALEDIDEKISNEVLKSSPSYAMRRKIEEINNGLHNVEKMLQQKSKNIEKAQEIQKKMWDELDLWHSKLNELDSEVQDIVEQDPGQAQEWMDNLMIPFQQYQQVSQRAECRTSQLNKATVKMEEYSDLLKSTEAWIENTSHLLANPADYDSLRTLSHHASTVQMALEDSEQKHNLLHSIFMDLEDLSIIFETDELTQSIQELSNQVTALQQKIMESLPQIQRMADDVVAIESEVKSMEKRVSKIKTILLSKEIFDFSPEEHLKHGEVILENIRPMKKTIAEIVSYQVELRLPQTGMKPLPVFQRTNQLLQDIKLLENVTQEQNELLKVVIKQTNEWDEEIENLKQILNNYSAQFSLEHMSPDQADKLPQLQGEIERMEKQILSLNQRKEDLLVDLKATVLNLHQHLKQEQEGVERDRLPAVTSEEGGVAERDASERKLNRRGSMSYLAAVEEEVEESSVKSDNGDEKAEPSPQSWSSLWKHDKDMEEDRASSSSGTIVQEAYGKISTSDNSMAQILTPDSLNTEQGPECSLRPNQTEEGTTPPIEADTLDSSDAQGGLEPRVEKTRPEPTEVLHACKTQVAELELWLQQANVAVEPETLNADMQQVLEQQLVGCQAMLTEIEHKVAFLLETCKDQGLGDNGATQHEAEALSLKLKTVKCNLEKVQMMLQEKHSEDQHPTILKKSSEPEHQEALQPVNLSELESIVTERPQFSRQKDFQQQQVLELKPMEQKDFIKFIEFNAKKMWPQYCQHDNDTTQESSASNQASSPENDVPDSILSPQGQNGDKWQYLHHELSSKIKLPLPQLVEPQVSTNMGILPSVTMYNFRYPTTEELKTYTTQLEDLRQEASNLQTQENMTEEAYINLDKKLFELFLTLSQCLSSVEEMLEMPRLYREDGSGQQVHYETLALELKKLYLALSDKKGDLLKAMTWPGENTNLLLECFDNLQVCLEHTQAAAVCRSKSLKAGLDYNRSYQNEIKRLYHQLIKSKTSLQQSLNEISGQSVAEQLQKADAYTVELENAESRVAKLRDEGERLHLPYALLQEVYKLEDVLDSMWGMLRARYTELSSPFVTESQQDALLQGMVELVKIGKEKLAHGHLKQTKSKVALQAQIENHKVFFQKLVADMLLIQAYSAKILPSLLQNRETFWAEQVTEVKILEEKSRQCGMKLQSLLQKWEEFDENYASLEKDLEILISTLPSVSLVEETEERLVERISFYQQIKRNIGGKHARLYQTLNEGKQLVASVSCPELEGQIAKLEEQWLSLNKKIDHELHRLQALLKHLLSYNRDSDQLTKWLESSQHTLNYWKEQSLNVSQDLDTIRSNINNFFEFSKEVDEKSSLKTAVISIGNQLLHLKETDTATLRASLAQFEQKWTMLITQLPDIQEKLHQLQMEKLPSRKAITEMISWMNNVEHQTSDEDSVHSPSSASQVKHLLQKHKEFRMEMDYKQWIVDFVNQSLLQLSTCDVESKRYERTEFAEHLGEMNRQWHRVHGMLNRKIQHLEQLLESITESENKIQILNNWLEAQEERLKTLQKPESVISVQKLLLDCQDIENQLAIKSKALDELKQSYLTLESGAVPLLEDTASRIDELFQKRSSVLTQVNQLKTSMQSVLQEWKIYDQLYDEVNMMTIRFWYCMEHSKPVVLSLETLRCQVENLQSLQDEAESSEGSWEKLQEVIGKLKGLCPSVAEIIEEKCQNTHKRWTQVNQAIADQLQKAQSLLQLWKAYSNAHGEAAARLKQQEAKFQQLANISMSGNNLAEILPPALQDIKELQHDVQKTKEAFLQNSSVLDRLPQPAESSTHMLLPGPLHSLQRAAYLEKMLLVKANEFEFVLSQFKDFGVRLESLKGLIMHEEENLDRLHQQEKENPDSFLNHVLALTAQSPDIEHLNEVSLKLPLSDVAVKTLQNMNRQWIRATATALERCSELQGIGLNEKFLYCCEKWIQLLEKIEEALKVDVANSLPELLEQQKTYKMLEAEVSINQTIADSYVTQSLQLLDTTEIENRPEFITEFSKLTDRWQNAVQGVRQRKGDVDGLVRQWQDFTTSVENLFRFLTDTSHLLSAVKGQERFSLYQTRSLIHELKNKEIHFQRRRTTCALTLEAGEKLLLTTDLKTKESVGRRISQLQDSWKDMEPQLAEMIKQFQSTVETWDQCEKKIKELKSRLQVLKAQSEDPLPELHEDLHNEKELIKELEQSLASWTQNLKELQTMKADLTRHVLVEDVMVLKEQIEHLHRQWEDLCLRVAIRKQEIEDRLNTWVVFNEKNKELCAWLVQMENKVLQTADISIEEMIEKLQKDCMEEINLFSENKLQLKQMGDQLIKASNKSRAAEIDDKLNKINDRWQHLFDVIGSRVKKLKETFAFIQQLDKNMSNLRTWLARIESELSKPVVYDVCDDQEIQKRLAEQQDLQRDIEQHSAGVESVFNICDVLLHDSDACANETECDSIQQTTRSLDRRWRNICAMSMERRMKIEETWRLWQKFLDDYSRFEDWLKSAERTAACPNSSEVLYTSAKEELKRFEAFQRQIHERLTQLELINKQYRRLARENRTDTASRLKQMVHEGNQRWDNLQRRVTAVLRRLRHFTNQREEFEGTRESILVWLTEMDLQLTNVEHFSESDADDKMRQLNGFQQEITLNTNKIDQLIVFGEQLIQKSEPLDAVLIEDELEELHRYCQEVFGRVSRFHRRLTSCTPGLEDEKEASENETDMEDPREIQTDSWRKRGESEEPSSPQSLCHLVAPGHERSGCETPVSVDSIPLEWDHTGDVGGSSSHEEDEEGPYYSALSDVEIPENPEAYLKMTTKTLKASSGKSISDGHSWHVPDSPSCPEHHYKQMEGDRNVPPVPPASSTPYKPPYGKLLLPPGTDGGKEGPRVLNGNPQQEDGGLAGITEQQSGAFDRWEMIQAQELHNKLKIKQNLQQLNSDISAITTWLKKTEAELEMLKMAKPPSDIQEIELRVKRLQEILKAFDTYKALVVSVNVSSKEFLQTESPESTELQSRLRQLSLLWEAAQGAVDSWRGGLRQSLMQCQDFHQLSQNLLLWLASAKNRRQKAHVTDPKADPRALLECRRELMQLEKELVERQPQVDMLQEISNSLLIKGHGEDCIEAEEKVHVIEKKLKQLREQVSQDLMALQGTQNPASPLPSFDEVDSGDQPPATSVPAPRAKFRAVRTTEGEEETESRVPGSTRPQRSFLSRVVRAALPLQLLLLLLLLLACLLPSSEEDYSCTQANNFARSFYPMLRYTNGPPPT

SEQ ID NO: 20608 - protein, 1804 aa, Homo sapiens
MTSLKRSQTERPLATDRASVVGTDGTPKVHTDDFYMRRFRSQNGSLGSSVMAPVGPPRSEGSHHITSTPGVPKMGVRARIADWPPRKENIKESSRSSQEIETSSCLDSLSSKSSPVSQGSSVSLNSNDSAMLKSIQNTLKNKTRPSENMDSRFLMPEAYPSSPRKALRRIRQRSNSDITISELDVDSFDECISPTYKTGPSLHREYGSTSSIDKQGTSGESFFDLLKGYKDDKSDRGPTPTKLSDFLITGGGKGSGFSLDVIDGPISQRENLRLFKEREKPLKRRSKSETGDSSIFRKLRNAKGEELGKSSDLEDNRSEDSVRPWTCPKCFAHYDVQSILFDLNEAIMNRHNVIKRRNTTTGASAAAVASLVSGPLSHSASFSSPMGSTEDLNSKGSLSMDQGDDKSNELVMSCPYFRNEIGGEGERKISLSKSNSGSFSGCESASFESTLSSHCTNAGVAVLEVPKENLVLHLDRVKRYIVEHVDLGAYYYRKFFYQKEHWNYFGADENLGPVAVSIRREKPDEMKENGSPYNYRIIFRTSELMTLRGSVLEDAIPSTAKHSTARGLPLKEVLEHVVPELNVQCLRLAFNTPKVTEQLMKLDEQGLNYQQKVGIMYCKAGQSTEEEMYNNESAGPAFEEFLQLLGERVRLKGFEKYRAQLDTKTDSTGTHSLYTTYKDYEIMFHVSTMLPYTPNNKQQLLRKRHIGNDIVTIVFQEPGAQPFSPKNIRSHFQHVFVIVRVHNPCSDSVCYSVAVTRSRDVPSFGPPIPKGVTFPKSNVFRDFLLAKVINAENAAHKSEKFRAMATRTRQEYLKDLAEKNVTNTPIDPSGKFPFISLASKKKEKSKPYPGAELSSMGAIVWAVRAEDYNKAMELDCLLGISNEFIVLIEQETKSVVFNCSCRDVIGWTSTDTSLKIFYERGECVSVGSFINIEEIKEIVKRLQFVSKGCESVEMTLRRNGLGQLGFHVNYEGIVADVEPYGYAWQAGLRQGSRLVEICKVAVATLSHEQMIDLLRTSVTVKVVIIPPHDDCTPRRSCSETYRMPVMEYKMNEGVSYEFKFPFRNNNKWQRNASKGPHSPQVPSQVQSPMTSRLNAGKGDGKMPPPERAANIPRSISSDGRPLERRLSPGSDIYVTVSSMALARSQCRNSPSNLSSSSDTGSVGGTYRQKSMPEGFGVSRRSPASIDRQNTQSDIGGSGKSTPSWQRSEDSIADQMAYSYRGPQDFNSFVLEQHEYTEPTCHLPAVSKVLPAFRESPSGRLMRQDPVVHLSPNKQGHSDSHYSSHSSSNTLSSNASSAHSDEKWYDGDRTESELNSYNYLQGTSADSGIDTTSYGPSHGSTASLGAATSSPRSGPGKEKVAPLWHSSSEVISMADRTLETESHGLDRKTESSLSLDIHSKSQAGSTPLTRENSTFSINDAASHTSTMSSRHSASPVVFTSARSSPKEELHPAAPSQLAPSFSSSSSSSSGPRSFYPRQGATSKYLIGWKKPEGTINSVGFMDTRKRHQSDGNEIAHTRLRASTRDLRASPKPTSKSTIEEDLKKLIDLESPTPESQKSFKFHALSSPQSPFPSTPTSRRALHRTLSDESIYNSQREHFFTSRASLLDQALPNDVLFSSTYPSLPKSLPLRRPSYTLGMKSLHGEFSASDSSLTDIQETRRQPMPDPGLMPLPDTAADLDWSNLVDAAKAYEVQRASFFAASDENHRPLSAASNSDQLEDQALAQMKPYSSSKDSSPTLASKVDQLEGMLKMLREDLKKEKEDKAHLQAEVQHLREDNLRLQEESQNASDKLKKFTEWVFNTIDMS

SEQ ID NO: 20609 - protein, 141 aa, Homo sapiens
MAELQEVQITEEKPLLPGQTPEAAKEAELAARILLDQGQTHSVETPYGSVTFTVYGTPKPKRPAILTYHDVGLNYKSCFQPLFQFEDMQEIIQNFVRVHVDAPGMEEGAPVFPLGYQYPSLDQLADMIPCVLQYLNFSTII

SEQ ID NO: 20610 - protein, 234 aa, Homo sapiens
MVSESDFSKDVAVQVLPLDKIEENNKQKANDIFISQYTMGQKDALRTVLKQKAQSMPVFKEVKVHLLEDAGIEKDAVTQETRISPSGIDSATTVAAATAAAIATAAPLIKVQSDLEAKVNSVTELLSKLQETDKHLQRVTEQQTSIQRKQEKLHCHDHEKQMNVFMEQHIRHLEKLQQQQIDIQTHFISAALKTSSFQPVSMPSSRAVEKYSVKPEHPNLGSCNPSLYNTFASK

SEQ ID NO: 20611 - protein, 920 aa, Homo sapiens
MTTLDHVIATHQSEWVSFNEEPPFPAHSQGGTEEHLPGLSSSPDQSESSSGENHVVDGGSQDHSHSEQDDSSEKMGLISEAASPPGSPEQPPPDLASAISNWVQFEDDTPWASTSPPHQETAETALPLTMPCWTCPSFDSLGRCPLTSESSWTTHSEDTSSPSFGCSYTDLQLINAEEQTSGQASGADSTDNSSSLQEDEEVEMEAISWQASSPAMNGHPAPPVTSARFPSWVTFDDNEVSCPLPPVTSPLKPNTPPSASVIPDVPYNSMGSFKKRDRPKSTLMNFSKVQKLDISSLNRTPSVTEASPWRATNPFLNETLQDVQPSPINPFSAFFEEQERRSQNSSISSTTGKSQRDSLIVIYQDAISFDDSSKTQSHSDAVEKLKQLQIDDPDHFGSATLPDDDPVAWIELDAHPPGSARSQPRDGWPMMLRIPEKKNIMSSRHWGPIFVKLTDTGYLQLYYEQGLEKPFREFKLEICHEISEPRLQNYDENGRIHSLRIDRVTYKEKKKYQPKPAVAHTAEREQVIKLGTTNYDDFLSFIHAVQDRLMDLPVLSMDLSTVGLNYLEEEITVDVRDEFSGIVSKGDNQILQHHVLTRIHILSFLSGLAECRLGLNDILVKGNEIVLRQDIMPTTTTKWIKLHECRFHGCVDEDVFHNSRVILFNPLDACRFELMRFRTVFAEKTLPFTLRTATSVNGAEVEVQSWLRMSTGFSANRDPLTQVPCENVMIRYPVPSEWVKNFRRESVLGEKSLKAKVNRGASFGSTSVSGSEPVMRVTLGTAKYEHAFNSIVWRINRLPDKNSASGHPHCFFCHLELGSDREVPSRFANHVNVEFSMPTTSASKASVRSISVEDKTDVRKWVNYSAHYSYQTTETDNLPNPLYCSCLPHTDLKRGSKRVVKIRWNASLEVPLASSIRTMV

SEQ ID NO: 20612 - protein, 465 aa, Homo sapiens
MAQGSGDQRAVGVADPEESSPNMIVYCKIEDIITKMQDDKTGGVPIRTVKSFLSKIPSVVTGTDIVQWLMKNLSIEDPVEAIHLGSLIAAQGYIFPISDHVLTMKDDGTFYRFQAPYFWPSNCWEPENTDYAIYLCKRTMQNKARLELADYEAENLARLQRAFARKWEFIFMQAEAQVKIDRKKDKTERKILDSQERAFWDVHRPVPGCVNTTEMDIRKCRRLKNPQKVKKSVYGVTEESQAQSPVHVLSQPIRKTTKEDIRKQITFLNAQIDRHCLKMSKVAESLIAYTEQYVEYDPLITPAEPSNPWISDDVALWDIEMSKEPSQQRVKRWGFSFDEILKDQVGRDQFLRFLESEFSSENLRFWLAVQDLKKQPLQDVAKRVEEIWQEFLAPGAPSAINLDSHSYEITSQNVKDGGRYTFEDAQEHIYKLMKSDSYARFLRSNAYQDLLLAKKKKVSKVVELP

SEQ ID NO: 20613 - protein, 2596 aa, Homo sapiens
MSTKAEQFASKIRYLQEYHNRVLHNIYPVPSGTDIANTLKYFSQTLLSILSRTGKKENQDASNLTVPMTMCLFPVPFPLTPSLRPQVSSINPTVTRSLLYSVLRDAPSERGPQSRDAQLSDYPSLDYQGLYVTLVTLLDLVPLLQHGQHDLGQSIFYTTTCLLPFLNDDILSTLPYTMISTLATFPPFLHKDIIEYLSTSFLPMAILGSSRREGVPAHVNLSASSMLMIAMQYTSNPVYHCQLLECLMKYKQEVWKDLLYVIAYGPSQVKPPAVQMLFHYWPNLKPPGAISEYRGLQYTAWNPIHCQHIECHNAINKPAVKMCIDPSLSVALGDKPPPLYLCEECSERIAGDHSEWLIDVLLPQAEISAICQKKNCSSHVRRAVVTCFSAGCCGRHGNRPVRYCKRCHSNHHSNEVGAAAETHLYQTSPPPINTRECGAEELVCAVEAVISLLKEAEFHAEQREHELNRRRQLGLSSSHHSLDNADFDNKDDDKHDQRLLSQFGIWFLVSLCTPSENTPTESLARLVAMVFQWFHSTAYMMDDEVGSLVEKLKPQFVTKWLKTVCDVRFDVMVMCLLPKPMEFARVGGYWDKSCSTVTQLKEGLNRILCLIPYNVINQSVWECIMPEWLEAIRTEVPDNQLKEFREVLSKMFDIELCPLPFSMEEMFGFISCRFTGYPSSVQEQALLWLHVLSELDIMVPLQLLISMFSDGVNSVKELANQRKSRVSELAGNLASRRVSVASDPGRRVQHNMLSPFHSPFQSPFRSPLRSPFRSPFKNFGHPGGRTIDFDCEDDEMNLNCFILMFDLLLKQMELQDDGITMGLEHSLSKDIISIINNVFQAPWGGSHTCQKDEKAIECNLCQSSILCYQLACELLERLAPKEESRLVEPTDSLEDSLLSSRPEFIIGPEGEEEENPASKHGENPGNCTEPVEHAAVKNDTERKFCYQQLPVTLRLIYTIFQEMAKFEEPDILFNMLNCLKILCLHGECLYIARKDHPQFLAYIQDHMLIASLWRVVKSEFSQLSSLAVPLLLHALSLPHGADIFWTIINGNFNSKDWKMRFEAVEKVAVICRFLDIHSVTKNHLLKYSLAHAFCCFLTAVEDVNPAVATRAGLLLDTIKRPALQGLCLCLDFQFDTVVKDRPTILSKLLLLHFLKQDIPALSWEFFVNRFETLSLEAQLHLDCNKEFPFPTTITAVRTNVANLSDAALWKIKRARFARNRQKSVRSLRDSVKGPVESKRALSLPETLTSKIRQQSPENDNTIKDLLPEDAGIDHQTVHQLITVLMKFMAKDESSAESDISSAKAFNTVKRHLYVLLGYDQQEGCFMIAPQKMRLSTCFNAFIAGIAQVMDYNINLGKHLLPLVVQVLKYCSCPQLRHYFQQPPRCSLWSLKPHIRQMWLKALLVILYKYPYRDCDISKILLHLIHITVNTLNAQYHSCKPHATAGPLYSDNSNISRYSEKEKGEIELAEYRETGALQDSLLHCVREESIPKKKLRSFKQKSLDIGNADSLLFTLDEHRRKSCIDRCDIEKPPTQAAYIAQRPNDPGRSRQNSATRPDNSEIPENPAMEGFPDARRPVIPEVRLNCMETFEVKVDSPVKPAPKEDLDLIDLSSDSTSGPEKHSILSTSDSDSLVFEPLPPLRIVESDEEEETMNQGDDGPSGKNAASSPSVPSHPSVLSLSTAPLVQVSVEDCSKDFSSKDSGNNQSAGNTDSALITLEDPMDAEGSSKPEELPEFSCGSPLTLKQKRDLLQKSFALPEMSLDDHPDPGTEGEKPGELMPSSGAKTVLLKVPEDAENPTESEKPDTSAESDTEQNPERKVEEDGAEESEFKIQIVPRQRKQRKIAVSAIQREYLDISFNILDKLGEQKDPDPSTKGLSTLEMPRESSSAPTLDAGVPETSSHSSISKQIQPGKRQCNVPTCLNPDLEGQPLRMRGATKSSLLSAPSIVSMFVPAPEEFTDEQPTVMTDKCHDCGAILEEYDEETLGLAIVVLSTFIHLSPDLAAPLLLDIMQSVGRLASSTTFSNQAESMMVPGNAAGVAKQFLRCIFHQLAPNGIFPQLFQSTIKDGTFLRTLASSLMDFNELSSIAALSQLLEGLNNKKNLPAGGAMIRCLENIATFMEALPMDSPSSLWTTISNQFQTFFAKLPCVLPLKCSLDSSLRIMICLLKIPSTNATRSLLEPFSKLLSFVIQNAVFTLAYLVELCGLCYRAFTKERDKFYLSRSVVLELLQALKLKSPLPDTNLLLLVQFICADAGTKLAESTILSKQMIASVPGCGTAAMECVRQYINEVLDFMADMHTLTKLKSHMKTCSQPLHEDTFGGHLKVGLAQIAAMDISRGNHRDNKAVIRYLPWLYHPPSAMQQGPKEFIECVSHIRLLSWLLLGSLTHNAVCPNASSPCLPIPLDAGSHVADHLIVILIGFPEQSKTSVLHMCSLFHAFIFAQLWTVYCEQSAVATNLQNQNEFSFTAILTALEFWSRVTPSILQLMAHNKVMVEMVCLHVISLMEALQECNSTIFVKLIPMWLPMIQSNIKHLSAGLQLRLQAIQNHVNHHSLRTLPGSGQSSAGLAALRKWLQCTQFKMAQVEIQSSEAASQFYPL

SEQ ID NO: 20614 - protein, 724 aa, Homo sapiens
MLSGLIEEKSKLLEKFSLVQKEYEGYEVESSLKDASFEKEATEAQSLEATCEKLNRSNSELEDEILCLEKELKEEKSKHSEQDELMADISKRIQSLEDESKSLKSQVAEAKMTFKIFQMNEERLKIAIKDALNENSQLQESQKQLLQEAEVWKEQVSELNKQKVTFEDSKVHAEQVLNDKESHIKTLTERLLKMKDWAAMLGEDITDDDNLELEMNSESENGAYLDNPPKGALKKLIHAAKLNASLKTLEGERNQIYIQLSEVDKTKEELTEHIKNLQTEQASLQSENTHFENENQKLQQKLKVMTELYQENEMKLHRKLTVEENYRLEKEEKLSKVDEKISHATEELETYRKRAKDLEEELERTIHSYQGQIISHEKKAHDNWLAARNAERNLNDLRKENAHNRQKLTETELKFELLEKDPYALDVPNTAFGREHSPYGPSPLGWPSSETRAFLSPPTLLEGPLRLSPLLPGGGGRGSRGPGNPLDHQITNERGESSCDRLTDPHRAPSDTGSLSPPWDQDRRMMFPPPGQSYPDSALPPQRQDRFCSNSGRLSGPAELRSFNMPSLDKMDGSMPSEMESSRNDTKDDLGNLNVPDSSLPAENEATGPGFVPPPLAPIRGPLFPVDARGPFLRRGPPFPPPPPGAMFGASRDYFPPGDFPGPPPAPFAMRNVYPPRGFPPYLPPRPGFFPPPPHSEGRSEFPSGLIPPSNEPATEHPEPQQET

SEQ ID NO: 20615 - protein, 279 aa, Homo sapiens
MSQEGDYGRWTISSSDESEEEKPKPDKPSTSSLLCARQGAANEPRYTCSEAQKAAHKRKISPVKFSNTDSVLPPKRQKSGSQEDLGWCLSSSDDELQPEMPQKQAEKVVIKKEKDISAPNDGTAQRTENHGAPACHRLKEEEDEYETSGEGQDIWDMLDKGNPFQFYLTRVSGVKPKYNSGALHIKDILSPLFGTLVSSAQFNYCFDVDWLVKQYPPEFRKKPILLVHGDKREAKAHLHAQAKPYENISLCQAKLDIAFGTHHTKMMLLLYEEGLRVVI

SEQ ID NO: 20616 - protein, 577 aa, Homo sapiens
MKIKSSWDIDGRATKRRKKSGDLKKAKVQVERMREVNSRCYQPEPFACGIEHCSVHYVSDSGDGVYAGRPLSVIQMVAFLEQRASALLASCSKNCTNSPAIVRFSGQSRGVPAVSESYSAPGACEEPTERGNLEVGEPQSEPVRVLDMVAKLESECLKRQGQREPGSLSRNNSFRRNVGRVLLANSTQADEGKTKKGVLEAPDTQVNPVGSVSVDCGPSRADRCSPKEDQAWDGASQDCPPLPAGVSFHIDSAELEPGSQTAVKNSNRYDVEMTDELVGLPFSSHTYSQASELPTDAVDCMSRELVSLTSRNPDQRKESLCISITVSKVDKDQPSILNSCEDPVPGMLFFLPPGQHLSDYSQLNESTTKESSEASQLEDAAGGDSASEEKSGSAEPFVLPASSVESTLPVLEASSWKKQVSHDFLETRFKIQQLLEPQQYMAFLPHHIMVKIFRLLPTKSLVALKCTCCYFKFIIEYYNIRPADSRWVRDPRYREDPCKQCKKKYVKGDVSLCRWHPKPYCQALPYGPGYWMCCHRSQKGFPGCKLGLHDNHWVPACHSFNRAIHKKAKGTEAEEEY

SEQ ID NO: 20617 - protein, 949 aa, Homo sapiens
MRAVRRGLREGGAMAAARDPPEVSLREATQRKLRRFSELRGKLVARGEFWDIVAITAADEKQELAYNQQLSEKLKRKELPLGVQYHVFVDPAGAKIGNGGSTLCALQCLEKLYGDKWNSFTILLIHSDEWKKKVSESYVITIERLEDDLQIKEKELTELRNIFGSDEAFSKVNLNYRTENGLSLLHLCCICGGKKSHIRTLMLKGLRPSRLTRNGFTALHLAVYKDNAELITSLLHSGADIQQVGYGGLTALHIATIAGHLEAADVLLQHGANVNIQDAVFFTPLHIAAYYGHEQVTRLLLKFGADVNVSGEVGDRPLHLASAKGFLNIAKLLMEEGSKADVNAQDNEDHVPLHFCSRFGHHDIVKYLLQSDLEVQPHVVNIYGDTPLHLACYNGKFEVAKEIIQISGTESLTKENIFSETAFHSACTYGKSIDLVKFLLDQNVININHQGRDGHTGLHSACYHGHIRLVQFLLDNGADMNLVACDPSRSSGEKDEQTCLMWAYEKGHDAIVTLLKHYKRPQDELPCNEYSQPGGDGSYVSVPSPLGKIKSMTKEKADILLLRAGLPSHFHLQLSEIEFHEIIGSGSFGKVYKGRCRNKIVAIKRYRANTYCSKSDVDMFCREVSILCQLNHPCVIQFVGACLNDPSQFAIVTQYISGGSLFSLLHEQKRILDLQSKLIIAVDVAKGMEYLHNLTQPIIHRDLNSHNILLYEDGHAVVADFGESRFLQSLDEDNMTKQPGNLRWMAPEVFTQCTRYTIKADVFSYALCLWEILTGEIPFAHLKPAAAAADMAYHHIRPPIGYSIPKPISSLLIRGWNACPEGRPEFSEVVMKLEECLCNIELMSPASSNSSGSLSPSSSSDCLVNRGGPGRSHVAALRSRFELEYALNARSYAALSQSAGQYSSQGLSLEEMKRSLQYTPIDKYGYVSDPMSSMHFHSCRNSSSFEDSS

SEQ ID NO: 20618 - protein, 484 aa, Homo sapiens
MSRSTQELLGYHCRLQDKLQEQEGSLAAEGRHSLASAADHMKVVPSLLLSVLLAQVWLVPGLAPSPQSPETPAPQNQTSRVVQAPKEEEEDEQEASEEKASEEEKAWLMASRQQLAKETSNFGFSLLRKISMRHDGNMVFSPFGMSLAMTGLMLGATGPTETQIKRGLHLQALKPTKPGLLPSLFKGLRETLSRNLELGLTQGSFAFIHKDFDVKETFFNLSKRYFDTECVPMNFRNASQAKRLMNHYINKETRGKIPKLFDEINPETKLILVDYILFKGKWLTPFDPVFTEVDTFHLDKYKTIKVPMMYGAGKFASTFDKNFRCHVLKLPYQGNATMLVVLMEKMGDHLALEDYLTTDLVETWLRNMKTRNMEVFFPKFKLDQKYEMHELLRQMGIRRIFSPFADLSELSATGRNLQVSRVLQRTVIEVDERGTEAVAGILSEITAYSMPPVIKVDRPFHFMIYEETSGMLLFLGRVVNPTLL

SEQ ID NO: 20619 - protein, 398 aa, Homo sapiens
LWLLVLCALLLLLVQLLRFLRADGDLTLLWAEWQGRRPEWELTDMVVWVTGASSGIGEELAYQLSKLGVSLVLSARRVHELERVKRRCLENGNLKEKDILVLPLDLTDTGSHEAATKAVLQEFGRIDILVNNGGMSQRSLCMDTSLDVYRKLIELNYLGTVSLTKCVLPHMIERKQGKIVTVNSILGIISVPLSIGYCASKHALRGFFNGLRTELATYPGIIVSNICPGPVQSNIVENSLAGEVTKTIGNNGDQSHKMTTSRCVRLMLISMANDLKEVWISEQPFLLVTYLWQYMPTWAWWITNKMGKKRIENFKSGVVRPISKFLNSMYQSCRKVQNFPVFKKLSGWVQWLMSVIPALWEAKADHLRPGVQDQPGQHSETPSLLKIQKVAGHGGACL

SEQ ID NO: 20620 - protein, 756 aa, Homo sapiens
MAGSDAEWVTIANNLLFKCHIHLRIHELQDCDANVFIALYQSILGEKVPDLIVIPRSQEDDAHNVQAVIDSLALDYLQVSLSHITALYSVSRRKYSERRMLGPSWDGDEAESTGEIIRLGDTAHTFSLRSNGAQCPNEMLSKKALASPSSKSHEDMLYPPSVLSKSRTSFVEDTETLSVSGIPNARKLGEPIRAAIPLHPPYHPSEPRAPCPIGKEYLHSSHCSPAVNSTGEHTEFSGDLDDGLFLISKLPKGSKWEVYPAQVQGPRTRKPPKGKRNENRATASSCNSPFPQRPRKRLTEQELHDVSEKLSQRLSELDWMLKSALGDRIKEKTDHKEENTGNEEVEDGTEETLSQHSDGIVEYGPKKSRPGLSMRRKPPYRSHSLSPSPVNKHKQFHLERKRQRKPRETDVRQFQAQAFTEAFERELRRHKVQENIGPLRIHEKEEETVGKNIQRRSFVKELQNVVSPGRFTLEKPQRRVRGGLPKPNKAVPMKVSEHSLLPLMLEQFPFLYVSGPTLSKMWKQQIAQVEQLKKEACRENRSKKKLQDEIEEALRRHDLLTTLVKKEYEHNKRLQDFKDCIRRQRLTQSKIKENRQQIVRARKYYDDYRVQLCAKMMRMRTREEMIFKKLFEEGLNIQKQRLRDLRNYAKEKRDEQRRRHQDELDSMENYYKDQFSLLAEAISQEHQELKAREKSQAQTLHKVKRELRSKMEKEIQQLQDMITQNDDDVFFRELEAERFRSRLQLASFQYSKSPSL

SEQ ID NO: 20621 - protein, 118 aa, Homo sapiens
SPKQFSVKEFYLKIIPWRLYTFRVCPGTKFSYLGPDPVHKLLTLVVDDGIQPPVELSCKERNILAATFIRSLHKNIGGSETFQDKVNFFQRELRQVHMKRPHSKVTLKVSRHALLESE

SEQ ID NO: 20622 - protein, 138 aa, Homo sapiens
MSGCRVFIGRLNPAAREKDVERFFKGYGRIRDIDLKRGFGFVEFEDPRDADDAVYELDGKELCSERVTIEHARARSRGGRGRGRYSDRFSSRRPRNDRRNAPPVRTENRLIVENLSSRVSWQPVCVVGLMTRSACGLS

SEQ ID NO: 20623 - protein, 553 aa, Homo sapiens
NKNKKEKESPKAGKSGKSSKEGQDTVESEGTSPEEPSSPKVPPPLLPELLVLIFGGLQGRDVPPADQEKLFIQKLRQCCVLFDFVSDPLSDLKWKEVKRAALSEMVEYITHNRNVITEPIYPEVVHMFAVNMFRTLPPSSNPTGAEFDPEEDEPTLEAAWPHLQLVYEFFLRFLESPDFQPNIAKKYIDQKFVLQLLELFDSEDPRERDFLKTTLHRIYGKFLGLRAYIRKQINNIFYRFIYETEHHNGIAELLEILGSIINGFALPLKEEHKIFLLKVLLPLHKVKSLSVYHPQLAYCVVQFLEKDSTLTEPVVMALLKYWPKTHSPKEVMFLNELEEILDVIEPSEFVKIMEPLFRQLAKCVSSPHFQVAERALYYWNNEYIMSLISDNAAKILPIMFPSLYRNSKTHWNKTIHGLIYNALKLFMEMNQKLFDDCTQQFKAEKLKEKLKMKEREEAWVKIENLAKANPQYTVYSQASTMSIPVAMETDGPLFEDVQMLRKTVKDEAHQAQKDPKKDRPLARRKSELPQDPHTKKALEAHCRADELASQDGR

SEQ ID NO: 20624 - protein, 472 aa, Homo sapiens
MAQGSGDQRAVGVADPEESSPNMIVYCKIEDIITKMQDDKTGGVPIRTVKSFLSKIPSVVTGTDIVQWLMKNLSIEDPVEAIHLGSLIAAQGYIFPISDHVLTMKDDGTFYRFQAPYFWPSNCWEPENTDYAIYLCKRTMQNKARLELADYEAENLARLQRAFARKWEFIFMQAEAQVKIDRKKDKTERKILDSQERAFWDVHRPVPGCVNTTEMDIRKCRRLKNPQKVKKSVYGVTEESQAQSPVHVLSQPIRKTTKEDIRKQITFLNAQIDRHCLKMSKVAESLIAYTEQYVEYDPLITPAEPSNPWISDDVALWDIEMSKEPSQQRVKRWGFSFDEILKDQVGRDQFLRFLESEFSSENLRFWLAVQDLKKQPLQDVAKRVEEIWQEFLAPGAPSAINLDSHSYEITSQNVKDGGRYTFEDAQEHIYKLMKSDSYARFLRSNAYQDLLLAKKKGKSLAGKRLTGLMQSS

SEQ ID NO: 20625 - protein, 97 aa, Homo sapiens
MLFWSSKGKARADQVLCSWGIHFSSSLMEDASKRKFRALEKARSSAQLQTNYPSSDNSLYTNAKGSTISAFDGGSDSSSESEPEEPQSRKKLRMEAS

SEQ ID NO: 20626 - protein, 522 aa, Homo sapiens
MRRRVHQINGHKFMATYLRQPTYCSHCREFIWGVFGKQGYQCQVCTCVVHKRCHHLIVTACTCQNNINKVDSKIAEQRFGINIPHKFSIHNYKVPTFCDHCGSLLWGIMRQGLQCKICKMNVHIRCQANVAPNCGVNAVELAKTLAGMGLQPGNISPTSKLVSRSTLRRQGKESSKEGNGIGVNSSNRLGIDNFEFIRVLGKGSFGKVMLARVKETGDLYAVKVLKKDVILQDDDVECTMTEKRILSLARNHPFLTQLFCCFQTPDRLFFVMEFVNGGDLMFHIQKSRRFDEARARFYAAEIISALMFLHDKGIIYRDLKLDNVLLDHEGHCKLADFGMCKEGICNGVTTATFCGTPDYIAPEILQEMLYGPAVDWWAMGVLLYEMLCGHAPFEAENEDDLFEAILNDEVVYPTWLHEDATGILKSFMTKNPTMRLGSLTQGGEHAILRHPFFKEIDWAQLNHRQIEPPFRPRIKSREDVSNFDPDFIKEEPVLTPIDEGHLPMINQDEFRNFSYVSPELQP

SEQ ID NO: 20627 - protein, 419 aa, Homo sapiens
TQAMALETPTPGPPREGQSPASQAGTQHPPAQATAHSQSSPEFKGSLASLSDSLGVSVMATDQDSYSTSSTEEELEQFSSPSVKKKPSMILGKARHRLSFASFSSMFHAFLSNNRKLYKKVVELAQDKGSYFGSLVQDYKVYSLEMMARQTSSTEMLQEIRTMMTQLKSYLLQSTELKALVDPALHSEEELEAIVESALYKCVLKPLKEAINSCLHQIHSKDGSLQQLKENQLVILATTTTDLGVTTSVPEVPMMEKILQKFTSMHKAYSPEKKISILLKTCKLIYDSMALGNPGKPYGADDFLPVLMYVLARSNLTEMLLNVEYMMELMDPALQLGEGSYYLTTTYGALEHIKSYDKITVTRQLSVEVQDSIHRWERRRTLNKARASRSSVQVRPESGRGPVGPCPRHHPCCLLAKEP

SEQ ID NO: 20628 - protein, 253 aa, Homo sapiens
MALTVHFEEAATAKERSKVAKIGAFCCGLSLCNQHTIILYVLCIIPWILFQLLKKKELSLGSLLKLSLYFSAGLLPYVHLPISSYLNHARWTWGDQTTLQGFLTHFLREEYGTFSLAKSEIGSSMSEILLSQVTNMRTELSFNIQALAVCANICLATKDRQNPSLVWLFTGMFCIYSLFFAWRANLDISKPLFMGVVERFWMQSNAVVAVLAGIGLAAVVSETNRVLNSNGLQCLEWLSATLFVVYQIYSNYR

SEQ ID NO: 20629 - protein, 793 aa, Homo sapiens
MDLPPERDGEKGRSTKPGFAMPKLALPKMKASKSGVSLPQRDVDPSLSSATAGGSFQDTEKASSDGGRGGLGATASATGSEGVNLHRPQVHIPSLGFAKPDLRSSKAKVEVSQPEADLPLPKHDLSTEGDSRGCGLGDVPVSQPCGEGIAPTPEDPLQPSCRKPDAEVLTVESPEEEAMTKYSQESWFKMPKFRMPSLRRSFRDRGGAGKLEVAQTQAPAATGGEAAAKVKEFLVSGSNVEAAMSLQLPEADAEVTASESKSSTDILRCDLDSTGLKLHLSTAGMTGDELSTSEVRIHPSKGPLPFQMPGMRLPETQVLPGEIDETPLSKPGHDLASMEDKTEKWSSQPEGPLKLKASSTDMPSQISVVNVDQLWEDSVLTVKFPKLMVPRFSFPAPSSEDDVFIPTVREVQCPEANIDTALCKESPGLWGASILKAGAGVPGEQPVDLNLPLEAPPISKVRVHIQGAQVESQEVTIHSIVTPEFVDLSVPRTFSTQIVRESEIPTSEIQTPSYGFSLLKVKIPEPHTQARVYTTMTQHSRTQEGTEEAPIQATPGVDSISGDLQPDTGEPFEMISSSVNVLGQQTLTFEVPSGHQLADSCSDEEPAEILEFPPDDSQEATTPLADEGRAPKDKPESKKSGLLWFWLPNIGFSSSVDETGVDSKNDVQRSAPIQTQPEARPEAELPKKQEKAGWFRFPKLGFSSSPTKKSKSTEDGAELEEQKLQEETITFFDARESFSPEEKEEGELIGPVGTGLDSRVMVTSAARTELILPEQDRKADDESKGSGLGPNEG

SEQ ID NO: 20630 - protein, 781 aa, Homo sapiens
MAGGAGAGADGGAGGGGGGGDGSGPSGSSSGGRSLRGCEDIIAESISLDTLIAILKWSSHPYGSKWVHRQALHFLCEEFSQVMTSDVFYELSKDHLLTAIQSDYLQASEQDILKYLIKWGEHQLMKRIADREPNLLSGTAHSVNKRGVKRRDLDMEELREILSSLLPFVRIEHILPINSEVLSDAMKRGLISTPPSDMLPTTEGGKSNAWLRQKNAGIYVRPRLFSPYVEEAKSVLDEMMVEQTDLVRLRMVRMSNVPDTLYMVNNAVPQCCHMISHQQISSNQSSPPSVVANEIPVPRLLIMKDMVRRLQELRHTEQVQRAYALNCGEGATVSYEIQIRVLREFGLADAAAELLQNPHKFFPDERFGDESPLLTMRQPGRCRVNSTPPAETMFTDLDSFVAFHPPLPPPPPPYHPPATPIHNQLKAGWKQRPPSQHPSRSFSYPCNHSLFHSRTAPKAGPPPVYLPSVKAAPPDCTSTAGLGRQTVAAAAATTTSTATAAAAAASEKQVRTQPVLNDLMPDIAVGVSTLSLKDRRLPELAVDTELSQSVSEAGPGPPQHLSCIPQRHTHTSRKKHTLEQKTDTRENPQEYPDFYDFSNAACRPSTPALSRRTPSPSQGGYFGPDLYSHNKASPSGLKSAYLPGQTSPKKQEEARREYPLSPDGHLHRQKNEPIHLDVVEQPPQRSDFPLAAPENASTGPAHVRGRTAVETDLTFGLTPNRPSLSACSSEAPEERSGRRLADSESLGHGAQRNTDLEREDSISRGRRSPSKPDFLYKKSAL

SEQ ID NO: 20631 - protein, 1327 aa, Homo sapiens
DLLEQQDIDLSPDLAATYGPTEEAAQKVKHYYRFWILPQLWIGINFDRLTLLALFDRNREILENVLAVILAILVAFLGSILLIQGFFRDIWVFQFCLVIASCQYSLLKSVQPDSSSPRHGHNRIIAYSRPVYFCICCGLIWLLDYGSRNLTATKFKLYGITFTNPLVFISARDLVIVFTLCFPIVFFIGLLPQVNTFVMYLCEQLDIHIFGGNATTSLLAALYSFICSIVAVALLYGLCYGALKDSWDGQHIPVLFSIFCGLLVAVSYHLSRQSSDPSVLFSLVQSKIFPKTEEKNPEDPLSEVKDPLPEKLRNSVSERLQSDLVVCIVIGVLYFAIHVSTVFTVLQPALKYVLYTLVGFVGFVTHYVLPQVRKQLPWHCFSHPLLKTLEYNQYEVRNAATMMWFEKLHVWLLFVEKNIIYPLIVLNELSSSAETIASPKKLNTELGALMITVAGLKLLRSSFSSPTYQYVTVIFTVLFFKFDYEAFSETMLLDLFFMSILFNKLWELLYKLQFVYTYIAPWQITWGSAFHAFAQPFAVPHSAMLFIQAAVSAFFSTPLNPFLGSAIFITSYVRPVKFWERDYNTKRVDHSNTRLASQLDRNPGTYCQQREVEAITEGVEEDEGFCCCEPGHIPHMLSFNAAFSQRWLAWEVIVTKYILEGYSITDNSAASMLQVFDLRKVLTTYYVKGIIYYVTTSSKLEEWLANETMQEGLRLCADRNYVDVDPTFNPNIDEDYDHRLAGISRESFCVIYLNWIEYCSSRRAKPVDVDKDSSLVTLCYGLCVLGRRALGTASHHMSSNLESFLYGLHALFKGDFRISSIRDEWIFADMELLRKVVVPGIRMSIKLHQDHFTSPDEYDDPTVLYEAIVSHEKNLVIAHEGDPAWRSAVLANSPSLLALRHVMDDGTNEYKIIMLNRRYLSFRVIKVNKECVRGLWAGQQQELVFLRNRNPERGSIQNAKQALRNMINSSCDQPIGYPIFVSPLTTSYSDSHEQLKDILGGPISLGNIRNFIVSTWHRLRKGCGAGCNSGGNIEDSDTGGGTSCTGNNATTANNPHSNVTQGSIGNPGQGSGTGLHPPVTSYPPTLGTSHSSHSVQSGLVRQSPARASVASQSSYCYSSRHSSLRMSTTGFVPCRRSSTSQISLRNLPSSIQSRLSMVNQMEPSGQSGLACVQHGLPSSSSSSQSIPACKHHTLVGFLATEGGQSSATDAQPGNTLSPANNSHSRKAEVIYRVQIVDPSQILEGINLSKRKELQWPDEGIRLKAGRNSWKDWSPQEGMEGHVIHRWVPCSRDPGTRSHIDKAVLLVQIDDKYVTVIETGVLELGAEV

SEQ ID NO: 20632 - protein, 314 aa, Homo sapiens
MNNSQISTVTQFVLLGFPGPWKIQIIFFSMILLVYIFTLTGNMAIICAVRWDHRLHTPMYVLLANFSFLEIWYVTCTVPNMLVNFFSKTKTISFSGCFTQFHFFFSLGTTECFFLCVMAYDRYLAICHPLHYPSIMTGQLCGILVSLCWLIGFLGHSISIFFIFQLPFCGPNIIDHFLCDVDPLMALSSAPTHIIGHVFHSVSSLFINLTMVYILGSYTLVLRTVLUVPSSAGWQKAISTCGSHLVVVSLFYGAIMLMYVSPTPGNSVAMHKLITLIYSVVTPVLNPLIYSLRNKDMKYALHHVFCGMRIIQRS

SEQ ID NO: 20633 - protein, 332 aa, Homo sapiens
MDELAGGGGGGPGMAAPPRQQQGPGGNLGLSPGGNGAAGGGGPPASEGAGPAAGPELSRPQQYTIPGILHYIQHEWARFEMERAHWEVERAELQARIAFLQGERKGQENLKKDLVRRIKMLEYALKQERAKYHKLKYGTELNQGDLKMPTFESEETKDTEAPTAPQNSQLTWKQGRQLLRQYLQEVGYTDTILDVRSQRVRSLLGLSNSEPNGSVETKNLEQILNGGESPKQKGQEIKRSSGDVLETFNFLENADDSDEDEENDMIEGIPEGKDKHRMNKHKIGNEGLAADLTDDPDTEEALKEFDFLVTAEDGEGAGEARSSGDGTEWVAC

SEQ ID NO: 20634 - protein, 490 aa, Homo sapiens
MAQGSGDQRAVGVADPEESSPNMIVYCKIEDIITKMQDDKTGGVPIRTVKSFLSKIPSVVTGTDIVQWLMKNLSIEDPVEAIHLGSLIAAQGYIFPISDHVLTMKDDGTFYRFQAPYFWPSNCWEPENTDYAIYLCKRTMQNKARLELADYEAENLARLQRAFARKWEFIFMQAEAQVKIDRKKDKTERKILDSQERAFWDVHRPVPGCVNTTEMDIRKCRRLKNPQKVKKSVYGVTEESQAQSPVHVLSQPIRKTTKEDIRKQITFLNAQIDRHCLKMSKVAESLIAYTEQYVEYDPLITPAEPSNPWISDDVALWDIEMSKEPSQQRVKRWGFSFDEILKDQVGRDQFLRFLESEFSSENLRFWLAVQDLKKQPLQDVAKRVEEIWQEFLAPGAPSAINLDSHSYEITSQNVKDGGRYTFEDAQEHIYKLMKSDSYARFLRSNAYQDLLLAKKKPESEQGRRTSLEKFTRSVGKSLAGKRLTGLMQSS

SEQ ID NO: 20635 - protein, 1694 aa, Homo sapiens
ELSDYEERIEELENLLQQGGSGVIETDLSKIYEMQKTIQVLQIEKVESTKKMEQLEDKIKDINKKLSSAENDRDILRREQEQLNVEKRQIMEECENLKLECSKLQPSAVKQSDTMTEKERILAQSASVEEVFRLQQALSDAENEIMRLSSLNQEELQMSLLKLNNEYEVIKSTATRDISLDSELHDLRLNLEAKEQELNQSISEKETLIAEIEELDRQNQEATKHMILIKDQLSKQQNEGDSIISKLKQDLNDEKKRVHQLEDDKMDITKELDVQKEKLIQSEVALNDLHLTKQKLEDKVENLVDQLNKSQESNVSIQKENLELKEHIRQNEEELSRIRNELMQSLNQDSNSNFKDTLLKEREAEVRNLKQNLSELEQLNENLKKVAFDVKMENEKLVLACEDVRHQLEECLAGNNQLSLEKNTIVETLKMEKGEIEAELCWAKKRLLEEANKYEKTIEELSNARNLNTSALQLEHEHLIKLNQKKDMEIAELKKNIEQMDTDHKETKDVLSSSLEEQKQLTQLINKKEIFIEKLKERSSKLQEELDKYSQALRKNEILRQTIEEKDRSLGSMKEENNHLQEELERLREEQSRTAPVADPKTLDSVTELASEVSQLNTIKEHLEEEIKHHQKIIEDQNQSKMQLLQSLQEQKKEMDEFRYQHEQMNATHTQLFLEKDEEIKSLQKTIEQIKTQLHEERQDIQTDNSDIFQETKVQSLNIENGSEKHDLSKAETERLVKGIKERELEIKLLNEKNISLTKQIDQLSKDEVGKLTQIIQQKDLEIQALHARISSTSHTQDVVYLQQQLQAYAMEREKVFAVLNEKTRENSHLKTEYHKMMDIVAAKEAALIKLQDENKKLSTRFESSGQDMFRETIQNLSRIIREKDIEIDALSQKCQTLLAVLQTSSTGNEAGGVNSNQFEELLQERDKLKQQVKKMEEWKQQVMTTVQNMQHESAQLQEELHQLQAQVLVDSDNNSKLQVDYTGLIQSYEQNETKLKNFGQELAQVQHSIGQLCNTKDLLLGKLDIISPQLSSASLLTPQSAECLRASKSEVLSESSELLQQELEELRKSLQEKDATIRTLQENNHRLSDSIAATSELERKEHEQTDSEIKQLKEKQDVLQKLLKEKDLLIKAKSDQLLSSNENFTNKVNENELLRQAVTNLKERILILEMDIGKLKGENEKIVETYRGKETEYQALQETNMKFSMMLREKEFECHSMKEKALAFEQLLKEKEQGKTGELNQLLNAVKSMQEKTVVFQQERDQVMLALKQKQMENTALQNEVQRLRDKEFRSNQELERLRNHLLESEDSYTREALAAEDREAKLRKKVTVLEEKLVSSSNAMENASHQASVQVESLQEQLNVVSKQRDETALQLSVSQEQVKQYALSLANLQMVLEHFQQEEKAMYSAELEKQKQLIAEWKKNAENLEGKVISLQECLDEANAALDSASRLTEQLDVKEEQIEELKRQNELRQEMLDDVQKKLMSLANSSEGKVDKVLMRNLFIGHFHTPKNQRHEVLRLMGSILGVRREEMEQLFHDDQGGVTRWMTGWLGGGSKSVPNTPLRPNQQSVVNSSFSELFVKFLETESHPSIPPPKLSVHDMKPLDSPGRRKRDTNAPESFKDTAESRSGRRTDVNPFLAPRSAAVPLINPAGLGPGGPGHLLLKPISDVLPTFTPLPALPDNSAGVVLKDLLKQ

SEQ ID NO: 20636 - protein, 383 aa, Homo sapiens
MVLAMASQDVQNFFQPFSSWISRVYEALQQAGDMLSASLVNISKQDSKLSDKLDQDLDNIQIQETYFEDEEQDNDWSQEDANSLFLEVDHFSCCNSDLQDSAQNSSPSLSQHAKDSCSTMSQWPNWASDDRKLPHVLSSIAEEEHHLEKQRSGLQHGFDSQLPGTLETVNGKKQVNSFGDDEELSTSSDSDEEVIKQFEISVSRSQSFRSVTSEKGKQTGLEQKPKFSRSLLTHGEDGTEVSACEDLDGASQRRYSENLSYGEDDHIPAHSQSPCERGDAKHHGTSHQESSVVQSLRRQSTEGSLEMETAFNSRGFEDSYATDSSSMWSPEANLNLKRKGYLLDVYCLSSPLLFTTSLHRRNRTGPICRCHPGSQSPSQSVVT

SEQ ID NO: 20637 - protein, 837 aa, Homo sapiens
MSAAGTYAWMAPEVIRASMFSKGSDVWSYGVLLWELLTGEVPFRGIDGLAVAYGVAMNKLALPIPSTCPEPFAKLMEDCWNPDPHSRPSFTNILDQLTTIEESGFFEMPKDSFHCLQDNWKHEIQEMFDQLRAKEKELRTWEEELTRAALQQKNQEELLRRREQELAEREIDILERELNIIIHQLCQEKPRVKKRKGKFRKSRLKLKDGNRISLPSDFQHKFTVQASPTMDKRKSLINSRSSPPASPTIIPRLRAIQCETVSQISWGQNTQGHLSPALSSHRLVQACSIHNFCHLSSTMCIYMHILTPGESSKTWGRSSVVPKEEGEEEEKRAPKKKGRTWGPGTLGQKELASGDEGLKSLVDGYKQWSSSAPNLVKGPRSSPALPGFTSLMEMALLAASWVVPIDIEEDEDSEGPGSGESRLQHSPSQSYLCIPFPRGEDGDGPSSDGIHEEPTPVNSATSTPQLTPTNSLKRGGAHHRRCEVALLGCGAVLAATGLGFDLLEAGKCQLLPLEEPEPPAREEKKRREGLFQRSSRPRRSTSPPSRKLFKKEEPMLLLGDPSASLTLLSLSSISECNSTRSLLRSDSDEIVVYEMPVSPVEAPPLSPCTHNPLVNVRVERFKRDPNQSLTPTHVTLTTPSQPSSHRRTPSDGALKPETLLASRSPSSNGLSPSPGAGMLKTPSPSRDPGEFPRLPDPNVVFPPTPRRWNTQQDSTLERPKTLEFLPRPRPSANRQRLDPWWFVSPSHARSTSPANSSSTETPSNLDSCFASSSSTVEERPGLPALLPFQAGPLPPTERTLLDLDAEGQSQDSTVPLCRAELNTHRPAPYEIQQEFWS

SEQ ID NO: 20638 - protein, 172 aa, Homo sapiens
MAELQEVQITEEKPLLPGQTPEAAKEAELAARILLDQGQTHSVETPYGSVTFTVYGTPKPKRPAILTYHDVGLNYKSCFQPLFQFEDMQEIIQNFVRVHVDAPGMEEGAPVFPLGYQYPSLDQLADMIPCVLQYLNFSTIIGVGVGAGAYILARYALNHPDTVEGLVLINID

SEQ ID NO: 20639 - protein, 466 aa, Homo sapiens
MEKILFYLFLIGIAVKAQICPKRCVCQILSPNLATLCAKKGLLFVPPNIDRRTVELRLADNFVTNIKRKDFANMTSLVDLTLSRNTISFITPHAFADLRNLRALHLNSNRLTKITNDMFSGLSNLHHLILNNNQLTLISSTAFDDVFALEELDLSYNNLETIPWDAVEKMVSLHTLSLDHNMIDNIPKGTFSHLHKMTRLDVTSNKLQKLPPDPLFQRAQVLATSGIISPSTFALSFGGNPLHCNCELLWLRRLSREDDLETCASPPLLTGRYFWSIPEEEFLCEPPLITRHTHEMRVLEGQRATLRCKARGDPEPAIHWISPEGKLISNATRSLVYDNGTLDILITTVKDTGAFTCIASNPAGEATQIVDLHIIKLPHLLNSTNHIHEPDPGSSDISTSTKSGSNTSSSNGDTKLSQDKIVVAEATSSTALLKFNFQRNIPGIRMFQIQYNGTYDDTLVYRCFAD

SEQ ID NO: 20640 - protein, 67 aa, Homo sapiens
NEPNSQSKFPIFRFPSSFSSPVGMVFHPRSHFLYAYGNQEWEDTVQSEVLLREFSHYTMITWDSYIS

SEQ ID NO: 20641 - protein, 194 aa, Homo sapiens
MAELQEVQITEEKPLLPGQTPEAAKEAELAARILLDQGQTHSVETPYGSVTFTVYGTPKPKRPAILTYHDVGLNYKSCFQPLFQFEDMQEIIQNFVRVHVDAPGMEEGAPVFPLGYQYPSLDQLADMIPCVLQYLNFSTIIGVGVGAGAYILARYALNHPDTVEGLVLINIDPNAKGWMDWAAHKLTGLTSSIP

SEQ ID NO: 20642 - protein, 1853 aa, Homo sapiens
MAASELYTKFARVWIPDPEEVWKSAELLKDYKPGDKVLLLHLEEGKDLEYHLDPKTKELPHLRNPDILVGENDLTALSYLHEPAVLHNLRVRFIDSKLIYTYCGIVLVAINPYEQLPIYGEDIINAYSGQNMGDMDPHIFAVAEEAYKQMARDERNQSIIVSGESGAGKTVSAKYAMRYFATVSGSASEANVEEKVLASNPIMESIGNAKTTRNDNSSRFGKYIEIGFDKRYRIIGANMRTYLLEKSRVVFQAEEERNYHIFYQLCASAKLPEFKMLRLGNADNFNYTKQGGSPVIEGVDDAKEMAHTRQACTLLGISESHQMGIFRILAGILHLGNVGFTSRDADSCTIPPKHEPLCIFCELMGVDYEEMCHWLCHRKLATATETYIKPISKLQATNARDALAKHIYAKLFNWIVDNVNQALHSAVKQHSFIGVLDIYGFETFEINSFEQFCINYANEKLQQQFNMHVFKLEQEEYMKEQIPWTLIDFYDNQPCINLIESKLGILDLLDEECKMPKGTDDTWAQKLYNTHLNKCALFEKPRLSNKAFIIQHFADKVEYQCEGFLEKNKDTVFEEQIKVLKSSKFKMLPELFQDDEKAISPTSATSSGRTPLTRTPAKPTKGRPGQMAKEHKKTVGHQFRNSLHLLMETLNATTPHYVRCIKPNDFKFPFTFDEKRAVQQLRACGVLETIRISAAGFPSRWTYQEFFSRYRVLMKQKDVLSDRKQTCKNVLEKLILDKDKYQFGKTKIFFRAGQVAYLEKLRADKLRAACIRIQKTIRGWLLRKKYLRMRKAAITMQRYVRGYQARCYAKFLRRTKAATIIQKYWRMYVVRRRYKIRRAATIVLQSYLRGFLARNRYRKILREHKAVIIQKRVRGWLARTHYKRSMHAIIYLQCCFRRMMAKRELKKLKIEARSVERYKKLHIGMENKIMQLQRKVDEQNKDYKCLVEKLTNLEGIYNSETEKLRSDLERLQLSEEEAKVATGRVLSLQEEIAKLRKDLEQTRSEKKCIEEHADRYKQETEQLVSNLKEENTLLKQEKEALNHRIVQQAKEMTETMEKKLVEETKQLELDLNDERLRYQNLLNEFSRLEERYDDLKEEMTLMVHVPKPGHKRTDSTHSSNESEYIFSSEIAEMEDIPSRTEEPSEKKVPLDMSLFLKLQKRVTELEQEKQVMQDELDRKEEQVLRSKAKEEERPQIRGAELEYESLKRQELESENKKLKNELNELRKALSEKSAPEVTAPGAPAYRVLMEQLTSVSEELDVRKEEVLILRSQLVSQKEAIQPKDDKNTMTDSTILLEDVQKMKDKGEIAQAYIGLKETNRLLESQLQSQKRSHENEAEALRGEIQSLKEENNRQQQLLAQNLQLPPEARIEASLQHEITRLTNENLYFEELYADDPKKYQSYRISLYKRMIDLMEQLEKQDKTVRKLKKQLKVFAKKIGELEVGQMENISPGQIIDEPIRPVNIPRKEKDFQGMLEYKKEDEQKLVKNLILELKPRGVAVNLIPGLPAYILFMCVRHADYLNDDQKVRSLLTSTINSIKKVLKKRGDDFETVSFWLSNTCRFLHCLKQYSGEEGFMKHNTSRQNEHCLTNFDLAEYRQVLSDLAIQIYQQLVRVLENILQPMIVSGMLEHETIQGVSGVKPTGLRKRTSSIADEGTYTLDSILRQLNSFHSVMCQHGMDPELIKQVVKQMFYIIGAITLNNLLLRKDMCSWSKGMQIRYNVSQLEEWLRDKNLMNSGAKETLEPLIQAAQLLQVKKKTDDDAEAICSMCNALTTAQIVKVLNLYTPVNEFEERVSVSFIRTIQMRLRDRKDSPQLLMDAKHIFPVTFPFNPSSLALETIQIPASLGLGFISRV

SEQ ID NO: 20643 - protein, 1886 aa, Homo sapiens
MSTIPRHFGLKYKEESYMFKELEKVRQETKKDFLRFKQKLASKPAVDESPVHSLHAPGPARPARVSCAAARTSRRYPSLKGPAMSAAALLQEVLGGAPRPSGLGEAAAPGKTRSFRPRDFYLRSSAFLRHQALKKPPVIASGFGTARPVVLLPPPEPPVKRRARGVLESSRHAAPRRVFHLGREREQSQEVAPLAGPCMAKERKASSVSAEDGYMEASSGRRKVRIRSNFVSESGAREAREAAGLGAQGEQESWPPSDAREAAWQALLPSRVIPTSIEEIIASLQSEAQLASDQTIKELIRSVLGQNYDITMEDISLMGKMYLKTSPMQAETPEIQAEYKFQMGAEESQMSVHKELSETMSSILQIEQEDIEWGPSEAESIVFKPQEISQVQPAEELSKPLEDGQPTSDSKEAKWVSLTAKSPEFLQIEGKEIKRMRKRKSLRPRKSSKPLCDKKLHKKIPQDYSMPHLHDLCTTIPAQELPVDLRLASRVYHTANRKGHDTLLGKFGTSFLDDRFTDEEQTDRILYGIPVMDDNQEYVHIPPTPQGIPPELAQGTRERAHKPHLEVLGEEMYAYPEFTKLFWNTAAPKFSVPESVMKETLYPKYESVQASRLLTDKLSYKSSVITLHQHSRTNFWCFLPRKSASFESIQKWFSAQPTQLRRVKSSVDLRKEKIIAPLEIKNDMQSSIKEVMFQKAKELKRQLQLTKQNKTEEPNYVKESIDDIFDNMCEKHSLRNLSLTLIEASKKAGISYIVYPKKKKMRWKKRLKQQKLIFVHEELSKPPKSLERSASHGILPGQKKYLFKVPLYERQIRCPSLPLYLNFEKFVQAKGGIPENIDPRTWALDRLIEYKDASIPVKEKDDKISVPEDPPERVKEPPKLKLNDYVESDLPQEVIKYYESEVKILTEEINDKTKYPAFAYCRRGAIYRKLGKLQSAMNDLQRVILLEPLFLNAYWHRHLIYLFQDKINEALDDLNYIHKYNKNNTEAYLSKAEIYRGKKDITLAILNYTQAIKSTPTDADIYFRRGEMYEITNKVLAIDDFSKCIFYDPKRTDALLKRGLFYCENENWFAAIEDFTALLNIDHQNSQARTYRGIAYVKWKFYKEATQDFSAAIHLDPNNWLALYYRGCLFRKSNPFRALQDYSVSALINDGYENLGCFLHRGIVYAHLKLWLLAICDFETVISLERTITLAYVNIGLIHLLHLDNYTEAIWQFSEAIRIDPLCIQSYLCRAETYFKLHKLKKAVNELSRAIHLQPDGIQLYIRRGQYLLMMKYYDLAKFTIYQIAEMDKGLSELSPMQQALIYSFCENHDKAIEVLDGISWNRAEMTMCALLAKVQMKAKRTKEAVEVLKKALDAISHSDKGPDATAISADCLYNLGLCYMEEGNLQMAFDSFTKAVKANPDFAESFYQRGLCKVKLHKDSSILDFNRAITLNPKHYQAYLSRVAFYGLKGRYSKAILNCNKAIKIYPESVRAYLYRGVLKYYNKTYKLAITDLTTAISMDKNSYTAFYNRALCYTKIRELQMALTDYGIVLLLDATETVKLNTFLNRGLIYVELGQYGFALEDFKQAALISRTNGSLCHATAMCHHRINEFEEAVNFFTWALKINPCFLDAYVGRGNSYMEYGHDEATKQAQKDFLKALHINPAYIKARISFGYNLQAQGKFQKAWNHFTIAIDTDPKNYLAYEGRAVVCLQMGNNFAAMQDINAAMKISTTAEFLTNRGVIHEFMGHKQNAMKDYQDAITLNPKYSLAYFNAGNIYFHHRQFSQASDYFSKALKFDPENEYVLMNRAITNTILKKYEEAKEDFANVIESCPFWAAVYFNRAHFYYCLKQYELAEEDLNKALSLKPNDALVYNFRAKVRGKIGLIEEAMADYNQALDLEDYASVI

SEQ ID NO: 20644 - protein, 722 aa, Homo sapiens
QILIATITHLLPSTEASSYEMDKRLVVSLLLCLLDWIMALPLKTLLQPFHATGAESDKTEKSVLNCIYKVLHGCVYGAQCFSNPRYFPMSLSDLASVDYDPFMHLESLKEPEPLHSPDSERSSKLQPVTEVKTQMQHGLISIAARTVITHLVNHLGHYPMSGGPAMLTSQVCENHDNHYSESTELSPELFESPNIQFFVLNNTTLVSCIQIRSEENMPGGGLSAGLASANSNVRIIVRDLSGKYSWDSAILYGPPPVSGLSEPTSFMLSLSHQEKPEEPPTSNECLEDITVKDGLSLQFKRFRETVPTWDTIRDEEDVLDELLQYLGVTSPECLQRTGISLNIPAPQPVCISEKQENDVINAILKQHTEEKEFVEKHFNDLNMKAVEQDEPIPQKPQSAFYYCRLLLSILGMNSWDKRRSFHLLKKNEKLLRELRNLDSRQCRETHKIAVFYVAEGQEDKHSILTNTGGSQAYEDFVAGLGWEVNLTNHCGFMGGLQKNKSTGLTTPYFATSTVEVIFHVSTRMPSDSDDSLTKKLRHLGNDEVHIVWSEHTRDYRRGIIPTEFGDVLIVIYPMKNHMFSIQIMKKPEVPFFGPLFDGAIVNGKVLPIMVRATAINASRALKSLIPLYQNFYEERARYLQTIVQHHLEPTTFEDFAAQVFSPAPYHHLPSDAVGSYPEILPSETPTATQVDGADLASPMSPRTSKSRMSMKLRRSSGSANKS

SEQ ID NO: 20645 - protein, 582 aa, Homo sapiens
MLSESKEGEEKEEVTMDTSENRPENDVPEPPMPIADQVSNDDRPEGSVEDEEKKESSLPKSFKRKISVVSTKGVPAGNSDTEGGQPGRKRRWGASTATTQKKPSISITTESLKSLIPDIKPLAGQEAVVDLHADDSRISEDETERNGDDGTHDKGLKICRTVTQVVPAEGQENGQREEEEEEKEPEAEPPVPPQVSVEVALPPPAEHEVKKVTLGDTLTRRSISQQKSGVSITIDDPVRTAQVPSPPRGKISNIVHISNLVRPFTLGQLKELLGRTGTLVEEAFWIDKIKSHCFVTYSTVEEAVATRTALHGVKWPQSNPKFLCADYAEQDELDYHRGLLVDRPSETKTEEQGIPRPLHPPPPPPVQPPQHPRAEQREQERAVREQWAEREREMERRERTRSEREWDRDKVREGPRSRSRSRDRRRKERAKSKEKKSEKKEKAQEEPPAKLLDDLFRKTKAAPCIYWLPLTDSQIVQKEAERAERAKEREKRRKEQEEEEQKEREKEAERERNRQLEREKRREHSRERDRERERERERDRGDRDRDRERDRERGRERDRRDTKRHSRSRSRSTPVRDRGGRR

SEQ ID NO: 20646 - protein, 440 aa, Homo sapiens
MSMLAERRRKQKWAVDPQNTAWSNDDSKFGQRMLEKMGWSKGKGLGAQEQGATDHIKVQVKNNHLGLGATINNEDNWIAHQDDFNQLLAELNTCHGQETTDSSDKKEKKSFSLEEKSKISKNRVHYMKFTKGKSWKALTLSQKRPYVDEAERLRLQHMQDYPNYKYRPRRKKQAKRLCKRVDPGFLLSSLSRDQNALPEKRSGSRGALGEKEDRGEYSPGTALPSLRGCYHEGPAGGGGGGTPSSVDTYPYGLPTPPEMSPLDVLEPEQTFFSSPCQEEHGHPRRIPHLPGHPYSPEYAPSPLHCSHPLGSLALGQSPGVSMMSPVPGCPPSPAYYSPATYHPLHSNLQAHLGQLSPPPEHPGFDALDQLSQVELLGDMDRNEFDQYLNTPGHPDSATGAMALSGHVPVSQVTPTGPTETSLISVLADATATYYNSYSVS

SEQ ID NO: 20647 - protein, 131 aa, Homo sapiens
MNESKPGDSQNLACVFCRKHDDCPNKYGEKKTKEKWNLTVHYYCLLMSSGIWQRGKEEEGVYGFLIEDIRKEVNRASKLKCCVCKKNGASIGCVAPRCKRSYHFPCGLQRECIFQFTGNFASFCWDHRPVQ

SEQ ID NO: 20648 - protein, 794 aa, Homo sapiens
MGAASCEDEELEFKLVFGEEKEAPPLGAGGLGEELDSEDAPPCCRLALGEPPPYGAAPIGIPRPPPPRPGMHSPPPRPAPSPGTWESQPARSVRLGGPGGGAGGAGGGRVLECPSIRITSISPTPEPPAALEDNPDAWGDGSPRDYPPPEGFGGYREAGGQGGGAFFSPSPGSSSLSSWSFFSDASDEAALYAACDEVESELNEAASRFGLGSPLPSPRASPRPWTPEDPWSLYGPSPGGRGPEDSWLLLSAPGPTPASPRPASPCGKRRYSSSGTPSSASPALSRRGSLGEEGSEPPPPPPLPLARDPGSPGPFDYVGAPPAESIPQKTRRTSSEQAVALPRSEEPASCNGKLPLGAEESVAPPGGSRKEVAGMDYLAVPSPLAWSKARIGGHSPIFRTSALPPLDWPLPSQYEQLELRIEVQPRAHHRAHYETEGSRGAVKAAPGGHPVVKLLGYSEKPLTLQMFIGTADERNLRPHAFYQVHRITGKMVATASYEAVVSGTKVLEMTLLPENNMAANIDCAGILKLRNSDIELRKGETDIGRKNTRVRLVFRVHVPQGGGKVVSVQAASVPIECSQRSAQELPQVEAYSPSACSVRGGEELVLTGSNFLPDSKVVFIERGPDGKLQWEEEATVNRLQSNEVTLTLTVPEYSNKRVSRPVQVYFYVSNGRRKRSPTQSFRFLPVICKEEPLPDSSLRGFPSASATPFGTDMDFSPPRPPYPSYPHEDPACETPYLSEGFGYGMPPLYPQTGPPPSYRPGLRMFPETRGTTVSEIIGRDLSGFPAPPGEEPPA

SEQ ID NO: 20649 - protein, 261 aa, Homo sapiens
ADPRDKALQDYRKKLLEHKEIDGRLKELREQLKELTKQYEKSENDLKALQSVGQIVGEVLKQLTEEKFIVKATNGPRYVVGCRRQLDKSKLKPGTRVALDMTTLTIMRYLPREVDPLVYNMSHEDPGNVSYSEIGGLSEQIRELREVIELPLTNPELFQRVGIIPPKGCLLYGPPGTGKTLLARAVASQLDCNFLKVVSSSIVDKYIGESARLIREMFNYARDHQPCIIFMDEIDAIDYEAIVKLSDGFNGADLRNVCTEA

SEQ ID NO: 20650 - protein, 606 aa, Homo sapiens
AQSLLQLWKAYSNAHGEAAARLKQQEAKFQQLANISMSGNNLAEILPPALQDIKELQHDVQKTKEAFLQNSSVLDRLPQPAESSTHMLLPGPLHSLQRAAYLEKMLLVKANEFEFVLSQFKDFGVRLESLKGLIMHEEENLDRLHQQEKENPDSFLNHVLALTAQSPDIEHLNEVSLKLPLSDVAVKTLQNMNRQWIRATATALERCSELQGIGLNEKFLYCCEKWIQLLEKIEEALKVDVANSLPELLEQQKTYKMLEAEVSINQTIADSYVTQSLQLLDTTEIENRPEFITEFSKLTDRWQNAVQGVRQRKGDVDGLVRQWQDFTTSVENLFRFLTDTSHLLSAVKGQERFSLYQTRSLIHELKNKEIHFQRRRTTCALTLEAGEKLLLTTDLKTKESVGRRISQLQDSWKDMEPQLAEMIKQFQSTVETWDQCEKKIKELKSRLQVLKAQSEDPLPELHEDLHNEKELIKELEQSLASWTQNLKELQTMKADLTRHVLVEDVMVLKEQIEHLHRQWEDLCLRVAIRKQEIEDRLNTWVVFNEKNKELCAWLVQMENKVLQTADISIEEMIEKLQKGEEAEGDLCFYSAVGQKHEQPSHLVGSN

SEQ ID NO: 20651 - protein, 149 aa, Homo sapiens
MAELQEVQITEEKPLLPGQTPEAAKEAELAARILLDQGQTHSVETPYGSVTFTVYGTPKPKRPAILTYHDVGLNYKSCFQPLFQFEDMQEIIQNFVRVHVDAPGMEEGAPVFPLGYQYPSLDQLADMIPCVLQYLNFSTIIGVGVGAGA

SEQ ID NO: 20652 - protein, 926 aa, Homo sapiens
MEALTTQLGPGREGSSSPNSKQELQPYSGSSALKPNQVGETSLYGVPIVSLVIDGQERLCLAQISNTLLKNYSYNEIHNRRVALGITCVQCTPVQLEILRRAGAMPISSRRCGMITKREAERLCKSFLGEHKPPKLPENFAFDVVHECAWGSRGSFIPARYNSSRAKCIKCGYCSMYFSPNKFIFHSHRTPDAKYTQPDAANFNSWRRHLKLSDKSATDELSHAWEDVKAMFNGGTRKRTFSLQGGGGGGANGGSGGQGKGGAGGGGGGGPGCGAEMAPGPPPHKSLRCGEDEAAGPPGPPPPHPQRGLGLATGASGPAGPGGPGGGAGVRSYPVIPVPSKGFGLLQKLPPPLFPHPYGFPTAFGLCPKKDDPVLGAGEPKGGPGTGSGGGGAGTGGGAGGPGASHLPPGAGAGPGGGAMFWGHQPSGAAKDAAAVAAAAAAATVYPTFPMFWPAAGSLPVPSYPAAQSQAKAVAAAVAAAAAAAAAAAGSGAPEPLDGAEPAKESGLGAEERCPSALSRGPLDEDGTDEALPPPLAPLPPPPPPPARKGSYVSAFRPVVKDTESIAKLYGSAREAYGAGPARGPGPGAGSGGYVSPDFLSEGSSSYNSASPDVDTADEPEVDVESNRFPDDEDAQEETEPSAPSAGGGPDGEQPTGPPSATSSGADGPANSPDGGSPRPRRRLGPPPAGRPAFGDLAAEDLVRRPERSPPSGGGGYELREPCGPLGGPAPAKVFAPERDEHVKSAAVALGPAASYVCTPEAHEPDKEDNHSPADDLETRKSYPDQRSISQPSPANTDRGEDGLTLDVTGTHLVEKDIENLAREELQKLLLEQMELRKKLEREFQSLKDNFQDQMKRELAYREEMVQQLQIVRDTLCNELDQERKARYAIQQKLKEAHDALHHFSCKMLTPRHCTGNCSFKPPLLP

SEQ ID NO: 20653 - protein, 542 aa, Homo sapiens
MRKIRANAIAILTVAWILGTFYYLWQDNRAHAASSGGRGAQRAGRRSEQLREDRTIPLIVTGTPSKGFDEKAYLSAKQLKAGEDPYRQHAFNQLESDKLSPDRPIRDTRHYSCPSVSYSSDLPATSVIITFHNEARSTLLRTVKSVLNRTPANLIQEIILVDDFSSDPEDCLLLTRIPKVKCLRNDRREGLIRSRVRGADVAAATVLTFLDSHCEVNTEWLPPMLQRVKEDHTRVVSPIIDVISLDNFAYLAASADLRGGFDWSLHFKWEQIPLEQKMTRTDPTRPIRTPVIAGGIFVIDKSWFNHLGKYDAQMDIWGGENFELSFRVWMCGGSLEIVPCSRVGHVFRKRHPYNFPEGNALTYIRNTKRTAEVWMDEYKQYYYEARPSAIGKAFGSVATRIEQRKKMNCKSFRWYLENVYPELTVPVKEALPGIIKQGVNCLESQGQNTAGDFLLGMGICRGSAKNPQPAQAWLFSDHLIQQQGKCLAATSTLMSSPGSPVILQMCNPREGKQVSLLASGPEAQQPEGPCLRVADLGRRAPD

SEQ ID NO: 20654 - protein, 456 aa, Homo sapiens
MPNPRPGKPSAPSLALGPSPGASPSWRAAPKASDLLGARGPGGTFQGRDLRGGAHASSSSLNPMPPSQLQLSTVDAHARTPVLQVHPLESPAMISLTPPTTATGVFSLKARPGLPPGINVASLEWVSREPALLCTFPNPSAPRKDSTLSAVPQSSYPLLANGVCKWPGCEKVFEEPEDFLKHCQADHLLDEKGRAQCLLQREMVQSLEQQLVLEKEKLSAMQAHLAGKMALTKASSVASSDKGSCCIVAAGSQGPVVPAWSGPREAPDSLFAVRRHLWGSHGNSTFPEFLHNMDYFKFHNMRPPFTYATLIRWAILEAPEKQRTLNEIYHWFTRMFAFFRNHPATWKVSSSEVAVTGMASSAIAAQSGQAWVWAHRHIGEERDVGCWWWLLASEVDAHLLPVPGLPQNAIRHNLSLHKCFVRVESEKGAVWTVDELEFRKKRSQRPSRCSNPTPGP

SEQ ID NO: 20655 - protein, 667 aa, Homo sapiens
MHFTGAVMQENLRFASSGDDIKIWDASSMTLVDKFNPHTSPHGISSICWSSNNNFLVTASSSGDKIVVSSCKCKPVPLLELAEGQKQTCVNLNSTSMYLVSGGLNNTVNIWDLKSKRVHRSLKDHKDQVTCVTYNWNDCYIASGSLSGEIILHSVTTNLSSTPFGHGSNQSVRHLKYSLFKKSLLGSVSDNGIVTLWDVNSQSPYHNFDSVHKAPASGICFSPVNELLFVTIGLDKRIILYDTSSKKLVKTLVADTPLTAVDFMPDGATLAIGSSRGKIYQYDLRMLKSPVKTISAHKTSVQCIAFQYSTVLTKSSLNKGCSNKPTTVNKRSVNVNAASGGVQNSGIVREAPATSIATVLPQPMTSAMGKGTVAVQEKAGLPRSINTDTLSKETDSGKNQDFSSFDDTGKSSLGDMFSPIRDDAVVNKGSDESIGKGDGFDFLPQLNSVFPPRKNPVTSSTSVLHSSPLNVFMGSPGKEENENRDLTAESKKIYMGKQESKDSFKQLAKLVTSGAESGNLNTSPSSNQTRNSEKFEKPENEIEAQLICEPPINGSSTPNPKIASSVTAGVASSLSEKIADSIGNNRQNAPLTSIQIRFIQNMIQETLDDFREACHRDIVNLQVEMIKQFHMQLNEMHSLLERYSVNEGLVAEIERLREENKRLRAHF

SEQ ID NO: 20656 - protein, 1248 aa, Homo sapiens
MSHLVDPTSGDLPVRDIDAIPLVLPASKGKNMKTQPPLSRMNREELEDSFFRLREDHMLVKELSWKQQDEIKRLRTTLLRLTAAGRDLRVAEEAAPLSETARRGQKAGWRQRLSMHQRPQMHRLQGHFHCVGPASPRRAQPRVQVGHRQLHTAGAPVPEKPKRGPRDRLSYTAPPSFKEHATNENRGEVASKPSELAHIMASNTMQVEEPPKSPEKMWPKDENFEQRSSLECAQKAAELRASIKEKVELIRLKKLLHERNASLVMTKAQLTEVQEAYETLLQKNQGILSAAHEALLKQVNELRAELKEESKKAVSLKSQLEDVSILQMTLKEFQERVEDLEKERKLLNDNYDKLLESMLDSSDSSSQPHWSNELIAEQLQQQVSQLQDQLDAELEDKRKVLLELSREKAQNEDLKLEVTNILQKHKQEVELLQNAATISQPPDRQSEPATHPAVLQENTQIEPSEPKNQEEKKLSQVLNELQVSHAETTLELEKTRDMLILQRKINVCYQEELEAMMTKADNDNRDHKEKLERLTRLLDLKNNRIKQLEEQLKDVAYGTRPLSLCLETLPAHGDEDKVDISLLHQGENLFELHIHQAFLTSAALAQAGDTQPTTFCTYSFYDFETHCTPLSVGPQPLYDFTSQYVMETDSLFLHYLQEASARLDIHQAMASEHSTLAAGWICFDRVLETVEKVHGLATLIGAGGEEFGVLEYWMRLRFPIKPSLQACNKRKKAQVYLSTDVLGGRKAQEEEFRSESWEPQNELWIEITKCCGLRSRWLGTQPSPYAVYRFFTFSDHDTAIIPASNNPYFRDQARFPVLVTSDLDHYLRREALSIHVFDDEDLEPGSYLGRARVPLLPLAKNESIKGDFNLTDPAEKPNGSIQVQLDWKFPYIPPESFLKPEAQTKGKDTKDSSKISSEEEKASFPSQDQMASPEVPIEAGQYRSKRKPPHGGERKEKEHQVVSYSRRKHGKRIGVQGKNRMEYLSLNILNGNTPEQVNYTEWKFSETNSFIGDGFKNQHEEEEMTLSHSALKQKEPLHPVNDKESSEQGSEVSEAQTTDSDDVIVPPMSQKYPKADSEKMCIEIVSLAFYPEAEVMSDENIKQVYVEYKFYDLPLSETETPVSLRKPRAGEEIHFHFSKVIDLDPQEQQGRRRFLFDMLNGQDPDQGHLKFTVVSDPLDEEKKECEEVGYAYLQLWQILESGRDILEQELDIVSPEDLATPIGRLKVSLQAAAVLHAIYKEMTEDLFS

SEQ ID NO: 20657 - protein, 915 aa, Homo sapiens
MLSGRDLGAPAGSMGAASCEDEELEFKLVFGEEKEAPPLGAGGLGEELDSEDAPPCCRLALGEPPPYGAAPIGIPRPPPPRPGMHSPPPRPAPSPGTWESQPARSVRLGGPGGGAGGAGGGRVLECPSIRITSISPTPEPPAALEDNPDAWGDGSPRDYPPPEGFGGYREAGGQGGGAFFSPSPGSSSLSSWSFFSDASDEAALYAACDEVESELNEAASRFGLGSPLPSPRASPRPWTPEDPWSLYGPSPGGRGPEDSWLLLSAPGPTPASPRPASPCGKRRYSSSGTPSSASPALSRRGSLGEEGSEPPPPPPLPLARDPGSPGPFDYVGAPPAESIPQKTRRTSSEQAVALPRSEEPASCNGKLPLGAEESVAPPGGSRKEVAGMDYLAVPSPLAWSKARIGGHSPIFRTSALPPLDWPLPSQYEQLELRIEVQPRAHHRAHYETEGSRGAVKAAPGGHPVVKLLGYSEKPLTLQMFIGTADERNLRPHAFYQVHRITGKMVATASYEAVVSGTKVLEMTLLPENNMAANIDCAGILKLRNSDIELRKGETDIGRKNTRVRLVFRVHVPQGGGKVVSVQAASVPIECSQRSAQELPQVEAYSPSACSVRGGEELVLTGSNFLPDSKVVFIERGPDGKLQWEEEATVNRLQSNEVTLTLTVPEYSNKRVSRPVQVYFYVSNGRRKRSPTQSFRFLPVICKEEPLPDSSLRGFPSASATPFGTDMDFSPPRPPYPSYPHEDPACETPYLSEGFGYGMPPLYPQTGPPPSYRPGLRMFPETRGTTGCAQPPAVSFLPRPFPSDPYGGRGSSFSLGLPFSPPAPFRPPPLPASPPLEGPFPSQSDVHPLPAEGYNKVGPGYGPGEGAPEQEKSRGGYSSGFRDSVPIQGITLEEVSEIIGRDLSGFPAPPGEEPPA

SEQ ID NO: 20658 - protein, 356 aa, Homo sapiens
MTSSQVKTKPFDSWSYSEMEKEFPELIRSVGLLTVAADSISTNGSEAVTEEVSQVSLSVDDKGGCEEDNASAVEEQPGLTLGVSSSSGEALTNAAQPSSETVQQESSSSSHHDAKNQQPVPCENATPKRTIRDCFNYNEDSPTQPTLPKRGLFLKEETFKNDLKGNGGKRQMVDLKPEMSRSTPSLVDPPDRSKLCLVLQSSYPNSPSAASQSYECLHKVGNGNLENTVKFHIKEISSSLGRLNDCYKEKSRLKKPHKTSEEVPPCRTPKRGTGSGKQAKNTKSSAVPNGELSYTSKAIEGPQTNSASTSSLEPCNQRSWNAKLQLQSETSSSPAFTQSSESSVGSDNIMSPVPLL

SEQ ID NO: 20659 - protein, 1245 aa, Homo sapiens
MLTMSVTLSPLRSQDLDPMATDASPMAINMTPTVEQGEGEEAMKDMDSDQQYEKPPPLHTGADWKIVLHLPEIETWLRMTSERVRDLTYSVQQDSDSKHVDVHLVQLKDICEDISDHVEQIHALLETEFSLKLLSYSVNVIVDIHAVQLLWHQLRVSVLVLRERILQGLQDANGNYTRQTDILQAFSEETKEGRLDSLTEVDDSGQLTIKCSQNYLSLDCGITAFELSDYSPSEDLLSGLGDMTSSQVKTKPFDSWSYSEMEKEFPELIRSVGLLTVAADSISTNGSEAVTEEVSQVSLSVDDKGGCEEDNASAVEEQPGLTLGVSSSSGEALTNAAQPSSETVQQESSSSSHHDAKNQQPVPCENATPKRTIRDCFNYNEDSPTQPTLPKRGLFLKEETFKNDLKGNGGKRQMVDLKPEMSRSTPSLVDPPDRSKLCLVLQSSYPNSPSAASQSYECLHKVGNGNLENTVKFHIKEISSSLGRLNDCYKEKSRLKKPHKTSEEVPPCRTPKRGTGSGKQAKNTKSSAVPNGELSYTSKAIEGPQTNSASTSSLEPCNQRSWNAKLQLQSETSSSPAFTQSSESSVGSDNIMSPVPLLSKHKSKKGQASSPSHVTRNGEVVEAWYGSDEYLALPSHLKQTEVLALKLENLTKLLPQKPRGETIQNIDDWELSEMNSDSEIYPTYHVKKKHTRLGRVSPSSSSDIASSLGESIESGPLSDILSDEESSMPLAGMKKYADEKSERASSSEKNESHSATKSALIQKLMQDIQHQDNYEAIWEKIEGFVNKLDEFIQWLNEAMETTENWTPPKAEMDDLKLYLETHLSFKLNVDSHCALKEAVEEEGHQLLELIASHKAGLKDMLRMIASQWKELQRQIKRQHSWILRALDTIKAEILATDVSVEDEEGTGSPKAEVQLCYLEAQRDAVEQMSLKLYSEQYTSSSKRKEEFADMSKVHSVGSNGLLDFDSEYQELWDWLIDMESLVMDSHDLMMSEEQQQHLYKRYSVEMSIRHLKKTELLSKVEALKKGGVLLPNDLLEKVDSINEKWELLGKTLGEKIQDTMAGHSGSSPRDLLSPESGSLVRQLEVRIKELKGWLRDTELFIFNSCLRQEKEGTMNTEKQLQYFKSLCREIKQRRRGVASILRLCQHLLDDRETCNLNADHQPMQLIIVNLERRWEAIVMQAVQWQTRLQKKMGKESIRLAATQGWPHPPALGWPLVPSRLSLPFITLTSPKMNLPSKCVFSTQAL

SEQ ID NO: 20660 - protein, 1519 aa, Homo sapiens
MRIPDQKYVTLKLNDVIRFGYDSNMYVLERVQHRVPEEALKHEKYTSQLQVSVKGLAPKRSEALPEHTPYCEASNPRPEKGDRRPGTEAASYRTPLYGQPSWWGEDDGSTLPDAQRQGEPYPERPKGPVQQDGELHGFRAPAEPQGCSFRREPSYFEIPTKETPQPSQPPEVPAHEMPTKDAEAGGGGAAPVVQSHASFTIEFDDCSPGKMKIKDHITKFSLRQRRPPGKEATPGEMVSAETKVADWLVQNDPSLLHRVGPGDDRHSTKSDLPVHTRTLKGHKHEDGTQSDSEDPLAKAASAAGVPLEASGEQVRLQRQIKRDPQELLHNQQAFVIEFFDEDTPRKKRSQSFTHSPSGDPKADKRRGPTPADRDRPSVPAPVQAGGRSSGPQRAGSLKREKTEERLGSPSPASRTPARPFGSVGRRSRLAQDFMAQCLRESSPAARPSPEKVPPVLPAPLTPHGTSPVGPPTPPPAPTDPQLTKARKQEEDDSLSDAGTYTIETEAQDTEVEEARKMIDQVFGVLESPELSRASSATFRPVIRGDRDESDDGGVAQRMALLQEFASRPLGAAPQAEHQGLPVPGSPGGQKWVSRWASLADSYSDPGLTEDGLGRRGGEPEGSLPVRMRRRLPQLPSERADSPAGPESSRRSGPGPPELDSEQPSRLFGQEELDPDSLSDASGSDGGRGPEPGVEPQDSRRRSPQEGPTWSRGRRSPRAPGEPTPASFFIGDQNGDAVLSRKPLAAPGDGEGLGQTAQPSPPARDGVYVSANGRMVIQLRPGRSPEPDGPAPAFLRQESFTKEPASGPPAPGKPPHISSHPLLQDLAATRAARMDFHSQDTHLILKETETALAALEARLLSNSVDAECEGGSTPRPPEDALSGDSDVDTASTVSLRSGKSGPSPTTPQPLRAQKEMSPSPPAAQDPGGTALVSAREQSSERQHHPLGPTDMGRGEPVRRSAIRRGHRPRGSLDWPSEERGPVLAHLPSSDVMASNHETPEATGAGRLGSRRKPAAPPPSPAAREEQSRSSASSQKGPQALTRSNSLSTPRPTRASRLRRARLGDASDTEAADGERGSLGNPEPVGRPAAEQAKKLSRLDILAMPRKRAGSFTGTSDPEAAPARTSFSGRSVELCCASRKPTMAEARAVSRKAANTATTTGPRQPFSRARSGSARYTSNTRRRQQGSDYTSTSEEEYGSRHGSPKHTRSHTSTATQTPRAGSSSRARSRAPGPRDTDDDEEEPDPYGFIVQTAEIAEIARLSQTLVKDVAILAQEIHDVAGDGDTLGSSEPAHSASLSNMPSTPASTISAREELVQRIPEASLNFQKVPPGSLNSRDFDQNMNDSCEDALANKTRPRNREEVIFDNLMLNPVSQLSQAIRENTEHLAEKMKILFQNTGRAWEDLEARINAENEVPILKTSNKEISSILKELRRVQKQLEVINAIVDPSGSLDLLTGNRSLASSAQPGLGKGRVAAQSPPSPASAEALLPALPLRNFPQRASCGPPSLPDPTFLPDAERFLI

SEQ ID NO: 20661 - protein, 761 aa, Homo sapiens
MLILQRKINVCYQELEAMMTKADNDNRDHKEKLERLTRLLDLKNNRIKQLEGILRSHDLPTSEQLKDVAYGTRPLSLCLETLPAHGDEDKVDISLLHQGENLFELHIHQAFLTSAALAQAGDTQPTTFCTYSFYDFETHCTPLSVGPQPLYDFTSQYVMETDSLFLHYLQEASARLDIHQAMASEHSTLAAGWICFDRVLETVEKVHGLATLIGAGGEEFGVLEYWMRLRFPIKPSLQACNKRKKAQVYLSTDVLGGRKAQEEEFRSESWEPQNELWIEITKCCGLRSRWLGTQPSPYAVYRFFTFSDHDTAIIPASNNPYFRDQARFPVLVTSDLDHYLRREALSIHVFDDEDLEPGSYLGRARVPLLPLAKNESIKGDFNLTDPAEKPNGSIQVQLDWKFPYIPPESFLKPEAQTKGKDTKDSSKISSEEEKASFPSQDQMASPEVPIEAGQYRSKRKPPHGGERKEKEHQVVSYSRRKHGKRIGVQGKNRMEYLSLNILNGNTPEQVNYTEWKFSETNSFIGDGFKNQHEEEEMTLSHSALKQKEPLHPVNDKESSEQGSEVSEAQTTDSDDVIVPPMSQKYPKADSEKMCIEIVSLAFYPEAEVMSDENIKQVYVEYKFYDLPLSETETPVSLRKPRAGEEIHFHFSKVIDLDPQEQQGRRRFLFDMLNGQDPDQGHLKFTVVSDPLDEEKKECEEVGYAYLQLWQILESGRDILEQELDIVSPEDLATPIGRLKVSLQAAAVLHAIYKEMTEDLFS

SEQ ID NO: 20662 - protein, 1118 aa, Homo sapiens
MEPSRALLGCLASAAAAAPPGEDGAGAGAEEEEEEEEEAAAAVGPGELGCDAPLPYWTAVFEYEAAGEDELTLRLGDVVEVLSKDSQVSGDEGWWTGQLNQRVGIFPSNYVTPRSAFSSRCQPGGEDPSCYPPIQLLEIDFAELTLEEIIGIGGFGKVYRAFWIGDEVAVKAARHDPDEDISQTIENVRQEAKLFAMLKHPNIIALRGVCLKEPNLCLVMEFARGGPLNRVLSGKRIPPDILVNWAVQIARGMNYLHDEAIVPIIHRDLKSSNILILQKVENGDLSNKILKITDFGLAREWHRTTKMSAAGTYAWMAPEVIRASMFSKGSDVWSYGVLLWELLTGEVPFRGIDGLAVAYGVAMNKLALPIPSTCPEPFAKLMEDCWNPDPHSRPSFTNILDQLTTIEESGFFEMPKDSFHCLQDNWKHEIQEMFDQLRAKEKELRTWEEELTRAALQQKNQEELLRRREQELAEREIDILERELNIIIHQLCQEKPRVKKRKGKFRKSRLKLKDGNRISLPSDFQHKFTVQASPTMDKRKSLINSRSSPPASPTIIPRLRAIQLTPGESSKTWGRSSVVPKEEGEEEEKRAPKKKGRTWGPGTLGQKELASGDEGSPQRREKANGLSTPSESPHFHLGLKSLVDGYKQWSSSAPNLVKGPRSSPALPGFTSLMEMALLAASWVVPIDIEEDEDSEGPGSGESRLQHSPSQSYLCIPFPRGEDGDGPSSDGIHEEPTPVNSATSTPQLTPTNSLKRGGAHHRRCEVALLGCGAVLAATGLGFDLLEAGKCQLLPLEEPEPPAREEKKRREGLFQRSSRPRRSTSPPSRKLFKKEEPMLLLGDPSASLTLLSLSSISECNSTRSLLRSDSDEIVVYEMPVSPVEAPPLSPCTHNPLVNVRVERFKRDPNQSLTPTHVTLTTPSQPSSHRRTPSDGALKPETLLASRSPSSNGLSPSPGAGMLKTPSPSRDPGEFPRLPDPNVVFPPTPRRWNTQQDSTLERPKTLEFLPRPRPSANRQRLDPWWFVSPSHARSTSPANSSSTETPSNLDSCFASSSSTVEERPGLPALLPFQAGPLPPTERTLLDLDAEGQSQDSTVPLCRAELNTHRPAPYEIQQEFWS

SEQ ID NO: 20663 - protein, 177 aa, Homo sapiens
MPFPVTTQGSQQTQPPQKHYGITSPISLAAPKETDCVLTQKLIETLKPFGVFEEEEELQRSNDLEYLIDNCFINRILILGKLNNLVKEWIREISESKNLPQSVIENVGGKIFTFGSYRLGVHTKGADIDALCVAPRHVDRSDFFTSFYDKLKLQEEVKDLRAVEEAFVPVIKLCFDG

SEQ ID NO: 20664 - protein, 163 aa, Homo sapiens
MMSYLKQPPYAVNGLSLTTSGMDLLHPSVGYPATPRKQRRERTTFTRAQLDVLEALFAKTRYPDIFMREEVALKINLPESRVQVWFKNRRAKCRQQQQQQQNGGQNKVRPAKKKTSPAREVSSESGTSGQFTPPSSTSVPTIASSSAPVSIWSPASISPLSDP

SEQ ID NO: 20665 - protein, 831 aa, Homo sapiens
MHSPPPRPAPSPGTWESQPARSVRLGGPGGGAGGAGGGRVLECPSIRITSISPTPEPPAALEDNPDAWGDGSPRDYPPPEGFGGYREAGGQGGGAFFSPSPGSSSLSSWSFFSDASDEAALYAACDEVESELNEAASRFGLGSPLPSPRASPRPWTPEDPWSLYGPSPGGRGPEDSWLLLSAPGPTPASPRPASPCGKRRYSSSGTPSSASPALSRRGSLGEEGSEPPPPPPLPLARDPGSPGPFDYVGAPPAESIPQKTRRTSSEQAVALPRSEEPASCNGKLPLGAEESVAPPGGSRKEVAGMDYLAVPSPLAWSKARIGGHSPIFRTSALPPLDWPLPSQYEQLELRIEVQPRAHHRAHYETEGSRGAVKAAPGGHPVVKLLGYSEKPLTLQMFIGTADERNLRPHAFYQVHRITGKMVATASYEAVVSGTKVLEMTLLPENNMAANIDCAGILKLRNSDIELRKGETDIGRKNTRVRLVFRVHVPQGGGKVVSVQAASVPIECSQRSAQELPQVEAYSPSACSVRGGEELVLTGSNFLPDSKVVFIERGPDGKLQWEEEATVNRLQSNEVTLTLTVPEYSNKRVSRPVQVYFYVSNGRRKRSPTQSFRFLPVICKEEPLPDSSLRGFPSASATPFGTDMDFSPPRPPYPSYPHEDPACETPYLSEGFGYGMPPLYPQTGPPPSYRPGLRMFPETRGTTGCAQPPAVSFLPRPFPSDPYGGRGSSFSLGLPFSPPAPFRPPPLPASPPLEGPFPSQSDVHPLPAEGYNKVGPGYGPGEGAPEQEKSRGGYSSGFRDSVPIQGITLEEGGCGTGGCECECVQEIALHVC

SEQ ID NO: 20666 - protein, 154 aa, Homo sapiens
MVMCFCVNPCVSLQEAELAARILLDQGQTHSVETPYGSVTFTVYGTPKPKRPAILTYHDVGLNYKSCFQPLFQFEDMQEIIQNFVRVHVDAPGMEEGAPVFPLGYQYPSLDQLADMIPCVLQYLNFSTIIGVGVGAGAYILARYALNHPDTVEG

SEQ ID NO: 20667 - protein, 112 aa, Homo sapiens
METLLKVLSGTLLWQLTWVRSQQPVQSPQAVILREGEDAVINCSSSKALYSVHWYRQKHGEAPVFLMILLKGGEQKGHDKISASFNEKKQQSSLYLTASQLSYSGTYFCGTE

SEQ ID NO: 20668 - protein, 631 aa, Homo sapiens
MSVSSGVQILTKPETVDRRRSAETTKEAGRPLEMAVSEPEASAAKEWKQLDPAQSNLYNDVMLENYCNQASMGCQAPKPDMISKLEKGEAPWLGKGKRPSQGCPSKIARPKQKETDGKVQKDDDQLENIQKSQNKLLREVAVKKKTQAKKNGSDCGSLGKKNNLHKKHVPSKKRLLKFESCGKILKQNLDLPDHSRNCVKRKSDAAKEHKKSFNHSLSDTRKGKKQTGKKHEKLSSHSSSDKCNKTGKKHDKLCCHSSSHIKQDKIQTGEKHEKSPSLSSSTKHEKPQACVKPYECNQCGKVLSHKQGLIDHQRVHTGEKPYECNECGIAFSQKSHLVVHQRTHTGEKPYECIQCGKAHGHKHALTDHLRIHTGEKPYECAECGKTFRHSSNLIQHVRSHTGEKPYECKECGKSFRYNSSLTEHVRTHTGEIPYECNECGKAFKYSSSLTKHMRIHTGEKPFECNECGKAFSKKSHLIIHQRTHTKEKPYKCNECGKAFGHSSSLTYHMRTHTGESPFECNQCGKGFKQIEGLTQHQRVHTGEKPYECNECGKAFSQKSHLIVHQRTHTGEKPYECNECEKAFNAKSQLVIHQRSHTGEKPYECNECGKTFKQNASLTKHVKTHSEDKSHE

SEQ ID NO: 20669 - protein, 1328 aa, Homo sapiens
MWRRKHPRTSGGTRGVLSGNRGVEYGSGRGHLGTFEGRWRKLPKMPEAVGTDPSTSRKMAELEEVTLDGKPLQALRVTDLKAALEQRGLAKSGQKSALVKRLKGALMLENLQKHSTPHAAFQPNSQIGEEMSQNSFIKQYLEKQQELLRQRLEREAREAAELEEASAESEDEMIHPEGVASLLPPDFQSSLERPELELSRHSPRKSSSISEEKGDSDDEKPRKGERRSSRVRQARAAKLSEGSQPAEEEEDQETPSRNLRVRADRNLKTEEEEEEEEEEEEDDEEEEGDDEGQKSREAPILKEFKEEGEEIPRVKPEEMMDERPKTRSQEQEVLERGGRFTRSQEEARKSHLARQQQEKEMKTTSPLEEEEREIKSSQGLKEKSKSPSPPRLTEDRKKASLVALPEQTASEEETPPPLLTKEASSPPPHPQLHSEEEIEPMEGPAPAVLIQLSPPNTDADTRELLVSQHTVQLVGGLSPLSSPSDTKAESPAEKVPEESVLPLVQKSTLADYSAQKDLEPESDRSAQPLPLKIEELALAKGITEECLKQPSLEQKEGRRASHTLLPSHRLKQSADSSSSRSSSSSSSSSRSRSRSPDSSGSRSHSPLRSKQRDVAQARTHANPRGRPKMGSRSTSESRSRSRSRSRSASSNSRKSLSPGVSRDSSTSYTETKDPSSGQEVATPPVPQLQVCEPKERTSTSSSSVQARRLSQPESAEKHVTQRLQPERGSPKKCEAEEAEPPAATQPQTSETQTSHLPESERIHHTVEEKEEVTMDTSENRPENDVPEPPMPIADQVSNDDRPEGSVEDEEKKESSLPKSFKRKISVVSTKGVPAGNSDTEGGQPGRKRRWGASTATTQKKPSISITTESLKEAVVDLHADDSRISEDETERNGDDGTHDKGLKICRTVTQVVPAEGQENGQREEEEEEKEPEAEPPVPPQVSVEVALPPPAEHEVKKVTLGDTLTRRSISQQKSGVSITIDDPVRTAQVPSPPRGKISNIVHISNLVRPFTLGQLKELLGRTGTLVEEAFWIDKIKSHCFVTYSTVEEAVATRTALHGVKWPQSNPKFLCADYAEQDELDYHRGLLVDRPSETKTEEQGIPRPLHPPPPPPVQPPQHPRAEQREQERAVREQWAEREREMERRERTRSEREWDRDKVREGPRSRSRSRDRRRKERAKSKEKKSEKKEKAQEEPPAKLLDDLFRKTKAAPCIYWLPLTDSQIVQKEAERAERAKEREKRRKEQEEEEQKEREKEAERERNRQLEREKRREHSRERDRERERERERDRGDRDRDRERDRERGRERDRRDTKRHSRSRSRSTPVRDRGGRR

SEQ ID NO: 20670 - protein, 34 aa, Homo sapiens
RTCFVSDLKRGLKIQAAKFNIDGNNERFSCGNSF

SEQ ID NO: 20671 - protein, 379 aa, Homo sapiens
MSDGEGPSADDSASAASSMEVTDRIASLEQRVQMQEDDIQLLKSALADVVRRLNITEEQQAVLNRKGPTKARPLMQTLPLRTTVNNGTVLPKKPTGSLPSPSGVRKETAVPATKSNIKRTSSSERVSPGGRRESNGDSRGNRNRTGSTSSSSSGKKNSESKPKEPVFSAEEGYVKMFLRGRPVTMYMPKDQVDSYSLEAKVELPTKRLKLEWVYGYRGRDCRNNLYLLPTGETVYFIASVVVLYNVEEQLQRHYAGHNDDVKCLAVHPDRITIATGQVAGTSKDGKQLPPHVRIWDSVTLNTLHVIGIGFFDRAVTCIAFSKSNGGTNLCAVDDSNDHVLSVWDWQKEEKLADVKCSNEAVFAADFHPTDTNIIVTCGK

SEQ ID NO: 20672 - protein, 148 aa, Homo sapiens
MAELQEVQITEEKPLLPGQTPEAAKEAELAARILLDQGQTHSVETPYGSVTFTVYGTPKPKRPAILTYHDVGLNYKSCFQPLFQFEDMQEIIQNFVRVHVDAPGMEEGAPVFPLGYQYPSLDQLADMIPCVLQYLNFSTIIGVGVGAG

SEQ ID NO: 20673 - protein, 136 aa, Homo sapiens
MAELQEVQITEEKPLLPGQTPEAAKEAELAARILLDQGQTHSVETPYGSVTFTVYGTPKPKRPAILTYHDVGLNYKSCFQPLFQFEDMQEIIQNFVRVHVDAPGMEEGAPVFPLGYQYPSLDQLADMIPCVLQYLK

SEQ ID NO: 20674 - protein, 238 aa, Homo sapiens
MMSYLKQPPYAVNGLSLTTSGMDLLHPSVGYPGPWASCPAATPRKQRRERTTFTRAQLDVLEALFAKTRYPDIFMREEVALKINLPESRVQVWFKNRRAKCRQQQQQQQNGGQNKVRPAKKKTSPAREVSSESGTSGQFTPPSSTSVPTIASSSAPVSIWSPASISPLSDPLSTSSSCMQRSYPMTYTQASGYSQGYAGSTSYFGGMDCGSYLTPMHHQLPGPGATLSPMGTNAVTSH

SEQ ID NO: 20675 - protein, 146 aa, Homo sapiens
MSQEGDYGRWTISSSDESEEEKPKPDKPSTSSLLCARQGAANEPRYTCSEAQKAAHKRKISPVKFSNTDSVLPPKRQKSGSQEDLGWCLSSSDDELQPEMPQKQAEKVVIKKEKDISAPNDGTAQRTENHGAPACHRLKEEEDEYE

SEQ ID NO: 20676 - protein, 2657 aa, Homo sapiens
MSTKAEQFASKIRYLQEYHNRVLHNIYPVPSGTDIANTLKYFSQTLLSILSRTGKKENQDASNLTVPMTMCLFPVPFPLTPSLRPQVSSINPTVTRSLLYSVLRDAPSERGPQSRDAQLSDYPSLDYQGLYVTLVTLLDLVPLLQHGQHDLGQSIFYTTTCLLPFLNDDILSTLPYTMISTLATFPPFLHKDIIEYLSTSFLPMAILGSSRREGVPAHVNLSASSMLMIAMQYTSNPVYHCQLLECLMKYKQEVWKDLLYVIAYGPSQVKPPAVQMLFHYWPNLKPPGAISEYRGLQYTAWNPIHCQHIECHNAINKPAVKMCIDPSLSVALGDKPPPLYLCEECSERIAGDHSEWLIDVLLPQAEISAICQKKNCSSHVRRAVVTCFSAGCCGRHGNRPVRYCKRCHSNHHSNEVGAAAETHLYQTSPPPINTRECGAEELVCAVEAVISLLKEAEFHAEQREHELNRRRQLGLSSSHHSLDNADFDNKDDDKHDQRLLSQFGIWFLVSLCTPSENTPTESLARLVAMVFQWFHSTAYMMDDEVGSLVEKLKPQFVTKWLKTVCDVRFDVMVMCLLPKPMEFARVGGYWDKSCSTVTQLKEGLNRILCLIPYNVINQSVWECIMPEWLEAIRTEVPDNQLKEFREVLSKMFDIELCPLPFSMEEMFGFISCRFTGYPSSVQEQALLWLHVLSELDIMVPLQLLISMFSDGVNSVKELANQRKSRVSELAGNLASRRVSVASDPGRRVQHNMLSPFHSPFQSPFRSPLRSPFRSPFKNFGHPGGRTIDFDCEDDEMNLNCFILMFDLLLKQMELQDDGITMGLEHSLSKDIISIINNVFQAPWGGSHTCQKDEKAIECNLCQSSILCYQLACELLERLAPKEESRLVEPTDSLEDSLLSSRPEFIIGPEGEEEENPASKHGENPGNCTEPVEHAAVKNDTERKFCYQQLPVTLRLIYTIFQEMAKFEEPDILFNMLNCLKILCLHGECLYIARKDHPQFLAYIQDHMLIASLWRVVKSEFSQLSSLAVPLLLHALSLPHGADIFWTIINGNFNSKDWKMRFEAVEKVAVICRFLDIHSVTKNHLLKYSLAHAFCCFLTAVEDVNPAVATRAGLLLDTIKRPALQGLCLCLDFQFDTVVKDRPTILSKLLLLHFLKQDIPALSWEFFVNRFETLSLEAQLHLDCNKEFPFPTTITAVRTNVANLSDAALWKIKRARFARNRQKSVRSLRDSVKGPVESKRALSLPETLTSKIPMRLTRHEQSAPALGGTPEQTPGQQSPENDNTIKDLLPEDAGIDHQTVHQLITVLMKFMAKDESSAESDISSAKAFNTVKRHLYVLLGYDQQEGCFMIAPQKMRLSTCFNAFIAGIAQVMDYNINLGKHLLPLVVQVLKYCSCPQLRHYFQQPPRCSLWSLKPHIRQMWLKALLVILYKYPYRDCDISKILLHLIHITVNTLNAQYHSCKPHATAGPLYSDNSNISRYSEKEKGEIELAEYRETGALQDSLLHCVREESIPKKKLRSFKQKSLDIGNADSLLFTLDEHRRKSCIDRCDIEKPPTQAAYIAQRPNDPGRSRQNSATRPDNSEIPENPAMEGFPDARRPVIPEVRLNCMETFEVKVDSPVKPAPKEDLDLIDLSSDSTSGPEKHSILSTSDSDSLVFEPLPPLRIVESDEEEETMNQGDDGPSGKNAASSPSVPSHPSVLSLSTAPLVQVSVEDCSKDFSSKDSGNNQSAGNTDSALITLEDPMDAEGSSKPEELPEFSCGSPLTLKQKRDLLQKSFALPEMSLDDHPDPGTEGEKPGELMPSSGAKTVLLKVPEDAENPTESEKPDTSAESDTEQNPERKVEEDGAEESEFKIQIVPRQRKQRKIAVSAIQREYLDISFNILDKLGEQKDPDPSTKGLSTLEMPRESSSAPTLDAGVPETSSHSSISTQYRQMKRGSLGVLTMSQLMKRQLEHQSSAPHNISNWDTEQIQPGKRQCNVPTCLNPDLEGQPLRMRGATKSSLLSAPSIVSMFVPAPEEFTDEQPTVMTDKCHDCGAILEEYDEETLGLAIVVLSTFIHLSPDLAAPLLLDIMQSVGRLASSTTFSNQAESMMVPGNAAGVAKQFLRCIFHQLAPNGIFPQLFQSTIKDGTFLRTLASSLMDFNELSSIAALSQLLEGLNNKKNLPAGGAMIRCLENIATFMEALPMDSPSSLWTTISNQFQTFFAKLPCVLPLKCSLDSSLRIMICLLKIPSTNATRSLLEPFSKLLSFVIQNAVFTLAYLVELCGLCYRAFTKERDKFYLSRSVVLELLQALKLKSPLPDTNLLLLVQFICADAGTKLAESTILSKQMIASVPGCGTAAMECVRQYINEVLDFMADMHTLTKLKSHMKTCSQPLHEDTFGGHLKVGLAQIAAMDISRGNHRDNKAVIRYLPWLYHPPSAMQQGPKEFIECVSHIRLLSWLLLGSLTHNAVCPNASSPCLPIPLDAGSHVADHLIVILIGFPEQSKTSVLHMCSLFHAFIFAQLWTVYCEQSAVATNLQNQNEFSFTAILTALEFWSRVTPSILQLMAHNKVMVEMVCLHVISLMEALQECNSTIFVKLIPMWLPMIQSNIKHLSAGLQLRLQAIQNHVNHHSLRTLPGSGQSSAGLAALRKWLQCTQFKMAQVEIQSSEAASQFYPL

SEQ ID NO: 20677 - protein, 366 aa, Homo sapiens
MSDYENDDECWSVLEGFRVTLTSVIDPSRITPYLRQCKVLNPDDEEQVLSDPNLVIRKRKVGVLLDILQRTGHKGYVAFLESLELYYPQLYKKVTGKEPARVFSMIIDASGESGLTQLLMTEVMKLQKKVQDLTALLSSKDDFIKELRVKDSLLRKHQERVQRLKEECEAGSRELKRCKEENYDLAMRLAHQSEEKGAALMRNRDLQLEIDQLKHSLMKAEDDCKVERKHTLKLRHAMEQRPSQELLWELQQEKALLQARVQELEASVQEGKLDRSSPYIQVLEEDWRQALRDHQEQANTIFSLRKDLRQGEARRLRCMEEKEMFELQCLALRKDSKMYKDRIEAILLQMEEVAIERDQSTQMEGL

SEQ ID NO: 20678 - protein, 526 aa, Homo sapiens
MECGIPPTLVCVGRGGGLHTVGVFHVLSQLISLCTIPEVFKEKPKINIIIWYYFPSAWRTCFNISSSVGLLLTNSYKFCPRDRRHAIHGNMGKTRVVRRQKQEQDTTTYSTERSEHFKPCRDKDLAYCLNDGECFVIETLTGSHKHCRCKEGYQGVRCDQFLPKTDSILSDPTDHLGIEFMESEEVYQRQVLSISCIIFGIVIVGMFCAAFYFKSKKQAKQIQEQLKVPQNGKSYSLKASSTMAKSENLVKSHVQLQNYSKVERHPVTALEKMMESSFVGPQSFPEVPSPDRGSQSVKHHRSLSSCCSPGQRSGMLHRNAFRRTPPSPRSRLGGIVGPAYQQLEESRIPDQDTIPCQGYSSSGLKTQRNTSINMQLPSRETNPYFNSLEQKDLVGYSSTRASSVPIIPSVGLEETCLQMPGISEVKSIKWCKNSYSADVVNVSIPVSDCLIAEQQEVKILLETVQEQIRILTDARRSEDYELASVETEDSASENTAFLPLSPTAKSEREAQFVLRNEIQRDSALTK

SEQ ID NO: 20679 - protein, 269 aa, Homo sapiens
MSGCRVFIGRLNPAAREKDVERFFKGYGRIRDIDLKRGFGFVDPRDADDAVYELDGKELCSERVTIEHARARSRGGRGRGRYSDRFSSRRPRNDRRNAPPVRTENRLIVENLSSRVSWQDLKDFMRQAGEVTFADAHRPKLNEGVVEFASYGDLKNAIEKLSGKEINGRKIKLIEGSKRHSRSRSRSRSRTRSSSRSRSRSRSRSRKSYSRSRSRSRSRSRSKSRSVSRSPVPEKSQKRGSSSRSKSPASVDRQRSRSRSRSRSVDSGN

SEQ ID NO: 20680 - protein, 398 aa, Homo sapiens
MHLRIHARRSPPRRPAWTLGIWFLFWGCIVSSVWSSSNVASSSSTSSSPGSHSQHEHHFHGSKHHSVPISIYRSPVSLRGGHAGATYIFGKSGGLILYTWPANDRPSTRSDRLAVGFSTTVKDGILVRIDSAPGLGDFLQLHIEQGKIGVVFNIGTVDISIKEERTPVNDGKYHVVRFTRNGGNATLQVDNWPVNEHYPTGNTDNERFQMVKQKIPFKYNRPVEEWLQEKGRQLTIFNTQAQIAIGGKDKGRLFQGQLSGLYYDGLKVLNMAAENNPNIKINGSVRLVGEVPSILGTTQTTSMPPEMSTTVMETTTTMATTTTRKNRSTASIQPTSDDLVSSAECSSDDEDFVECEPSTGRSARSSNAARSLRAALTWTWRLTYTFTPIIFISCVVHS

SEQ ID NO: 20681 - protein, 436 aa, Homo sapiens
MFIGTADERNLRPHAFYQVHRITGKMVATASYEAVVSGTKVLEMTLLPENNMAANIDCAGILKLRNSDIELRKGETDIGRKNTRVRLVFRVHVPQGGGKVVSVQAASVPIECSQRSAQELPQVEAYSPSACSVRGGEELVLTGSNFLPDSKVVFIERGPDGKLQWEEEATVNRLQSNEVTLTLTVPEYSNKRVSRPVQVYFYVSNGRRKRSPTQSFRFLPVICKEEPLPDSSLRGFPSASATPFGTDMDFSPPRPPYPSYPHEDPACETPYLSEGFGYGMPPLYPQTGPPPSYRPGLRMFPETRGTTGCAQPPAVSFLPRPFPSDPYGGRGSSFSLGLPFSPPAPFRPPPLPASPPLEGPFPSQSDVHPLPAEGYNKVGPGYGPGEGAPEQEKSRGGYSSGFRDSVPIQGITLEEGGCGTGGCECECVQEIALHVC

SEQ ID NO: 20682 - protein, 478 aa, Homo sapiens
MGANASNYPHSCSPRVGGNSQAQQTFIGTSSYSQQGYGCESKLYSLDHGHEKPQDKKKRTSGLATLKKKFIKRRKSNRSADHAKQMRELLSGWDVRDVNALVEEYEGTSALKELSLQASLARPEARTLQKDMADLYEYKYCTDVDLIFQETCFPVHRAILAARCPFFKTLLSSSPEYGAEIIMDINTAGIDMPMFSALLHYLYTGEFGMEDSRFQNVDILVQLSEEFGTPNSLDVDMRGLFDYMCYYDVVLSFSSDSELVEAFGGNQNCLDEELKAHKAVISARSPFFRNLLQRRIRTGEEITDRTLRTPTRIILDESIIPKKYATVILHCMYTDVVDLSVLHCSPSVGSLSEVQALVAGKPNMTRAEEAMELYHIALFLEFNMLAQACLPFVLQRRLQSSGLPVQQSFQTAAYCLNLKYENPSKDNWTFEESFQIETEIRAKRTKSWRKQTMKGAEENFSRIKISLYKRTFYGISET

SEQ ID NO: 20683 - protein, 330 aa, Homo sapiens
IPEALGYVRQALQLQGDDANSLHLLALLLSAQKHYHDALNIIDMALSEYPENFILLFSKVKLQSLCRGPDEALLTCKHMLQIWKSCYNLTNPSDSGRGSSLLDRTIADRRQLNTITLPDFSDPETGNSPEAYFHGFPSLFSVSSVHATSVAASRVEQALSEVASSLQSSAPKQGPLHPWMTLAQIWLHAAEVYIGIGKPAEATACTQEAANLFPMSHNVLYMRGQIAELRGSMDEARRWYEEALAISPTHVKSMQRLALILHQLGRYSLAEKILRDAVQVNSTAHEVWNGLGEVLQAQGNDAAATECFLTALELEASSPAVPFTIIPRVL

SEQ ID NO: 20684 - protein, 1814 aa, Homo sapiens
KRIQSRHPELKRVNRPQASAWKKLELSHEYKNRNQLREYQLEGVNWLLFNWYNRQNCILADEMGLGKTIQSIAFLQEVYNVGIHGPFLVIAPLSTITNWEREFNTWTEMNTIVYHGSLASRQMIQQYEMYCKDSRGRLIPGAYKFDALITTFEMILSDCPELREIEWRCVIIDEAHRLKNRNCKLLDSLKHMDLEHKVLLTGTPLQNTVEELFSLLHFLEPSQFPSESEFLKDFGDLKTEEQVQKLQAILKPMMLRRLKEDVEKNLAPKQETIIEVELTNIQKKYYRAILEKNFSFLSKGAGHTNMPNLLNTMMELRKCCNHPYLINGAEEKILTEFREACHIIPHDFHLQAMVRSAGKLVLIDKLLPKLKAGGHKVLIFSQMVRCLDILEDYLIQRRYLYERIDGRVRGNLRQAAIDRFSKPDSDRFVFLLCTRAGGLGINLTAADTCIIFDSDWNPQNDLQAQARCHRIGQSKAVKVYRLITRNSYEREMFDKASLKLGLDKAVLQSMSGRDGNITGIQQFSKKEIEDLLRKGAYAAIMEEDDEGSKFCEEDIDQILLRRTTTITIESEGKGSTFAKASFVASENRTDISLDDPNFWQKWAKKADLDMDLLNSKNNLVIDTPRVRKQTRHFSTLKDDDLVEFSDLESEDDERPRSRRHDRHHAYGRTDCFRVEKHLLVYGWGRWRDILSHGRFKRRMTERDVETICRAILVYCLLHYRGDENIKGFIWDLISPAENGKTKELQNHSVFDVSPFPGLSIPVPRGRKGKKVKSQSTFDIHKADWIRKYNPDTLFQDESYKKHLKHQCNKVLLRVRMLYYLRQEVIGDQAEKVLGGAIASEIDIWFPVVDQLEVPTTWWDSEADKSLLIGVFKHGYEKYNTMRADPALCFLEKAGRPDDKAIAAEHRVLDNFSDIVEGVDFDKDCEDPEYKPLQGPPKDQDDEGDPLMMMDEEISVIDGDEAQVTQQPGHLFWPPGSALTARLRRLVTAYQRSYKREQMKIEAAERGDRRRRRCEAAFKLKEIARREKQQRWTRREQTDFYRVVSTFGVEYDPDTMQFHWDRFRTFARLDKKTDESLTKYFHGFVAMCRQVCRLPPAAGDEPPDPNLFIEPITEERASRTLYRIELLRRLREQVLCHPLLEDRLALCQPPGPELPKWWEPVRHDGELLRGAARHGVSQTDCNIMQDPDFSFLAARMNYMQNHQAGAPAPSLSRCSTPLLHQQYTSRTASPLPLRPDAPVEKSPEETATQVPSLESLTLKLEHEVVARSRPTPQDYEMRVSPSDTTPLVSRSVPPVKLEDEDDSDSELDLSKLSPSSSSSSSSSSSSSSTDESEDEKEEKLTDQSRSKLYDEESLLSLTMSQDGFPNEDGEQMTPELLLLQERQRASEWPKDRVLINRIDLVCQAVLSGKWPSSRRSQEMVTGGILGPGNHLLDSPSLTPGEYGDSPVPTPRSSSAASMAEEEASAVSTAAAQFTKLRRGMDEKEFTVQIKDEEGLKLTFQKHKLMANGVMGDGHPLFHKKKGNRKKLVELEVECMEEPNHLDVDLETRIPVINKVDGTLLVGEDAPRRAELEMWLQGHPEFAVDPRFLAYMEDRRKQKWQRCKKNNKAELNCLGMEPVQTANSRNGKKGHHTETVFNRVLPGPIAPESSKKRARRMRPDLSKMMALMQGGSTGSLSLHNTFQHSSSGLQSVSSLGHSSATSASLPFMPFVMGGAPSSPHVDSSTMLHHHHHHPHPHHHHHHHPGLRAPGYPSSPVTTASGTTLRLPPLQPEEDDDEDEEDDDDLSQGYDSSERDFSLIDDPMMPANSDSSEDADD

SEQ ID NO: 20685 - protein, 782 aa, Homo sapiens
MPASISSIFPGPTLLLSCGSEELDSEDAPPCCRLALGEPPPYGAAPIGIPRPPPPRPGMHSPPPRPAPSPGTWESQPARSVRLGGPGGGAGGAGGGRVLECPSIRITSISPTPEPPAALEDNPDAWGDGSPRDYPPPEGFGGYREAGGQGGGAFFSPSPGSSSLSSWSFFSDASDEAALYAACDEVESELNEAASRFGLGSPLPSPRASPRPWTPEDPWSLYGPSPGGRGPEDSWLLLSAPGPTPASPRPASPCGKRRYSSSGTPSSASPALSRRGSLGEEGSEPPPPPPLPLARDPGSPGPFDYVGAPPAESIPQKTRRTSSEQAVALPRSEEPASCNGKLPLGAEESVAPPGGSRKEVAGMDYLAVPSPLAWSKARIGGHSPIFRTSALPPLDWPLPSQYEQLELRIEVQPRAHHRAHYETEGSRGAVKAAPGGHPVVKLLGYSEKPLTLQMFIGTADERNLRPHAFYQVHRITGKMVATASYEAVVSGTKVLEMTLLPENNMAANIDCAGILKLRNSDIELRKGETDIGRKNTRVRLVFRVHVPQGGGKVVSVQAASVPIECSQRSAQELPQVEAYSPSACSVRGGEELVLTGSNFLPDSKVVFIERGPDGKLQWEEEATVNRLQSNEVTLTLTVPEYSNKRVSRPVQVYFYVSNGRRKRSPTQSFRFLPVICKEEPLPDSSLRGFPSASATPFGTDMDFSPPRPPYPSYPHEDPACETPYLSEGFGYGMPPLYPQTGPPPSYRPGLRMFPETRGTTVSEIIGRDLSGFPAPPGEEPPA

SEQ ID NO: 20686 - protein, 1777 aa, Homo sapiens
MRPRTKARSPGRALRNPWRGFLPLTLALFVGAGHAQRDPVGRYEPAGGDANRLRRPGGSYPAAAAAKVYSLFREQDAPVAGLQPVERAQPGWGSPRRPTEAEARRPSRAQQSRRVQPPAQTRRSTPLGQQQPAPRTRAAPALPRLGTPQRSGAAPPTPPRGRLTGRNVCGGQCCPGWTTANSTNHCIKPVCEPPCQNRGSCSRPQLCVCRSGFRGARCEEVIPDEEFDPQNSRLAPRRWAERSPNLRRSSAAGEGTLARAQPPAPQSPPAPQSPPAGTLSGLSQTHPSQQHVGLSRTVRLHPTATASSQLSSNALPPGPGLEQRDGTQQAVPLEHPSSPWGLNLTEKIKKIKIVFTPTICKQTCARGHCANSCERGDTTTLYSQGGHGHDPKSGFRIYFCQIPCLNGGRCIGRDECWCPANSTGKFCHLPIPQPDREPPGRGSRPRALLEAPLKQSTFTLPLSNQLASVNPSLVKVHIHHPPEASVQIHQVAQVRGGVEEALVENSVETRPPPWLPASPGHSLWDSNNIPARSGEPPRPLPPAAPRPRGLLGRCYLNTVNGQCANPLLELTTQEDCCGSVGAFWGVTLCAPCPPRPASPVIENGQLECPQGYKRLNLTHCQDINECLTLGLCKDAECVNTRGSYLCTCRPGLMLDPSRSRCVSDKAISMLQGLCYRSLGPGTCTLPLAQRITKQICCCSRVGKAWGSECEKCPLPGTEAFREICPAGHGYTYASSDIRLSMRKAEEEELARPPREQGQRSSGALPGPAERQPLRVVTDTWLEAGTIPDKGDSQAGQVTTSVTHAPAWVTGNATTPPMPEQGIAEIQEEQVTPSTDVLVTLSTPGIDRCAAGATNVCGPGTCVNLPDGYRCVCSPGYQLHPSQAYCTDDNECLRDPCKGKGRCINRVGSYSCFCYPGYTLATSGATQECQDINECEQPGVCSGGQCTNTEGSYHCECDQGYIMVRKGHCQDINECRHPGTCPDGRCVNSPGSYTCLACEEGYRGQSGSCVDVNECLTPGVCAHGKCTNLEGSFRCSCEQGYEVTSDEKGCQDVDECASRASCPTGLCLNTEGSFACSACENGYWVNEDGTACEDLDECAFPGVCPSGVCTNTAGSFSCKDCDGGYRPSPLGDSCEDVDECEDPQSSCLGGECKNTVGSYQCLCPQGFQLANGTVCEDVNECMGEEHCAPHGECLNSHGSFFCLCAPGFVSAEGGTSCQDVDECATTDPCVGGHCVNTEGSFNCLCETGFQPSPESGECVDIDECANDTMCGSHGFCDNTDGSFRCLCDQGFEISPSGWDCVDVNECELMLAVCGAALCENVEGSFLCLCASDLEEYDAQEGHCRPRGAGGQSMSEAPTGDHAPAPTRMDCYSGQKGHAPCSSVLGRNTTQAECCCTQGASWGDACDLCPSEDSAEFSEICPSGKGYIPVEGAWTFGQTMYTDADECVIFGPGLCPNGRCLNTVPGYVCLCNPGFHYDASHKKCEDHDECQDLACENGECVNTEGSFHCFCSPPLTLDLSQQRCMNSTSSTEDLPDHDIHMDICWKKVTNDVCSEPLRGHRTTYTECCCQDGEAWSQQCALCPPRSSEVYAQLCNVARIEAEREAGVHFRPGYEYGPGPDDLHYSIYGPDGAPFYNYLGPEDTVPEPAFPNTAGHSADRTPILESPLQPSELQPHYVASHPEPPAGFEGLQAEECGILNGCENGRCVRVREGYTCDCFEGFQLDAAHMACVDVNECDDLNGPAVLCVHGYCENTEGSYRCHCSPGYVAEAGPPHCTAKE

SEQ ID NO: 20687 - protein, 826 aa, Homo sapiens
MADGGADSAAQRLPEGPGRVAPGRDLGAPAGSMGAASCEDEELEFKLVFGEEKEAPPLGAGGLGEELDSEDAPPCCRLALGEPPPYGAAPIGIPRPPPPRPGMHSPPPRPAPSPGTWESQPARSVRLGGPGGGAGGAGGGRVLECPSIRITSISPTPEPPAALEDNPDAWGDGSPRDYPPPEGFGGYREAGGQGGGAFFSPSPGSSSLSSWSFFSDASDEAALYAACDEVESELNEAASRFGLGSPLPSPRASPRPWTPEDPWSLYGPSPGGRGPEDSWLLLSAPGPTPASPRPASPCGKRRYSSSGTPSSASPALSRRGSLGEEGSEPPPPPPLPLARDPGSPGPFDYVGAPPAESIPQKTRRTSSEQAVALPRSEEPASCNGKLPLGAEESVAPPGGSRKEVAGMDYLAVPSPLAWSKARIGGHSPIFRTSALPPLDWPLPSQYEQLELRIEVQPRAHHRAHYETEGSRGAVKAAPGGHPVVKLLGYSEKPLTLQMFIGTADERNLRPHAFYQVHRITGKMVATASYEAVVSGTKVLEMTLLPENNMAANIDCAGILKLRNSDIELRKGETDIGRKNTRVRLVFRVHVPQGGGKVVSVQAASVPIECSQRSAQELPQVEAYSPSACSVRGGEELVLTGSNFLPDSKVVFIERGPDGKLQWEEEATVNRLQSNEVTLTLTVPEYSNKRVSRPVQVYFYVSNGRRKRSPTQSFRFLPVICKEEPLPDSSLRGFPSASATPFGTDMDFSPPRPPYPSYPHEDPACETPYLSEGFGYGMPPLYPQTGPPPSYRPGLRMFPETRGTTVSEIIGRDLSGFPAPPGEEPPA

SEQ ID NO: 20688 - protein, 507 aa, Homo sapiens
MAVKDTGERLSHAVGCAFAACLERKQKREKECGVTATFDASRTTFTREGSFRVTTATEQAEREEIMKQMQDAKKAETDKIVVGSSVAPGNTAPSPSSPTSPTSDATTSLEMNNPHAIPRRHAPIEQLARQGSFRGFPALSQKMSPFKRQLSLRINELPSTMQRKTDFPIKNAVPEVEGEAESISSLCSQITNAFSTPEDPFSSAPMTKPVTVVAPQSPTFQANGTDSAFHVLAKPAHTALAPVAMPVRETNPWAHAPDAANKEIAATCSGTEWGQSSGAASPGLFQAGHRRTPSEADRWLEEVSKSVRAQQPQASAAPLQPVLQPPPPTAISQPASPFQGNAFLTSQPVPVGVVPALQPAFVPAQSYPVANGMPYPAPNVPVVGITPSQMVANVFGTAGHPQAAHPHQSPSLVRQQTFPHYEASSATTSPFFKPPAQHLNGSAAFNGVDDGRLASADRHTEVPTGTCPVDPFEAQWAALENKSKQRTNPSPTNPFSSDLQKTFEIEL

SEQ ID NO: 20689 - protein, 190 aa, Homo sapiens
MDWKEVLRRRLATPNTCPNKKKSEQELKDEEMDLFTKYYSEWKGGRKNTNEFYKTIPRFYYRLPAEDEVLLQKLREESRAVFLQRKSRELLDNEELQNLWFLLDKHQTPPMIGEEAMINYENFLKVGEKAGAKCKQFFTAKVFAKLLHTDSYGRISIMQFFNYVMRKGDSFLLCLNSLSGNQVGFWSVLL

SEQ ID NO: 20690 - protein, 306 aa, Homo sapiens
MPSSVSWGILLLAGLCCLVPVSLAEDPQGDAAQKTDTSHHDQDHPTFNKITPNLAEFAFSLYRQLAHQSNSTNIFFSPVSIATAFAMLSLGTKADTHDEILEGLNFNLTEIPEAQIHEGFQELLRTLNQPDSQLQLTTGNGLFLSEGLKLVDKFLEDVKKLYHSEAFTVNFGDTEEAKKQINDYVEKGTQGKIVDLVKELDRDTVFALVNYIFFKGKWERPFEVKDTEEEDFHVDQVTTVKVPMMKRLGMFNIQHCKKLSSWVLLMKYLGNATAIFFLPDEGKLQHLENELTHDIITKFLENEDRR

SEQ ID NO: 20691 - protein, 438 aa, Homo sapiens
MRMSSKFPSPPLPIFLPPEPVDLGSITSSSCSLNELDNISHLLRKISADINEIKGMKAAILTVEANLFDLNVRVSKNEAKISSLEVKMNEYSTTYECNRQFEDQEEDTESQSRTTDVKIIGFLRNVEKGTQQRQLLSRLQIDPVMAETLQMSQDYYDMESMVHADTRSFILKKPKLSEEVVVAPNQESGMKTADSLRVLSGHLMQTRDLVQPDKPASPKFIVTLDGVPSPPGYMSDQEEDMCFEGMKPVNQTAASNKGLRGLLHPQQLHLLSRQLEDPNGSFSNAEMSELSVAQKPEKLLERCKYWPACKNGDECAYHHPISPCKAFPNCKFAEKCLFVHPNCKYDAKCTKPDCPFTHVSRRIPVLSPKPAVAPPAPPSSSQLCRYFPACKKMECPFYHPKHCRFNTQCTRPDCTFYHPTINVPPRHALKWIRPQTSE

SEQ ID NO: 20692 - protein, 1275 aa, Homo sapiens
MIKCLSVEVQAKLRSGLAISSLGQCVEELALNSIDAEAKCVAVRVNMETFQVQVIDNGFGMGSDDVEKVGNRYFTSKCHSVQDLENPRFYGFRGEALANIADMASAVEISSKKNRTMKTFVKLFQSGKALKACEADVTRASAGTTVTVYNLFYQLPVRRKCMDPRLEFEKVRQRIEALSLMHPSISFSLRNDVSGSMVLQLPKTKDVCSRFCQIYGLGKSQKLREISFKYKEFELSGYISSEAHYNKNMQFLFVNKRLVLRTKLHKLIDFLLRKESIICKPKNGPTSRQMNSSLRHRSTPELYGIYVINVQCQFCEYDVCMEPAKTLIEFQNWDTLLFCIQEGVKMFLKQEKLFVELSGEDIKEFSEDNGFSLFDATLQKRVTSDERSNFQEACNNILDSYEMFNLQSKAVKRKTTAENVNTQSSRDSEATRKNTNDAFLYIYESGGPGHSKMTEPSLQNKDSSCSESKMLEQETIVASEAGENEKHKKSFLEHSSLENPCGTSLEMFLSPFQTPCHFEESGQDLEIWKESTTVNGMAANILKNNRIQNQPKRFKDATEVGCQPLPFATTLWGVHSAQTEKEKKKESSNCGRRNVFSYGRVKLCSTGFITHVVQNEKTKSTETEHSFKNYVRPGPTRAQETFGNRTRHSVETPDIKDLASTLSKESGQLPNKKNCRTNISYGLENEPTATYTMFSAFQEGSKKSQTDCILSDTSPSFPWYRHVSNDSRKTDKLIGFSKPIVRKKLSLSSQLGSLEKFKRQYGKVENPLDTEVEESNGVTTNLSLQVEPDILLKDKNRLENSDVCKITTMEHSDSDSSCQPASHILNSEKFPFSKDEDCLEQQMPSLRESPMTLKELSLFNRKPLDLEKSSESLASKLSRLKGSERETQTMGMMSRFNELPNSDSSRKDSKLCSVLTQDFCMLFNNKHEKTENGVIPTSDSATQDNSFNKNSKTHSNSNTTENCVISETPLVLPYNNSKVTGKDSDVLIRASEQQIGSLDSPSGMLMNPVEDATGDQNGICFQSEESKARACSETEESNTCCSDWQRHFDVALGRMVYVNKMTGLSTFIAPTEDIQAACTKDLTTVAVDVVLENGYLFRCYHKNLEDLGLEFVFPDTSDSLVLVGKVPLCFVEREANELRRGRSTVTKSIVEEFIREQLELLQTTGGIQGTLPLTVQKVLASQACHGAIKFNDGLSLQESCRLIEALSSCQLPFQCAHGRPSMLPLADIDHLEQEKQIKPNLTKLRKMAQAWRLFGKAECDTRQSLQQSMPPCEPP

SEQ ID NO: 20693 - protein, 865 aa, Homo sapiens
MSLWGLVSKMPPEKVQRLYVDFPQHLRHLLGDWLESQPWEFLVGSDAFCCNLASALLSDTVQHLQASVGEQGEGSTILQHISTLESIYQRDPLKLVATFRQILQGEKKAVMEQFRHLPMPFHWKQEELKFKTGLRRLQHRVGEIHLLREALQKGAEAGQVSLHSLIETPANGTGPSEALAMLLQETTGELEAAKALVLKRIQIWKRQQQLAGNGAPFEESLAPLQERCESLVDIYSQLQQEVGAAGGELEPKTRASLTGRLDEVLRTLVTSCFLVEKQPPQVLKTQTKFQAGVRFLLGLRFLGAPAKPPLVRADMVTEKQARELSVPQGPGAGAESTGEIINNTVPLENSIPGNCCSALFKNLLLKKIKRCERKGTESVTEEKCAVLFSASFTLGPGKLPIQLQALSLPLVVIVHGNQDNNAKATILWDNAFSEMDRVPFVVAERVPWEKMCETLNLKFMAEVGTNRGLLPEHFLFLAQKIFNDNSLSMEAFQHRSVSWSQFNKMRNLMLRGLCSLFKFPKQEILLGRGFTFWQWFDGVLDLTKRCLRSYWSDRLIIGFISKQYVTSLLLNEPDGTFLLRFSDSEIGGITIAHVIRGQDGSPQIENIQPFSAKDLSIRSLGDRIRDLAQLKNLYPKKPKDEAFRSHYKPEQMGKDGRGYVPATIKMTVERDQPLPTPELQMPTMVPSYDLGMAPDSSMSMQLGPDMVPQVYPPHSHSIPPYQGLSPEESVNVLSAFQEPHLQMPPSLGQMSLPFDQPHPQGLLPCQPQEHAVSSPDPLLCSDVTMVEDSCLSQPVTAFPQGTWIGEDIFPPLLPPTEQDLTKLLLEGQGESGGGSLGAQPLLQPSHYGQSGISMSHMDLRANPSW

SEQ ID NO: 20694 - protein, 1347 aa, Homo sapiens
MLCVAGARLKRELDATATVLANRQDESEQSRKRLIEQSREFKKNTPEDLRKQVAPLLKSFQGEIDALSKRSKEAEAAFLNVYKRLIDVPDPVPALDLGQQLQLKVQRLHDIETENQKLRETLEEYNKEFAEVKNQEVTIKALKEKIREYEQTLKNQAETIALEKEQKLQNDFAEKERKLQETQMSTTSKLEEAEHKVQSLQTALEKTRTELFDLKTKYDEETTAKADEIEMIMTDLERANQRAEVAQREAETLREQLSSANHSLQLASQIQKAPDVEQAIEVLTRSSLEVELAAKEREIAQLVEDVQRLQASLTKLRENSASQISQLEQQLSAKNSTLKQLEEKLKGQADYEEVKKELNILKSMEFAPSEGAGTQDAAKPLEVLLLEKNRSLQSENAALRISNSDLSGPYSTNSISSQSPLQQSPDVNGMAPSPSQSESAGSVSEGEEMDTAEIARQVKEQLIKHNIGQRIFGHYVLGLSQGSVSEILARPKPWNKLTVRGKEPFHKMKQFLSDEQNILALRSIQGRQRAEPAQPSSASGSGNSDDAIRSILQQARREMEAQQAALDPALKQAPLSQSDITILTPKLLSTSPMPTVSSYPPLAISLKKPSAAPEAGASALPNPPALKKEAQDAPGLDPQGAADCAQGVLRQVKNEVGRSGAWKDHWWSAVQPERRNAASSEEAKAEETGGGKEKGSGGSGGGSQPRAERSQLQGPSSSEYWKEWPSAESPYSQSSELSLTGASRSETPQNSPLPSSPIVPMSKPTKPSVPPLTPEQYEVYMYQEVDTIELTRQVKEKLAKNGICQRIFGEKVLGLSQGSVSDMLSRPKPWSKLTQKGREPFIRMQLWLNGELGQGVLPVQGQQQGPVLHSVTSLQDPLQQGCVSSESTPKTSASCSPAPESPMSSSESVKSLTELVQQPCPPIEASKDSKPPEPSDPPASDSQPTTPLPLSGHSALSIQELVAMSPELDTYGITKRVKEVLTDNNLGQRLFGETILGLTQGSVSDLLARPKPWHKLSLKGREPFVRMQLWLNDPNNVEKLMDMKRMEKKAYMKRRHSSVSDSQPCEPPSVGTEYSQGASPQPQHQLKKPRVVLAPEEKEALKRAYQQKPYPSPKTIEDLATQLNLKTSTVINWFHNYRSRIRRELFIEEIQAGSQGQAGASDSPSARSGRAAPSSEGDSCDGVEATEGPGSADTEEPKSQGEAEREEVPRPAEQTEPPPSGTPGPDDARDDDHEGGPVEGPGPLPSPASATATAAPAAPEDAATSAAAAPGEGPAAPSSAPPPSNSSSSSAPRRPSSLQSLFGLPEAAGARDSRDNPLRKKKAANLNSIIHRLEKAASREEPIEWEF

SEQ ID NO: 20695 - protein, 797 aa, Homo sapiens
MAVQGSQRRLLGSLNSTPTAIPQLGLAANQTGARCLEVSISDGLFLSLGLVSLVENALVVATIAKNRNLHSPMYCFICCLALSDLLVSGSNVLETAVILLLEAGALVARAAVLQQLDNVIDVITCSSMLSSLCFLGAIAVDRYISIFYALRYHSIVTLPRARRAVAAIWVASVVFSTLFIAYYDHVAVLLCLVVFFLAMLVLMAVLYVHMLARACQHAQGIARLHKRQRPVHQGFGLKGAVTLTILLGIFFLCWGPFFLHLTLIVLCPEHPTCGCIFKNFNLFLALIICNAIIDPLIYAFHSQELRRTLKEVLTCSCSQDRALVSWDVKSLGGSVCQELLPQQPQEKGLCDQKASSTALQRLLQKEFWEVISDEHGIDPSGNYVGDSDLQLERISVYYNEASSHKYVPRAILVDLEPGTMDSVRSGAFGHLFRPDNFIFGQSGAGNNWAKGHYTEGAELVDSVLDVVRKECENCDCLQGFQLTHSLGGGTGSGMGTLLISKVREEYPDRIMNTFSVVPSPKVSDTVVEPYNATLSIHQLVENTDETYCIDNEALYDICFRTLKLATPTYGDLNHLVSATMSGVTTSLRFPGQLNADLRKLAVNMVPFPRLHFFMPGFAPLTARGSQQYRALTVPELTQQMFDAKNMMAACDPRHGRYLTVATVFRGRMSMKEVDEQMLAIQSKNSSYFVEWIPNNVKVAVCDIPPRGLKMSSTFIGNSTAIQELFKRISEQFTAMFRRKAFLHWYTGEGMDEMEFTEAESNMNDLVSEYQQYQDATAEEEGEMYEDDEEESEAQGPK

SEQ ID NO: 20696 - protein, 440 aa, Homo sapiens
MSTIPRHFGLKYKEESYMFKELEKVRQETKKDFLRFKQKLASKPAVDESPVHSLHAPGPARPARVSCAAARTSRRYPSLKGPAMSAAALLQEVLGGAPRPSGLGEAAAPGKTRSFRPRDFYLRSSAFLRHQALKKPPVIASGFGTARPVVLLPPPEPPVKRRARGVLESSRHAAPRRVFHLGREREQSQEVAPLAGPCMAKERKASSVSAEDGYMEASSGRRKVRIRSNFVSESGAREAREAAGLGAQGEQESWPPSDAREAAWQALLPSRVIPTSIEEIIASLQSEAQLASDQTIKELIRSVLGQNYDITMEDISLMGKMYLKTSPMQAETPEIQAEYKFQMGAEESQMSVHKELSETMSSILQIEQEDIEWGPSEAESIVFKPQEISQVQPAEELSKPLEDGQPTSDSKEAKWVSLTHTLYFLKGKITRILANRRKRN

SEQ ID NO: 20697 - protein, 635 aa, Homo sapiens
MATQISTRGSQCTIGQEEYSLYSSLSEDELVQMAIEQSLADKTRGPTTAEATASACTNRQPAHFYPWTRSTAPPESSPARAPMGLFQGVMQKYSSSLFKTSQLAPADPLIKAIKDGDEEALKTMIKEGKNLAEPNKEGWLPLHEAAYYGQVGCLKVLQRAYPGTIDQRTLQEETAVYLATCRGHLDCLLSLLQAGAEPDISNKSRETPLYKACERKNAEAVKILVQHNADTNHRCNRGWTALHESVSRNDLEVMQILVSGGAKVESKNAYGITPLFVAAQSGQLEALRFLAKYGADINTQASDNASALYEACKNEHEEVVEFLLSQGADANKTNKDGLLPLHIASKKGNYRIVQMLLPVTSRTRIRRSGVSPLHLAAERNHDEVLEALLSARFDVNTPLAPERARLYEDRRSSALYFAVVNNNVYATELLLQHGADPNRDVISPLLVAIRHGCLRTMQLLLDHGANIDAYIATHPTAFPATIMFAMKCLSLLKFLMDLGCDGEPCFSCLYGNGPHPPAPQPSSRFNDAPAADKEPSVVQFCEFVSAPEVSRWAGPIIDVLLDYVGNVQLCSRLKEHIDSFEDWAVIKEKAEPPRPLAHLCRLRVRKAIGKYRIKLLDTLPLPGRLIRYLKYENTQ

SEQ ID NO: 20698 - protein, 317 aa, Homo sapiens
MAVQGSQRRLLGSLNSTPTAIPQLGLAANQTGARCLEVSISDGLFLSLGLVSLVENALVVATIAKNRNLHSPMYCFICCLALSDLLVSGSNVLETAVILLLEAGALVARAAVLQQLDNVIDVITCSSMLSSLCFLGAIAVDRYISIFYALRYHSIVTLPRARRAVAAIWVASVVFSTLFIAYYDHVAVLLCLVVFFLAMLVLMAVLYVHMLARACQHAQGIARLHKRQRPVHQGFGLKGAVTLTILLGIFFLCWGPFFLHLTLIVLCPEHPTCGCIFKNFNLFLALIICNAIIDPLIYAFHSQELRRTLKEVLTCSW

SEQ ID NO: 20699 - protein, 1104 aa, Homo sapiens
MEPSRALLGCLASAAAAAPPGEDGAGAGAEEEEEEEEEAAAAVGPGELGCDAPLPYWTAVFEYEAAGEDELTLRLGDVVEVLSKDSQVSGDEGWWTGQLNQRVGIFPSNYVTPRSAFSSRCQPGGEDPSCYPPIQLLEIDFAELTLEEIIGIGGFGKVYRAFWIGDEVAVKAARHDPDEDISQTIENVRQEAKLFAMLKHPNIIALRGVCLKEPNLCLVMEFARGGPLNRVLSGKRIPPDILVNWAVQIARGMNYLHDEAIVPIIHRDLKSSNILILQKVENGDLSNKILKITDFGLAREWHRTTKMSAAGTYAWMAPEVIRASMFSKGSDVWSYGVLLWELLTGEVPFRGIDGLAVAYGVAMNKLALPIPSTCPEPFAKLMEDCWNPDPHSRPSFTNILDQLTTIEESGFFEMPKDSFHCLQDNWKHEIQEMFDQLRAKEKELRTWEEELTRAALQQKNQEELLRRREQELAEREIDILERELNIIIHQLCQEKPRVKKRKGKFRKSRLKLKDGNRISLPSDFQHKFTVQASPTMDKRKSLINSRSSPPASPTIIPRLRAIQLTPGESSKTWGRSSVVPKEEGEEEEKRAPKKKGRTWGPGTLGQKELASGDEGSPQRREKANGLSTPSESPHFHLGLKSLVDGYKQWSSSAPNLVKGPRSSPALPGFTSLMEMEDEDSEGPGSGESRLQHSPSQSYLCIPFPRGEDGDGPSSDGIHEEPTPVNSATSTPQLTPTNSLKRGGAHHRRCEVALLGCGAVLAATGLGFDLLEAGKCQLLPLEEPEPPAREEKKRREGLFQRSSRPRRSTSPPSRKLFKKEEPMLLLGDPSASLTLLSLSSISECNSTRSLLRSDSDEIVVYEMPVSPVEAPPLSPCTHNPLVNVRVERFKRDPNQSLTPTHVTLTTPSQPSSHRRTPSDGALKPETLLASRSPSSNGLSPSPGAGMLKTPSPSRDPGEFPRLPDPNVVFPPTPRRWNTQQDSTLERPKTLEFLPRPRPSANRQRLDPWWFVSPSHARSTSPANSSSTETPSNLDSCFASSSSTVEERPGLPALLPFQAGPLPPTERTLLDLDAEGQSQDSTVPLCRAELNTHRPAPYEIQQEFWS

SEQ ID NO: 20700 - protein, 378 aa, Homo sapiens
MDSVRSGAFGHLFRPDNFIFGQSGAGNNWAKGHYTEGAELVDSVLDVVRKECENCDCLQGFQLTHSLGGGTGSGMGTLLISKVREEYPDRIMNTFSVVPSPKVSDTVVEPYNATLSIHQLVENTDETYCIDNEALYDICFRTLKLATPTYGDLNHLVSATMSGVTTSLRFPGQLNADLRKLAVNMVPFPRLHFFMPGFAPLTARGSQQYRALTVPELTQQMFDAKNMMAACDPRHGRYLTVATVFRGRMSMKEVDEQMLAIQSKNSSYFVEWIPNNVKVAVCDIPPRGLKMSSTFIGNSTAIQELFKRISEQFTAMFRRKAFLHWYTGEGMDEMEFTEAESNMNDLVSEYQQYQDATAEEEGEMYEDDEEESEAQGPK

SEQ ID NO: 20701 - protein, 508 aa, Homo sapiens
MATEGGGKEMNEIKTQFTTREGLYKLLPHSEYSRPNRVPFNSQGSNPVRVSFVNLNDQSGNGDRLCFNVGRELYFYIYKGVRKRLIDKSRVTCVKWVPGSESLFLVAHSSGNMYLYNVEHTCGTTAPHYQLLKQGESFAVHTCKSKSTRNPLLKWTVGEGALNEFAFSPDGKFLACVSQDGFLRVFNFDSVELHGTMKSYFGGLLCVCWSPDGKYIVTGGEDDLVTVWSFVDCRVIARGHGHKSWVSVVAFDPYTTSVEEGDPMEFSGSDEDFQDLLHFGRDRANSTQSRLSKRNSTDSRPVSVTYRFGSVGQDTQLCLWDLTEDILFPHQPLSRARTHTNVMNATSPPAGSNGNSVTTPGNSVPPPLPRSNSLPHSAVSNAGSKSSVMDGAIASGVSKFATLSLHDRKERHHEKDHKRNHSMGHISSKSSDKLNLVTKTKTDPAKTLGTPLCPRMEDVPLLEPLICKKIAHERLTVLIFLEDCIVTACQEGFICTWGRPGKVVSFNP

SEQ ID NO: 20702 - protein, 1481 aa, Homo sapiens
MEKLHGHVSAHPDILSLENRCLAMLPDLQPLEKLHQHVSTHSDILSLKNQCLATLPDLKTMEKPHGYVSAHPDILSLENQCLATLSDLKTMEKPHGHVSAHPDILSLENRCLATLSSLKSTVSASPLFQSLQISHMTQADLYRVNNSNCLLSEPPSWRAQHFSKGLDLSTCPIALKSISATETAQEATLGRWFDSEEKKGAETQMPSYSLSLGEEEEVEDLAVKLTSGDSESHPEPTDHVLQEKKMALLSLLCSTLVSEVNMNNTSDPTLAAIFEICRELALLEPEFILKASLYARQQLNVRNVANNILAIAAFLPACRPHLRRYFCAIVQLPSDWIQVAELYQSLAEGDKNKLVPLPACLRTAMTDKFAQFDEYQLAKYNPRKHRAKRHPRRPPRSPGMEPPFSHRCFPRYIGFLREEQRKFEKAGDTVSEKKNPPRFTLKKLVQRLHIHKPAQHVQALLGYRYPSNLQLFSRSRLPGPWDSSRAGKRMKLSRPETWERELSLRGNKASVWEELIENGKLPFMAMLRNLCNLLRVGISSRHHELILQRLQHAKSVIHSRQFPFRFLNAHDAIDALEAQLRNQALPFPSNITLMRRILTRNEKNRPRRRFLCHLSRQQLRMAMRIPVLYEQLKREKLRVHKARQWKYDGEMLNRYRQALETAVNLSVKHSLPLLPGRTVLVYLTDANADRLCPKSNPQGPPLNYALLLIGMMITRAEQVDVVLCGGDTLKTAVLKAEEGILKTAIKLQAQVQEFDENDGWSLNTFGKYLLSLAGQRVPVDRVILLGQSMDDGMINVAKQLYWQRVNSKCLFVGILLRRVQYLSTDLNPNDVTLSGCTDAILKFIAEHGASHLLEHVGQMDKIFKIPPPPGKTGVQSLRPLEEDTPSPLAPVSQQGWRSIRLFISSTFRDMHGERDLLLRSVLPALQARAAPHRISLHGIDLRWGVTEEETRRNRQLEVCLGEVENAQLFVGILGSRYGYIPPSYNLPDHPHFHWAQQYPSGRSVTEMEVMQFLNRNQRLQPSAQALIYFRDSSFLSSVPDAWKSDFVSESEEAARRISELKSYLSRQKGITCRRYPCEWGGVAAGRPYVGGLEEFGQLVLQDVWNMIQKLYLQPGALLEQPVSIPDDDLVQATFQQLQKPPSPARPRLLQDTVQRLMLPHGRLSLVTGQSGQGKTAFLASLVSALQAPDGAKVASLVFFHFSGARPDQGLALTLLRRLCTYLRGQLKEPGALPSTYRSLVWELQQRLLPKSAESLHPGQTQVLIIDGADRLVDQNGQLISDWIPKKLPRCVHLVLSVSSDAGLGETLEQSQGAHVLALGPLEASARARLVREELALYGKRLEESPFNNQMRLLLVKRESGRPLYLRLVTDHLRLFTLYEQVSERLRTLPATVPLLLQHILSTLEKEHGPDVLPQALTALEVTRSGLTVDQLHGVLSVWRTLPKGTKSWEEAVAAGNSGDPYPMGPFACLVQSLRSSALEDM

SEQ ID NO: 20703 - protein, 165 aa, Homo sapiens
MAAVASRVTAPLYYLLTDQQKTTVIENGEIRFNGKGKKIRKPRTIYSSLQLQALNHRFQQTQYLALPERAELAASLGLTQTQVKIWFQNKRSKFKKLLKQGSNPHESDPLQGSAALSPRSPALPPVWDVSASAKGVSMPPNSYMPGYSHWYSSPHQDTMQRPQMM

SEQ ID NO: 20704 - protein, 917 aa, Homo sapiens
RTNSRFVKVVLMSATISCKEFADYFAVPVQNKMNPAYIFEVEGKPHSVEEYYLNDLEHIHHSKLSPHLLEEPVITKDIYEVAVSLIQMFDDLDMKESGNKAWSGAQFVLERSSVLVFLPGLGEINYMHELLTSLVHKRLQVYPLHSSVALEEQNNVFLSPVPGYRKIILSTNIAESSVTVPDVKYVIDFCLTRTLVCDEDTNYQSLRLSWASKTSCNQRKGRAGRVSRGYCYRLVHKDFWDNSIPDHVVPEMLRCPLGSTILKVKLLDMGEPRALLATALSPPGLSDIERTILLLKEVGALAVSGQREDENPHDGELTFLGRVLAQLPVNQQLGKLIVLGHVFGCLDECLIIAAALSLKNFFAMPFRQHLDGYRNKVNFSGSSKSDCIALVEAFKTWKACRQTGELRYPKDELNWGRLNYIQIKRIREVAELYEELKTRISQFNMHVDSRRPVMDQEYIYKQRFILQVVLAGAFYPNYFTFGQPDEEMAVRELAGKDPKTTVVLKHIPPYGFLYYKQLQSLFRQCGQVKSIVFDGAKAFVEFSRNPTERFKTLPAVYMAIKMSQLKVSLELSVHSAEEIEGKVQGMNVSKLRNTRVNVDFQKQTVDPMQVSFNTSDRSQTVTDLLLTIDVTEVVEVGHFWGYRIDENNSEILKKLTAEINQLTLVPLPTHPHPDLVCLAPFADFDKQRYFRAQVLYVSGNSAEVFFVDYGNKSHVDLHLLMEIPCQFLELPFQALEFKICKMRPSAKSLVCGKHWSDGASQWFASLVSGCTLLVKVFSVVHSVLHVDVYQYSGVQDAINIRDVLIQQGYAELTEESYESKVNILRAAINKLVCDGPNGCKCLGPERVAQLQDIARQKLLGLFCQSKPREKIVPKWHEKPYEWNQVDPKLVMEQADRESSRGKNTFLYQLHKLVVLGT

SEQ ID NO: 20705 - protein, 1061 aa, Homo sapiens
MLGSDDFFYVGGSPSTADLPGSPVSNNFMGCLKEVVYKNNDIRLELSRLARIADTKMKIYGEVVFKCENVATLDPINFETPEAYISLPKWNTKRMGSISFDFRTTEPNGLILFTHGKPQERKDARSQKNTKVDFFAVELLDGNLYLLLDMGSGTIKVKATQKKANDGEWYHVDIQRDGRSGTISVNSRRTPFTASGESEILDLEGDMYLGGLPENRAGLILPTELWTAMLNYGYVGCIRDLFIDGRSKNIRQLAEMQNAAGVKSSCSRMSAKQCDSYPCKNNAVCKDGWNRFICDCTGTGYWGRTCEREASILSYDGSMYMKIIMPMVMHTEAEDVSFRFMSQRAYGLLVATTSRDSADTLRLELDGGRVKLMVNLDCIRINCNSSKGPETLYAGQKLNDNEWHTVRVVRRGKSLKLTVDDDVAEGTMVGDHTRLEFHNIETGIMTEKRYISVVPSSFIGHLQSLMFNGLLYIDLCKNGDIDYCELKARFGLRNIIADPVTFKTKSSYLSLATLQAYTSMHLFFQFKTTSPDGFILFNSGDGNDFIAVELVKGYIHYVFDLGNGPNVIKGNSDRPLNDNQWHNVVITRDNSNTHSLKVDTKVVTQVINGAKNLDLKGDLYMAGLAQGMYSNLPKLVASRDGFQGCLASVDLNGRLPDLINDALHRSGQIERGCEGPSTTCQEDSCANQGVCMQQWEGFTCDCSMTSYSGNQCNDPGATYIFGKSGGLILYTWPANDRPSTRSDRLAVGFSTTVKDGILVRIDSAPGLGDFLQLHIEQGKIGVVFNIGTVDISIKEERTPVNDGKYHVVRFTRNGGNATLQVDNWPVNEHYPTGRQLTIFNTQAQIAIGGKDKGRLFQGQLSGLYYDGLKVLNMAAENNPNIKINGSVRLVGEVPSILGTTQTTSMPPEMSTTVMETTTTMATTTTRKNRSTASIQPTSDDLVSSAECSSDDEDFVECEPSTANPTEPGIRRVPGASEVIRESSSTTGMVVGIVAAAALCILILLYAMYKYRNRDEGSYQVDETRNYISNSAQSNGTLMKEKQQSSKSGHKKQKNKDREYYV

SEQ ID NO: 20706 - protein, 736 aa, Homo sapiens
MLIPALQISDSESVGLEDGIEQSAYLTESKMNESKPGDSQNLACVFCRKHDDCPNKYGEKKTKEKWNLTVHYYCLLMSSGIWQRGKEEEGVYGFLIEDIRKEVNRASKLKCCVCKKNGASIGCVAPRCKRSYHFPCGLQRECIFQFTGNFASFCWDHRPVQIITSNNYRESLPCTICLEFIEPIPSYNILRSPCCKNAWFHRDCLQVQAINAGVFFFRCTICNNSDIFQKEMLRMGIHIPEKDASWELEENAYQELLQHYERCDVRRCRCKEGRDYNAPDSKWEIKRCQCCGSSGTHLACSSLRSWEQNWECLECRGIIYNSGEFQKAKKHVLPNSNNVGITDCLLEESSPKLPRQSPGSQSKDLLRQGSKFRRNVSTLLIELGFQIKKKTKRLYINKANIWNSALDAFRNRNFNPSYAIEVAYVIENDNFGSEHPGSKQEFLSLLMQHLENSSLFEGSLSKNLSLNSQALKENLYYEAGKMLAISLVHGGPSPGFFSKTLFNCLVYGPENTQPILDDVSDFDVAQIIIRINTATTVADLKSIINECYNYLELIGCLRLITTLSDKYMLVKDILGYHVIQRVHTPFESFKQGLKTLGVLEKIQAYPEAFCSILCHKPESLSAKILSELFTVHTLPDVKALGFWNSYLQAVEDGKSTTTMEDILIFATGCSSIPPAGFKPTPSIECLHVDFPVGNKCNNCLAIPITNTYKEFQENMDFTIRNTLRLEKEESSHYIGH

SEQ ID NO: 20707 - protein, 637 aa, Homo sapiens
MHLRIHARRSPPRRPAWTLGIWFLFWGCIVSSVWSSSNVASSSSTSSSPGSHSQHEHHFHGSKHHSVPISIYRSPVSLRGGHAGATYIFGKSGGLILYTWPANDRPSTRSDRLAVGFSTTVKDGILVRIDSAPGLGDFLQLHIEQGKIGVVFNIGTVDISIKEERTPVNDGKYHVVRFTRNGGNATLQVDNWPVNEHYPTGRQLTIFNTQAQIAIGGKDKGRLFQGQLSGLYYDGLKVLNMAAENNPNIKINGSVRLVGEVPSILGTTQTTSMPPEMSTTVMETTTTMATTTTRKNRSTASIQPTSDDLVSSAECSSDDEDFVECEPSTGGELVIPLLVEDPLATPPIATRAPSITLPPTFRPLLTIIETTKDSLSMTSEAGLPCLSDQGSDGCDDDGLVISGYGSGETFDSNLPPTDDEDFYTTFSLVTDKSLSTSIFEGGYKAHAPKWESKDFRPNKVSETSRTTTTSLSPELIRFTASSSSGMVPKLPAGKMNNRDLKPQPDIVLLPLPTAYELDSTKLKSPLITSPMFRNVPTANPTEPGIRRVPGASEVIRESSSTTGMVVGIVAAAALCILILLYAMYKYRNRDEGSYQVDETRNYISNSAQSNGTLMKEKQQSSKSGHKKQKNKDREYYV

SEQ ID NO: 20708 - protein, 334 aa, Homo sapiens
MFWFRISEREKEISGLWNELDSLKDAVEHQRKKNNDLREKNWEAMEALASTEKMLQDKVNKTSKERQQQVEAVELEAKEVLKKLFPKVSVPSNLSYGEWLHGFEKKAKECMAGTSGSEEVKVLEHKLKEADEMHTLLQLECEKYKSVLAETEGILQKLQRSVEQEENKWKVKVDESHKTIKQMQSSFTSSEQELERLRSENKDIENLRREREHLEMELEKAEMERSTYVTEVRELKAQLNETLTKLRTEQNERQKVAGDLHKAQQSLELIQSKIVKAAGDTTVIENSDVSPETESSEKETMSVSLNQTVTQLQQLLQAVNQQLTKEKEHYQVLE

SEQ ID NO: 20709 - protein, 636 aa, Homo sapiens
MMSRACWAKSKHLIHSKTFRGMTLLHLAAAQGYATLIQTLIKWRTKHADSIDLELEVDPLNVDHFSCTPLMWACALGHLEAAVVLYKWDRRAISIPDSLGRLPLGIARSRGHVKLAECLEHLQRDEQAQLGQNPRIHCPASEEPSTESWMAQWHSEAISSPEIPKGVTVIASTNPELRRPRSEPSNYYSSESHKDYPAPKKHKLNPEYFQTRQEKLLPTALSLEEPNIRKQSPSSKQSVPETLSPSEGVRDFSRELSPPTPETAAFQASGSQPVGKWNSKDLYIGVSTVQVTGNPKGTSVGKEAAPSQVRPREPMSVLMMANREVVNTELGSYRDSAENEECGQPMDDIQVNMMTLAEHIIEATPDRIKQENFVPMESSGLERTDPATISSTMSWLASYLADADCLPSAAQIRSAYNEPLTPSSNTSLSPVGSPVSEIAFEKPNLPSAADWSEFLSASTSEKVENEFAQLTLSDHEQRELYEAARLVQTAFRKYKGRPLREQQEVAAAVIQRCYRKYKQLTWIALKYALYKKMTQAAILIQSKFRSYYEQKKFQQSRRAAVLIQKYYRSYKKCGKRRQARRTAVIVQQKLRSSLLTKKQDQAARKIMRFLRRCRHRVKELKKAKELEDIQQHPLAM

SEQ ID NO: 20710 - protein, 134 aa, Homo sapiens
FIAKSFYDLSAISLDGEKENCQNEEILNSLKYVRPGGGYQPTFTLVQKCEVNGQNEHPVFAYLKDKLPYPYDDPFSLMTDPKLIIWSPVRRSDVAWNFEKFLIGPEGEPFRRYSRTFPTINIEPDIKRLLKVAI

SEQ ID NO: 20711 - protein, 1262 aa, Homo sapiens
MRLLLLVPLLLAPAPGSSAPKVRRQSDTWGPWSQWSPCSRTCGGGVSFRERPCYSQRRDGGSSCVGPARSHRSCRTESCPDGARDFRAEQCAEFDGAEFQGRRYRWLPYYSAPNKCELNCIPKGENFYYKHREAVVDGTPCEPGKRDVCVDGSCRVVGCDHELDSSKQEDKCLRCGGDGTTCYPVAGTFDANDLSRGYNQILIVPMGATSILIDEAAASRNFLAVKNVRGEYYLNGHWTIEAARALPAASTILHYERGAEGDLAPERLHARGPTSEPLVIELISQEPNPGVHYEYHLPLRRPSPGFSWSHGSWSDCSAECGGGHQSRLVFCTIDHEAYPDHMCQRQPRPADRRSCNLHPCPETKRWKAGPWAPCSASCGGGSQSRSVYCISSDGAGIQEAVEEAECAGLPGKPPAIQACNLQRCAAWSPEPWGECSVSCGVGVRKRSVTCRGERGSLLHTAACSLEDRPPLTEPCVHEDCPLLSDQAWHVGTWGLCSKSCSSGTRRRQVICAIGPPSHCGSLQHSKPVDVEPCNTQPCHLPQEVPSMQDVHTPASNPWMPLGPQESPASDSRGQWWAAQEHPSARGDHRGERGDPRGDQGTHLSALGPAPSLQQPPYQQPLRSGSGPHDCRHSPHGCCPDGHTASLGPQWQGCPGAPCQQSRYGCCPDRVSVAEGPHHAGCTKSYGGDSTGGMPRSRAVASTVHNTHQPQAQQNEPSECRGSQFGCCYDNVATAAGPLGEGCVGQPSHDWAARWYFVASVGQCNRFWYGGCHGNANNFASEQECMSSCQGSLHGPRRPQPGASGRSTHTDGGGSSPAGEQEPSQHRTGAAVQRKPWPSGGLWRQDQQPGPGEAPHTQAFGEWPWGQELGSRAPGLGGDAGSPAPPFHSSSYRISLAGVEPSLVQAALGQLVRLSCSDDTAPESQAAWQKDGQPISSDRHRLQFDGSLIIHPLQAEDAGTYSCGSTRPGRDSQKIQLRIIGGDMAVLSEAELSRFPQPRDPAQDFGQAGAAGPLGAIPSSHPQPANRLRLDQNQPRVVDASPGQRIRMTCRAEGFPPPAIEWQRDGQPVSSPRHQLQPDGSLVISRVAVEDGGFYTCVAFNGQDRDQRWVQLRVLGELTISGLPPTVTVPEGDTARLLCVVAGESVNIRWSRNGLPVQADGHRVHQSPDGTLLIYNLRARDEGSYTCSAYQGSQAVSRSTEVKVVSPAPTAQPRDPGRDCVDQPELANCDLILQAQLCGNEYYSSFCCASCSRFQPHAQPIWQ

SEQ ID NO: 20712 - protein, 545 aa, Homo sapiens
MAKERGLISPSDFAQLQKYMEYSTKKGGRPEDKLEFTFKLYDTDRNGILDSSEVDKIILQMMRVAEYLDWDVSELRPILQEMMKEIDYDGSGSVSQAEWVRAGATTVPLLVLLGLEMTLKDDGQHMWRPKRFPRPVYCNLCESSIGLGKQGLSCNLCKYTVHDQCAMKALPCEVSTYAKSRKDIGVQSHVWVRGGCESGRCDRCQKKIRIYHSLTGLHCVWCHLEIHDDCLQAVGHECDCGLLRDHILPPSSIYPSVLASGPDRKNSKTSQKTMDDLNLSTSEALRIDPVPNTHPLLVFVNPKSGGKQGQRVLWKFQYILNPRQVFNLLKDGPEIGLRLFKDVPDSRILVCGGDGTVGWILETIDKANLPVLPPVAVLPLGTGNDLARCLRWGGGYEGQNLAKILKDLEMSKVVHMDRWSVEVIPQQTEEKSDPVPFQIINNYFSIGVDASIAHRFHIMREKYPEKFNSRMKNKLWYFEFATSESIFSTCKKLEESLTVEICGKPLDLSNLSLEGIAVLNIPSMHGGSNLWGDTRRPHGDIYGIN

SEQ ID NO: 20713 - protein, 173 aa, Homo sapiens
VSQDPGLSHLMMSEQAREENVATFRGSEYLCYDLSQNPIQSSSDEITLSFKTWQRNGLILHTGKSADYVNLALKDGAVSLVINLGSGAFEAIVEPVNGKFNDNAWHDVKVTRNLRQHSGIGHAMVTISVDGILTTTGYTQEDYTMLGSDDFFYVGGSPSTADLPGSPVSNNFM

SEQ ID NO: 20714 - protein, 382 aa, Homo sapiens
MAVQGSQRRLLGSLNSTPTAIPQLGLAANQTGARCLEVSISDGLFLSLGLVSLVENALVVATIAKNRNLHSPMYCFICCLALSDLLVSGSNVLETAVILLLEAGALVARAAVLQQLDNVIDVITCSSMLSSLCFLGAIAVDRYISIFYALRYHSIVTLPRARRAVAAIWVASVVFSTLFIAYYDHVAVLLCLVVFFLAMLVLMAVLYVHMLARACQHAQGIARLHKRQRPVHQGFGLKGAVTLTILLGIFFLCWGPFFLHLTLIVLCPEHPTCGCIFKNFNLFLALIICNAIIDPLIYAFHSQELRRTLKEVLTCSCSQDRALVSWDVKSLGGSVCQELLPQQPQEKGLCDQKASSTALQRLLQKEVKSLPQAKGPGLQEPP

SEQ ID NO: 20715 - protein, 142 aa, Homo sapiens
RHSYPPALGSPGALAGAGVGAAGPLERRGAQPGRHSVTGYGDCAVGARYQDELTALLRLTVGTGGREAGARGEPSGIEPSGLEEPPGPFVPEAARARMREPEAREDYFGIMLTWSPLHGALCQARSFSPSLEVCSGEKSFYN

SEQ ID NO: 20716 - protein, 1278 aa, Homo sapiens
MRLLLLVPLLLAPAPGSSAPKVRRQSDTWGPWSQWSPCSRTCGGGVSFRERPCYSQRRDGGSSCVGPARSHRSCRTESCPDGARDFRAEQCAEFDGAEFQGRRYRWLPYYSAPNKCELNCIPKGENFYYKHREAVVDGTPCEPGKRDVCVDGSCRVVGCDHELDSSKQEDKCLRCGGDGTTCYPVAGTFDANDLSRGYNQILIVPMGATSILIDEAAASRNFLAVKNVRGEYYLNGHWTIEAARALPAASTILHYERGAEGDLAPERLHARGPTSEPLVIELISQEPNPGVHYEYHLPLRRPSPGFSWSHGSWSDCSAECGGGHQSRLVFCTIDHEAYPDHMCQRQPRPADRRSCNLHPCPETKRWKAGPWAPCSASCGGGSQSRSVYCISSDGAGIQEAVEEAECAGLPGKPPAIQACNLQRCAAWSPEPWGECSVSCGVGVRKRSVTCRGERGSLLHTAACSLEDRPPLTEPCVHEDCPLLSDQAWHVGTWGLCSKSCSSGTRRRQVICAIGPPSHCGSLQHSKPVDVEPCNTQPCHLPQEVPSMQDVHTPASNPWMPLGPQESPASDSRGQWWAAQEHPSARGDHRGERGDPRGDQGTHLSALGPAPSLQQPPYQQPLRSGSGPHDCRHSPHGCCPDGHTASLGPQWQGCPGAPCQQSRYGCCPDRVSVAEGPHHAGCTKSYGGDSTGGMPRSRAVASTVHNTHQPQAQQNEPSECRGSQFGCCYDNVATAAGPLGEGCVGQPSHAYPVRCLLPSAHGSCADWAARWYFVASVGQCNRFWYGGCHGNANNFASEQECMSSCQGSLHGPRRPQPGASGRSTHTDGGGSSPAGEQEPSQHRTGAAVQRKPWPSGGLWRQDQQPGPGEAPHTQAFGEWPWGQELGSRAPGLGGDAGSPAPPFHSSSYRISLAGVEPSLVQAALGQLVRLSCSDDTAPESQAAWQKDGQPISSDRHRLQFDGSLIIHPLQAEDAGTYSCGSTRPGRDSQKIQLRIIGGDMAVLSEAELSRFPQPRDPAQDFGQAGAAGPLGAIPSSHPQPANRLRLDQNQPRVVDASPGQRIRMTCRAEGFPPPAIEWQRDGQPVSSPRHQLQPDGSLVISRVAVEDGGFYTCVAFNGQDRDQRWVQLRVLGELTISGLPPTVTVPEGDTARLLCVVAGESVNIRWSRNGLPVQADGHRVHQSPDGTLLIYNLRARDEGSYTCSAYQGSQAVSRSTEVKVVSPAPTAQPRDPGRDCVDQPELANCDLILQAQLCGNEYYSSFCCASCSRFQPHAQPIWQ

SEQ ID NO: 20717 - protein, 995 aa, Homo sapiens
MAAAPSALLLLPPFPVLSTYRLQSRSRPSAPETDDSRVGGIMRGEKNYYFRGAAGDHGSCPTTTSPLASALLMPSEAVSSSWSESGGGLSGGDEEDTRLLQLLRTARDPSEAFQALQAALPRRGGRLGFPRRKEALYRALGRVLVEGGSDEKRLCLQLLSDVLRGQGEAGQLEEAFSLALLPQLVVSLREENPALRKDALQILHICLKRSPGEVLRTLIQQGLESTDARLRASTALLLPILLTTEDLLLGLDLTEVIISLARKLGDQETEEESETAFSALQQIGERLGQDRFQSYISRLPSALRRHYNRRLESQFGSQVPYYLELEASGFPEDPLPCAVTLSNSNLKFGIIPQELHSRLLDQEDYKNRTQAVEELKQVLGKFNPSSTPHSSLVGFISLLYNLLDDSNFKVVHGTLEVLHLLVIRLGEQVQQFLGPVIAASVKVLADNKLVIKQEYMKIFLKLMKEVGPQQVLCLLLEHLKHKHSRVREEVVNICICSLLTYPSEDFDLPKLSFDLAPALVDSKRRVRQAALEAFAVLASSMGSGKTSILFKAVDTVELQDNGDGVMNAVQARLARKTLPRLTEQGFVEYAVLMPSSAGGRSNHLAHGADTDWLLAGNRTQSAHCHCGDHVRDSMHIYGSYSPTICTRRVLSAGKGKNKLPWENEQPGIMGENQTSTSKDIEQFSTYDFIPSAKLKLSQGMPVNDDLCFSRKRVSRNLFQNSRDFNPDCLPLCAAGTTGTHQTNLSGKCAQLGFSQICGKTGSVGSDLQFLGTTSSHQEKVYASLNFGSKTQQTFGSQTECTSSNGQNPSPGAYILPSYPVSSPRTSPKHTSPLIISPKKSQDNSVNFSNSWPLKSFEGLSKPSPQKKLVSQKSSDPTGRNHGENSQEKPPVQLTPALVRSPSSRRGLNGTKPVPPIPRGISLLPDKADLSTVGHKKKEPDDIWKCEKDSLPIDLSELNFKDKDLDQEEVRHISNIWVKTLSNKTFFCKEKNFSYC

SEQ ID NO: 20718 - protein, 132 aa, Homo sapiens
MVSESDFSKDVAVQVLPLDKIEENNKQKANDIFISQYTMGQKDALRTVLKQKAQSMPVFKEVKVHLLEDAGIEKDAVTQETRISPSGIDSATTVAAATAAAIATAAPLIKVQSDLEAKVNSVTELLSKLQET

SEQ ID NO: 20719 - protein, 114 aa, Homo sapiens
MEKNPLAAPLLILWFHLDCVSSILNVEQSPQSLHVQEGDSTNFTCSFPSSNFYALHWYRWETAKSPEALFVMTLNGDEKKKGRISATLNTKEGYSYLYIKGSQPEDSATYLCAF

SEQ ID NO: 20720 - protein, 43 aa, Homo sapiens
MTEYKLVVVGAGGVGKSALTIQLIQNHFVDEYDPTIEVLLSSM

SEQ ID NO: 20721 - protein, 519 aa, Homo sapiens
MTTGLILFFQSGRPLGAGVRLGLGLRMNRTKGDEEEYWNSSKFKAFTFDDEDDELSQLKESKRAVNSLRDFVDDDDDDDLERVSWSGEPVGSISWSIRETAGNSGSTHEGREQLKSRNSFSSYAQLPKPTSTYSLSSFFRGRTRPGSFQSLSDALSDTPAKSYAPELGRPKGEYRDYSNDWSPSDTVRRLRKGKVCSLERFRSLQDKLQLLEEAVSMHDGNVITAVLIFLKRTLSKEILFRELEVRQVALRHLIHFLKEIGDQKLLLDLFRFLDRTEELALSHYREHLNIQDPDKRKEFLKTCVGLPFSAEDSAHIQDHYTLLERQIIIEANDRHLESAGQTEIFRKHPRKASILNMPLVTTLFYSCFYHYTEAEGTFSSPVNLKKTFKIPDKQYVLTALAARAKLRAWNDVDALFTTKNWLGYTKKRAPIGFHRVVEILHKNNAPVQILQEYVNLVEDVDTKLNLATKFKCHDVVIDTYRDLKDRQQLLAYRSKVDKGSAEEEKIDALLSSSQIRWKN

SEQ ID NO: 20722 - protein, 1465 aa, Homo sapiens
VFAQTFQQTMLPSIRKASLALIRKMIHFCSEALLKEVCDSDVGHNLPTILVEITATVLDQEDDDDGHLLALQIIRDLVDKGGDIFLDQLARLGVISKVSTLAGPSSDDENEEESKPEKEDEPQEDAKELQQGKPYHWRDWSIIRGRDCLYIWSDAAALELSNGSNGWFRFILDGKLATMYSSGSPEGGSDSSESRSEFLEKLQRARGQVKPSTSSQPILSAPGPTKLTVGNWSLTCLKEGEIAIHNSDGQQATILKEDLPGFVFESNRGTKHSFTAETSLGSEFVTGWTGKRGRKLKSKLEKTKQKVRTMARDLYDDHFKAVESMPRGVVVTLRNIATQLESSWELHTNRQCIESENTWRDLMKTALENLIVLLKDENTISPYEMCSSGLVQALLTVLNNSMDLDMKQDCSQLVERINVFKTAFSENEDDESRPAVALIRKLIAVLESIERLPLHLYDTPGSTYNLQILTRRLRFRLERAPGETALIDRTGRMLKMEPLATVESLEQYLLKMVAKQWYDFDRSSFVFVRKLREGQNFIFRHQHDFDENGIIYWIGTNAKTAYEWVNPAAYGLVVVTSSEGRNLPYGRLEDILSRDNSALNCHSNDDKNAWFAIDLGLWVIPSAYTLRHARGYGRSALRNWVFQVSKDGQNWTSLYTHVDDCSLNEPGSTATWPLDPPKDEKQGWRHVRIKQMGKNASGQTHYLSLSGFELYGTVNGVCEDQLGKAAKEAEANLRRQRRLVRSQVLKYMVPGARVIRGLDWKWRDQDGSPQGEGTVTGELHNGTTQSWSSLVKNNCPDKTSAAAGSSSRKGSSSSVCSVASSSDISLGSTKTERRSEIVMEHSIVSGADVHEPIVVLSSAENVPQTEVGSSSSASTSTLTAETGSENAERKLGPDSSVRTPGESSAISMGIVSVSSPDVSSVSELTNKEAASQRPLSSSASNRLSVSSLLAAGAPMSSSASVPNLSSRETSSLESFVRRVANIARTNATNNMNLSRSSSDNNTNTLGRNVMSTATSPLMGAQSFPNLTTPGTTSTVTMSTSSVTSSSNVATATTVLSVGQSLSNTLTTSLTSTSSESDTGQEAEYSLYDFLDSCRASTLLAELDDDEDLPEPDEEDDENEDDNQEDQEYEEVMILRRPSLQRRAGSRSDVTHHAVTSQLPQVPAGAGSRPIGEQEEEEYETKGGRRRTWDDDYVLKRQFSALVPAFDPRPGRTNVQQTTDLEIPPPGTPHSELLEEVECTPSPRLALTLKVTGLGTTREVELPLTNFRSTIFYYVQKLLQLSCNGNVKSDKLRRIWEPTYTIMYREMKDSDKEKENGKMGCWSIEHVEQYLGTDELPKNDLITYLQKNADAAFLRHWKLTGTNKSIRKNRNCSQLIAAYKDFCEHGTKSGLNQGAISTLQSSDILNLTKEQPQAKAGNGQNSCGVEDVLQLLRILYIVASDPYSRISQEDGDEQPQFTFPPDEFTS

SEQ ID NO: 20723 - protein, 372 aa, Homo sapiens
MVWKVAVFLSVALGIGAVPIDDPEDGGKHWVVIVAGSNGWYNYRHQADACHAYQIIHRNGIPDEQIVVMMYDDIAYSEDNPTPGIVINRPNGTDVYQGVPKDYTGEDVTPQNFLAVLRGDAEAVKGIGSGKVLKSGPQDHVFIYFTDHGSTGILVFPNEDLHVKDLNETIHYMYKHKMYRKMVFYIEACESGSMMNHLPDNINVYATTAANPRESSYACYYDEKRSTYLGDWYSVNWMEDSDVEDLTKETLHKQYHLVKSHTNTSHVMQYGNKTISTMKVMQFQGMKRKASSPVPLPPVTHLDLTPSPDVPLTIMKRKLMNTNDLEESRQLTEEIQRHLDDKIVHGPRVPWSLLKSCLLEAFPSVSAPPTVC

SEQ ID NO: 20724 - protein, 2083 aa, Homo sapiens
MFSKKPHGDVKKSTQKVLDTKKDALTRLKHLRIVIENAESIDLKQFFDQHFSHIYYVFFENFVTIEASLKQKGHKSQREELDAILFIFEKILQLLPERIHQRWQFHSIGLILKKLLHTGNSLKIRREGVRLFLLWLQALQNNCSKEQLWMFSCLIPGFSAPQSEHGPRTLDNLINPPLNLQETQVTIEEITPLVPPQSGDKGQEDLTSYFLEALLKYIVIQVKSLEWKNKENQERGFSFLFSHFKKYYLPYIFPNICKENSLYHPILDIPQMRPKPHYVVIKKDAETNEAIYCTKEPFIKARVIVIRWLVSFWLEPKPHTGPHIPGMEGEVLPKNIQRAAASLVSREESKNDNADKTDRTTEPEQSHSNTSTLTEREPSSSSLCSIDEEHLTDIEIVRRVFSSKRSNVNFVTEIFRQAFLLPICEAAAMRKVVKVYQEWIQQEEKPLFMQEPEEIVITSSDLPCIENVTDHDISMEEGEKREEENGTNTADHVRNSSWAKNGSYQGALHNASEEATEQNIRAGTQAVLQVFIINSSNIFLLEPANEIKNLLDEHTDMCKRILNIYRYMVVQVSMDKKTWEQMLLVLLRVTESVLKMPSQAFLQFQGKKNMTLAGRLAGPLFQTLIVAWIKANLNVYISRELWDDLLSVLSSLTYWEELATEWSLTMETLTKVLARNLYSLDLSDLPLDKLSEQKQKKHKGKGVGHEFQKVSVDKSFSRGWSRDQPGQAPMRQRSATTTGSPGTEKARSIVRQKTVAMRSRSIGECALPSAYIRSAKSAPVLIHTSKPFLPDIVLTPLSDELSDIDDAQILPRSTRVRHFSQSEETGNEVFGALNEEQPLPRSSSTSDILEPFTVERAKVNKEDMSQKLPPLNSDIGGSSANVPDLMDEFIAERLRSGNASTMTRRGSSPGSLEIPKDLPDILNKQNQMRPIDDPGVPSEWTSPASAGSSDLISSDSHSDSFSAFQYDGRKFDNFGFGTDTGVTSSADVDSGSGHHQSAEEQEVASLTTLHIDSETSSLNQQAFSAEVATITGSESASPVHSPLGSRSQTPSPSTLNIDHMEQKDLQLDEKLHHSVLQTPDDLEISEFPSECCSVMAGGTLTGWHADVATVMWRRMLGILGDVNSIMDPEIHAQVFDYLCELWQNLAKIRDNLGISTDNLTSPSPPVLIPPLRILTPWLFKATMLTDKYKQGKLHAYKLICNTMKRRQDVSPNRDFLTHFYNIMHCGLLHIDQDIVNTIIKHCSPQFFSLGLPGATMLIMDFIVAAGRVASSAFLNAPRVEAQVLLGSLVCFPNLYCELPSLHPNIPDVAVSQFTDVKELIIKTVLSSARDEPSGPARCVALCSLGIWICEELVHESHHPQIKEALNVICVSLKFTNKTVAHVACNMLHMLVHYVPRLQIYQPDSPLKIIQILIATITHLLPSTEASSYEMDKRLVVSLLLCLLDWIMALPLKTLLQPFHATGAESDKTEKSVLNCIYKVLHGCVYGAQCFSNPRYFPMSLSDLASVDYDPFMHLESLKEPEPLHSPDSERSSKLQPVTEVKTQMQHGLISIAARTVITHLVNHLGHYPMSGGPAMLTSQVCENHDNHYSESTELSPELFESPNIQFFVLNNTTLVSCIQIRSEENMPGGGLSAGLASANSNVRIIVRDLSGKYSWDSAILYGPPPVSGLSEPTSFMLSLSHQEKPEEPPTSNECLEDITVKDGLSLQFKRFRETVPTWDTIRDEEDVLDELLQYLGVTSPECLQRTGISLNIPAPQPVCISEKQENDVINAILKQHTEEKEFVEKHFNDLNMKAVEQDEPIPQKPQSAFYYCRLLLSILGMNSWDKRRSFHLLKKNEKLLRELRNLDSRQCRETHKIAVFYVAEGQEDKHSILTNTGGSQAYEDFVAGLGWEVNLTNHCGFMGGLQKNKSTGLTTPYFATSTVEVIFHVSTRMPSDSDDSLTKKLRHLGNDEVHIVWSEHTRDYRRGIIPTEFGDVLIVIYPMKNHMFSIQIMKKPEVPFFGPLFDGAIVNGKVLPIMVRATAINASRALKSLIPLYQNFYEERARYLQTIVQHHLEPTTFEDFAAQVFSPAPYHHLPSDADH

SEQ ID NO: 20725 - protein, 465 aa, Homo sapiens
MEKILFYLFLIGIAVKAQICPKRCVCQILSPNLATLCAKKGLLFVPPNIDRRTVELRLADNFVTNIKRKDFANMTSLVDLTLSRNTISFITPHAFADLRNLRALHLNSNRLTKITNDMFSGLSNLHHLILNNNQLTLISSTAFDDVFALEELDLSYNNLETIPWDAVEKMVSLHTLSLDHNMIDNIPKGTFSHLHKMTRLDVTSNKLQKLPPDPLFQRAQVLATSGIISPSTFALSFGGNPLHCNCELLWLRRLSREDDLETCASPPLLTGRYFWSIPEEEFLCEPPLITRHTHEMRVLEGQRATLRCKARGDPEPAIHWISPEGKLISNATRSLVYDNGTLDILITTVKDTGAFTCIASNPAGEATQIVDLHIIKLPHLLNSTNHIHEPDPGSSDISTSTKSGSNTSSSNGDTKLSQDKIVVAEATSSTALLKFNFQRNIPGIRMFQIQYNGTYDDTLVYRGWS

SEQ ID NO: 20726 - protein, 346 aa, Homo sapiens
MQNKARLELADYEAENLARLQRAFARKWEFIFMQAEAQVKIDRKKDKTERKILDSQERAFWDVHRPVPGCVNTTEMDIRKCRRLKNPQKVKKSVYGVTEESQAQSPVHVLSQPIRKTTKEDIRKQITFLNAQIDRHCLKMSKVAESLIAYTEQYVEYDPLITPAEPSNPWISDDVALWDIEMSKEPSQQRVKRWGFSFDEILKDQVGRDQFLRFLESEFSSENLRFWLAVQDLKKQPLQDVAKRVEEIWQEFLAPGAPSAINLDSHSYEITSQNVKDGGRYTFEDAQEHIYKLMKSDSYARFLRSNAYQDLLLAKKKPESEQGRRTSLEKFTRSVLYSNTPLAKRP

SEQ ID NO: 20727 - protein, 150 aa, Homo sapiens
MNKFVGLSNVDPKSESLVVCDVAEDLVEKLRKFRFRKETNNAAIIMKIDKDKRLVVLDEELEGISPDELKDELPERQPRTFIVYSYKYQHDDGRVSYPLCFIFSSPVGCKPEQQMMYAGSKNKLVQTAELTKVFEIRNTEDLTEEWLREK

SEQ ID NO: 20728 - protein, 832 aa, Homo sapiens
MELTGLEVALVLILQKVENGDLSNKILKITDFGLAREWHRTTKMSAAGTYAWMAPEVIRASMFSKGSDVWSYGVLLWELLTGEVPFRGIDGLAVAYGVAMNKLALPIPSTCPEPFAKLMEDCWNPDPHSRPSFTNILDQLTTIEESGFFEMPKDSFHCLQDNWKHEIQEMFDQLRAKEKELRTWEEELTRAALQQKNQEELLRRREQELAEREIDILERELNIIIHQLCQEKPRVKKRKGKFRKSRLKLKDGNRISLPSDFQHKFTVQASPTMDKRKSLINSRSSPPASPTIIPRLRAIQLTPGESSKTWGRSSVVPKEEGEEEEKRAPKKKGRTWGPGTLGQKELASGDEGLKSLVDGYKQWSSSAPNLVKGPRSSPALPGFTSLMEMALLAASWVVPIDIEEDEDSEGPGSGESRLQHSPSQSYLCIPFPRGEDGDGPSSDGIHEEPTPVNSATSTPQLTPTNSLKRGGAHHRRCEVALLGCGAVLAATGLGFDLLEAGKCQLLPLEEPEPPAREEKKRREGLFQRSSRPRRSTSPPSRKLFKKEEPMLLLGDPSASLTLLSLSSISECNSTRSLLRSDSDEIVVYEMPVSPVEAPPLSPCTHNPLVNVRVERFKRDPNQSLTPTHVTLTTPSQPSSHRRTPSDGALKPETLLASRSPSSNGLSPSPGAGMLKTPSPSRDPGEFPRLPDPNVVFPPTPRRWNTQQDSTLERPKTLEFLPRPRPSANRQRLDPWWFVSPSHARSTSPANSSSTETPSNLDSCFASSSSTVEERPGLPALLPFQAGPLPPTERTLLDLDAEGQSQDSTVPLCRAELNTHRPAPYEIQQEFWS

SEQ ID NO: 20729 - protein, 224 aa, Homo sapiens
MRRRVHQINGHKFMATYLRQPTYCSHCREFIWGVFGKQGYQCQVCTCVVHKRCHHLIVTACTCQNNINKVDSKIAEQRFGINIPHKFSIHNYKVPTFCDHCGSLLWGIMRQGLQCKICKMNVHIRCQANVAPNCGVNAVELAKTLAGMGLQPGNISPTSKLVSRSTLRRQGKESSKEGNGIGVNSSNRLGIDNFEFIRVLGKGSFGKVMLARVKETGDLYAVKV

SEQ ID NO: 20730 - protein, 292 aa, Homo sapiens
MVLLSTLGIVFQGEGPPISSCDTGTMANCERTFIAIKPDGVQRGLVGEIIKRFEQKGFRLVGLKFMQASEDLLKEHYVDLKDRPFFAGLVKYMHSGPVVAMVWEGLNVVKTGRVMLGETNPADSKPGTIRGDFCIQVGRTMANLERTFIAIKPDGVQRGLVGEIIKRFEQKGFRLVAMKFLRASEEHLKQHYIDLKDRPFFPGLVKYMNSGPVVAMVWEGLNVVKTGRVMLGETNPADSKPGTIRGDFCIQVGRNIIHGSDSVKSAEKEISLWFKPEELVDYKSCAHDWVYE

SEQ ID NO: 20731 - protein, 310 aa, Homo sapiens
MLAWQDGGAKAAPSHHKISFSVLDILDPQKFTRAALPAVRPAPREARKSLAEVEAGKDASSRDPVRQLETPDAAGPGAGQASPLEGSEAEEEEDAEDPRRPRLRERAARLLPGLARSPDAPAGALASGEPCEDGGGGPVRSPPGSPGSPRPRRRRLEPNCAKPRRARTAFTYEQLVALENKFRATRYLSVCERLNLALSLSLTETQVKIWFQNRRTKWKKQNPGADGAAQVGGGAPQPGAAGGGGGGGSGGSPGPPGTGALHFQTFPSYSAANVLFPSAASFPLTAAAPGSPFAPFLGPSYLTPFYAPRL

SEQ ID NO: 20732 - protein, 775 aa, Homo sapiens
MNYMLATRLFQDRGNPRRSLLTGRTRMTADGAPELKIESLNSKAKLHAALYERKLLSLEVRKRRRRSSRLRAMRPKYPVITQPAEMNVKTETESEEEEEVALDNEDEEQEASQEESAGFLRENQAKYTPSLTALVENTPKENSMKVREWNNKGGHCCKLETQELEPKFNLMQILQDNGNLSKMQARIAFSAYLQHVQIRLMKDSGGQTFSASWAAKEDEQMELVVRFLKRASNNLQHSLRMVLPSRRLALLERRRILAHQLGDFIIVYNKETEQMAEKKSKKKVEEEEEDGVNMENFQEFIRQASEAELEEVLTFYTQKNKSASVFLGTHSKISKNNNNYSDSGAKGDHPETIMEEVKIKPPKQQQTTEIHSDKLSRFTTSAEKEAKLVYSNSSSGPTATLQKIPNTHLSSVTTSDLSPGPCHHSSLSQIPSAIPSMPHQPTILLNTVSASASPCLHPGAQNIPSPTGLPRCRSGSHTIGPFSSFQSAAHIYSQKLSRPSSAKAGSCYLNKHHSGIAKTQKEGEDASLYSKRYNQSMVTAELQRLAEKQAARQYSPSSHINLLTQQVTNLNLATGIINRSSASAPPTLRPIISPSGPTWSTQSDPQAPENHSSSPGSRSLQTGGFAWEGEVENNVYSQATGVVPQHKYHPTAGSYQLQFALQQLEQQKLQSRQLLDQSRARHQAIFGSQTLPNSNLWTMNNGAGCRISSATASGQKPTTLPQKVVPPPSSCASLVPKPPPNHEQVLRRATSQKASNTRFRSSFQNYLWYFFQAVS

SEQ ID NO: 20733 - protein, 131 aa, Homo sapiens
EGKARPPDSRLPENDERPAAEYEQPWEWKKEQIVRALSVQFEGAERPSFREETVRQHHRQKSWTQKILKPALSDHSEGEKVDPGLPLEKQPWYHGAISRAEAESRLQPCKEAGYLVRNSESGNSRYSIALK

SEQ ID NO: 20734 - protein, 1126 aa, Homo sapiens
LRASLAQFEQKWTMLITQLPDIQEKLHQLQMEKLPSRKAITEMISWMNNVEHQTSDEDSVHSPSSASQVKHLLQKHKEFRMEMDYKQWIVDFVNQSLLQLSTCDVESKRYERTEFAEHLGEMNRQWHRVHGMLNRKIQHLEQLLESITESENKIQILNNWLEAQEERLKTLQKPESVISVQKLLLDCQDIENQLAIKSKALDELKQSYLTLESGAVPLLEDTASRIDELFQKRSSVLTQVNQLKTSMQSVLQEWKIYDQLYDEVNMMTIRFWYCMEHSKPVVLSLETLRCQVENLQSLQDEAESSEGSWEKLQEVIGKLKGLCPSVAEIIEEKCQNTHKRWTQVNQAIADQLQKAQSLLQLWKAYSNAHGEAAARLKQQEAKFQQLANISMSGNNLAEILPPALQDIKELQHDVQKTKEAFLQNSSVLDRLPQPAESSTHMLLPGPLHSLQRAAYLEKMLLVKANEFEFVLSQFKDFGVRLESLKGLIMHEEENLDRLHQQEKENPDSFLNHVLALTAQSPDIEHLNEVSLKLPLSDVAVKTLQNMNRQWIRATATALERCSELQGIGLNEKFLYCCEKWIQLLEKIEEALKVDVANSLPELLEQQKTYKMLEAEVSINQTIADSYVTQSLQLLDTTEIENRPEFITEFSKLTDRWQNAVQGVRQRKGDVDGLVRQWQDFTTSVENLFRFLTDTSHLLSAVKGQERFSLYQTRSLIHELKNKEIHFQRRRTTCALTLEAGEKLLLTTDLKTKESVGRRISQLQDSWKDMEPQLAEMIKQFQSTVETWDQCEKKIKELKSRLQVLKAQSEDPLPELHEDLHNEKELIKELEQSLASWTQNLKELQTMKADLTRHVLVEDVMVLKEQIEHLHRQWEDLCLRVAIRKQEIEDRLNTWVVFNEKNKELCAWLVQMENKVLQTADISIEEMIEKLQKDCMEEINLFSENKLQLKQMGDQLIKASNKSRAAEIDDKLNKINDRWQHLFDVIGSRVKKLKETFAFIQQLDKNMSNLRTWLARIESELSKPVVYDVCDDQEIQKRLAEQQPTHGVQQKYYLMMTKNAMFIREEVFQFFPMTMHFLFINVIFPKLGNCITIIIKGQDSRDPTSLQATTALAGLYQLGRQGSTARY

SEQ ID NO: 20735 - protein, 140 aa, Homo sapiens
MAELQEVQITEEKPLLPGQTPEAAKEAELAARILLDQGQTHSVETPYGSVTFTVYGTPKPKRPAILTYHDVGLNYKSCFQPLFQFEDMQEIIQNFVRVHVDAPGMEEGAPVFPLGYQYPSLDQLADMIPCVLQYLNFSTI

SEQ ID NO: 20736 - protein, 453 aa, Homo sapiens
MRSGNCRQRYMILTVTILALCLPSPGNAQAQCTNGFDLDRQSGQCLDIDECRTIPEACRGDMMCVNQNGGYLCIPRTNPVYRGPYSNPYSTPYSGPYPAAAPPLSAPNYPTISRPLICRFGYQMDESNQCVDVDECATDSHQCNPTQICINTEGGYTCSCTDGYWLLEGQCLDIDECRYGYCQQLCANVPGSYSCTCNPGFTLNEDGRSCQDVNECATENPCVQTCVNTYGSFICRCDPGYELEEDGVHCSDMDECSFSEFLCQHECVNQPGTYFCSCPPGYILLDDNRSCQDINECEHRNHTCNLQQTCYNLQGGFKCIDPIRCEEPYLRISDNRCMCPAENPGCRDQPFTILYRDMDVVSGRSVPADIFQMQATTRYPGAYYIFQIKSGNEGREFYMRQTGPISATLVMTRPIKGPREIQLDLEMITVNTVINFRGSSVIRLRIYVSQYPF

SEQ ID NO: 20737 - protein, 362 aa, Homo sapiens
MVLKGIWGLLIILSVSSSWVGTTQIVKITYKNFYCPFFMTWFSTNWNIMFFPVYYSGHLATAQEKQSPMKKFRECSRIFGEDGLTLKLFLKRTAPFSILWTLTNYLYLLALKKLTATDVSALFCCNKAFVFLLSWIVLKDRFMGVRIVAAIMAITGIVMMAYADNFHADSIIGVAFAVGSASTSALYKVLFKMFLGSANFGEAAHFVSTLGFFNLIFISFTPVILYFTKVEHWSSFAALPWGCLCGMAGLWLAFNILVNVGVVLTYPILISIGTVLSVPGNAAVDLLKQEVIFNVVRLAATIIICIGFLLMLLPEEWDEITLRFINSLKEKKSEEHVDDVTDPSIHLRGRGRANGTVSIPLA

SEQ ID NO: 20738 - protein, 1977 aa, Homo sapiens
MAARSAPSCHLRLEWVYGYRGHQCRNNLYYTAAKEIVYFVAGVGVVYSPREHRQKFYRGHSDDIISLALHPERVLVATGQVGKEPYICIWDSYTVQTISVLKDVHTHGIACLAFDLDGQRLVSVGLDSKNAVCVWDWKRGKMLSMAPGHTDRIFDISWDLYQPNKLVSCGVKHIKFWSLCGNALTPKRGVFGKTGDLQTILCLACARDELTYSGALNGDIYVWKGINLIRTIQGAHAAGIFSMNACEEGFATGGRDGCIRLWDLTFKPITVIDLRETDQGYKGLSVRSVCWRGDHILVGTQDSEIFEIVVQERNKPFLIMQGHCEGELWALAVHPTKPLAVTGSDDRSVRIWSLVDHALIARCNMEEPIRCAAVNADGIHLALGMKDGSFTVLRVRDMTEVVHIKDRKEAIHELKYSPDGTYLAVGCNDSSVDIYGVAQRYKKVGECLGSLSFITHLDWSSDSRYLQTNDGNGKRLFYRMPGGKEVTSTEEIKGVHWASWTCVSGLEVNGIWPKYSDINDINSVDGNYIGQVLVTADDYGIIKLFRYPCLRKGAKFRKYIGHSAHVTNVRWSHDYQWVISIGGADHSVFQWKFIPERKLKDAVHIAPQESLADSHSDESDSDLSDVPELDSEIEQETQLTYRRQVYKEDLPQLKEQCKEKQKSATSKRRERAPGNSIRLHFVHGYRGYDCRSNLFYTQIGEIVYHVAAVGVIYNRQQNTQRFYLGHDDDILCLTIHPLKDYVATGQVGRDPSIHIWDTETIKPLSILKGHHQYGVSAVDFSADGKRLASVGIDDSHTVVLWDWKKGEKLSIARGSKDKIFVVKMNPYVPDKLITAGIKHMKFWRKAGGGLIGRKGYIGTLGKNDTMMCAVYGWTEEMAFSGTSTGDVCIWRDIFLVKTVKAHDGPVFSMHALEKGFVTGGKDGIVALWDDSFERCLKTYAIKRAALAPGSKGLLLEDNPSIRAISLGHGHILVGTKNGEILEVDKSGPITLLVQGHMEGEVWGLATHPYLPICATVSDDKTLRIWDLSPSHCMLAVRKLKKGGRCCCFSPDGKALAVGLNDGSFLMANADTLEDLVSFHHRKDMISDIRFSPGSGKYLAVASHDSFIDIYNVMSSKRVGICKGATSYITHIDWDIRGKLLQVNTGAKEQLFFEAPRGKKQTIPSVEVEKIAWASWTSVLGLCCEGIWPVIGEVTDVTASCLTSDKMVLATGDDLGFVKLFRYPTKGKFGKFKRYVAHSTHVTNVRWTYDDSMLVTLGGTDMSLMVWTNEMEGYREKRPCDSEESDIDSEEDGGYDSDVTRENEISYTIRALSTNIRPMLGIKPHLQQKEPSIDERQGVVRGSRPPVSRAPPQPEKLQTNNVGKKKRPIEDLVLELIFGYRGRDCRNNVHYLNDGDDIIYHTASVGILHNVATGSQSFYQEHNDDILCLTVNQHPKFINIVATGQVGDSADMSATAPSIHIWDAMNKQTLSILRCYHSKGVCSVSFSATGKLLLSVGLDPEHTITIWRWQEGAKIASRAGHNQRIFVAEFRPDSDTQFVSVGVKHVKFWTLAGRALLSKKGLLSTLEDARMQTMLAIAFGANNLTFTGTISGDVCVWKDHILCRIVARAHNGPVFAMYTTLRDGLIVTGGKERPSKEGGAVKLWDQELRRCRAFRLETGQATDCVRSVCRGKGKILVGTRNAEIIEVGEKNAACNILVNGHVDGPIWGLATHPSRDFFLSAAEDGTVRLWDIADKKMLNKVNLGHAARTVCYSPEGDMVAIGMKNGEFIILLVSSLKIWGKKRDRRCAIHDIRFSPDSRYLAVGSSENSVDFYDLTLGPTLNRISYCKDIPSFVIQMDFSADSSYLQVSSGCYKRHVYEVPSGKHLMDHAAIDRITWATWTSILGDEVLGIWSRHAEKADVNCACVSHSGISLVTGDDFGMVKLFDFPCPEKFAKHKRFLGHSPHVTNIRFTSGDRHVVSAGGDDCSLFVWKCVHTPH

SEQ ID NO: 20739 - protein, 112 aa, Homo sapiens
METVLQVLLGILGFQAAWVSSQELEQSPQSLIVQEGKNLTINCTSSKTLYGLYWYKQKYGEGLIFLMMLQKGGEEKSHEKITAKLDEKKQQSSLHITASQPSHAGIYLCGAD

SEQ ID NO: 20740 - protein, 468 aa, Homo sapiens
MGPVMPPSKKPESSGISVSSGLSQCYGGSGFSKALQEDDDLDFSLPDIRLEEGAMEDEELTNLNWLHESKNLLKSFGESVLRSVSPVQDLDDDTPPSPAHSDMPYDARQNPNCKPPYSFSCLIFMAIEDSPTKRLPVKDIYNWILEHFPYFANAPTGWKNSVRHNLSLNKCFKKVDKERSQSIGKGSLWCIDPEYRQNLIQALKKTPYHPHPHVFNTPPTCPQAYQSTSGPPIWPGSTFFKRNGALLQVPPGVIQNGARVLSRGLFPGVRPLPITPIGVTAAMRNGITSCRMRTESEPSCGSPVVSGDPKEDHNYSSAKSSNARSTSPTSDSISSSSSSADDHYEFATKGSQEGSEGSEGSFRSHESPSDTEEDDRKHSQKEPKDSLGDSGYASQHKKRQHFAKARKVPSDTLPLKKRRTEKPPESDDEEMKEAAGSLLHLAGIRSCLNNITNRTAKGQKEQKETTKN

SEQ ID NO: 20741 - protein, 1564 aa, Homo sapiens
LECMFARTRSTSANGISAIQQGDKNKKFVYSHPKLKKLEEVVIEHFKSWNAENTTEKKRDETRVMIFSSFRDSVQEIAEMLSQHQPIIRVMTFVGHASGKSTKGFTQKEQLEIYNQSQSNKRSIYKAISSNRQVLHFYQRSPRMVPDGINPKLHKMFITHGVYEPEKPSRNLQRKSSIFSYRDGMRQSSLKKDWFLSEEEFKLWNRLYRLRDSDEIKEITLPQVQFSSLQNEENKPAQESTTGIHQLSLSEWRLWQDHPLPTHQVDHSDRCRHFIGLMQMIEGMRHEEGECSYELEVESYLQMEDVTSTFIAPRNESNNLASDTFITHKKSSFIKNINQGSSSSVIESDEECAEIVKQTHIKPTKIVSLKKKVSKEIKKDQLKKENNHGIIDSVDNDRNSTVENIFQEDLPNDKRTSDTDEIAATCTINENVIKEPCVLLTECQFTNKSTSSLAGNVLDSGYNSFNDEKSVSSNLFLPFEEELYIVRTDDQFYNCHSLTKEVLANVERFLSYSPPPLSGLSDLEYEIAKGTALENLLFLPCAEHLRSDKCTCLLSHSAVNSQQNLELNSLKCINYPSEKSCLYDIPNDNISDEPSLCDCDVHKHNQNENLVPNNRVQIHRSPAQNLVGENNHDVDNSDLPVLSTDQDESLLLFEDVNTEFDDVSLSPLNSKSESLPVSDKTAISETPLVSQFLISDELLLDNNSELQDQITRDANSFKSRDQRGVQEEKVKNHEDIFDCSRDLFSVTFDLGFCSPDSDDEILEHTSDSNRPLDDLYGRYLEIKEISDANYVSNQALIPRDHSKNFTSGTVIIPSNEDMQNPNYVHLPLSAAKNEELLSPGYSQFSLPVQKKVMSTPLSKSNTLNSFSKIRKEILKTPDSSKEKVNLQRFKEALNSTFDYSEFSLEKSKSSGPMYLHKSCHSVEDGQLLTSNESEDDEIFRRKVKRAKGNVLNSPEDQKNSEVDSPLHAVKKRRFPINRSELSSSDESENFPKPCSQLEDFKVCNGNARRGIKVPKRQSHLKHVARKFLDDEAELSEEDAEYVSSDENDESENEQDSSLLDFLNDETQLSQAINDSEMRAIYMKSLRSPMMNNKYKMIHKTHKNINIFSQIPEQDETYLEDSFCVDEEESCKGQSSEEEVCVDFNLITDDCFANSKKYKTRRAVMLKEMMEQNCAHSKKKLSRIILPDDSSEEENNVNDKRESNIAVNPSTVKKNKQQDHCLNSVPSGSSAQSKVRSTPRVNPLAKQSKQTSLNLKDTISEVSDFKPQNHNEVQSTTPPFTTVDSQKDCRKFPVPQKDGSALEDSSTSGASCSKSRPHLAGTHTSLRLPQEGKGTCILVGGHEITSGLEVISSLRAIHGLQVEVCPLNGCDYIVSNRMVVERRSQSEMLNSVNKNKFIEQIQHLQSMFERICVIVEKDREKTGDTSRMFRRTKSYDSLLTTLIGAGIRILFSSCQEETADLLKELSLVEQRKNVGIHVPTVVNSNKSEALQFYLSIPNISYITALNMCHQFSSVKRMANSSLQEISMYAQVTHQKAEEIYRYIHYVFDIQMLPNDLNQDRLKSDI

SEQ ID NO: 20742 - protein, 857 aa, Homo sapiens
MITTLPSLLPASLASISHRVTNLPSNSLSHNPGLSKPDFPGNSSPGLPSSSSPGRDLGAPAGSMGAASCEDEELEFKLVFGEEKEAPPLGAGGLGEELDSEDAPPCCRLALGEPPPYGAAPIGIPRPPPPRPGMHSPPPRPAPSPGTWESQPARSVRLGGPGGGAGGAGGGRVLECPSIRITSISPTPEPPAALEDNPDAWGDGSPRDYPPPEGFGGYREAGGQGGGAFFSPSPGSSSLSSWSFFSDASDEAALYAACDEVESELNEAASRFGLGSPLPSPRASPRPWTPEDPWSLYGPSPGGRGPEDSWLLLSAPGPTPASPRPASPCGKRRYSSSGTPSSASPALSRRGSLGEEGSEPPPPPPLPLARDPGSPGPFDYVGAPPAESIPQKTRRTSSEQAVALPRSEEPASCNGKLPLGAEESVAPPGGSRKEVAGMDYLAVPSPLAWSKARIGGHSPIFRTSALPPLDWPLPSQYEQLELRIEVQPRAHHRAHYETEGSRGAVKAAPGGHPVVKLLGYSEKPLTLQMFIGTADERNLRPHAFYQVHRITGKMVATASYEAVVSGTKVLEMTLLPENNMAANIDCAGILKLRNSDIELRKGETDIGRKNTRVRLVFRVHVPQGGGKVVSVQAASVPIECSQRSAQELPQVEAYSPSACSVRGGEELVLTGSNFLPDSKVVFIERGPDGKLQWEEEATVNRLQSNEVTLTLTVPEYSNKRVSRPVQVYFYVSNGRRKRSPTQSFRFLPVICKEEPLPDSSLRGFPSASATPFGTDMDFSPPRPPYPSYPHEDPACETPYLSEGFGYGMPPLYPQTGPPPSYRPGLRMFPETRGTTVSEIIGRDLSGFPAPPGEEPPA

SEQ ID NO: 20743 - protein, 191 aa, Homo sapiens
MSQEGDYGRWTISSSDESEEEKPKPDKPSTSSLLCARQGAANEPRYTCSEAQKAAHKRKISPVKFSNTDSVLPPKRQKSGSQEDLGWCLSSSDDELQPEMPQKQAEKVVIKKEKDISAPNDGTAQRTENHGAPACHRLKEEEDEYETSGEGQDIWDMLDKGNPFQFYLTRVSGVKPKYNSGALHIKGQSYE

SEQ ID NO: 20744 - protein, 115 aa, Homo sapiens
MSPHGDGRGQAQGRAVRVGLRRSGGIRGGVAVFAAVAAVFTFTLPPSVPGGDSGELITAAHELGVAHPPGYPLFTLVAKLAITLFPFGSIAYRVNLLCGLFGAVAASLLFFTVFR

SEQ ID NO: 20745 - protein, 644 aa, Homo sapiens
MAAQGSPSSSPSDDSTTSGSLPELPPTSTATSRSPPESKGSSRSSLLQWTCPEDSLPLAVFYGPLDAKNPLLASCEKEIQELLGFMRKKKALATTEEEKHEFRRRCATSLFNIWTKYAPRLPADYYNEKLLKVGDSLCQMKFHALSGKNMCNYQLVCDSDENLKNKESVVQCLHILSSLRLIMQVALPQEHLCWIIFNGTIYIYTICRKLMVIGQSSKALEYLLWASMCMESLVPLLSLRYLTWRATLYTAVCQCCYDCHAGIHGEAFARRALAKIDELRQLELMSSSKSQEESRRYFREATMKMAVMIFKRGVFESRRKNKAVFRPKIRINLREVQTLSWPRTVTERLLDEMFDSTASQFLAVLEALSDSNRRILQTGPIVTDEVEIHDVVSELFMAGKELLIMSNIGADGMLDFPKTSLLELMIGRKDVISVDAAVKFIKLAFTYEEWSLFESSAVHLIYFLQRQDDPESKKAEKDLTLLIAMEPLINVKRNKGLIFPLENYKEGQSTQIYLKKIAVHDTCLKTCGYSEDIFHLAATLYVCVCTAPQDVQPDKEIVVDTIMFLWQKCKLGIQRLNISRNDYAKFTQKISTNKVFLSHSLSRVFFAIAYSSCHTHFKSKFFLFFTWLMTFICIYTYIKKIFFL

SEQ ID NO: 20746 - protein, 494 aa, Homo sapiens
MNKLRQSFRRKKDVYVPEASRPHQWQTDEEGVRTGKCSFPVKYLGHVEVDESRGMHICEDAVKRLKATGKKAVKAVLWVSADGLRVVDEKTKDLIVDQTIEKVSFCAPDRNFDRAFSYICRDGTTRRWICHCFMAVKDTGERLSHAVGCAFAACLERKQKREKECGVTATFDASRTTFTREGSFRVTTATEQAEREEIMKQMQDAKKVPEVEGEAESISSLCSQITNAFSTPEDPFSSAPMTKPVTVVAPQSPTFQGTEWGQSSGAASPGLFQAGHRRTPSEADRWLEEVSKSVRAQQPQASAAPLQPVLQPPPPTAISQPASPFQGNAFLTSQPVPVGVVPALQPAFVPAQSYPVANGMPYPAPNVPVVGITPSQMVANVFGTAGHPQAAHPHQSPSLVRQQTFPHYEASSATTSPFFKPPAQHLNGSAAFNGVDDGRLASADRHTEVPTGTCPVDPFEAQWAALENKSKQRTNPSPTNPFSSDLQKTFEIEL

SEQ ID NO: 20747 - protein, 595 aa, Homo sapiens
MVPSCCFFRCRKQKDNRYQPNKDVVEQMEKCIQEKDEKLKTVEELLETGLIQVATKEEELNAIRTENSSLTKEVQDLKAKQNDQVSFASLVEELKKVIHEKDGKIKSVEELLEAELLKVANKEKTVQDLKQEIKALKEEIGNVQLEKAQQLSITSKVQELQNLLKGKEEQMNTMKAVLEEKEKDLANTGKWLQDLQEENESLKAHVQEVAQHNLKEASSASQFEELEIVLKEKENELKRLEAMLKERESDLSSKTQLLQDVQDENKLFKSQIEQLKQQNYQQASSFPPHEELLKVISEREKEISGLWNELDSLKDAVEHQRKKNNERQQQVEAVELEAKEVLKKLFPKVSVPSNLSYGEWLHGFEKKAKECMAGTSGSEEVKVLEHKLKEADEMHTLLQLECEKYKSVLAETEGILQKLQRSVEQEENKWKVKVDESHKTIKQMQSSFTSSEQELERLRSENKDIENLRREREHLEMELEKAEMERSTYVTEVRELKAQLNETLTKLRTEQNERQKVAGDLHKAQQSLELIQSKIVKAAGDTTVIENSDVSPETESSEKETMSVSLNQTVTQLQQLLQAVNQQLTKEKEHYQVLE

SEQ ID NO: 20748 - protein, 485 aa, Homo sapiens
MDVKAAPNGVATIEDRILRITGYYGYYPGYSSQKSTSRSSVTRCKPGANCPSSHSGISRQLSPLSVTEDSSAPILELQNQGSSGVCGHRVERQNRSADDGTQTHSENSSQENRIKARCLSCTSMVLKGIWGLLIILSVSSSWVGTTQIVKITYKNFYCPFFMTWFSTNWNIMFFPVYYSGHLATAQEKQSPMKKFRECSRIFGEDGLTLKLFLKRTAPFSILWTLTNYLYLLALKKLTATDVSALFCCNKAFVFLLSWIVLKDRFMGVRIVAAIMAITGIVMMAYADNFHADSIIGVAFAVGSASTSALYKVLFKMFLGSANFGEAAHFVSTLGFFNLIFISFTPVILYFTKVEHWSSFAALPWGCLCGMAGLWLAFNILVNVGVVLTYPILISIGTVLSVPGNAAVDLLKQEVIFNVVRLAATIIICIGFLLMLLPEEWDEITLRFINSLKEKKSEEHVDDVTDPSIHLRGRGRANGTVSIPLA

SEQ ID NO: 20749 - protein, 285 aa, Homo sapiens
MEVTDRIASLEQRVQMQEDDIQLLKSALADVVRRLNITEEQQAVLNRKGPTKARPLMQTLPLRTTVNNGTVLPKKPTGSLPSPSGVRKETAVPATKSNIKRTSSSERVSPGGRRESNGDSRGNRNRTGSTSSSSSGKKNSESKPKEPVFSAEEGYVKMFLRGRPVTMYMPKDQVDSYSLEAKVELPTKRLKLEWVYGYRGRDCRNNLYLLPTGETVYFIASVVVLYNVEEQLQRHYAGHNDDVKCLAVHPDRITIATGQVAGTSKDGKQLPPHVRIWDSVTLNTL

SEQ ID NO: 20750 - protein, 124 aa, Homo sapiens
MSGCRVFIGRLNPAAREKDVERFFKGYGRIRDIDLKRGFGFVEFEDPRDADDAVYELDGKELCSERVTIEHARARSRGGRGRGRYSDRFSSRRPRNDRRNAPPVRTENRLIVENLSSRVSWQVC

SEQ ID NO: 20751 - protein, 631 aa, Homo sapiens
MVVPSKTKIVCHFSTLVLTCGQPHTLQIVPRDEYDNPTNNSMSLRDEHNYTLSIHELGPQEEESTGVSFEKSVTSNRQTFQVFLRLTLHSRGCFHACISYQNQPINNGEFDIIVLSEDEKNIVERNVSTSGVSIYFEAYLYNATNCSSTPWHLPPMHMTSSQRRPSTAVDEEDEDSPSECHTPEKVKKPKKVYCYVSPKQFSVKEFYLKIIPWRLYTFRVCPGTKFSYLGPDPVHKLLTLVVDDGIQPPVELSCKERNILAATFIRSLHKNIGGSETFQDKVNFFQRELRQVHMKRPHSKVTLKVSRHALLESSLKATRNFSISDWSKNFEVVFQDEEALDWGGPRREWFELICKALFDTTNQLFTRFSDNNQALVHPNPNRPAHLRLKMYEFAGRLVGKCLYESSLGGAYKQLVRARFTRSFLAQIIGLRMHYKYFETDDPEFYKSKVCFILNNDMSEMELVFAEEKYNKSGQLDKVVELMTGGAQTPVTNANKIFYLNLLAQYRLASQVKEEVEHFLKGLNELVPENLLAIFDENELELLMCGTGDISVSDFKAHAVVVGGSWHFREKVMRWFWTVVSSLTQEELARLLQFTTGSSQLPPGGFAALCPSFQIIAAPTHSTLPTAHTCFN

SEQ ID NO: 20752 - protein, 1769 aa, Homo sapiens
MRPRTKARSPGRALRNPWRGFLPLTLALFVGAGHAQRDPVGRYEPAGGDANRLRRPGGSYPAAAAAKVYSLFREQDAPVAGLQPVERAQPGWGSPRRPTEAEARRPSRAQQSRRVQPPAQTRRSTPLGQQQPAPRTRAAPALPRLGTPQRSGAAPPTPPRGRLTGRNVCGGQCCPGWTTANSTNHCIKPVCEPPCQNRGSCSRPQLCVCRSGFRGARCEEVIPDEEFDPQNSRLAPRRWAERSPNLRRSSAAGEGTLARAQPPAPQSPPAPQSPPAGTLSGLSQTHPSQQHVGLSRTVRLHPTATASSQLSSNALPPGPGLEQRDGTQQAVPLEHPSSPWGLNLTEKIKKIKIVFTPTICKQTCARGHCANSCERGDTTTLYSQGGHGHDPKSGFRIYFCQIPCLNGGRCIGRDECWCPANSTGKFCHLPIPQPDREPPGRGSRPRALLEAPLKQSTFTLPLSNQLASVNPSLVKVHIHHPPEASVQIHQVAQVRGGVEEALVENSVETRPPPWLPASPGHSLWDSNNIPARSGEPPRPLPPAAPRPRGLLGRCYLNTVNGQCANPLLELTTQEDCCGSVGAFWGVTLCAPCPPRPASPVIENGQLECPQGYKRLNLTHCQDINECLTLGLCKDAECVNTRGSYLCTCRPGLMLDPSRSRCVSDKAISMLQGLCYRSLGPGTCTLPLAQRITKQICCCSRVGKAWGSECEKCPLPGTEAFREICPAGHGYTYASSDIRLSMRKAEEEELARPPREQGQRSSGALPGPAERQPLRVVTDTWLEAGTIPDKGDSQAGQVTTSVTHAPAWVTGNATTPPMPEQGIAEIQEEQVTPSTDVLVTLSTPGIDRCAAGATNVCGPGTCVNLPDGYRCVCSPGYQLHPSQAYCTDDNECLRDPCKGKGRCINRVGSYSCFCYPGYTLATSGATQECQDINECEQPGVCSGGQCTNTEGSYHCECDQGYIMVRKGHCQDINECRHPGTCPDGRCVNSPGSYTCLACEEGYRGQSGSCVDVNECLTPGVCAHGKCTNLEGSFRCSCEQGYEVTSDEKGCQDVDECASRASCPTGLCLNTEGSFACSACENGYWVNEDGTACEDLDECAFPGVCPSGVCTNTAGSFSCKDCDGGYRPSPLGDSCEDVDECEDPQSSCLGGECKNTVGSYQCLCPQGFQLANGTVCEDVNECMGEEHCAPHGECLNSHGSFFCLCAPGFVSAEGGTSCQDVDECATTDPCVGGHCVNTEGSFNCLCETGFQPSPESGECVDIDECEDYGDPVCGTWKCENSPGSYRCVLGCQPGFHMAPNGDCIDIDECANDTMCGSHGFCDNTDGSFRCLCDQGFEISPSGWDCVDVNECELMLAVCGAALCENVEGSFLCLCASDLEEYDAQEGHCRPRGAGGQSMSEAPTGDHAPAPTRMDCYSGQKGHAPCSSVLGRNTTQAECCCTQGASWGDACDLCPSEDSAEFSEICPSGKGYIPVEGAWTFGQTMYTDADECVIFGPGLCPNGRCLNTVPGYVCLCNPGFHYDASHKKCEDHDECQDLACENGECVNTEGSFHCFCSPPLTLDLSQQRCMNSTSSTEDLPDHDIHMDICWKKVTNDVCSEPLRGHRTTYTECCCQDGEAWSQQCALCPPRSSEVYAQLCNVARIEAEREAGVHFRPGYEYGPGPDDLHYSIYGPDGAPFYNYLGPEDTVPEPAFPNTAGHSADRTPILESPLQPSELQPHYVASHPGLCCCKTGEEVGTKAVSLPSPPPASHIASRSPQPASKGFRRRSAAS

SEQ ID NO: 20753 - protein, 189 aa, Homo sapiens
MGRARKSGLGQRSRPTASRSEAAVQPGVRKARGAGNWRVGLQTGEAAPSPHRDLRDTPDPRPWLARTHRMTTTLVSATIFDLSEVLCKGNKMLNYSAPSAGGCLLDRKAVGTPAGGGFPRRHSVTLPSSKFHQNQLLSSLKGEPAPALSSRDSRFRDRSFSEGGERLLPTQKQPGGGQVNSSRYKTELC

SEQ ID NO: 20754 - protein, 1141 aa, Homo sapiens
MAGARSRDPWGASGICYLFGSLLVELLFSRAVAFNLDVMGALRKEGEPGSLFGFSVALHRQLQPRPQSWLLVGAPQALALPGQQANRTGGLFACPLSLEETDCYRVDIDQGADMQKESKENQWLGVSVRSQGPGGKIVTCAHRYEARQRVDQILETRDMIGRCFVLSQDLAIRDELDGGEWKFCEGRPQGHEQFGFCQQGTAAAFSPDSHYLLFGAPGTYNWKGTARVELCAQGSADLAHLDDGPYEAGGEKEQDPRLIPVPANSYFGFSIDSGKGLVRAEELSFVAGAPRANHKGAVVILRKDSASRLVPEVMLSGERLTSGFGYSLAVADLNSDGWPDLIVGAPYFFERQEELGGAVYVYLNQGGHWAGISPLRLCGSPDSMFGISLAVLGDLNQDGFPDIAVGAPFDGDGKVFIYHGSSLGVVAKPSQVLEGEAVGIKSFGYSLSGSLDMDGNQYPDLLVGSLADTAVLFRARPILHVSHEVSIAPRSIDLEQPNCAGGHSVCVDLRVCFSYIAVPSSYSPTVALDYVLDADTDRRLRGQVPRVTFLSRNLEEPKHQASGTVWLKHQHDRVCGDAMFQLQENVKDKLRAIVVTLSYSLQTPRLRRQAPGQGLPPVAPILNAHQPSTQRAEIHFLKQGCGEDKICQSNLQLVRARFCTRVSDTEFQPLPMDVDGTTALFALSGQPVIGLELMVTNLPSDPAQPQADGDDAHEAQLLVMLPDSLHYSGVRALDPAEKPLCLSNENASHVECELGNPMKRGAQVTFYLILSTSGISIETTELEVELLLATISEQELHPVSARARVFIELPLSIAGMAIPQQLFFSGVVRGERAMQSERDVGSKVKYEVTVSNQGQSLRTLGSAFLNIMWPHEIANGKWLLYPMQVELEGGQGPGQKGLCSPRPNILHLDVDSRDRRRRELEPPEQQEPGERQEPSMSWWPVSSAEKKKNITLDCARGTANCVVFSCPLYSFDRAAVLHVWGRLWNSTFLEEYSAVKSLEVIVRANITVKSSIKNLMLRDASTVIPVMVYLDPMAVVAEGVPWWVILLAVLAGLLVLALLVLLLWKMGFFKRAKHPEATVPQYHAVKIPREDRQQFKEEKTGTILRNNWGSPRREGPDAHPILAADGHPELGPDGHPGPGTA

SEQ ID NO: 20755 - protein, 458 aa, Homo sapiens
MGGLGPRRAGTSRERLVVTGRAGWMGMGRGAGRSALGFWPTLAFLLCSFPAATSPCKILKCNSEFWSATSGSHAPASDDTPEFCAALRSYALCTRRTARTCRGDLAYHSAVHGIEDLMSQHNCSKDGPTSQPRLRTLPPAGDSQERSDSPEICHYEKSFHKHSATPNYTHCGLFGDPHLRTFTDRFQTCKVQGAWPLIDNNYLNVQVTNTPVLPGSAATATSKLTIIFKNFQECVDQKVYQAEMDELPAAFVDGSKNGGDKHGANSLKITEKVSGQHVEIQAKYIGTTIVVRQVGRYLTFAVRMPEEVVNAVEDWDSQGLYLCLRGCPLNQQIDFQAFHTNAEGTGARRLAAASPAPTAPETFPYETAVAKCKEKLPVEDLYYQACVFDLLTTGDVNFTLAAYYALEDVKMLHSNKDKLHLYERTRDLPGRAAAGLPLAPRPLLGALVPLLALLPVFC

SEQ ID NO: 20756 - protein, 489 aa, Homo sapiens
MNKSRWQSRRRHGRRSHQQNPWFRLRDSEDRSDSRAAQPAHDSGHGDDESPSTSSGTAGTSSVPELPGFYFDPEKKRYFRLLPGHNNCNPLTKESIRQKEMESKRLRLLQEEDRRKKIARMGFNASSMLRKSQLGFLNVTNYCHLAHELRLSCMERKKVQIRSMDPSALASDRFNLILADTNSDRLFTVNDVKVGGSKYGIINLQSLKTPTLKVFMHENLYFTNRKVNSVCWASLNHLDSHILLCLMGLAETPGCATLLPASLFVNSHPAGIDRPGMLCSFRIPGAWSCAWSLNIQANNCFSTGLSRRVLLTNVVTGHRQSFGTNSDVLAPLLFNGCRSGEIFAIDLRCGNQGKGWKATRLFHDSAVTSVRILQDEQYLMASDMAGKIKLWDLRTTKCVRQYEGHVNEYAYLPLHVHEEEGILVAVGQDCYTRIWSLHDARLLRTIPSPYPASKADIPSVAFSSRLGGSRGAPGLLMAVGQDLYCYSYS

SEQ ID NO: 20757 - protein, 816 aa, Homo sapiens
MDDLVCFEELTDYQLVSPAKNPSSLFSKEAPKRKAQAVSEEEEEEEGKSSSPKKKIKLKKSKNVATEGTSTQKEFEVKDPELEAQGDDMVCDDPEAGEMTSENLVQTAPKKKKNKGKKGLEPSQSTAAKVPKKAKTWIPEVHDQKADVSAWKDLFVPRPVLRALSFLGFSAPTPIQALTLAPAIRDKLDILGAAETGSGKTLAFAIPMIHAVLQWQKRNAAPPPSNTEAPPGETRTEAGAETRSPGKAEAESDALPDDTVIESEALPSDIAAEARAKTGGTVSDQALLFGDDDAGEGPSSLIREKPVPKQNENEEENLDKEQTGNLKQELDDKSATCKAYPKRPLLGLVLTPTRELAVQVKQHIDAVARFTGIKTAILVGGMSTQKQQRMLNRRPEIVVATPGRLWELIKEKHYHLRNLRQLRCLVVDEADRMVEKGHFAELSQLLEMLNDSQYNPKRQTLVFSATLTLVHQAPARILHKKHTKKMDKTAKLDLLMQKIGMRGKPKVIDLTRNEATVETLTETKIHCETDEKDFYLYYFLMQYPGRSLVFANSISCIKRLSGLLKVLDIMPLTLHACMHQKQRLRNLEQFARLEDCVLLATDVAARGLDIPKVQHVIHYQVPRTSEIYVHRSGRTARATNEGLSLMLIGPEDVINFKKIYKTLKKDEDIPLFPVQTKYMDVVKERIRLARQIEKSEYRNFQACLHNSWIEQAAAALEIELEEDMYKGGKADQQEERRRQKQMKVLKKELRHLLSQPLFTESQKTKYPTQSGKPPLLVSAPSKSESALSCLSKQKKKKTKKPKEPQPEQPQPSTSAN

SEQ ID NO: 20758 - protein, 732 aa, Homo sapiens
MQQLYSFSLPVFPSPLYPLQDIAKDFPRGEESLETLEEQSAGVIRNTSPLGAEKITGELEEMRKVLEKLRALWEEEEERLRGLLRSRGAWEQQIKQLEAELSEFRMVLQRLAQEGLQPAAKAGTEDELVAHWRRYSATRAALASEEPRVDRLQAQLKELIVFPHNLKPLSDSVIATIQEYQSLKVKSARLRNAAAVELWQHFQRPLQDLQLWKALAQRLLEVTASLPDLPSLHTFLPQIEAALMESSRLKELLTMLQLKKDLLIGIFGQERATALLEQVAGSMRDRDLLHNSLLQRKSKLQSLLAQHKDFGAAFEPLQRKLLDLQVRVQAEKGLQRDLPGKQAQLSRLQGLQEEGLDLGAQMEAARPLVQENPNHQHKMDQLSSDFQALQRSLEDLVDRCRQSVQEHCTFSHQLLELRQWIVVTTQKLEAHRGEAGPGDAESQEAEFERLVAEFPEKEAQLSLVEAQGWLVMEKSSPEGAAVVQEELRELAESWRALRLLEESLLSLIRNWHLQRMEVDSGKKMVFTNNIPKSGFLINPMDPIPRHRRRANLLQEEEGSHEDFSQLLRNFGQWLQVENSKLVRIIAMRTSTAEDLRTRKSKLQELEARVPEGQHLFENLLRLGPARGTSDELEDLRYQWMLYKSKLKDSGHLLTQSSPGEPTGFQKTRRWRGLGSLFRRACCVALPLQLLLLLFLLLLFLLPIREEDRSCTLANNFARSFTLMLRYNGPPPT

SEQ ID NO: 20759 - protein, 129 aa, Homo sapiens
MAELQEVQITEEKPLLPGQTPEAAKEAELAARILLDQGQTHSVETPYGSVTFTVYGTPKPKRPAILTYHDVGLNYKSCFQPLFQFEDMQEIIQNFVRVHVDAPGMEEGAPVFPLGYQYPSLDQLADMIP

SEQ ID NO: 20760 - protein, 161 aa, Homo sapiens
MSQEGDYGRWTISSSDESEEEKPKPDKPSTSSLLCARQGAANEPRYTCSEAQKAAHKRKISPVKFSNTDSVLPPKRQKSGSQEDLGWCLSSSDDELQPEMPQKQAEKVVIKKEKDISAPNDGTAQRTENHGAPACHRLKEEEDEYETSGEGQDIWDMLDKG

SEQ ID NO: 20761 - protein, 643 aa, Homo sapiens
YSLTFGAINQTWSYRIHQNITYQVCRHAPRHPSFPTTQQLNVDRVFALYNDEERVLRFAVTNQIGPVKEDSDPTPGNPCYDGSHMCDTTARCHPGTGVDYTCECASGYQGDGRNCVDENECATGFHRCGPNSVCINLPGSYRCECRSGYEFADDRHTCIYVDECSENRCHPAATCYNTPGSFSCRCQPGYYGDGFQCIPDSTSSLTPCEQQQRHAQAQYAYPGARFHIPQCDEQGNFLPLQCHGSTGFCWCVDPDGHEVPGTQTPPGSTPPHCGPSPEPTQRPPTICERWRENLLEHYGGTPRDDQYVPQCDDLGHFIPLQCHGKSDFCWCVDKDGREVQGTRSQPGTTPACIPTVAPPMVRPTPRPDVTPPSVGTFLLYTQGQQIGYLPLNGTRLQKDAAKTLLSLHGSIIVGIDYDCRERMVYWTDVAGRTISRAGLELGAEPETIVNSGLISPEGLAIDHIRRTMYWTDSVLDKIESALLDGSERKVLFYTDLVNPRAIAVDPIRGNLYWTDWNREAPKIETSSLDGENRRILINTDIGLPNGLTFDPFSKLLCWADAGTKKLECTLPDGTGRRVIQNNLKYPFSIVSYADHFYHTDWRRDGVVSVNKHSGQFTDEYLPEQRSHLYGITAVYPYCPTGRK

SEQ ID NO: 20762 - protein, 380 aa, Homo sapiens
MATEGMILTNHDHQIRVGVLTVSDSCFRNLAEDRSGINLKDLVQDPSLLGGTISAYKIVPDEIEEIKKFPTFPFCGLQKGATKEVIEREAPGMALAMLMGSLNVTPLGMLSRPVCGIRGKTLIINLPGSKKGSQECFQFILPALPHAIDLLRDAIVKVKEVHDELEDLPSPPPPLSPPPTTSPHKQTEDKGVQCEEEEEEKKDSGVASTEDSSSSHITAAAIAAKKHPFYTSPAVVMAHGEQPIPGLINYSHHSTDERIPDSIISRGVQVLPRDTASLSTTPSESPRAQATSRLSTASCPTPKVQSRCSSKENILRASHSAVDITKVARRHRMSPFPLTSMDKAFITVLEMTPVLGTEIINYRGTIIFDHCPFFSSFFSK

SEQ ID NO: 20763 - protein, 1501 aa, Homo sapiens
MMAKNKEPRPPSYTISIVGLSGTEKDKGNCGVGKSCLCNRFVRSKADEYYPEHTSVLSTIDFGGRVVNNDHFLYWGDIIQNSEDGVECKIHVIEQTEFIDDQTFLPHRSTNLQPYIKRAAASKLQSAEKLMYICTDQLGLEQDFEQKQMPEGKLNVDGFLLCIDVSQGCNRKFDDQLKFVNNLFVQLSKSKKPVIIAATKCDECVDHYLREVQAFASNKKNLLVVETSARFNVNIETCFTALVQMLDKTRSKPKIIPYLDAYKTQRQLVVTATDKFEKLVQTVRDYHATWKTVSNKLKNHPDYEEYINLEGTRKARNTFSKHIEQLKQEHIRKRREEYINTLPRAFNTLLPNLEEIEHLNWSEALKLMEKRADFQLCFVVLEKTPWDETDHIDKINDRRIPFDLLSTLEAEKVYQNHVQHLISEKRRVEMKEKFKKTLEKIQFISPGQPWEEVMCFVMEDEAYKYITEADSKEVYGRHQREIVEKAKEEFQEMLFEHSELFYDLDLNATPSSDKMSEIHTVLSEEPRYKALQKLAPDRESLLLKHIGFVYHPTKETCLSGQNCTDIKVEQLLASSLLQLDHGRLRLYHDSTNIDKVNLFILGKDGLAQELANEIRTQSTDDEYALDGKIYELDLRPVDAKSPYFLSQLWTAAFKPHGCFCVFNSIESLSFIGEFIGKIRTEASQIRKDKYMANLPFTLILANQRDSISKNLPILRHQGQQLANKLQCPFVDVPAGTYPRKFNETQIKQALRGVLESVKHNLDVVSPIPANKDLSEADLRIVMCAMCGDPFSVDLILSPFLDSHSCSAAQAGQNNSLMLDKIIGEKRRRIQITILSYHSSIGVRKDELVHGYILVYSAKRKASMGMLRAFLSEVQDTIPVQLVAVTDSQADFFENEAIKELMTEGEHIATEITAKFTALYSLSQYHRQTEVFTLFFSDVLEKKNMIENSYLSDNTRESTHQSEDVFLPSPRDCFPYNNYPDSDDDTEAPPPYSPIGDDVQLLPTPSDRSRYRLDLEGNEYPIHSTPNCHDHERNHKVPPPIKPKPVVPKTNVKKLDPNLLKTIEAGIGKNPRKQTSRVPLAHPEDMDPSDNYAEPIDTIFKQKGYSDEIYVVPDDSQNRIKIRNSFVNNTQGDEENGFSDRTSKSHGERRPSKYKYKSKTLFSKAKSYYRRTHSDASDDEAFTTSKTKRKGRHRGSEEDPLLSPVETWKGGIDNPAITSDQELDDKKMKKKTHKVKEDKKKKKTKNFNPPTRRNWESNYFGMPLQDLVTAEKPIPLFVEKCVEFIEDTGLCTEGLYRVSGNKTDQDNIQKQFDQDHNINLVSMEVTVNAVAGALKAFFADLPDPLIPYSLHPELLEAAKIPDKTERLHALKEIVKKFHPVNYDVFRYVITHLNRVSQQHKINLMTADNLSICFWPTLMRPDFENREFLSTTKIHQSVVETFIQQCQFFFYNGEIVETTNIVAPPPPSNPGQLVEPMVPLQLPPPLQPQLIQPQLQTDPLGII

SEQ ID NO: 20764 - protein, 305 aa, Homo sapiens
MERMLPLLALGLLAAGFCPAVLCHPNSPLDEENLTQENQDRGTHVDLGLASANVDFAFSLYKQLVLKAPDKNVIFSPLSISTALAFLSLGAHNTTLTEILKGLKFNLTETSEAEIHQSFQHLLRTLNQSSDELQLSMGNAMFVKEQLSLLDRFTEDAKRLYGSEAFATDFQDSAAAKKLINDYVKNGTRGKITDLIKDLDSQTMMVLVNYIFFKAKWEMPFDPQDTHQSRFYLSKKKWVMVPMMSLHHLTIPYFRDEELSCTVVELKYTGNASALFILPDQDKMEEVEAMLLPETLKRWRDSLEF

SEQ ID NO: 20765 - protein, 1339 aa, Homo sapiens
MAKFGVHRILLLAISLTKCLESTKLLADLKKCGDLECEALINRVSAMRDYRGPDCRYLNFTKGEEISVYVKLAGEREDLWAGSKGKEFGYFPRDAVQIEEVFISEEIQMSTKESDFLCLLGVSYTFDNEDSELNGDYGENIYPYEEDKDEKSSIYESDFQIEPGFYATYESTLFEDQVPALEAPEDIGSTSESKDWEEVVVESMEQDRIPEVHVPPSSAVSGVKEWFGLGGEQAEEKAFESVIEPVQESSFRSRKIAVEDENDLEELNNGEPQTEHQQESESEIDSVPKTQSELASESEHIPKPQSTGWFGGGFTSYLGFGDEDTGLELIAEESNPPLQDFPNSISSDKEATVPCTEILTEKKDTITNDSLSLKPSWFDFGFAILGFAYAKEDKIMLDDRKNEEDGGADEHEHPLTSELDPEKEQEIETIKIIETEDQIDKKPVSEKTDESDTIPYLKKFLYNFDNPWNFQNIPKETELPFPKQILDQNNVIENEETGEFSIDNYPTDNTKVMIFKSSYSLSEDASEFQILKYLFQIDVYDFMNSAFSPIVILTERVVAALPEGMRPDSNLYGFPWELVICAAVVGFFAVLFFLWRSFRSVRSRLYVGREKKLALMLSGLIEEKSKLLEKFSLVQKEYEGYEVESSLKDASFEKEATEAQSLEATCEKLNRSNSELEDEILCLEKELKEEKSKHSEQDELMADISKRIQSLEDESKSLKSQVAEAKMTFKIFQMNEERLKIAIKDALNENSQLQESQKQLLQEAEVWKEQVSELNKQKVTFEDSKVHAEQVLNDKESHIKTLTERLLKMKDWAAMLGEDITDDDNLELEMNSESENGAYLDNPPKGALKKLIHAAKLNASLKTLEGERNQIYIQLSEVDKTKEELTEHIKNLQTEQASLQSENTHFENENQKLQQKLKVMTELYQENEMKLHRKLTVEENYRLEKEEKLSKVDEKISHATEELETYRKRAKDLEEELERTIHSYQGQIISHEKKAHDNWLAARNAERNLNDLRKENAHNRQKLTETELKFELLEKDPYALDVPNTAFGREHSPYGPSPLGWPSSETRAFLSPPTLLEGPLRLSPLLPGGGGRGSRGPGNPLDHQITNERGESSCDRLTDPHRAPSDTGSLSPPWDQDRRMMFPPPGQSYPDSALPPQRQDRFCSNSGRLSGPAELRSFNMPSLDKMDGSMPSEMESSRNDTKDDLGNLNVPDSSLPAENEATGPGFVPPPLAPIRGPLFPVDARGPFLRRGPPFPPPPPGAMFGASRDYFPPGDFPGPPPAPFAMRNVYPPRGFPPYLPPRPGFFPPPPHSEGRSEFPSGLIPPSNEPATEHPEPQQET

SEQ ID NO: 20766 - protein, 934 aa, Homo sapiens
MADGGADSAAQRLPEGPGRVAPGRDLGAPAGSMGAASCEDEELEFKLVFGEEKEAPPLGAGGLGEELDSEDAPPCCRLALGEPPPYGAAPIGIPRPPPPRPGMHSPPPRPAPSPGTWESQPARSVRLGGPGGGAGGAGGGRVLECPSIRITSISPTPEPPAALEDNPDAWGDGSPRDYPPPEGFGGYREAGGQGGGAFFSPSPGSSSLSSWSFFSDASDEAALYAACDEVESELNEAASRFGLGSPLPSPRASPRPWTPEDPWSLYGPSPGGRGPEDSWLLLSAPGPTPASPRPASPCGKRRYSSSGTPSSASPALSRRGSLGEEGSEPPPPPPLPLARDPGSPGPFDYVGAPPAESIPQKTRRTSSEQAVALPRSEEPASCNGKLPLGAEESVAPPGGSRKEVAGMDYLAVPSPLAWSKARIGGHSPIFRTSALPPLDWPLPSQYEQLELRIEVQPRAHHRAHYETEGSRGAVKAAPGGHPVVKLLGYSEKPLTLQMFIGTADERNLRPHAFYQVHRITGKMVATASYEAVVSGTKVLEMTLLPENNMAANIDCAGILKLRNSDIELRKGETDIGRKNTRVRLVFRVHVPQGGGKVVSVQAASVPIECSQRSAQELPQVEAYSPSACSVRGGEELVLTGSNFLPDSKVVFIERGPDGKLQWEEEATVNRLQSNEVTLTLTVPEYSNKRVSRPVQVYFYVSNGRRKRSPTQSFRFLPVICKEEPLPDSSLRGFPSASATPFGTDMDFSPPRPPYPSYPHEDPACETPYLSEGFGYGMPPLYPQTGPPPSYRPGLRMFPETRGTTGCAQPPAVSFLPRPFPSDPYGGRGSSFSLGLPFSPPAPFRPPPLPASPPLEGPFPSQSDVHPLPAEGYNKVGPGYGPGEGAPEQEKSRGGYSSGFRDSVPIQGITLEEVSEIIGRDLSGFPAPPGEEPPA

SEQ ID NO: 20767 - protein, 309 aa, Homo sapiens
MANRNNVTEFILLGLTENPKMQKIIFVVFSVIYINAMIGNVLIVVTITASPSLRSPMYFFLAYLSFIDACYSSVNTPKLITDSLYENKTILFNGCMTQVFGEHFFRGVEVILLTVMAYDHYVAICKPLHYTTVMKQHVCSLLVGVSWVGGFLHATIQILFICQLPFCGPNVIDHFMCDLYTLINLACTNTHTLGLFIAANSGFICLLNCLLLLVSCVVILYSLKTHSLEARHEALSTCVSHITVVILSFIPCIFVYMRPPATLPIDKAVAVFYTMITSMLNPLIYTLRNAQMKNAIRKLCSRKAISSVK

SEQ ID NO: 20768 - protein, 151 aa, Homo sapiens
MSQEGDYGRWTISSSDESEEEKPKPDKPSTSSLLCARQGAANEPRYTCSEAQKAAHKRKISPVKFSNTDSVLPPKRQKSGSQEDLGWCLSSSDDELQPEMPQKQAEKVVIKKEKDISAPNDGTAQRTENHGAPACHRLKEEEDEYETSGEG

SEQ ID NO: 20769 - protein, 494 aa, Homo sapiens
MLYFSLFWAARPLQRCGQLVRMAIRAQHSNAAQTQTGEANRGWTGQESLSDSDPEMWELLQREKDRQCRGLELIASENFCSRAALEALGSCLNNKYSEGYPGKRYYGGAEVVDEIELLCQRRALEAFDLDPAQWGVNVQPYSGSPANLAVYTALLQPHDRIMGLDLPDGGHLTHGYMSDVKRISATSIFFESMPYKLNLALTARLFRPRLIIAGTSAYARLIDYARMREVCDEVKAHLLADMAHISGLVAAKVIPSPFKHADIVTTTTHKTLRGARSGLIFYRKGVKAVDPKTGREIPYTFEDRINFAVFPSLQGGPHNHAIAAVAVALKQACTPMFREYSLQVLKNARAMADALLERGYSLVSGGTDNHLVLVDLRPKGLDGARAERVLELVSITANKNTCPGDRSAITPGGLRLGAPALTSRQFREDDFRRVVDFIDEGVNIGLEVKSKTAKLQDFKSFLLKDSETSQRLANLRQRVEQFARAFPMPGFDEH

SEQ ID NO: 20770 - protein, 147 aa, Homo sapiens
MSQEGDYGRWTISSSDESEEEKPKPDKPSTSSLLCARQGAANEPRYTCSEAQKAAHKRKISPVKFSNTDSVLPPKRQKSGSQEDLGWCLSSSDDELQPEMPQKQAEKVVIKKEKDISAPNDGTAQRTENHGAPACHRLKEEEDEYET

SEQ ID NO: 20771 - protein, 244 aa, Homo sapiens
MMDSQTVGKSSKMLQHIDYRMRCILQDGRIFIGTFKAFDKHMNLILCDCDEFRKIKPKNAKQPEREEKRVLGLVLLRGENLVSMTVEGPPPKDTGIARVPLAGAAGGPGVGRAAGRGVPAGVPIPQAPAGLAGPVRGVGGPSQQVMTPQGRGTVAAAAVAATASIAGAPTQYPPGRGTPPPPVGRATPPPGIMAPPPGMRPPMGPPIGLPPARGTPIGMPPPGMRPPPPGIRGPPPPGMRPPRP

SEQ ID NO: 20772 - protein, 148 aa, Homo sapiens
PGQVDAAMAGRIYISGMAPRPSLAKKQRFRHRNRKGYRSQRGHSRGRNQNSRRPSRATWLSLFSSEESNLGANNYDDYRMDWLVPATCEPIQSVFFFSGDKYYRVNLRTRRWQRVGFPPEKADHLQQRAATGAGEGVCSMALPQHQHP

SEQ ID NO: 20773 - protein, 937 aa, Homo sapiens
MALLCGLGSGGMEALTTQLGPGREGSSSPNSKQELQPYSGSSALKPNQVGETSLYGVPIVSLVIDGQERLCLAQISNTLLKNYSYNEIHNRRVALGITCVQCTPVQLEILRRAGAMPISSRRCGMITKREAERLCKSFLGEHKPPKLPENFAFDVVHECAWGSRGSFIPARYNSSRAKCIKCGYCSMYFSPNKFIFHSHRTPDAKYTQPDAANFNSWRRHLKLSDKSATDELSHAWEDVKAMFNGGTRKRTFSLQGGGGGGANGGSGGQGKGGAGGGGGGGPGCGAEMAPGPPPHKSLRCGEDEAAGPPGPPPPHPQRGLGLATGASGPAGPGGPGGGAGVRSYPVIPVPSKGFGLLQKLPPPLFPHPYGFPTAFGLCPKKDDPVLGAGEPKGGPGTGSGGGGAGTGGGAGGPGASHLPPGAGAGPGGGAMFWGHQPSGAAKDAAAVAAAAAAATVYPTFPMFWPAAGSLPVPSYPAAQSQAKAVAAAVAAAAAAAAAAAGSGAPEPLDGAEPAKESGLGAEERCPSALSRGPLDEDGTDEALPPPLAPLPPPPPPPARKGSYVSAFRPVVKDTESIAKLYGSAREAYGAGPARGPGPGAGSGGYVSPDFLSEGSSSYNSASPDVDTADEPEVDVESNRFPDDEDAQEETEPSAPSAGGGPDGEQPTGPPSATSSGADGPANSPDGGSPRPRRRLGPPPAGRPAFGDLAAEDLVRRPERSPPSGGGGYELREPCGPLGGPAPAKVFAPERDEHVKSAAVALGPAASYVCTPEAHEPDKEDNHSPADDLETRKSYPDQRSISQPSPANTDRGEDGLTLDVTGTHLVEKDIENLAREELQKLLLEQMELRKKLEREFQSLKDNFQDQMKRELAYREEMVQQLQIVRDTLCNELDQERKARYAIQQKLKEAHDALHHFSCKMLTPRHCTGNCSFKPPLLP

SEQ ID NO: 20774 - protein, 259 aa, Homo sapiens
MSQEGDYGRWTISSSDESEEEKPKPDKPSTSSLLCARQGAANEPRYTCSEAQKAAHKRKISPVKFSNTDSVLPPKRQKSGSQEDLGWCLSSSDDELQPEMPQKQAEKVVIKKEKDISAPNDGTAQRTENHGAPACHRLKEEEDEYETSGEGQDIWDMLDKGNPFQFYLTRVSGVKPKYNSGALHIKDILSPLFGTLVSSAQFNYCFDVDWLVKQYPPEFRKKPILLVHGDKREAKAHLHAQAKPYENISLCQENDAAAL

SEQ ID NO: 20775 - protein, 1181 aa, Homo sapiens
MAGARSRDPWGASGICYLFGSLLVELLFSRAVAFNLDVMGALRKEGEPGSLFGFSVALHRQLQPRPQSWLLVGAPQALALPGQQANRTGGLFACPLSLEETDCYRVDIDQGADMQKESKENQWLGVSVRSQGPGGKIVTCAHRYEARQRVDQILETRDMIGRCFVLSQDLAIRDELDGGEWKFCEGRPQGHEQFGFCQQGTAAAFSPDSHYLLFGAPGTYNWKGTARVELCAQGSADLAHLDDGPYEAGGEKEQDPRLIPVPANSYFGLLFVTNIDSSDPDQLVYKTLDPADRLPGPAGDLALNSYLGFSIDSGKGLVRAEELSFVAGAPRANHKGAVVILRKDSASRLVPEVMLSGERLTSGFGYSLAVADLNSDGWPDLIVGAPYFFERQEELGGAVYVYLNQGGHWAGISPLRLCGSPDSMFGISLAVLGDLNQDGFPDIAVGAPFDGDGKVFIYHGSSLGVVAKPSQVLEGEAVGIKSFGYSLSGSLDMDGNQYPDLLVGSLADTAVLFRARPILHVSHEVSIAPRSIDLEQPNCAGGHSVCVDLRVCFSYIAVPSSYSPTVALDYVLDADTDRRLRGQVPRVTFLSRNLEEPKHQASGTVWLKHQHDRVCGDAMFQLQENVKDKLRAIVVTLSYSLQTPRLRRQAPGQGLPPVAPILNAHQPSTQRAEIHFLKQGCGEDKICQSNLQLVRARFCTRVSDTEFQPLPMDVDGTTALFALSGQPVIGLELMVTNLPSDPAQPQADGDDAHEAQLLVMLPDSLHYSGVRALDPAEKPLCLSNENASHVECELGNPMKRGAQVTFYLILSTSGISIETTELEVELLLATISEQELHPVSARARVFIELPLSIAGMAIPQQLFFSGVVRGERAMQSERDVGSKVKYEVTVSNQGQSLRTLGSAFLNIMWPHEIANGKWLLYPMQVELEGGQGPGQKGLCSPRPNILHLDVDSRDRRRRELEPPEQQEPGERQEPSMSWWPVSSAEKKKNITLDCARGTANCVVFSCPLYSFDRAAVLHVWGRLWNSTFLEEYSAVKSLEVIVRANITVKSSIKNLMLRDASTVIPVMVYLDPMAVVAEGVPWWVILLAVLAGLLVLALLVLLLWKMGFFKRAKHPEATVPQYHAVKIPREDRQQFKEEKTGTILRNNWGSPRREGPDAHPILAADGHPELGPDGHPGPGTA

SEQ ID NO: 20776 - protein, 99 aa, Homo sapiens
MSGCRVFIGRLNPAAREKDVERFFKGYGRIRDIDLKRGFGFVEFEDPRDADDAVYELDGKELCSERVTIEHARARSRGGRGRGRYSDRFSSRRPRNDRR

SEQ ID NO: 20777 - protein, 592 aa, Homo sapiens
MNKLRQSFRRKKDVYVPEASRPHQWQTDEEGVRTGKCSFPVKYLGHVEVDESRGMHICEDAVKRLKATGKKAVKAVLWVSADGLRVVDEKTKDLIVDQTIEKVSFCAPDRNFDRAFSYICRDGTTRRWICHCFMAVKDTGERLSHAVGCAFAACLERKQKREKECGVTATFDASRTTFTREGSFRVTTATEQAEREEIMKQMQDAKKAETDKIVVGSSVAPGNTAPSPSSPTSPTSDATTSLEMNNPHAIPRRHAPIEQLARQGSFRGFPALSQKMSPFKRQLSLRINELPSTMQRKTDFPIKNAVPEVEGEAESISSLCSQITNAFSTPEDPFSSAPMTKPVTVVAPQSPTFQGTEWGQSSGAASPGLFQAGHRRTPSEADRWLEEVSKSVRAQQPQASAAPLQPVLQPPPPTAISQPASPFQGNAFLTSQPVPVGVVPALQPAFVPAQSYPVANGMPYPAPNVPVVGITPSQMVANVFGTAGHPQAAHPHQSPSLVRQQTFPHYEASSATTSPFFKPPAQHLNGSAAFNGVDDGRLASADRHTEVPTGTCPVDPFEAQWAALENKSKQRTNPSPTNPFSSDLQKTFEIEL

SEQ ID NO: 20778 - protein, 412 aa, Homo sapiens
MTDLYYLSQTDGAGDWREKEAKDLTELVQRRITYLQNPKDCSKAKKLVCNINKGCGYGCQLHHVVYCFMIAYGTQRTLILESQNWRYATGGWETVFRPVSETCTDRSGISTGHWSGEVKDKNVQVVELPIVDSLHPRPPYLPLAVPEDLADRLVRVHGDPAVWWVSQFVKYLIRPQPWLEKEIEEATKKLGFKHPVIGVHVRRTDKVGTEAAFHPIEEYMVHVEEHFQLLARRMQVDKKRVYLATDDPSLLKEAKTKYPNYEFISDNSISWSAGLHNRYTENSLRGVILDIHFLSQADFLVCTFSSQVCRVAYEIMQTLHPDASANFHSLDDIYYFGGQNAHNQIAIYAHQPRTADEIPMEPGDIIGVAGNHWDGYSKGVNRKLGRTGLYPSYKVREKIETVKYPTYPEAEK

SEQ ID NO: 20779 - protein, 122 aa, Homo sapiens
SHVSADSNRGYSRGGRKVPNLQESRYREPGTESIGKGSLWCIDPEYRQNLIQALKKTPYHPHPHVFNTPPTCPQAYQSTSGPPIWPGSTFFKRNGALLQDPDIDAASAMMLLNTPPEIQAGC

SEQ ID NO: 20780 - protein, 929 aa, Homo sapiens
MRLLLLVPLLLAPAPGSSAPKVRRQSDTWGPWSQWSPCSRTCGGGVSFRERPCYSQRRDGGSSCVGPARSHRSCRTESCPDGARDFRAEQCAEFDGAEFQGRRYRWLPYYSAPNKCELNCIPKGENFYYKHREAVVDGTPCEPGKRDVCVDGSCRVVGCDHELDSSKQEDKCLRCGGDGTTCYPVAGTFDANDLSRAVKNVRGEYYLNGHWTIEAARALPAASTILHYERGAEGDLAPERLHARGPTSEPLVIELISQEPNPGVHYEYHLPLRRPSPGFSWSHGSWSDCSAECGGGHQSRLVFCTIDHEAYPDHMCQRQPRPADRRSCNLHPCPETKRWKAGPWAPCSASCGGGSQSRSVYCISSDGAGIQEAVEEAECAGLPGKPPAIQACNLQRCAAWSPEPWGECSVSCGVGVRKRSVTCRGERGSLLHTAACSLEDRPPLTEPCVHEDCPLLSDQAWHVGTWGLCSKSCSSGTRRRQVICAIGPPSHCGSLQHSKPVDVEPCNTQPCHLPQEVPSMQDVHTPASNPWMPLGPQESPASDSRGQWWAAQEHPSARGDHRGERGDPRGDQGTHLSALGPAPSLQQPPYQQPLRSGSGPHDCRHSPHGCCPDGHTASLGPQWQGCPGAPCQQSRYGCCPDRVSVAEGPHHAGCTKSYGGDSTGGMPRSRAVASTVHNTHQPQAQQNEPSECRGSQFGCCYDNVATAAGPLGEGCVGQPSHAYPVRCLLPSAHGSCADWAARWYFVASVGQCNRFWYGGCHGNANNFASEQECMSSCQGSLHGPRRPQPGASGRSTHTDGGGSSPAGEQEPSQHRTGAAVQRKPWPSGGLWRQDQQPGPGEAPHTQAFGEWPWGQELGSRAPGLGGDAGSPAPPFHSSSYRISLAGVEPSLVQAALGQLVRLSCSDDTAPESQAAWQKDGQPISSDRFT

SEQ ID NO: 20781 - protein, 99 aa, Homo sapiens
MAELQEVQITEEKPLLPGQTPEAAKEAELAARILLDQGQTHSVETPYGSVTFTVYGTPKPKRPAILTYHDVGLNYKSCFQPLFQFEDMQEIIQNFVRVH

SEQ ID NO: 20782 - protein, 219 aa, Homo sapiens
MAELQEVQITEEKPLLPGQTPEAAKEAELAARILLDQGQTHSVETPYGSVTFTVYGTPKPKRPAILTYHDVGLNYKSCFQPLFQFEDMQEIIQNFVRVHVDAPGMEEGAPVFPLGYQYPSLDQLADMIPCVLQYLNFSTIIGVGVGAGAYILARYALNHPDTVEGLVLINIDPNAKGWMDWAAHKLTGLTSSIPEMILGHLFSQEELSGNSELIQKYRN

SEQ ID NO: 20783 - protein, 75 aa, Homo sapiens
MTEYKLVVVGAGGVGKSALTIQLIQNHFVDEYDPTIEGVDDAFYTLVREIRKHKEKMSKDGKKKKKKSKTKCVIM

SEQ ID NO: 20784 - protein, 362 aa, Homo sapiens
MAEVPPGPSSLLPPPAPPAPAAVEPRCPFPAGAALACCSEDEEDDEEHEGGGSRSPAGGESATVAAKGHPCLRCPQPPQEQQQLNGLISPELRHLRAAASLKSKVLSVAEVAATTATPDGGPRATATKGAGVHSGERPPHSLSSNARTAVPSPVEAAAASDPAAARNGLAEGTEQEEEEEDEQVRLLSSSLTADCSLRSPSGREVEPGEDRTIRYVRYESELQMPDIMRLITKDLSEPYSIYTYRYFIHNWPQLCFLAMVGEECVGAIVCKLDMHKKMFRRGYIAMLAVDSKYRRNGIGTNLVKKAIYAMVEGDCDEVVLETEITNKSALKLYENLGFVRDKRLFRYYLNGVDALRLKLWLR

SEQ ID NO: 20785 - protein, 817 aa, Homo sapiens
MEEIKVLRRVKEENDRRGGFIRIFPTSETWEIYGSYLEHKTSMNYMLATRLFQDRGNPRRSLLTGRTRMTADGAPELKIESLNSKAKLHAALYERKLLSLEVRKRRRRSSRLRAMRPKYPVITQPAEMNVKTETESEEEEEVALDNEDEEQEASQEESAGFLRENQAKYTPSLTALVENTPKENSMKVREWNNKGGHCCKLETQELEPKFNLMQILQDNGNLSKMQARIAFSAYLQHVQIRLMKDSGGQTFSASWAAKEDEQMELVVRFLKRASNNLQHSLRMVLPSRRLALLERRRILAHQLGDFIIVYNKETEQMAEKKSKKKVEEEEEDGVNMENFQEFIRQASEAELEEVLTFYTQKNKSASVFLGTHSKISKNNNNYSDSGAKGDHPETIMEEVKIKPPKQQQTTEIHSDKLSRFTTSAEKEAKLVYSNSSSGPTATLQKIPNTHLSSVTTSDLSPGPCHHSSLSQIPSAIPSMPHQPTILLNTVSASASPCLHPGAQNIPSPTGLPRCRSGSHTIGPFSSFQSAAHIYSQKLSRPSSAKAGSCYLNKHHSGIAKTQKEGEDASLYSKRYNQSMVTAELQRLAEKQAARQYSPSSHINLLTQQVTNLNLATGIINRSSASAPPTLRPIISPSGPTWSTQSDPQAPENHSSSPGSRSLQTGGFAWEGEVENNVYSQATGVVPQHKYHPTAGSYQLQFALQQLEQQKLQSRQLLDQSRARHQAIFGSQTLPNSNLWTMNNGAGCRISSATASGQKPTTLPQKVVPPPSSCASLVPKPPPNHEQVLRRATSQKASNTRFRSSFQNYLWYFFQAVS

SEQ ID NO: 20786 - protein, 998 aa, Homo sapiens
MKSRFSTIDLRAVLAELNASLLGMRVNNVYDVDNKTYLIRLQKPDFKATLLLESGIRIHTTEFEWPKNMMPSSFAMKGNIVLTDYEYVILNILRFRTDEADDVKFAVRERYPLDHARAAEPLLTLERLTEIVASAPKGELLKRVLNPLLPYGPALIEHCLLENGFSGNVKVDEKLETKDIEKVLVSLQKAEDYMKTTSNFSGKGYIIQKREIKPSLEADKPVEDILTYEEFHPFLFSQHSQCPYIEFESFDKAVDEFYSKIEGQKIDLKALQQEKQALKKLDNVRKDHENRLEALQQAQEIDKLKGELIEMNLQIVDRAIQVVRSALANQIDWTEIGLIVKEAQAQGDPVASAIKELKLQTNHVTMLLRNPYLLSEEEDDDVDGDVNVEKNETEPPKGKKKKQKNKQLQKPQKNKPLLVDVDLSLSAYANAKKYYDHKRYAAKKTQKTVEAAEKAFKSAEKKTKQTLKEVQTVTSIQKARKVYWFEKFLWFISSENYLIIGGRDQQQNEIIVKRYLTPGDIYVHADLHGATSCVIKNPTGEPIPPRTLTEAGTMALCYSAAWDARVITSAWWVYHHQVSKTAPTGEYLTTGSFMIRGKKNFLPPSYLMMGFSFLFKVDESCVWRHQGERKVRVQDEDMETLASCTSELISEEMEQLDGGDTSSDEDKEEHETPVEVELMTQVDQEDITLQSGRDELNEELIQEESSEDEGEYEEVRKDQDSVGEMKDEGEETLNYPDTTIDLSHLQPQRSIQKLASKEESSNSSDSKSQSRRHLSAKERREMKKKKLPSDSGDLEALEGKDKEKESTVHIETHQNTSKNVAAVQPMKRGQKSKMKKMKEKYKDQDEEDRELIMKLLGSAGSNKEEKGKKGKKGKTKDEPVKKQPQKPRGGQRVSDNIKKETPFLEVITHELQDFAVDDPHDDKEEQDLDQQGNEENLFDSLTGQPHPEDVLLFAIPICAPYTTMTNYKYKVKLTPGVQKKGKAAKTALNSFMHSKEAT

SEQ ID NO: 20787 - protein, 645 aa, Homo sapiens
MSVSSGVQILTKPETVDRRRSAETTKEAGRPLEMAVSEPEASAAVSVTFKHVTMAFTQKEWKQLDPAQSNLYNDVMLENYCNQASMGCQAPKPDMISKLEKGEAPWLGKGKRPSQGCPSKIARPKQKETDGKVQKDDDQLENIQKSQNKLLREVAVKKKTQAKKNGSDCGSLGKKNNLHKKHVPSKKRLLKFESCGKILKQNLDLPDHSRNCVKRKSDAAKEHKKSFNHSLSDTRKGKKQTGKKHEKLSSHSSSDKCNKTGKKHDKLCCHSSSHIKQDKIQTGEKHEKSPSLSSSTKHEKPQACVKPYECNQCGKVLSHKQGLIDHQRVHTGEKPYECNECGIAFSQKSHLVVHQRTHTGEKPYECIQCGKAHGHKHALTDHLRIHTGEKPYECAECGKTFRHSSNLIQHVRSHTGEKPYECKECGKSFRYNSSLTEHVRTHTGEIPYECNECGKAFKYSSSLTKHMRIHTGEKPFECNECGKAFSKKSHLIIHQRTHTKEKPYKCNECGKAFGHSSSLTYHMRTHTGESPFECNQCGKGFKQIEGLTQHQRVHTGEKPYECNECGKAFSQKSHLIVHQRTHTGEKPYECNECEKAFNAKSQLVIHQRSHTGEKPYECNECGKTFKQNASLTKHVKTHSEDKSHE

SEQ ID NO: 20788 - protein, 729 aa, Homo sapiens
MLSGLIEEKSKLLEKFSLVQKEYEGYEVESSLKDASFEKEATEAQSLEVENQMATCEKLNRSNSELEDEILCLEKELKEEKSKHSEQDELMADISKRIQSLEDESKSLKSQVAEAKMTFKIFQMNEERLKIAIKDALNENSQLQESQKQLLQEAEVWKEQVSELNKQKVTFEDSKVHAEQVLNDKESHIKTLTERLLKMKDWAAMLGEDITDDDNLELEMNSESENGAYLDNPPKGALKKLIHAAKLNASLKTLEGERNQIYIQLSEVDKTKEELTEHIKNLQTEQASLQSENTHFENENQKLQQKLKVMTELYQENEMKLHRKLTVEENYRLEKEEKLSKVDEKISHATEELETYRKRAKDLEEELERTIHSYQGQIISHEKKAHDNWLAARNAERNLNDLRKENAHNRQKLTETELKFELLEKDPYALDVPNTAFGREHSPYGPSPLGWPSSETRAFLSPPTLLEGPLRLSPLLPGGGGRGSRGPGNPLDHQITNERGESSCDRLTDPHRAPSDTGSLSPPWDQDRRMMFPPPGQSYPDSALPPQRQDRFCSNSGRLSGPAELRSFNMPSLDKMDGSMPSEMESSRNDTKDDLGNLNVPDSSLPAENEATGPGFVPPPLAPIRGPLFPVDARGPFLRRGPPFPPPPPGAMFGASRDYFPPGDFPGPPPAPFAMRNVYPPRGFPPYLPPRPGFFPPPPHSEGRSEFPSGLIPPSNEPATEHPEPQQET

SEQ ID NO: 20789 - protein, 6818 aa, Homo sapiens
MASSPELPTEDEQGSWGIDDLHISLQAEQEDTQKKAFTCWINSQLARHTSPSVISDLFTDIKKGHVLLDLLEVLSGQQLPRDKGSNTFQCRINIEHALTFLRNRSIKLINIHVTDIIDGNPSIILGLIWTIILHFHIEKLAQTLSCNYNQPSLDDVSVVDSSPASSPPAKKCSKVQARWQMSARKALLLWAQEQCATYESVNVTDFKSSWRNGMAFLAIIHALRPDLIDMKSVKHRSNKDNLREAFRIAEQELKIPRLLEPEDVDVVDPDEKSIMTYVAQFLQYSKDAPGTGEEAQGKVKDAMGWLTLQKEKLQKLLKDSENDTYFKKYNSLLSFMESFNEEKKSFLDVLSIKRDLDELDKDHLQLREAWDGLDHQINAWKIKLNYALPPPLHQTEAWLQEVEELMDEDLSASQDHSQAVTLIQEKMTLFKSLMDRFEHHSNILLTFENKDENHLPLVPPNKLEEMKRRINNILEKKFILLLEFHYYKCLVLGLVDEVKSKLDIWNIKYGSRESVELLLEDWHKFIEEKEFLARLDTSFQKCGEIYKNLAGECQNINKQYMMVKSDVCMYRKNIYNVKSTLQKVLACWATYVENLRLLRACFEETKKEEIKEVPFETLAQWNLEHATLNEAGNFLVEVSNDVVGSSISKELRRLNKRWRKLVSKTQLEMNLPLMIKKQDQPTFDNSGNILSKEEKATVEFSTDMSVELPENYNQNIKAGEKHEKENEEFTGQLKVAKDVEKLIGQVEIWEAEAKSVLDQDDVDTSMEESLKHLIAKGSMFDELMARSEDMLQMDIQNISSQESFQHVLTTGLQAKIQEAKEKVQINVVKLIAALKNLTDVSPDLDIRLKMEESQKELESYMMRAQQLLGQRESPGELISKHKEALIISNTKSLAKYLKAVEELKNNVTEDIKMSLEEKSRDVCAKWESLHHELSLYVQQLKIDIEKGKLSDNILKLEKQINKEKKLIRRGRTKGLIKEHEACFSEEGCLYQLNHHMEVLRELCEELPSQKSQQEVKRLLKDYEQKIERLLKCASEIHMTLQPTAGGTSKNEGTITTSENRGGDPHSEAPFAKSDNQPSTEKAMEPTMKFSLASVLRPLQEESIMEKDYSASINSLLERYDTYRDILEHHLQNNKFRITSDFSSEEDRSSSCLQAKLTDLQVIKNETDARWKEFEIISLKLENHVNDIKKPFVIKERDTLKERERELQMTLNTRMESLETALRLVLPVEKASLLLCGSDLPLHKMAIQGFHLIDADRIYQHLRNIQDSIAKQIEICNRLEEPGNFVLKELHPFDLHAMQNIILKYKTQFEGMNHRVQRSEDTLKALEDFLASLRTAKLSAEPVTDLSASDTQVAQENTLTVKNKEGEIHLMKDKAKHLDKCLKMLDMSFKDAERGDDTSCENLLDAFSIKLSETHGYGVQEEFTEENKLLEACIFKNNELLKNIQDVQSQISKIGLKDPTVPAVKHRKKSLIRLDKVLDEYEEEKRHLQEMANSLPHFKDGREKTVNQQCQNTVVLWENTKALVTECLEQCGRVLELLKQYQNFKSILTTLIQKEESVISLQASYMGKENLKKRIAEIEIVKEEFNEHLEVVDKINQVCKNLQFYLNKMKTFEEPPFEKEANIIVDRWLDINEKTEDYYENLGRALALWDKLFNLKNVIDEWTEKALQKMELHQLTEEDRERLKEELQVHEQKTSEFSRRVAEIQFLLQSSEIPLELQVMESSILNKMEHVQKCLTGESNCHALSGSTAELREDLDQAKTQIGMTESLLKALSPSDSLEIFTKLEEIQQQILQQKHSMILLENQIGCLTPELSELKKQYESVSDLFNTKKSVLQDHFSKLLNDQCKNFNDWFSNIKVNLKECFESSETKKSVEQKLQKLSDFLTLEGRNSKIKQVDSVLKHVKKHLPKAHVKELISWLVGQEFELEKMESICQARAKELEDSLQQLLRLQDDHRNLRKWLTNQEEKWKGMEEPGEKTELFCQALARKREQFESVAQLNNSLKEYGFTEEEEIIMEATCLMDRYQTLLRQLSEIEEEDKLLPTEDQSFNDLAHDVIHWIKEIKESLMVLNSSEGKMPLEERIQKIKEIILLKPEGDARIETIMKQAESSEAPLVQKTLTDISNQWDNTLHLASTYLSHQEKLLLEGEKYLQSKEDLRLMLIELKKKQEAGFALQHGLQEKKAQLKIYKKFLKKAQDLTSLLKELKSQGNYLLECTKNPSFSEEPWLEIKHLHESLLQQLQDSVQNLDGHVREHDSYQVCVTDLNTTLDNFSKEFVSFSDKPVDQIAVEEKLQKLQELENRLSLQDGTLKKILALAKSVKQNTSSVGQKIIKDDIKSLQCKQKDLENRLASAKQEMECCLNSILKSKRSTEKKGKFTLPGREKQATSDVQESTQESAAVEKLEEDWEINKNFVENVMAVSKNCHHSMYIFESIVKNFISDEMQDSAVEMAMSKQLSLNAQESMKNTEDERKVNELQNQPLELDTMLRNEQLEEIEKLYTQLEAKKAAIKPLEQTECLNKTETGALVLHNIGYSAQHLDNLLQALITLKKNKESQYCVLRDFQEYLAAVESSMKALLTDKESLKVGPLDSVTYLDKIKKFIASIEKEKDSLGNLKIKWENLSNHVTDMDKKLLESQIKQLEHGWEQVEQQIQKKYSQQVVEYDEFTTLMNKVQDTEISLQQQQQHLQLRLKSPEERAGNQSMIALTTDLQATKHGFSVLKGQAELQMKRIWGEKEKKNLEDGINNLKKQWETLEPLHLEAENQIKKCDIRNKMKETILWAKNLLGELNPSIPLLPDDILSQIRKCKVTHDGILARQQSVESLAEEVKDKVPSLTTYEGSDLNNTLEDLRNQYQMLVLKSTQRSQQLEFKLEERSNFFAIIRKFQLMVQESETLIIPRVETAATEAELKHHHVTLEASQKELQEIDSGISTHLQELTNIYEELNVFERLFLEDQLKNLKIRTNRIQRFIQNTCNEVEHKIKFCRQFHEKTSALQEEADSIQRNELLLNQEVNKGVKEEIYNLKDRLTAIKCCILQVLKLKKVFDYIGLNWDFSQLDQLQTQVFEKEKELEEKIKQLDTFEEEHGKYQALLSKMRAIDLQIKKMTEVVLKAPDSSPESRRLNAQILSQRIEKAKCLCDEIIKKLNENKTFDDSFKEKEILQIKLNAEENDKLYKVLQNMVLELSPKELDEKNCQDKLETSLHVLNQIKSQLQQPLLINLEIKHIQNEKDNCEAFQEQVWAEMCSIKAVTAIEKQREENSSEASDVETKLREFEDLQMQLNTSIDLRTNVLNDAYENLTRYKEAVTRAVESITSLEAIIIPYRVDVGNPEESLEMPLRKQEELESTVAHIQDLTEKLGMISSPEAKLQLQYTLQELVSKNSAMKEAFKAQETEAERYLENYKCYRKMEEDIYTNLSKMETVLGQSMSSLPLSYREALERLEQSKALVSNLISTKEELMKLRQILRLLRLRCTENDGICLLKIVSALWEKWLSLLEAAKEWEMWCEELKQEWKFVSEEIEREAIILDNLQEELPEISKTKEAATTEELSELLDCLCQYGENVEKQQLLLTLLLQRIRSIQNVPESSGAVETVPAFQEITSMKERCNKLLQKVQKNKELVQTEIQERHSFTKEIIALKNFFQQTTTSFQNMAFQDHPEKSEQFEELQSILKKGKLTFENIMEKLRIKYSEMYTIVPAEIESQVEECRKALEDIDEKISNEVLKSSPSYAMRRKIEEINNGLHNVEKMLQQKSKNIEKAQEIQKKMWDELDLWHSKLNELDSEVQDIVEQDPGQAQEWMDNLMIPFQQYQQVSQRAECRTSQLNKATVKMEEYSDLLKSTEAWIENTSHLLANPADYDSLRTLSHHASTVQMALEDSEQKHNLLHSIFMDLEDLSIIFETDELTQSIQELSNQVTALQQKIMESLPQIQRMADDVVAIESEVKSMEKRVSKIKTILLSKEIFDFSPEEHLKHGEVILENIRPMKKTIAEIVSYQVELRLPQTGMKPLPVFQRTNQLLQDIKLLENVTQEQNELLKVVIKQTNEWDEEIENLKQILNNYSAQFSLEHMSPDQADKLPQLQGEIERMEKQILSLNQRKEDLLVDLKATVLNLHQHLKQEQEGVERDRLPAVTSEEGGVAERDASERKLNRRGSMSYLAAVEEEVEESSVKSDHDKDMEEDRASSSSGTIVQEAYGKISTSDNSMAQILTPDSLNTEQGPECSLRPNQTEEGTTPPIEADTLDSSDAQGGLEPRVEKTRPEPTEVLHACKTQVAELELWLQQANVAVEPETLNADMQQVLEQQLVGCQAMLTEIEHKVAFLLETCKDQGLGDNGATQHEAEALSLKLKTVKCNLEKVQMMLQEKHSEDQHPTILKKSSEPEHQEALQPVNLSELESIVTERPQFSRQKDFQQQQVLELKPMEQKDFIKFIEFNAKKMWPQYCQHDNDTTQESSARYPTTEELKTYTTQLEDLRQEASNLQTQENMTEEAYINLDKKLFELFLTLSQCLSSVEEMLEMPRLYREDGSGQQVHYETLALELKKLYLALSDKKGDLLKAMTWPGENTNLLLECFDNLQVCLEHTQAAAVCRSKSLKAGLDYNRSYQKADAYTVELENAESRVAKLRDEGERLHLPYALLQEVYKLEDVLDSMWGMLRARYTELSSPFVTESQQDALLQGMVELVKIGKEKLAHGHLKQTKSKVALQAQIENHKVFFQKLVADMLLIQAYSAKILPSLLQNRETFWAEQVTEVKILEEKSRQCGMKLQSLLQKWEEFDENYASLEKDLEILISTLPSVSLVEETEERLVERISFYQQIKRNIGGKHARLYQTLNEGKQLVASVSCPELEGQIAKLEEQWLSLNKKIDHELHRLQALLKHLLSYNRDSDQLTKWLESSQHTLNYWKEQSLNVSQDLDTIRSNINNFFEFSKEVDEKSSLKTAVISIGNQLLHLKETDTATLRASLAQFEQKWTMLITQLPDIQEKLHQLQMEKLPSRKAITEMISWMNNVEHQTSDEDSVHSPSSASQVKHLLQKHKEFRMEMDYKQWIVDFVNQSLLQLSTCDVESKRYERTEFAEHLGEMNRQWHRVHGMLNRKIQHLEQLLESITESENKIQILNNWLEAQEERLKTLQKPESVISVQKLLLDCQDIENQLAIKSKALDELKQSYLTLESGAVPLLEDTASRIDELFQKRSSVLTQVNQLKTSMQSVLQEWKIYDQLYDEVNMMTIRFWYCMEHSKPVVLSLETLRCQVENLQSLQDEAESSEGSWEKLQEVIGKLKGLCPSVAEIIEEKCQNTHKRWTQVNQAIADQLQKAQSLLQLWKAYSNAHGEAAARLKQQEAKFQQLANISMSGNNLAEILPPALQDIKELQHDVQKTKEAFLQNSSVLDRLPQPAESSTHMLLPGPLHSLQRAAYLEKMLLVKANEFENHVLALTAQSPDIEHLNEVSLKLPLSDVAVKTLQNMNRQWIRATATALERCSELQGIGLNEKFLYCCEKWIQLLEKIEEALKVDVANSLPELLEQQKTYKMLEAEVSINQTIADSYVTQSLQLLDTTEIENRPEFITEFSKLTDRWQNAVQGVRQRKGDVDGLNAHVARCGGASLKKQDLRYSLHTACGAALLCRSSHGANKEIHFQRRRTTCALTLEAGEKLLLTTDLKTKESVGRRISQLQDSWKDMEPQLAEMIKQFQSTVETWDQCEKKIKELKSRLQVLKAQSEDPLPELHEDLHNEKELIKVAIRKQEIEDRLNTWVVFNEKNKELCAWLVQMENKVLQTADISIEEMIEKLQKRTVGREEVPERWECETIVSGHGTEESCFLSIRKFHQGRGLHILTCQLIPQDCMEEINLFSENKLQLKQMGDQLIKASNKSRAAEIDDKLNKINDRWQHLFDVIGSSMADQTNSRWMFFQWPRGIQRTVTWPWDHLCSCASTGHTGPFHSSVLRCFEQHIEFGIYRRTYKVNKELGGDKNGQRCPIIYPHGLVQCIRLGEPLILKRVKKLKETFAFIQQLDKNMSNLRTWLARIESELSKPVVYDVCDDQEIQKRLAEQQDLQRDIEQHSAGVESVFNICDVLLHDSDACANETECDSIQQTTRSLDRRWRNICAMSMERRMKIEETWRLWQKFLDDYSRFEDWLKSAERTAACPNSSEVLYTSAKEELKRFERQIHERLTQLELINKQYRRLARENRTDTASRLKQMVHEGNQRWDNLQRRVTAVLRRLRHFTNQREEFEGTRESILVWLTEMDLQLTNVEHFSESDADDKMRQLNGFQQEITLNTNKIDQLIVFGEQLIQKSEPLDAVLIEDELEELHRYCQEGLEDEKEASENETDMEDPREIQTDSWRKRGESEEPSSPQSLCHLVAPGHERSGCETPVSVDSIPLEWDHTGDVGGSSSHEEDEEGPYYSALSGKSISDGHSWHVPDSPSCPEHHYKQMEGDRNVPPVPPASSTPYKPPYVSLNFTGSTAYVCAFDRWEMIQAQELHNKLKIKQNLQQLNSDISAITTWLKKTEAELEMLKMAKPPSDIQEIELRVKRLQEILKAFDTYKALVVSVNVSSKEFLQTESPESTELQSRLRQLSLLWEAAQGAVDSWRGGLRQSLMQCQDFHQLSQNLLLWLASAKNRRQKAHVTDPKADPRALLECRRELMQLEKELVERQPQVDMLQEISNSLLIKGHGEDCIEAEEKVHVIEKKLKQLREQVSQDLMALQGTQNPASPLPSFDEVDSGDQPPATSVPAPRAKFLYPAVQSSENYRRRGGDREQGPRQHTATALLPLKGGPGSPTPAAAPPAAAAPGLPAALLRRRLQLHSGQQLCPVLLPHAEVHQWATPHIEGIAGHSATPPA

SEQ ID NO: 20790 - protein, 376 aa, Homo sapiens
MVWKVAVFLSVALGIGAVPIDDPEDGGKHWVVIVAGSNGWYNYRHQADACHAYQIIHRNGIPDEQIVVMMYDDIAYSEDNPTPGIVINRPNGTDVYQGVPKDYTGEDVTPQNFLAVLRGDAEAVKGIGSGKVLKSGPQDHVFIYFTDHGSTGILVFPNEDLHVKDLNETIHYMYKHKMYRKMVFYIEACESGSMMNHLPDNINVYATTAANPRESSYACYYDEKRSTYLGDWYSVNWMEDSDVEDLTKETLHKQYHLVKSHTNTSHVMQYGNKTISTMKVMQFQGMKRKASSPVPLPPVTHLDLTPSPDVPLTIMKRKLMNTNDLEESRQLTEEIQRHLDYEYALRHLYVLVNLCEKPYPLHRIKLSMDHVCLGHY

SEQ ID NO: 20791 - protein, 2519 aa, Homo sapiens
MEKLHGHVSAHPDILSLENRCLAMLPDLQPLEKLHQHVSTHSDILSLKNQCLATLPDLKTMEKPHGYVSAHPDILSLENQCLATLSDLKTMEKPHGHVSAHPDILSLENRCLATLSSLKSTVSASPLFQSLQISHMTQADLYRVNNSNCLLSEPPSWRAQHFSKGLDLSTCPIALKSISATETAQEATLGRWFDSEEKKGAETQMPSYSLSLGEEEEVEDLAVKLTSGDSESHPEPTDHVLQEKKMALLSLLCSTLVSEVNMNNTSDPTLAAIFEICRELALLEPEFILKGMEPPFSHRCFPRYIGFLREEQRKFEKAGDTVSEKKNPPRFTLKKLVQRLHIHKPAQHVQALLGYRYPSNLQLFSRSRLPGPWDSSRAGKRMKLSRPETWERELSLRGNKASVWEELIENGKLPFMAMLRNLCNLLRVGISSRHHELILQRLQHAKSVIHSRQFPFRFLNAHDAIDALEAQLRNQALPFPSNITLMRRILTRNEKNRPRRRFLCHLSRQQLRMAMRIPVLYEQLKREKLRVHKARQWKYDGEMLNRYRQALETAVNLSVKHSLPLLPGRTVLVYLTDANADRLCPKSNPQGPPLNYALLLIGMMITRAEQVDVVLCGGDTLKTAVLKAEEGILKTAIKLQAQVQEFDENDGWSLNTFGKYLLSLAGQRVPVDRVILLGQSMDDGMINVAKQLYWQRVNSKCLFVGILLRRVQYLSTDLNPNDVTLSGCTDAILKFIAEHGASHLLEHVGQMDKIFKIPPPPGKTGVQSLRPLEEDTPSPLAPVSQQGWRSIRLFISSTFRDMHGERDLLLRSVLPALQARAAPHRISLHGIDLRWGVTEEETRRNRQLEVCLGEVENAQLFVGILGSRYGYIPPSYNLPDHPHFHWAQQYPSGRSVTEMEVMQFLNRNQRLQPSAQALIYFRDSSFLSSVPDAWKSDFVSESEEAARRISELKSYLSRQKGITCRRYPCEWGGVAAGRPYVGGLEEFGQLVLQDVWNMIQKLYLQPGALLEQPVSIPDDDLVQATFQQLQKPPSPARPRLLQDTVQRLMLPHGRLSLVTGQSGQGKTAFLASLVSALQAPDGAKVASLVFFHFSGARPDQGLALTLLRRLCTYLRGQLKEPGALPSTYRSLVWELQQRLLPKSAESLHPGQTQVLIIDGADRLVDQNGQLISDWIPKKLPRCVHLVLSVSSDAGLGETLEQSQGAHVLALGPLEASARARLVREELALYGKRLEESPFNNQMRLLLVKRESGRPLYLRLVTDHLRLFTLYEQVSERLRTLPATVPLLLQHILSTLEKEHGPDVLPQALTALEVTRSGLTVDQLHGVLSVWRTLPKGTKSWEEAVAAGNSGDPYPMGPFACLVQSLRSLLGEGPLERPGARLCLPDGPLRTAAKRCYGKRPGLEDTAHILIAAQLWKTCDADASGTFRSCPPEALGDLPYHLLQSGNRGLLSKFLTNLHVVAAHLELGLVSRLLEAHALYASSVPKEEQKLPEADVAVFRTFLRQQASILSQYPRLLPQQAANQPLDSPLCHQASLLSRRWHLQHTLRWLNKPRTMKNQQSSSLSLAVSSSPTAVAFSTNGQRAAVGTANGTVYLLDLRTWQEEKSVVSGCDGISACLFLSDDTLFLTAFDGLLELWDLQHGCRVLQTKAHQYQITGCCLSPDCRLLATVCLGGCLKLWDTVRGQLAFQHTYPKSLNCVAFHPEGQVIATGSWAGSISFFQVDGLKVTKDLGAPGASIRTLAFNVPGGVVAVGRLDSMVELWAWREGARLAAFPAHHGFVAAALFLHAGCQLLTAGEDGKVQVWSGSLGRPRGHLGSLSLSPALSVALSPDGDRVAVGYRADGIRIYKISSGSQGAQGQALDVAVSALAWLSPKVLVSGAEDGSLQGWALKECSLQSLWLLSRFQKPVLGLATSQELLASASEDFTVQLWPRQLLTRPHKAEDFPCGTELRGHEGPVSCCSFSTDGGSLATGGRDRSLLCWDVRTPKTPVLIHSFPACHRDWVTGCAWTKDNLLISCSSDGSVGLWDPESGQRLGQFLGHQSAVSAVAAVEEHVVSVSRDGTLKVWDHQGVELTSIPAHSGPISHCAAAMEPRAAGQPGSELLVVTVGLDGATRLWHPLLVCQTHTLLGHSGPVRAAAVSETSGLMLTASEDGSVRLWQVPKEADDTCIPRSSAAVTAVAWAPDGSMAVSGNQAGELILWQEAKAVATAQAPGHIGALIWSSAHTFFVLSADEKISEWQVKLRKGSAPGNLSLHLNRILQEDLGVLTSLDWAPDGHFLILAKADLKLLCMKPGDAPSEIWSSYTENPMILSTHKEYGIFVLQPKDPGVLSFLRQKESGEFEERLNFDINLENPSRTLISITQAKPESESSFLCASSDGILWNLAKCSPEGEWTTGNMWQKKANTPETQTPGTDPSTCRESDASMDSDASMDSEPTPHLKTRQRRKIHSGSVTALHVLPELLVTASKDRDVKLWERPSMQLLGLFRCEGSVSCLEPWLGANSTLQLAVGDVQGNVYFLNWE

SEQ ID NO: 20792 - protein, 156 aa, Homo sapiens
MAVPAAAPVCQPKSATNGQPPAPAPTPTPRLSISSRATVVARMEGTSQGGLQTVMKWKTVVAIFVVVVVYLVTGGLVFRALEQPFESSQKNTIALEKAEFLRDHVCVSPQELETLIQHALDADNAGVSPIGNSSNNSSHWDLGSAFFFAGTVITTI

SEQ ID NO: 20793 - protein, 233 aa, Homo sapiens
MVSFRLSNKTASPSIKLLVDDPIVVNPGEAITLVCVTTGGEPAPSLTWVRSFGTLPEKTVLNGGTLTIPAITSDDAGTYSCIANNNVGNPAKKSTNIIVRALKKGRFWITPDPYHKDDNIQIGREVKISCQVEAVPSEELTFSWFKNGRPLRSSERMVITQTDPDVSPGTTNLDIIDLKFTDFGTYTCVASLKGGGISDISIDVNISSSTGKITIGHQRRRHNRTAMSSNWQT

SEQ ID NO: 20794 - protein, 796 aa, Homo sapiens
MKLKKQVTVCGAAIFCVAVFSLYLMLDRVQHDPTRHQNGGNFPRSQISVLQNRIEQLEQLLEENHEIISHIKDSVLELTANAEGPPAMLPYYTVNGSWVVPPEPRPSFFSISPQDCQFALGGRGQKPELQMLTVSEELPFDNVDGGVWRQGFDISYDPHDWDAEDLQVFVVPHSHNDPGWIKTFDKYYTEQTQHILNSMVSKLQEDPRRRFLWAEVSFFAKWWDNINVQKRAAVRRLVGNGQLEIATGGWVMPDEANSHYFALIDQLIEGHQWLERNLGATPRSGWAVDPFGYSSTMPYLLRRANLTSMLIQRVHYAIKKHFAATHSLEFMWRQTWDSDSSTDIFCHMMPFYSYDVPHTCGPDPKICCQFDFKRLPGGRINCPWKVPPRAITEANVAERAALLLDQYRKKSQLFRSNVLLVPLGDDFRYDKPQEWDAQFFNYQRLFDFFNSRPNLHVQAQFGTLSDYFDALYKRTGVEPGARPPGFPVLSGDFFSYADREDHYWTGYYTSRPFYKSLDRVLEAHLRGAEVLYSLAAAHARRSGLAGRYPLSDFTLLTEARRTLGLFQHHDAITGTAKEAVVVDYGVRLLRSLVNLKQVIIHAAHYLVLGDKETYHFDPEAPFLQVDDTRLSHDALPERTVIQLDSSPRFVVLFNPLEQERFSMVSLLVNSPRVRVLSEEGQPLAVQISAHWSSATEAVPDVYQVSVPVRLPALGLGVLQLQLGLDGHRTLPSSVRIYLHGRQLSVSRHEAFPLRVIDSGTSDFALSNRYMQVWFSGLTGLLKGSGLCFLAEHPKGG

SEQ ID NO: 20795 - protein, 164 aa, Homo sapiens
GGVDAGLRVGGRCVHKQTGRHATLLGVVKEGSTSAKVQWDEAEITISDTPLYNLEPCEPLPFDVARFRGLTASVLLDLTYLTGVHEDMGKQSTKRHEKKHRHESEEKGDVEQKPESESALDMRTGLTSDDVKSQSTTSSKSENEIASFSLDPTLPSVESQHQIT

SEQ ID NO: 20796 - protein, 229 aa, Homo sapiens
MFRAAAPGQLRRANLLPRVAAKLEVAPISDIIAIKSPDTFVRTIYAGNALCTVKCDEKVKVFSVRGTSFDAAATSGGSASSEKASSTSPVEISEWLDQKLTKSDRPELTGAKVVVSGGRGLKSGENFKLLYDLADQLHAAVGASRAAVDAGFVPNDMQVGQTGKIVAPELYIAVGISGAIQHLAGMKDSKTIVAINKDPEAPIFQVADYGIVADLFKVVPEMTEILKKK

SEQ ID NO: 20797 - protein, 230 aa, Homo sapiens
MAVAMAIYVAGGVSGGHINPAVSLAMCLFGRMKWFKLPFYVGAQFLGAFVGAATVFGIYYDGLMSFAGGKLLIVGENATAHIFATYPAPYLSLANAFADQVVATMILLIIVFAIFDSRNLGAPRGLEPIAIGLLIIVIASSLGLNSGCAMNPARDLSPRLFTALAGWGFEVFRAGNNFWWIPVVGPLVGAVIGGLIYVLVIEIHHPEPDSVFKTEQSEDKPEKYELSVIM

SEQ ID NO: 20798 - protein, 1101 aa, Homo sapiens
MKTSKASQRYRGIRRNASQCYLYQESLLLSNLDDSFSADETGDSNDPEQIFQNIQFQKDLMANIRCRPWTMGQKLRALRQAKNIVLKFEGRLTRTRGYQAAGAELWRKFARLACNFVVIFIPWEMRIKKIESHFGSGVASYFIFLRWLFGINIVLTIMTGAFIVIPELIAGQPFGSTARKTIPKEQVSSAQDLDTVWSLGGYLQYSVLFYGYYGRERKIGRAGYRLPLAYFLVGMAVFAYSFIILLKKMAKNSRTSLASASNENYTFCWRVFCAWDYLIGNPEAAESKTAAIVNSIREAILEEQEKKKSKNLAVTICLRIIANILVLLSLAGSIYLIYFVVDRSQKLEQSKKELTLWEKNEQVSVVVSLVTMIAPSAFDLIAALEMYHPRTTLRFQLARVLVLYLGNLYSLIIALLDKVNSMSIEEMATKNNTSHWIDSTTFFATRTAPEEEKWSTSRPGMGLRRNNTWALEETSISAYTMPLIKANKTSLHTQSPQDQCWETYVGQEMLKLSIIDMLFTVASILLIDFFRGLFVRYLSDYWCWDLESKFPEYGEFKIAENVLHLVYNQGMIWMGAFFSPCLPAFNVLKLIGLMYLRSWAVLTCNVPHQQVFRASRSNNFYLAMLLFMLFLCMLPTIFAIVRYKPSLNCGPFSGQEKIYDIVSETIEKDFPVWFGSVVGHISSPVVILPAVLLLFMLIYYLQSIARSLKLSNHQLKMQIQNARSEDKKKVAQMVEARIQTQEESTKKLPNDSDLTSQLSSAHSGTPQNNGNVAHFDSGSSKSGRIETVAQSMPQSPRPGDRAPSSPLPGVPKSRLEHETNRYLHGLCASTSDLHRNRSRTPMTFTTHIEDVHSEPLFRKDFQQINPPHRGPQASTLLAQGPRPHAPRYYVINECDSYKKKHLNVWPERHFKIDASGDIVELYPRNVRQYASRVPRQPPSPQLSEEEEETPSRDWIKRSLPPRSLIDLRRAPHFYIGERSESQTRDPEHQGRVHYKSWNEDFEGHLERPAYVPRKPRSRNFQYPQPPLKPRGKPRFEPSLTESDSVSAASSSDQQNSSADQYLQVTHSQGRFPRSVGQPSRRKAKSGQELTVDLDDLICSDV

SEQ ID NO: 20799 - protein, 138 aa, Homo sapiens
AGADFVMLGGMLAGHSESGGELIERDGKKYKLFYGMSSEMAMKKYAGGVAEYRASEGKTVEVPFKGDVEHTIRDILGGIRSTCTYVGAAKLKELSRRTTFIRVTQQGSCSNSVLLYLHTQNAQGTHWGGSKEANSLRK

SEQ ID NO: 20800 - protein, 962 aa, Homo sapiens
MDTRPKVSSLLNRMANYTNLTQGAKEHEEAENITEGKKKPTKTMLTAISMSAIATNGVVPAGGSYFMISRALGPEFGGAVGLCFYLGTTFAAAMYILGAIEIFLVYIVPRAAIFHSDDALKESAAMLNNMRVYGTAFLVLMVLVVFIGVRYVNKFASLFLACVIVSILAIYAGAIKSSFAPPHFPVCMLGNRTLSSRHIDVCSKTKEINNMTVPSKLWGFFCNSSQFFNATCDEYFVHNNVTSIQGIPGLASGIITENLWSNYLPKGEIIEKPSAKSSDVLGSLNHEYVLVDITTSFTLLVGIFFPSVTGIMAGSNRSGDLKDAQKSIPIGTILAILTTSFVYLSNVVLFGACIEGVVLRDKFGDAVKGNLVVGTLSWPSPWVIVIGSFFSTCGAGLQSLTGAPRLLQAIAKDNIIPFLRVFGHSKANGEPTWALLLTAAIAELGILIASLDLVAPILSMFFLMCYLFVNLACALQTLLRTPNWRPRFRYYHWALSFMGMSICLALMFISSWYYAIVAMVIAGMIYKYIEYQGAEKEWGDGIRGLSLSAARFALLRLEEGPPHTKNWRPQLLVLLKLDEDLHVKHPRLLTFASQLKAGKGLTIVGSVIVGNFLENYGEALAAEQTIKHLMEAEKVKGFCQLVVAAKLREGISHLIQSCGLGGMKHNTVVMGWPNGWRQSEDARAWKTFIGTVRVTTAAHLALLVAKNISFFPSNVEQFSEGNIDVWWIVHDGGMLMLLPFLLKQHKVWRKCSIRIFTVAQLEDNSIQMKKDLATFLYHLRIEAEVEVVEMHDSDISAYTYERTLMMEQRSQMLRHMRLSKTERDREAQLVKDRNSMLRLTSIGSDEDEETETYQEKVHMTWTKDKYMASRGQKAKSMEGFQDLLNMRPDQSNVRRMHTAVKLNEVIVNKSHEAKLVLLNMPGPPRNPEGDENYMEFLEVLTEGLERVLLVRGGGSEVITIYS

SEQ ID NO: 20801 - protein, 338 aa, Homo sapiens
MSSKMVISEPGLNWDISPKNGLKTFFSRENYKDHSMAPSLKELRVLSNRRIGENLNASASSVENEPAVSSATQAKEKVKTTIGMVLLPKPRVPYPRFSRFSQREQRSYVDLLVKYAKIPANSKAVGINKNDYLQYLDMKKHVNEEVTEFLKFLQNSAKKCAQDYNMLSDDARLFTEKILRACIEQVKKYSEFYTLHEVTSLMGFFPFRVEMGLKLEKTLLALGSVKYVKTVFPSMPIKLQLSKDDIATIETSEQTAEAMHYDISKDPNAEKLVSRYHPQIALTSQSLFTLLNNHGPTYKEQWEIPVCIQVIPVAGSKPVKVIYINSPLPQKKMTMRER

SEQ ID NO: 20802 - protein, 597 aa, Homo sapiens
MGTLGKAREAPRKPSHGCRAASKARLEAKPANSPFPSHPSLAHITQFRMMVSLGHLAKGASLDDLIDSCIQSFDADGNLCRSNQLLQVMLTMHRIVISSAELLQKVITLYKDALAKNSPGLCLKICYFVRYWITEFWVMFKMDASLTDTMEEFQELVKAKGEELHCRLIDTTQINARDWSRKLTQRIKSNTSKKRKVSLLFDHLEPEELSEHLTYLEFKSFRRISFSDYQNYLVNSCVKENPTMERSIALCNGISQWVQLMVLSRPTPQLRAEVFIKFIQVAQKLHQLQNFNTLMAVIGGLCHSSISRLKETSSHVPHEINKVLGEMTELLSSSRNYDNYRRAYGECTDFKIPILGVHLKDLISLYEAMPDYLEDGKVNVHKLLALYNHISELVQLQEVAPPLEANKDLVHLLTLSLDLYYTEDEIYELSYAREPRNHRAPSVFKNYDHDQDGYISQEEFEKIAASFPFSFCVMDKDREGLISRDEITAYFMRASSIYSKLGLGFPHNFQETTYLKPTFCDNCAGFLWGVIKQGYRCKDCGMNCHKQCKDLVVFECKKRAKNPVAPTENNTSVGPVSNLCSLGAKDLLHGNKYSESR

SEQ ID NO: 20803 - protein, 383 aa, Homo sapiens
MSARAAAAKSTAMEETAIWEQHTVTLHRAPGFGFGIAISGGRDNPHFQSGETSIVISDVLKGGPAEGQLQENDRVAMVNGVSMDNVEHAFAVQQLRKSGKNAKITIRRKKKVQIPVSRPDPEPVSDNEEDSYDEEIHDPRSGRSGVVNRRSEKIWPRDRSASRERSLSPRSDRRSVASSQPAKPTKVTLVKSRKNEEYGLRLASHIFVKEISQDSLAARDGNIQEGDVVLKINGTVTENMSLTDAKTLIERSKGKLKMVVQRDERATLLNVPDLSDSIHSANASERDDISEIQSLASDHSGRSHDRPPRRSRSRSPDQRSEPSDHSRHSPQQPSNGRVTRTFENLKKIMILLSRKMCMCTYTQQLHTISGDSQGSIGHHLTHG

SEQ ID NO: 20804 - protein, 994 aa, Homo sapiens
MSQWTPEYNELYTLKVDMKSEIPSDAPKTQESLKGILLHPEPIGAAKSFPAGVEMINSKVGNEFSHLCDDSQKQEKEMNGNQQEQEKSLVVRKKRKSQQAGPSYVQNCVKENQGILGLRQHLGTPSDEDNDSSFSDCLSSPSSSLHFGDSDTVTSDEDKEVSVRHSQTILNAKSRSHSARSHKWPRTETESVSGLLMKRPCLHGSSLRRLPCRKRFVKNNSSQRTQKQKERILMQRKKREVLARRKYALLPSSSSSSENDLSSESSSSSSTEGEEDLFVSASENHQNNPAVPSGSIDEDVVVIEASSTPQVTANEEINVTSTDSEVEIVTVGESYRSRSTLGHSRSHWSQGSSSHASRPQEPRNRSRISTVIQPLRQNAAEVVDLTVDEDEPTVVPTTSARMESQATSASINNSNPSTSEQASDTASAVTSSQPSTVSETSATLTSNSTTGTSIGDDSRRTTSSAVTETGPPAMPRLPSCCPQHSPCGGSSQNHHALGHPHTSCFQQHGHHFQHHHHHHHTPHPAVPVSPSFSDPACPVERPPQVQAPCGANSSSGTSYHEQQALPVDLSNSGIRSHGSGSFHGASAFDPCCPVSSSRAAIFGHQAAAAAPSQPLSSIDGYGSSMVAQPQPQPPPQPSLSSCRHYMPPPYASLTRPLHHQASACPHSHGNPPPQTQPPPQVDYVIPHPVHAFHSQISSHATSHPVAPPPPTHLASTAAPIPQHLPPTHQPISHHIPATAPPAQRLHPHEVMQRMEVQRRRMMQHPTRAHERPPPHPHRMHPNYGHGHHIHVPQTMSSHPRQAPERSAWELGIEAGVTAATYTPGALHPHLAHYHAPPRLHHLQLGALPLMVPDMAGYPHIRYISSGLDGTSFRGPFRGNFEELIHLEERLGNVNRGASQGTIERCTYPHKYKKVTTDWFSQRKLHCKQDGEEGTEEDTEEKCTICLSILEEGEDVRRLPCMHLFHQVCVDQWLITNKKCPICRVDIEAQLPSES

SEQ ID NO: 20805 - protein, 454 aa, Homo sapiens
MESHSRAGKSRKSAKFRSISRSLMLCNAKTSDDGSSPDEKYPDPFEISLAQGKEGIFHSSVQLADTSEAGPSSVPDLALASEAAQLQAAGNDRGKTCRRIFFMKESSTASSREKPGKLEAQSSNFLFPKACHQRARSNSTSVNPYCTREIDFPMTKKSAAPTDRQPYSLCSNRKSLSQQLDCPAGKAAGTSRPTRSLSTAQLVQPSGGLQASVISNIVLMKGQAKGLGFSIVGGKDSIYGPIGIYVKTIFAGGAAAADGRLQEGDEILELNGESMAGLTHQDALQKFKQAKKGLLTLTVRTRLTAPPSLCSHLSPPLCRSLSSSTCITKDSSSFALESPSAPISTAKPNYRIMVEVSLQKEAGVGLGIGLCSVPYFQCISGIFVHTLSPGSVAHLDGRLRCGDEIVEISDSPVHCLTLNEVYTILSHCDPGPVPIIVSRHPDPQKEEMEAQEVK

SEQ ID NO: 20806 - protein, 290 aa, Homo sapiens
MNTIVFNKLSGAVLFEDGGASERERGGRPYSGVLDSPHARPEVGIPDGPPLKDNLGLRHRRTGARQNGGKVRHKRQALQDMARPLKQWLYKHRDNPYPTKTEKILLALGSQMTLVQVSNWFANARRRLKNTVRQPDLSWALRIKLYNKYVQGNAERLSVSSDDSCSEDGENPPRTHMNEGGYNTPVHHPVIKSENSVIKAGVRPESRASEDYVAPPKYKSSLLNRYLNDSLRHVMATNTTMMGKTRQRNHSGSFSSNEFEEELVSPSSSETEGNFVYRTVENLGSLSEDS

SEQ ID NO: 20807 - protein, 333 aa, Homo sapiens
MFRAAAPGQLRRAASLLRFQSTLVIAEHANDSLAPITLNTITAATRLGGEVSCLVAGTKCDKVAQDLCKVAGIAKVLVAQHDVYKGLLPEELTPLILATQKQFNYTHICAGASAFGKNLLPRVAAKLEVAPISDIIAIKSPDTFVRTIYAGNALCTVKCDEKVKVFSVRGTSFDAAATSGGSASSEKASSTSPVEISEWLDQKLTKSDRPELTGAKVVVSGGRGLKSGENFKLLYDLADQLHAAVGASRAAVDAGFVPNDMQVGQTGKIVAPELYIAVGISGAIQHLAGMKDSKTIVAINKDPEAPIFQVADYGIVADLFKVVPEMTEILKKK

SEQ ID NO: 20808 - protein, 1112 aa, Homo sapiens
MRTSLQAVALWGQKAPPHSITAIMITDDQRTIVTGSQEGQLCLWNLSHELKISAKELLFGHSASVTCLARARDFSKQPYIVSAAENGEMCVWNVTNGQCMEKATLPYRHTAICYYHCSFRMTGEGWLLCCGEYQDVLIIDAKTLAVVHSFRSSQFPDWINCMCIVHSMRIQEDSLLVVSVAGELKVWDLSSSINSIQEKQDVYEKESKFLESLNCQTIRFCTYTERLLLVVFSKCWKVYDYCDFSLLLTEVSRNGQFFAGGEVIAAHRILIWTEDGHSYIYQLLNRWAQMGAAYKTFSGLSKSIYPADGRVLKETIYPHLLCSTSVQENKSRPFVMGYMNERKEPFYKVLFSGEVSGRITLWHIPDVPVSKFDGSPREIPVTATWTLQDNFDKHDTMSQSIIDYFSGLKDGAGTAVVTSSEYIPSLDKLICGCEDGTIIITQALNAAKARLLEGGSLVKDSPPHKVLKGHHQSVTSLLYPHGLSSKLDQSWMLSGDLDSCVILWDIFTEEILHKFFLEAGPVTSLLMSPEKFKLRGEQIICCVCGDHSVALLHLEGKSCLLHARKHLFPVRMIKWHPVENFLIVGCADDSVYIWEIETGTLERHETGERARIILNCCDDSQLVKSVLPIASETLKHKSIEQRSSSPYQLGPLPCPGLQVESSCKVTDAKFCPRPFNVLPVKTKWSNVGFHILLFDLENLVELLLPTPLSDVDSSSSFYGGEVLRRAKSTVEKKTLTLRKSKTACGPLSAEALAKPITESLAQGDNTIKFSEENDGIKRQKKMKISKKMQPKPSRKVDASLTIDTAKLFLSCLLPWGVDKDLDYLCIKHLNILKLQGPISLGISLNEDNFSLMLPGWDLCNSGMIKDYSGVNLFSRKVLDLSDKYTATLPNQVGIPRGLENNCDSLRESDTIVYLLSRLFLVNKLVNMPLELACRVGSSFRMESIHNKMRGAGNDILNMSSFYSCLRNGKNESHVPEADLSLLKLISCWRDQSVQVTEAIQAVLLAEVQQHMKSLGKIPVNSQPVSMAENGNCEMKQMLPKLEWTEELELQCVRNTLPLQTPVSPVKHDSNSNSANFQDVEDMPDRCALEESESPGEPRHHSWIAKVCPCKVS

SEQ ID NO: 20809 - protein, 374 aa, Homo sapiens
MASVLAKKEEEKKRESHKQSLLKEKKRLTINNVARQWDLQQQRVANIATNEDRKDSDSPQDPCQIDGSTLSAFPEETGPLDSGLNNALQGLSVIDTYLVEVDGDTLSLYGSGALESLDRNWSVQTAGMITTVSFTFIEFDEIVQVLPKLKIKFPNSLHLKFKETNLVMLQQFNALAQLRRIDQLTIDPQGNPVVNFTLWKYYVLFRLSHFSMQKINGTEVTQNDMIMAERLFGILAHVASSELPQYRLISILGDARKKQFRYLLESKGKKPGIINEENNDSKRLVGENTNRATLNYTTRDFYNEKLEEIKEKKKFCKTYIEDLVKEATEINMKNEALQKLWPQMFIELVRDAVIEIRNKNSYMKLCLQQITDQK

SEQ ID NO: 20810 - protein, 1141 aa, Homo sapiens
MASVRFMVTPTKIDDIPGLSDTSPDLSSRSSSRVRFSSRESVPETSRSEPMSEMSGATTSLATVALDPPSDRTSHPQDVIEDLSQNSITGEHSQLLDDGHKKARNAYLNNSNYEEGDEYFDKNLALFEEEMDTRPKVSSLLNRMANYTNLTQGAKEHEEAENITEGKKKPTKTPQMGTFMGVYLPCLQNIFGVILFLRLTWVVGTAGVLQAFAIVLICCCCTMLTAISMSAIATNGVVPAGGSYFMISRALGPEFGGAVGLCFYLGTTFAAAMYILGAIEIFLVYIVPRAAIFHSDDALKESAAMLNNMRVYGTAFLVLMVLVVFIGVRYVNKFASLFLACVIVSILAIYAGAIKSSFAPPHFPVCMLGNRTLSSRHIDVCSKTKEINNMTVPSKLWGFFCNSSQFFNATCDEYFVHNNVTSIQGIPGLASGIITENLWSNYLPKGEIIEKPSAKSSDVLGSLNHEYVLVDITTSFTLLVGIFFPSVTGIMAGSNRSGDLKDAQKSIPIGTILAILTTSFVYLSNVVLFGACIEGVVLRDKFGDAVKGNLVVGTLSWPSPWVIVIGSFFSTCGAGLQSLTGAPRLLQAIAKDNIIPFLRVFGHSKANGEPTWALLLTAAIAELGILIASLDLVAPILSMFFLMCYLFVNLACALQTLLRTPNWRPRFRYYHWALSFMGMSICLALMFISSWYYAIVAMVIAGMIYKYIEYQGAEKEWGDGIRGLSLSAARFALLRLEEGPPHTKNWRPQLLVLLKLDEDLHVKHPRLLTFASQLKAGKGLTIVGSVIVGNFLENYGEALAAEQTIKHLMEAEKVKGFCQLVVAAKLREGISHLIQSCGLGGMKHNTVVMGWPNGWRQSEDARAWKTFIGTVRVTTAAHLALLVAKNISFFPSNVEQFSEGNIDVWWIVHDGGMLMLLPFLLKQHKVWRKCSIRIFTVAQLEDNSIQMKKDLATFLYHLRIEAEVEVVEMHDSDISAYTYERTLMMEQRSQMLRHMRLSKTERDREAQLVKDRNSMLRLTSIGSDEDEETETYQEKVHMTWTKDKYMASRGQKAKSMEGFQDLLNMRPDQSNVRRMHTAVKLNEVIVNKSHEAKLVLLNMPGPPRNPEGDENYMEFLEVLTEGLERVLLVRGGGSEVITIYS

SEQ ID NO: 20811 - protein, 289 aa, Homo sapiens
MFRAAAPGQLRRAASLLRFQSTLVIAEHANDSLAPITLNTITAATRLGGEVSCLVAGTKCDKVAQDLCKVAGIAKVLVAQHDVYKGLLPEELTPLILATQKQFNYTHICAGASAFGKNLLPRVAAKLEVAPISDIIAIKSPDTFVRTIYAGNALCTVKCDEKVKVFSVRGTSFDAAATSGGSASSEKASSTSPVEISEWLDQKLTKSDRPELTGAKVVVSGDGVSLLLPRLECNGTISAHRHLHLPGSSDSPASASRVAGITGRGLKSGENFKLLYDLADQLHAAVGAS

SEQ ID NO: 20812 - protein, 1257 aa, Homo sapiens
MQKGIRLNDGHVASLGLLARKDGTRKGYLSKRSSDNTKWQTKWFALLQNLLFYFESDSSSRPSGLYLLEGCVCDRAPSPKPALSAKEPLEKQHYFTVNFSHENQKALELRTEDAKDCDEWVAAIAHASYRTLATEHEALMQKYLHLLQIVETEKTVAKQLRQQIEDGEIEIERLKAEITSLLKDNERIQSTQTVAPNDEDSDIKKIKKVQSFLRGWLCRRKWKTIIQDYIRSPHADSMRKRNQVVFSMLEAEAEYVQQLHILVNNFLRPLRMAASSKKPPITHDDVSSIFLNSETIMFLHQIFYQGLKARISSWPTLVLADLFDILLPMLNIYQEFVRNHQYSLQILAHCKQNRDFDKLLKHYEAKPDCEERTLETFLTYPMFQIPRYILTLHELLAHTPHEHVERNSLDYAKSKLEELSRIMHDEVSETENIRKNLAIERMIIEGCEILLDTSQTFVRQGSLIQVPMSEKGKITRGRLGSLSLKKEGERQCFLFSKHLIICTRGSGGKLHLTKNGVISLIDCTLLEEPESTEEEAKGSGQDIDHLDFKIGVEPKDSPPFTVILVASSRQEKAAWTSDISQCVDNIRCNGLMMNAFEENSKVTVPQMIKSDASLYCDDVDIRFSKTMNSCKVLQIRYASVERLLERLTDLRFLSIDFLNTFLHSYRVFTTAIVVLDKLITIYKKPISAIPARSLELLFASGQNNKLLYGEPPKSPRATRKFSSPPPLSITKTSSPSRRRKLSLNIPIITGGKALDLAALSCNSNGYTSMYSAMSPFSKATLDTSKLYVSSSFTNKIPDEGDTTPEKPEDPSALSKQSSEVSMREESDIDQNQSDDGDTETSPTKSPTTPKSVKNKNSSEFPLFSYNNGVVMTSCRELDNNRSALSAASAFAIATAGANEGTPNKEKYRRMSLASAGFPPDQRNGDKEFVIRRAATNRVLNVLRHWVSKHSQDFETNDELKCKVIGFLEEVMHDPELLTQERKAAANIIRTLTQEDPGDNQITLEEITQMAEGVKAEPFENHSALEIAEQLTLLDHLVFKKIPYEEFFGQGWMKLEKNERTPYIMKTTKHFNDISNLIASEIIRNEDINARVSAIEKWVAVADICRCLHNYNAVLEITSSMNRSAIFRLKKTWLKVSKQTKALIDKLQKLVSSEGRFKNLREALKNCDPPCVPYLGMYLTDLAFIEEGTPNYTEDGLVNFSKMRMISHIIREIRQFQQTAYKIEHQAKVTQYLLDQSFVMDEESLYESSLRIEPKLPT

SEQ ID NO: 20813 - protein, 788 aa, Homo sapiens
MRARPRPRPLWATVLALGALAGVGVGGPNICTTRGVSSCQQCLAVSPMCAWCSDEALPLGSPRCDLKENLLKDNCAPESIEFPVSEARVLEDRPLSDKGSGDSSQVTQVSPQRIALRLRPDDSKNFSIQVRQVEDYPVDIYYLMDLSYSMKDDLWSIQNLGTKLATQMRKLTSNLRIGFGAFVDKPVSPYMYISPPEALENPCYDMKTTCLPMFGYKHVLTLTDQVTRFNEEVKKQSVSRNRDAPEGGFDAIMQATVCDEKIGWRNDASHLLVFTTDAKTHIALDGRLAGIVQPNDGQCHVGSDNHYSASTTMDYPSLGLMTEKLSQKNINLIFAVTENVVNLYQNYSELIPGTTVGVLSMDSSNVLQLIVDAYGKIRSKVELEVRDLPEELSLSFNATCLNNEVIPGLKSCMGLKIGDTVSFSIEAKVRGCPQEKEKSFTIKPVGFKDSLIVQVTFDCDCACQAQAEPNSHRCNNGNGTFECGVCRCGPGWLGSQCECSEEDYRPSQQDECSPREGQPVCSQRGECLCGQCVCHSSDFGKITGKYCECDDFSCVRYKGEMCSGHGQCSCGDCLCDSDWTGYYCNCTTRTDTCMSSNGLLCSGRGKCECGSCVCIQPGSYGDTCEKCPTCPDACTFKKECVECKKFDRGALHDENTCNRYCRDEIESVKELKDTGKDAVNCTYKNEDDCVVRFQYYEDSSGKSILYVVEEPECPKGPDILVVLLSVMGAILLIGLAALLIWKLLITIHDRKEFAKFEEERARAKWDTANNPLYKEATSTFTNITYRGT

SEQ ID NO: 20814 - protein, 1104 aa, Homo sapiens
MADGPRCKRRKQANPRRNNVTNYNTVVETNSDSDDEDKLHIVEEESVTDAADCEGVPEDDLPTDQTVLPGRSSEREGNAKNCWEDDIKDDECESDAENEQNHDPNVEEFLQQQDTAVIFPEAPEEDQRQGTPEASGHDENGTPDAFSQLLTCPYCDRGYKRFTSLKEHIKYRHEKNEDNFSCSLCSYTFAYRTQLERHMTSHKSGRDQRHVTQSGCNRKFKCTECGKAFKYKHHLKEHLRIHSGEKPYECPNCKKRFSHSGSYSSHISSKKCISLIPVNGRPRTGLKTSQCSSPSLSASPGSPTRPQIRQKIENKPLQEQLSVNQIKTEPVDYEFKPIVVASGINCSTPLQNGVFTGGGPLQATSSPQGMVQAVVLPTVGLVSPISINLSDIQNVLKVAVDGNVIRQVLENNQANLASKEQETINASPIQQGGHSVISAISLPLVDQDGTTKIIINYSLEQPSQLQVVPQNLKKENPVATNSCKSEKLPEDLTVKSEKDKSFEGGVNDSTCLLCDDCPGDINALPELKHYDLKQPTQPPPLPAAEAEKPESSVSSATGDGNLSPSQPPLKNLLSLLKAYYALNAQPSAEELSKIADSVNLPLDVVKKWFEKMQAGQISVQSSEPSSPEPGKVNIPAKNNDQPQSANANEPQDSTVNLQSPLKMTNSPVLPVGSTTNGSRSSTPSPSPLNLSSSRNTQGYLYTAEGAQEEPQVEPLDLSLPKQQGELLERSTITSVYQNSVYSVQEEPLNLSCAKKEPQKDSCVTDSEPVVNVIPPSANPINIAIPTVTAQLPTIVAIADQNSVPCLRALAANKQTILIPQVAYTYSTTVSPAVQEPPLKVIQPNGNQDERQDTSSEGVSNVEDQNDSDSTPPKKKMRKTENGMYACDLCDKIFQKSSSLLRHKYEHTGKRPHECGICKKAFKHKHHLIEHMRLHSGEKPYQCDKCGKRFSHSGSYSQHMNHRYSYCKREAEERDSTEQEEAGPEILSNEHVGARASPSQGDSDERESLTREEDEDSEKEEEEEDKEMEELQEEKECEKPQGDEEEEEEEEEVEEEEVEEAENEGEEAKTEGLMKDDRAESQASSLGQKVGESSEQVSEEKTNEA

SEQ ID NO: 20815 - protein, 222 aa, Homo sapiens
MLQTLYDYFWWERLWLPVNLTWADLEDRDGRVYAKASDLYITLPLALLFLIVRYFFELYVATPLAALLNIKEKTRLRAPPNATLEHFYLTSGKQPKQVEVELLSRQSGLSGRQVERWFRRRRNQDRPSLLKKFREASWRFTFYLIAFIAGMAVIVDKPWFYDMKKVWEGYPIQSTIPSQYWYYMIELSFYWSLLFSIASDVKRKDFKEQIIHHVATIILISF

SEQ ID NO: 20816 - protein, 396 aa, Homo sapiens
MLSSFPVVLLETMSHYTDEPRFTIEQIDLLQRLRRTGMTKHEILHALETLDRLDQEHSDKFGRRSSYGGSSYGNSTNNVPASSSTATASTQTQHSGMSPSPSNSYDTSPQPCTTNQNGRENNERLSTSNGKMSPTRYHANSMGQRSYSFEASEEDLDVDDKVEELMRRDSSVIKEEIKAFLANRRISQAVVAQVTGISQSRISHWLLQQGSDLSEQKKRAFYRWYQLEKTNPGATLSMRPAPIPIEDPEWRQTPPPVSATSGTFRLRRGSRFTWRKECLAVMESYFNENQYPDEAKREEIANACNAVIQKPGKKLSDLERVTSLKVYNWFANRRKEIKRRANIEAAILESHGIDVQSPGGHSNSDDVDGNDYSEQVSPCAAGRGSWCLSRGYSGTA

SEQ ID NO: 20817 - protein, 848 aa, Homo sapiens
MKVVPTSPTPTDARRPRLGQIWITPVERTSTQAALVQGAGRRAQGTCLRPSPADGYLETPGHRKPSHGCRAASKARLEAKPANSPFPSHPSLAHITQFRMMVSLGHLAKGASLDDLIDSCIQSFDADGNLCRSNQLLQVMLTMHRIVISSAELLQKVITLYKDALAKNSPGLCLKICYFVRYWITEFWVMFKMDASLTDTMEEFQELVKAKGEELHCRLIDTTQINARDWSRKLTQRIKSNTSKKRKVSLLFDHLEPEELSEHLTYLEFKSFRRISFSDYQNYLVNSCVKENPTMERSIALCNGISQWVQLMVLSRPTPQLRAEVFIKFIQVAQKLHQLQNFNTLMAVIGGLCHSSISRLKETSSHVPHEINKVLGEMTELLSSSRNYDNYRRAYGECTDFKIPILGVHLKDLISLYEAMPDYLEDGKVNVHKLLALYNHISELVQLQEVAPPLEANKDLVHLLTLSLDLYYTEDEIYELSYAREPRNHRAPPLTPSKPPVVVDWASGVSPKPDPKTISKHVQRMVDSVFKNYDHDQDGYISQEEFEKIAASFPFSFCVMDKDREGLISRDEITAYFMRASSIYSKLGLGFPHNFQETTYLKPTFCDNCAGFLWGVIKQGYRCKDCGMNCHKQCKDLVVFECKKRAKNPVAPTENNTSVGPVSNLCSLGAKDLLHAPEEGPFTFPNGEAVEHGEESKDRTIMLMGVSSQKISLRLKRAVAHKATQTESQPWIGSEGPSGPFVLSSPRKTAQDTLYVLPSPTSPCPSPVLVRKRAFVKWENKDSLIKSKEELRHLRLPTYQELEQEINTLKADNDALKIQLKYAQKKIESLQLEKSNHVLAQMEQGDCS

SEQ ID NO: 20818 - protein, 51 aa, Homo sapiens
MSRSVALAVLALLSLSGLEAIQHSGLLTSSSREWKVKFPELLCVWVSSIRH

SEQ ID NO: 20819 - protein, 300 aa, Homo sapiens
MGYIQSWRPNFPENLAQKLPNLVELYLHSNNIVVVPEAIGSLVKLQCLDLSDNALEIVCPEIGRLRALRHLRLANNQLQFLPPEVGDLKELQTLDISTNRLLTLPERLHMCLSLQYLTVDRNRLWYVPRHLCQLPSLNELSMAGNRLAFLPLDLGRSRELQYVYVDNNIHLKGLPSYLYNKVIGCSGCGAPIQVSEVKLLSFSSGQRTVFLPAEVKAIGTEHDHVLPLQELAMRGLYHTYHSLLKDLNFLSPISLPRSLLELLHCPLGHCHRCSEPMFTIVYPKLFPLRETPMAGLHQWK

SEQ ID NO: 20820 - protein, 772 aa, Homo sapiens
MYPQGRHPAPHQPGQPGFKFTVAESCDRIKDEFQFLQAQYHSLKVEYDKLANEKTEMQRHYVMYYEMSYGLNIEMHKQTEIAKRLNTILAQIMPFLSQEHQQQVAQAVERAKQVTMTELNAIIGQQQLQAQHLSHATHGPPVQLPPHPSGLQPPGIPPVTGSSSGLLALGALGSQAHLTVKDEKNHHELDHRERESSANNSVSPSESLRASEKHRGSADYSMEAKKRKAEEKDSLSRYDSDGDKSDDLVVDVSNEDPATPRVSPAHSPPENGLDKARSLKKDAPTSPASVASSSSTPSSKTKDLGHNDKSSTPGLKSNTPTPRNDAPTPGTSTTPGLRSMPGKPPGMDPIGIMASALRTPISITSSYAAPFAMMSHHEMNGSLTSPGAYAGLHNIPPQMSAAAAAAAAAYGRSPMVSFGAVGFDPHPPMRATGLPSSLASIPGGKPAYSFHVSADGQMQPVPFPHDALAGPGIPRHARQINTLSHGEVVCAVTISNPTRHVYTGGKGCVKIWDISQPGSKSPISQLDCLNRDNYIRSCKLLPDGRTLIVGGEASTLTIWDLASPTPRIKAELTSSAPACYALAISPDAKVCFSCCSDGNIAVWDLHNQTLVRQFQGHTDGASCIDISHDGTKLWTGGLDNTVRSWDLREGRQLQQHDFTSQIFSLGYCPTGEWLAVGMESSNVEVLHHTKPDKYQLHLHESCVLSLKFAYCGKWFVSTGKDNLLNAWRTPYGASIFQSKESSSVLSCDISADDKYIVTGSGDKKATVYEVIY

SEQ ID NO: 20821 - protein, 535 aa, Homo sapiens
SMHKFLTIPRLEELYNTKQGPTNPMLFHLVRDVKQGNLPPGYKITLIDIGLVIEYLMGGTYRCTYTRKRFRLIYNSLGGNNRRSGRNTSSSTPQLRKSHESFGNRADKKEKMRHNHFIKTAQPYRPKIDTVMEEGKKKRTKDEIVDIDDPETKRFPYPLNELLIWACLMKRQVMARFLWQHGEESMAKALVACKIYRSMAYEAKQSDLVDDTSEELKQYSNDFGQLAVELLEQSFRQDETMAMKLLTYELKNWSNSTCLKLAVSSRLRPFVAHTCTQMLLSDMWMGRLNMRKNSWYKVILSILVPPAILLLEYKTKAEMSHIPQSQDAHQMTMDDSENNFQNITEEIPMEVFKEVRILDSNEGKNEMEIQMKSKKLPITRKFYAFYHAPIVKFWFNTLAYLGFLMLYTFVVLVQMEQLPSVQEWIVIAYIFTYAIEKVREIFMSEAGKVNQKIKVWFSDYFNISDTIAIISFFIGFGLRFGAKWNFANAYDNHVFVAGRLIYCLNIIFWYVRLLDFLAVNQQAGPYVMMIGKMVS

SEQ ID NO: 20822 - protein, 778 aa, Homo sapiens
MPPPPPLSCLRGLQAPHQPGQPGFKFTVAESCDRIKDEFQFLQAQYHSLKVEYDKLANEKTEMQRHYVMYYEMSYGLNIEMHKQTEIAKRLNTILAQIMPFLSQEHQQQVAQAVERAKQVTMTELNAIIGQQQLQAQHLSHATHGPPVQLPPHPSGLQPPGIPPVTGSSSGLLALGALGSQAHLTVKDEKNHHELDHRERESSANNSVSPSESLRASEKHRGSADYSMEAKKRKAEEKDSLSRYDSDGDKSDDLVVDVSNEDPATPRVSPAHSPPENGLDKARSLKKDAPTSPASVASSSSTPSSKTKDLGHNDKSSTPGLKSNTPTPRNDAPTPGTSTTPGLRSMPGKPPGMDPIGIMASALRTPISITSSYAAPFAMMSHHEMNGSLTSPGAYAGLHNIPPQMSAAAAAAAAAYGRSPMVSFGAVGFDPHPPMRATGLPSSLASIPGGKPAYSFHVSADGQMQPVPFPHDALAGPGIPRHARQINTLSHGEVVCAVTISNPTRHVYTGGKGCVKIWDISQPGSKSPISQLDCLNRDNYIRSCKLLPDGRTLIVGGEASTLTIWDLASPTPRIKAELTSSAPACYALAISPDAKVCFSCCSDGNIAVWDLHNQTLVRQFQGHTDGASCIDISHDGTKLWTGGLDNTVRSWDLREGRQLQQHDFTSQIFSLGYCPTGEWLAVGMESSNVEVLHHTKPDKYQLHLHESCVLSLKFAYCGKWFVSTGKDNLLNAWRTPYGASIFQSKESSSVLSCDISADDKYIVTGSGDKKATVYEVIY

SEQ ID NO: 20823 - protein, 942 aa, Homo sapiens
MSEMSGATTSLATVALDPPSDRTSHPQDVIEDLSQNSITGEHSQLLDDGHKKARNAYLNNSNYEEGDEYFDKNLALFEEEMDTRPKVSSLLNRMANYTNLTQGAKEHEEAENITEGKKKPTKTPQMGTFMGVYLPCLQNIFGVILFLRLTWVVGTAGVLQAFAIVLICCCCTMLTAISMSAIATNGVVPAGGSYFMISRALGPEFGGAVGLCFYLGTTFAAAMYILGAIEIFLVYIVPRAAIFHSDDALKESAAMLNNMRVYGTAFLVLMVLVVFIGVRYVNKFASLFLACVIVSILAIYAGAIKSSFAPPHFPVCMLGNRTLSSRHIDVCSKTKEINNMTVPSKLWGFFCNSSQFFNATCDEYFVHNNVTSIQGIPGLASGIITENLWSNYLPKGEIIEKPSAKSSDVLGSLNHEYVLVDITTSFTLLVGIFFPSVTGIMAGSNRSGDLKDAQKSIPIGTILAILTTSFVYLSNVVLFGACIEGVVLRDKFGDAVKGNLVVGTLSWPSPWVIVIGSFFSTCGAGLQSLTGAPRLLQAIAKDNIIPFLRVFGHSKANGEPTWALLLTAAIAELGILIASLDLVAPILSMFFLMCYLFVNLACALQTLLRTPNWRPRFRYYHWALSFMGMSICLALMFISSWYYAIVAMVIAGMIYKYIEYQGAEKEWGDGIRGLSLSAARFALLRLEEGPPHTKNWRPQLLVLLKLDEDLHVKHPRLLTFASQLKAGKGLTIVGSVIVGNFLENYGEALAAEQTIKHLMEAEKVKGFCQLVVAAKLREGISHLIQSCGLGGMKHNTVVMGWPNGWRQSEDARAWKTFIGTVRVTTAAHLALLVAKNISFFPSNVEQFSEGNIDVWWIVHDGGMLMLLPFLLKQHKVWRKCSIRIFTVAQLEDNSIQMKKDLATFLYHLRIEAEVEVVEMVRKLSLRYKSMTVIYQHILTSAL

SEQ ID NO: 20824 - protein, 86 aa, Homo sapiens
DTKEMKKKLETKRLERIQGMTKVTTDKMAQERLKREINNSHIQEVVQVIKQMTENLERHQEKLEEKQAACLEQIREMEKQPDPAHP

SEQ ID NO: 20825 - protein, 268 aa, Homo sapiens
MPRPRLLAALCGALLCAPSLLVALDICSKNPCHNGGLCEEISQEVRGDVFPSYTCTCLKGYAGNHCETKCVEPLGLENGNIANSQIAASSVRVTFLGLQHWVPELARLNRAGMVNAWTPSSNDDNPWIQVNLLRRMWVTGVVTQGASRLASHEYLKAFKVAYSLNGHEFDFIHDVNKKHKEFVGNWNKNAVHVNLFETPVEAQYVRLYPTSCHTACTLRFELLGCELNAATRPGACISSAGTPPMHGWTSRATSTPGLRGATVTISGC

SEQ ID NO: 20826 - protein, 774 aa, Homo sapiens
MPPPPPLSCLRGLQAPHQPGQPGFKFTVAESCDRIKDEFQFLQAQYHSLKVEYDKLANEKTEMQRHYVMYYEMSYGLNIEMHKQTEIAKRLNTILAQIMPFLSQEHQQQVAQAVERAKQVTMTELNAIIGQQLQAQHLSHATHGPPVQLPPHPSGLQPPGIPPVTGSSSGLLALGALGSQAHLTVKDEKNHHELDHRERESSANNSVSPSESLRASEKHRGSADYSMEAKKRKAEEKDSLSRYDSDGDKSDDLVVDVSNEDPATPRVSPAHSPPENGLDKARSLKKDAPTSPASVASSSSTPSSKTKDLGHNDKSSTPGLKSNTPTPRNDAPTPGTSTTPGLRSMPGKPPGMDPIASALRTPISITSSYAAPFAMMSHHEMNGSLTSPGAYAGLHNIPPQMSAAAAAAAAAYGRSPMVSFGAVGFDPHPPMRATGLPSSLASIPGGKPAYSFHVSADGQMQPVPFPHDALAGPGIPRHARQINTLSHGEVVCAVTISNPTRHVYTGGKGCVKIWDISQPGSKSPISQLDCLNRDNYIRSCKLLPDGRTLIVGGEASTLTIWDLASPTPRIKAELTSSAPACYALAISPDAKVCFSCCSDGNIAVWDLHNQTLVRQFQGHTDGASCIDISHDGTKLWTGGLDNTVRSWDLREGRQLQQHDFTSQIFSLGYCPTGEWLAVGMESSNVEVLHHTKPDKYQLHLHESCVLSLKFAYCGKWFVSTGKDNLLNAWRTPYGASIFQSKESSSVLSCDISADDKYIVTGSGDKKATVYEVIY

SEQ ID NO: 20827 - protein, 198 aa, Homo sapiens
MKVFCEVLEELYKKVLLGATLENDSHDYIFYLNPAVSDQDCSTATSLEWANTCGIQGRHQPISVGVAPIAVAPVCLKTNSQMSGSREVMLLQLTVIKVMTTRILSVKTEFHAKEQYRDVIKILLESAKVDSKLICMFQNSDKLLSHMAAQCLALLLYFQLREKITLSNSWIAFCQKNLSEYSESNKAIYCLWTLTAII

SEQ ID NO: 20828 - protein, 1390 aa, Homo sapiens
MKDSNRCCCGQFTNQHIPPLPSATPSKNEEESKQVETQPEKWSVAKHTQSYPTDSYGVLEFQGGGYSNKAMYIRVSYDTKPDSLLHLMVKDWQLELPKLLISVHGGLQNFEMQPKLKQVFGKGLIKAAMTTGAWIFTGGVSTGVISHVGDALKDHSSKSRGRVCAIGIAPWGIVENKEDLVGKDVTRVYQTMSNPLSKLSVLNNSHTHFILADNGTLGKYGAEVKLRRLLEKHISLQKINTRLGQGVPLVGLVVEGGPNVVSIVLEYLQEEPPIPVVICDGSGRASDILSFAHKYCEEGGIINESLREQLLVTIQKTFNYNKAQSHQLFAIIMECMKKKELVTVFRMGSEGQQDIEMAILTALLKGTNVSAPDQLSLALAWNRVDIARSQIFVFGPHWPPLGSLAPPTDSKATEKEKKPPMATTKGGRGKGKGKKKGKVKEEVEEETDPRKIELLNWVNALEQAMLDALVLDRVDFVKLLIENGVNMQHFLTIPRLEELYNTRLGPPNTLHLLVRDVKKSNLPPDYHISLIDIGLVLEYLMGGAYRCNYTRKNFRTLYNNLFGPKRPKALKLLGMEDDEPPAKGKKKKKKKKEEEIDIDVDDPAVSRFQYPFHELMVWAVLMKRQKMAVFLWQRGEESMAKALVACKLYKAMAHESSESDLVDDISQDLDNNSKDFGQLALELLDQSYKHDEQIAMKLLTYELKNWSNSTCLKLAVAAKHRDFIAHTCSQMLLTDMWMGRLRMRKNPGLKVIMGILLPPTILFLEFRTYDDFSYQTSKENEDGKEKEEENTDANADAGSRKGDEENEHKKQRSIPIGTKICEFYNAPIVKFWFYTISYLGYLLLFNYVILVRMDGWPSLQEWIVISYIVSLALEKIREILMSEPGKLSQKIKVWLQEYWNITDLVAISTFMIGAILRLQNQPYMGYGRVIYCVDIIFWYIRVLDIFGVNKYLGPYVMMIGKMMIDMLYFVVIMLVVLMSFGVARQAILHPEEKPSWKLARNIFYMPYWMIYGEVFADQIDLYAMEINPPCGENLYDEEGKRLPPCIPGAWLTPALMACYLLVANILLVNLLIAVFNNTFFEVKSISNQVWKFQRYQLIMTFHDRPVLPPPMIILSHIYIIIMRLSGRCRKKREGDQEERDRGLKLFLSDEELKRLHEFEEQCVQEHFREKEDEQQSSSDERIRVTSERVENMSMRLEEINERETFMKTSLQTVDLRLAQLEELSNRMVNALENLAGIDRSDLIQARSRASSECEATYLLRQSSINSADGYSLYRYHFNGEELLFEDTSLSTSPGTGVRKKTCSFRIKEEKDVKTHLVPECQNSLHLSLGTSTSATPDGSHLAVDDLKNAEESKLGPDIGISKEDDERQTDSKKEETISPSLNKTDVIHGQ

SEQ ID NO: 20829 - protein, 122 aa, Homo sapiens
MFCSEKKLREVERIVKANDREYNEKFQYADNRIHTSKYNILTFLPINLFEQFQRVANAYFLCLLILQLIPEISSLTWFTTIVPLVLVITMTAVKDATDDYFRHKSDNQVNNRQSEVLINSKC

SEQ ID NO: 20830 - protein, 568 aa, Homo sapiens
MARLTKRRQADTKAIQHLWAAIEIIRNQKQIANIDRITKYMSRVHGMHPKETTRQLSLAVKDGLIVETLTVGCKGSKAGIEQEGYWLPGDEIDWETENHDWYCFECHLPGEVLICDLCFRVYHSKCLSDEFRLRDSSSPWQCPVCRSIKKKNTNKQEMGTYLRFIVSRMKERAIDLNKKGKDNKHPMYRRLVHSAVDVPTIQEKVNEGKYRSYEEFKADAQLLLHNTVIFYGADSEQADIARMLYKDTCHELDELQLCKNCFYLSNARPDNWFCYPCIPNHELVWAKMKGFGFWPAKVMQKEDNQVDVRFFGHHHQRAWIPSENIQDITVNIHRLHVKRSMGWKKACDELELHQRFLREGRFWKSKNEDRGEEEAESSISSTSNEQLKVTQEPRAKKGRRNQSVEPKKEEPEPETEAVSSSQEIPTMPQPIEKVSVSTQTKKLSASSPRMLHRSTQTTNDGVCQSMCHDKYTKIFNDFKDRMKSDHKRETERVVREALEKLRSEMEEEKRQAVNKAVANMQGEMDRKCKQVKEKCKEEFVEEIKKLATQHKQLISQTKKKQWVNTSLF

SEQ ID NO: 20831 - protein, 828 aa, Homo sapiens
MALSPWTPGLGAGEKLVQAAAVSTGPSLELCTLPSTLGSSVAVEALEQLFVVEQSLQSDYFKCNEEAKIFLKDIAVAVKKLEEMRKATIDLLEIESMELNKLYYLLETLPNSIKRELEECVRDARRLNLFEINTIKMRITRTENEIELLKKKITDLTKYNEALGEKQEELARKHARFVLSLNQTMEKKATTTVYINETYTKINLKREDIALQKKCIQEAEELMEKERAEYLIRKQELTAQINEFENTREVKRMETYQKKKELDKLQTKMSKIKETVTVSAAVLSDHNLEIARLHESIRYWEQEVSELKKDLAILEAKLCFFTDNKEKLDDISNDEKNEFLNKIKQLVETLHAARMEYKDLREKMKTLARQYKIVLSEEEKAFLQKQKIHDENQKQLTFISQKEYFLSQKRVDIKNMEEGLITLQELQQATKTVYQQQIKILSANLERESQRCVITQWKMACLRKKHARWTAKIKAEIQAITEKIQNAEVRRIELLNETSFRQQEISGFVAQIEKLTTELKEEEKAFVNKEKMLMKELSKYEEIFVKETQINKEKEEELVEYLPQLQVAEQEYKEKRRKLEELSNIITAQRQEEDLLNNHIFLFTRDFSRYISNMEDVKQELQQLRDQESKKNKDHFETLKNLENGFYINDQKADLLLLENKKLKEYILYLKNNIEKYREGQEALMHTSSDLSRQLIAQEAQYKDLWAEFQTTVKILVDNGEETLQDINNLTDKLRERDEKMQHVSTWLRGSLEGLRLLVEQESPMDLLSKQQLRALLVTSKEEKTCQLSDLVIPNYATNIQLNIDTYLGLNTLVVLSNSAFHLREFSR

SEQ ID NO: 20832 - protein, 916 aa, Homo sapiens
NNPVFRSTVDAVQGGRDVLRLYGYTEEQPDGLSFPEGQEEPDEHQVATVTLEVLLLRTELSLLLQNTHPRQQALEQLLEDKVEDDMLQLSEFDPLLREIAPGPLTTPSVPGSTPGPCFLCGSAPGTLHCPSCKQALCPACDHLFHGHPSRAHHLRQTLPGVLQGTHLSPSLPASAQPRPQSTSLLALGDSSLSSPNPASAHLPWHCAACAMLNEPWAVLCVACDRPRGCKGLGLGTEGPQGTGGLEPDLARGRWACQSCTFENEAAAVLCSICERPRLAQPPSLVVDSRDAGICLQPLQQGDALLASAQSQVWYCIHCTFCNSSPGWVCVMCNRTSSPIPAQHAPRPYASSLEKGPPKPGPPRRLSAPLPSSCGDPEKQRQDKMREEGLQLVSMIREARRAWLDRHGNLDEAVEECVRTRRRKVQELQSLGFGPEEGSLQALFQHGGDVSRALTELQRQRLEPFRQRLWDSGPEPTPSWDGPDKQSLVRRLLAVYALPSWGRAELALSLLQETPRNYELGDVVEAVRHSQDRAFLRRLLAQECAVCGWALPHNRMQALTSCECTICPDCFRQHFTIALKEKHITDMVCPACGRPDLTDDTQLLSYFSTLDIQLRESLEPDAYALFHKKLTEGVLMRDPKFLWCAQCSFGFIYEREQLEATCPQCHQTFCVRCKRQWEEQHRGRSCEDFQNWKRMNDPEYQAQGLAMYLQENGIDCPKCKFSYALARGGCMHFHCTQCRHQFCSGCYNAFYAKNKCPEPNCRVKKSLHGHHPRDCLFYLRDWTALRLQKLLQDNNVMFNTEPPAGARAVPGGGCRVIEQKEVPNGLRDEACGKETPAGYAGLCQAHYKEYLVSLINAHSLDPATLYEVEELETATERYLHVRPQPLAGEDPPAYQARLLQKLTEEVPLGQSIPRRRK

SEQ ID NO: 20833 - protein, 1062 aa, Homo sapiens
MMKECMVRLIYCEMLGYDASFGYIHAIKLAQQGNLLEKRVGYLAVSLFLHESHELLLLLVNTVVKDLQSTNLVEVCMALTVVSQIFPCEMIPAVLPLIEDKLQHSKEIVRRKAVLALYKFHLIAPNQVQHIHIKFRKALCDRDVGVMAASLHIYLRMIKENSSGYKDLTGSFVTILKQVVGGKLPVEFNYHSVPAPWLQIQLLRILGLLGKDDQRTSELMYDVLDESLRRAELNHNVTYAILFECVHTVYSIYPKSELLEKAAKCIGKFVLSPKINLKYLGLKALTYVIQQDPTLALQHQMTIIECLDHPDPIIKRETLELLYRITNAQNITVIVQKMLEYLHQSKEEYVIVNLVGKIAELAEKYAPDNAWFIQTMNAVFSVGGDVMHPDIPNNFLRLLAEGFDDETEDQQLRLYAVQSYLTLLDMENVFYPQRFLQVMSWVLGEYSYLLDKETPEEVIAKLYKLLMNDSVSSETKAWLIAAVTKLTSQAHSSNTVERLIHEFTISLDTCMRQHAFELKHLHENVELMKSLLPVDRSCEDLVVDASLSFLDGFVAEGLSQGAAPYKPPHQRQEEKLSQEKVLNFEPYGLSFSSSGFTGRQSPAGISLGSDVSGNSAETGLKETNSLKLEGIKKLWGKEGYLPKKESKTGDESGALPVPQESIMENVDQAITKKDQSQVLTQSKEEKEKQLLASSLFVGLGSESTINLLGKADTVSHKFRRKSKVKEAKSGETTSTHNMTCSSFSSLSNVAYEDDYYSNTLHDTGDKELKKFSLTSELLDSESLTELPLVEKFSYCSLSTPSLFANNNMEIFHPPQSTAASVAKESSLASSFLEETTEYIHSNAMEVCNNETISVSSYKIWKDDCLLMVWSVTNKSGLELKSADLEIFPAENFKVTEQPGCCLPVMEAESTKSFQYSVQIEKPFTEGNLTGFISYHMMDTHSAQLEFSVNLSLLDFIRPLKISSDDFGKLWLSFANDVKQNVKMSESQAALPSALKTLQQKLRLHIIEIIGNEGLLACQLLPSIPCLLHCRVHADVLALWFRSSCSTLPDYLLYQCQKVMEGS

SEQ ID NO: 20834 - protein, 417 aa, Homo sapiens
MNDRCPRPGSSSLARGCLLSVADGAGREGGPGPALPGLGRCCWRLALHQASLWQESELCRGRRLRMMPQLQFKDAFWCRDFTAHTGYEVLLQRLLDGRKMCKDMEELLRQRAQAEERYGKELVQIARKAGGQTEINSLRASFDSLKQQMENVGSSHIQLALTLREELRSLEEFRERQKEQRKKYEAVMDRVQKSKLSLYKKAMESKKTYEQKCRDADDAEQAFERISANGHQKQVEKSQNKARQCKDSATEAERVYRQSIAQLEKVRAEWEQEHRTTCEAFQLQEFDRLTILRNALWVHSNQLSMQCVKDDELYEEVRLTLEGCSIDADIDSFIQAKSTGTEPPGEVRLADSAASSSGALPELLRSGGHPADQQPWHTAVLRHDKEVLWTAARKSQDHFVGSFCCVHRDPDPHPRAE

SEQ ID NO: 20835 - protein, 721 aa, Homo sapiens
MTTLLWVFVTLRVITAAVTVETSDHDNSLSVSIPQPSPLRVLLGTSLTIPCYFIDPMHPVTTAPSTAPLAPRIKWSRVSKEKEVVLLVATEGRVRVNSAYQDKVSLPNYPAIPSDATLEVQSLRSNDSGVYRCEVMHGIEDSEATLEVVVKGIVFHYRAISTRYTLDFDRAQRACLQNSAIIATPEQLQAAYEDGFHQCDAGWLADQTVRYPIHTPREGCYGDKDEFPGVRTYGIRDTNETYDVYCFAEEMEGEVFYATSPEKFTFQEAANECRRLGARLATTGQLYLAWQAGMDMCSAGWLADRSVRYPISKARPNCGGNLLGVRTVYVHANQTGYPDPSSRYDAICYTGEDFVDIPENFFGVGGEEDITVQTVTWPDMELPLPRNITEGEARGSVILTVKPIFEVSPSPLEPEEPFTFAPEIGATAFAEVENETGEATRPWGFPTPGLGPATAFTSEDLVVQVTAVPGQPHLPGGVVFHYRPGPTRYSLTFEEAQQACLRTGAVIASPEQLQAAYEAGYEQCDAGWLRDQTVRYPIVSPRTPCVGDKDSSPGVRTYGVRPSTETYDVYCFVDRLEGEVFFATRLEQFTFQEALEFCESHNATLATTGQLYAAWSRGLDKCYAGWLADGSLRYPIVTPRPACGGDKPGVRTVYLYPNQTGLPDPLSRHHAFCFRGMQPHFGSNSPFCLERTPLGSPDPATTQYPIHQSKKMSVPLGQSQL

SEQ ID NO: 20836 - protein, 1003 aa, Homo sapiens
MSQWTPEYNELYTLKVDMKSEIPSDAPKTQESLKGILLHPEPIGAAKSFPAGVEMINSKVGNEFSHLCDDSQKQEKEMNGNQQEQEKSLVVRKKRKSQQAGPSYVQNCVKENQGILGLRQHLGTPSDEDNDSSFSDCLSSPSSSLHFGDSDTVTSDEDKEVSVRHSQTILNAKSRSHSARSHKWPRTETESVSGLLMKRPCLHGSSLRRLPCRKRFVKNNSSQRTQKQKERILMQRKKREVLARRKYALLPSSSSSSENDLSSESSSSSSTEGEEDLFVSASENHQNNPAVPSGSIDEDVVVIEASSTPQVTANEEINVTSTDSEVEIVTVGESYRSRSTLGHSRSHWSQGSSSHASRPQEPRNRSRISTVIQPLRQNAAEVVDLTVDEDEPTVVPTTSARMESQATSASINNSNPSTSEQASDTASAVTSSQPSTVSETSATLTSNSTTGTSIGDDSRRTTSSAVTETGPPAMPRLPSCCPQHSPCGGSSQNHHALGHPHTSCFQQHGHHFQHHHHHHHTPHPAVPVSPSFSDPACPVERPPQVQAPCGANSSSGTSYHEQQALPVDLSNSGIRSHGSGSFHGASAFDPCCPVSSSRAAIFGHQAAAAAPSQPLSSIDGYGSSMVAQPQPQPPPQPSLSSCRHYMPPPYASLTRPLHHQASACPHSHGNPPPQTQPPPQVDYVIPHPVHAFHSQISSHATSHPVAPPPPTHLASTAAPIPQHLPPTHQPISHHIPATAPPAQRLHPHEVMQRMEVQRRRMMQHPTGLFVFCVSRRAHERPPPHPHRMHPNYGHGHHIHVPQTMSSHPRQAPERSAWELGIEAGVTAATYTPGALHPHLAHYHAPPRLHHLQLGALPLMVPDMAGYPHIRYISSGLDGTSFRGPFRGNFEELIHLEERLGNVNRGASQGTIERCTYPHKYKKVTTDWFSQRKLHCKQDGEEGTEEDTEEKCTICLSILEEGEDVRRLPCMHLFHQVCVDQWLITNKKCPICRVDIEAQLPSES

SEQ ID NO: 20837 - protein, 238 aa, Homo sapiens
AQDLCKVAGIAKVLVAQHDVYKGLLPEELTPLILATQKQFNYTHICAGASAFGKNLLPRVAAKLEVAPISDIIAIKSPDTFVRTIYAGNALCTVKCDEKVKVFSVRGTSFDAAATSGGSASSEKASSTSPVEISEWLDQKLTKSDRPELTGAKVVVSGVETEVLHVGQAGLEILTSGDPPTSASQSVGITGRGLKSGENFKLLYDLADQLHAAVGASRAAVDAGFVPNDMQVGQTGKI

SEQ ID NO: 20838 - protein, 304 aa, Homo sapiens
MAGQRTCQRRSSRAGPGKMQEPPKSIEEFLKFQNWDYWPREIHFRDDDKWSCTLKKIKEDSSFVSIYTHLWENVPRIFEALLIMESKLKEYSLILQNHTSEIFKWKSMISETSSYRKLERYGEFLKKYHKKKKIMLSDEMETEKNIEGCSFTGFKANELTQLPRHLDAEQIYLFILKAHNFDERVFKIWKTHFLSEASIALLHDSFWWWFLHKFRIYPDCLAQAIYATFHEAFPESSYLFNDEFKEDLGNNIFLWCSGLKPQKGFWIHWKLKELSTTTIHGSKKAPAKSVKERIADSQEHISTS

SEQ ID NO: 20839 - protein, 207 aa, Homo sapiens
PKCTACQESIVKDKVFKDNCCKREILALQIYCRNESRGCAEQLMLGHLLVHLKNDCHFEELPCVRPDCKEKVLRKDLRDHVEKACKYREATCSHCKSQVPMIALQKHEDTDCPCVVVSCPHKCSVQTLLRSELSAHLSECVNAPSTCSFKRYGCVFQGTNQQIKAHEASSAVQHVNLLKEWSNSLEKKGYENKESENSVPSLTDGNE

SEQ ID NO: 20840 - protein, 290 aa, Homo sapiens
SRGCAEQLMLGHLLVHLKNDCHFEELPCVRPDCKEKVLRKDLRDHVEKACKYREATCSHCKSQVPMIALQGTNQQIKAHEASSAVQHVNLLKEWSNSLEKKVSLLQNESVEKNKSIQSLHNQICSFEIEIERQKEMLRNNESKILHLQRVIDSQAEKLKELDKEIRPFRQNWEEADSMKSSVESLQNRVTELESVDKSAGQVARNTGLLESQLSRHDQMLSVHDIRLADMDLRFQVLETASYNGVLIWKIRDYKRRKQEAVMGKTLSLYSQPFYTGYFGYKMCARVYLNG

SEQ ID NO: 20841 - protein, 484 aa, Homo sapiens
MWLDRRGWLRVLGHWRYDLRRPSFTRTWSGDKGPMAETVSTQVGTEGGLRASHQQNGDAGGDAKVELSPGPPKPAGREVEPAPVGGEHPSAAAPGPGKHKKRRGATRERVVPPPKKRRTGVSFGDEHFAETSYYFEGGLRKDNDFLRNTVHRHEPPVTAEPIRLLAENEDVVVVDKPSSIPVHPCGRFRHNTVIFILGKEHQLKELHPLHRLDRLTSGVLMFAKTAAVSERIHEQVRDRQLEKEYVCRVEGEFPTEEVTCKEPILVVSYKVGVCRVDPRGKPCETVFQRLSYNGQSSVVRCRPLTGRTHQIRVHLQFLGHPILNDPIYNSVAWGPSRGRGGYIPKTNEELLRDLVAEHQAKQSLDVLDLCEGDLSPGLTDSTAPSSELGKDDLEELAAAAQKMEEVAEAAPQELDTIALASEKAVETDVMNQETDPLCAECRLVRQDPLPQDLVMFLHALRYKGPGFEYFSPMPAWAQDDWQKD

SEQ ID NO: 20842 - protein, 967 aa, Homo sapiens
MADWLRDYQDLLQVKTGLSLEVATYRALLEGESNPEIVIWAEHVENMPSEFRNKSYHYTDSLLQRENERNLFSRQKAPLASFNHSSALYSNLSGHRGSQTGTSIGGDARRGFLGSGYSSSATTQQENSYGKAVSSQTNVRTFSPTYGLLRNTEAQVKTFPDRPKAGDTREVPVYIGEDSTIARESYRDRRDKVAAGASESTRSNERTVILGKKTEVKATREQERNRPETIRTKPEEKMFDSKEKASEERNLRWEELTKLDKEARQRESQQMKEKAKEKDSPKEKSVREREVPISLEVSQDRRAEVSPKGLQTPVKDAGGGTGREAEARELRFRLGTSDATGSLQGDSMTETVAENIVTSILKQFTQSPETEASADSFPDTKVTYVDRKELPGERKTKTEIVVESKLTEDVDVSDEAGLDYLLSKDIKEVGLKGKSAEQMIGDIINLGLKGREGRAKVVNVEIVEEPVSYVSGEKPEEFSVPFKVEEVEDVSPGPWGLVKEEEGYGESDVTFSVNQHRRTKQPQENTTHVEEVTEAGDSEGEQSYFVSTPDEHPGGHDRDDGSVYGQIHIEEESTIRYSWQDEIVQGTRRRTQKDGAVGEKVVKPLDVPAPSLEGDLGSTHWKEQARSGEFHAEPTVIEKEIKIPHEFHTSMKGISSKEPRQQLVEVIGQLEETLPERMREELSALTREGQGGPGSVSVDVKKVQGAGGSSVTLVAEVNVSQTVDADRLDLEELSKDEASEMEKAVESVVRESLSRQRSPAPGSPDEEGGAEAPAAGIRFRRWATRELYIPSGESEVAGGASHSSGQRTPQGPVSATVEVSSPTGFAQSQVLEDVSQAARHIKLGPSEVWRTERMSYEGPTAEVVEMDVSNVEAIRSRTQEAGALGVSDRGSWRDADSRNDQAVGVSFKASAGEGDQAHREQGKEQAMFDKKVQLQRMVDQRSVISDEKKVALLYLDNEEEENDGHWF

SEQ ID NO: 20843 - protein, 733 aa, Homo sapiens
MRGLGLWLLGAMMLPGPAPREGELRPWGHRAQLHPPPAEEQGPAGLRLHRDLYGCQWLRGDGAASRAGPLLLPGPRRGVPGLSRQPQHLCRPQVGSDLHLIEPLDEGGEGGRHAVYQAEHLLQTAGTCGVSDDSLGSLLGPRTAAVFRPRPGDSLPSRETRYVELYVVVDNAEFQMLGSEAAVRHRVLEVVNHVDKLYQKLNFRVVLVGLEIWNSQDRFHVSPDPSVTLENLLTWQARQRTRRHLHDNVQLITGVDFTGTTVGFARVSAMCSHSSGAVNQDHSKNPVGVACTMAHEMGHNLGMDHDENVQGCRCQERFEAGRCIMAGSIGSSFPRMFSDCSQAYLESFLERPQSVCLANAPDLSHLVGGPVCGNLFVERGEQCDCGPPEDCRNRCCNSTTCQLAEGAQCAHGTCCQECKVKPAGELCRPKKDMCDLEEFCDGRHPECPEDAFQENGTPCSGGYCYNGACPTLAQQCQAFWGPGGQAAEESCFSYDILPGCKASRYRADMCGVLQCKGGQQPLGRAICIVDVCHALTTEDGTAYEPVPEGTRCGPEKVCNHKQECHCHAGWAPPHCAKLLTEVHAASGSLPVFVVVVLVLLAVVLVTLAGIIVYRKARSRILSRNVAPKTTMGRSNPLFHQAASRVPAKGGAPAPSRGPQELVPTTHPGQPARHPASSVALKRPPPAPPVTVSSPPFPVPVYTRQAPKQGAVGPKVALKPPIQRKQGAGAPTAP

SEQ ID NO: 20844 - protein, 747 aa, Homo sapiens
MAELFMECEEEELEPWQKKVKEVEDDDDDEPIFVGEISSSKPAISNILNRVNPSSYSRGLKNGALSRGITAAFKPTSQHYTNPTSNPVPASPINFHPESRSSDSSVIVQPFSKPGYITNSSRVVSNKSSELLFDLTQDTGLSHYQGGPTLSMAGMSESSFLSKRPSTSEVNNVNPKKPKPSESVSGANSSAVLPSVKSPSVTSSQAMLAKGTNTSSNQSKNGTPFPRACPKCNIHFNLLDPLKNHMKYCCPDMINNFLGLAKTEFSSTVNKNTTIDSEKGKLIMLVNDFYYGKHEGDVQEEQKTHTTFKCFSCLKILKNNIRFMNHMKHHLELEKQSSESWENHTTCQHCYRQFPTPFQLQCHIESTHTPHEFSTICKICELSFETEHVLLQHMKDNHKPGEMPYVCQVCNYRSSSFSDVETHFRTSHENTKNLLCPFCLKVIKIATPYMHHYMKHQKKGIHRCTKCRLQFLTCKEKMDHKTQHHRTFIKPKQLEGLPPGTKVTIRASVGPLQSGASPTPSISASASTLQLSPPRTKNITAKNPAKSNTSKPNTVKSNASKPNTSKPNGSKSKYKPKISNMQKKQSTLASSNKKSKVNTALRNLRYRRGIHKCIECCSEIKDFANHFPTYVHCSFCRYNTSCSKAYVNHMMSFHSNRPSKRFCIFKKHSENLRGITLVCLNCDFLSDVSGLDNMATHLSQHKTHTCQVVMQKDAEAAQRFQKISRVYLDSVPLRWTQLMPVLSFQGM

SEQ ID NO: 20845 - protein, 58 aa, Homo sapiens
MILVCDRVSEDGINRQKAQEWCIKHGFELVELSPEELPEEDDDFPESTGVKRIVQALN

SEQ ID NO: 20846 - protein, 782 aa, Homo sapiens
MYPQGRHPAPHQPGQPGFKFTVAESCDRIKDEFQFLQAQYHSLKVEYDKLANEKTEMQRHYVMYYEMSYGLNIEMHKQTEIAKRLNTILAQIMPFLSQEHQQQVAQAVERAKQVTMTELNAIIGVRGLPNLPLTQQQLQAQHLSHATHGPPVQLPPHPSGLQPPGIPPVTGSSSGLLALGALGSQAHLTVKDEKNHHELDHRERESSANNSVSPSESLRASEKHRGSADYSMEAKKRKAEEKDSLSRYDSDGDKSDDLVVDVSNEDPATPRVSPAHSPPENGLDKARSLKKDAPTSPASVASSSSTPSSKTKDLGHNDKSSTPGLKSNTPTPRNDAPTPGTSTTPGLRSMPGKPPGMDPIGIMASALRTPISITSSYAAPFAMMSHHEMNGSLTSPGAYAGLHNIPPQMSAAAAAAAAAYGRSPMVSFGAVGFDPHPPMRATGLPSSLASIPGGKPAYSFHVSADGQMQPVPFPHDALAGPGIPRHARQINTLSHGEVVCAVTISNPTRHVYTGGKGCVKIWDISQPGSKSPISQLDCLNRDNYIRSCKLLPDGRTLIVGGEASTLTIWDLASPTPRIKAELTSSAPACYALAISPDAKVCFSCCSDGNIAVWDLHNQTLVRQFQGHTDGASCIDISHDGTKLWTGGLDNTVRSWDLREGRQLQQHDFTSQIFSLGYCPTGEWLAVGMESSNVEVLHHTKPDKYQLHLHESCVLSLKFAYCGKWFVSTGKDNLLNAWRTPYGASIFQSKESSSVLSCDISADDKYIVTGSGDKKATVYEVIY

SEQ ID NO: 20847 - protein, 92 aa, Homo sapiens
MELCEFAFNMKKDEVCVNPYHYQRVETPVLPPVLVPRHTEIPAEFPPLDDYSHSIPENTNFPAGIEPQSNIPETPPPGYLSEDGETSDHQMN

SEQ ID NO: 20848 - protein, 764 aa, Homo sapiens
MYPQGRHPAPHQPGQPGFKFTVAESCDRIKDEFQFLQAQYHSLKVEYDKLANEKTEMQRHYVMYYEMSYGLNIEMHKQTEIAKRLNTILAQIMPFLSQEHQQQVAQAVERAKQVTMTELNAIIGQQQLQAQHLSHATHGPPVQLPPHPSGLQPPGIPPVTGSSSGLLALGALGSQAHLTVKDEKNHHELDHRERESSANNSVSPSESLRASEKHRGSADYSMEAKKRKAEEKDSLSRYDSDGDKSDDLVVDVSNEDPATPRVSPAHSPPENGLDKARSLKKDAPTSPASVASSSSTPSSKTKDLGHNDKSSTPGLKSNTPTPRNDAPTPGTSTTPGLRSMPGKPPGMDPIASALRTPISITSSYAAPFAMMSHHEMNGSLTSPGAYAGLHNIPPQMSAAAAAAAAAYGRSPMVGFDPHPPMRATGLPSSLASIPGGKPAYSFHVSADGQMQPVPFPHDALAGPGIPRHARQINTLSHGEVVCAVTISNPTRHVYTGGKGCVKIWDISQPGSKSPISQLDCLNRDNYIRSCKLLPDGRTLIVGGEASTLTIWDLASPTPRIKAELTSSAPACYALAISPDAKVCFSCCSDGNIAVWDLHNQTLVRQFQGHTDGASCIDISHDGTKLWTGGLDNTVRSWDLREGRQLQQHDFTSQIFSLGYCPTGEWLAVGMESSNVEVLHHTKPDKYQLHLHESCVLSLKFAYCGKWFVSTGKDNLLNAWRTPYGASIFQSKESSSVLSCDISADDKYIVTGSGDKKATVYEVIY

SEQ ID NO: 20849 - protein, 183 aa, Homo sapiens
MQELHLLWWALLLGLAQACPEPCDCGEKYGFQIADCAYRDLESVPPGFPANVTTLSLSANRLPGLPEGAFREVPLLQSLWLAHNEIRTVAAGALASLSHLKSLDLSHNLISDFAWSDLHNLSALQLLKMDSNELTFIPRDAFRSLRALRSLQLNHNRLHTLAEGTFTPLTALSHLQINENPFD

SEQ ID NO: 20850 - protein, 1526 aa, Homo sapiens
YIRVSYDTKPDSLLHLMVKDWQLELPKLLISVHGGLQNFEMQPKLKQVFGKGLIKAAMTTGAWIFTGGVSTGVISHVGDALKDHSSKSRGRVCAIGIAPWGIVENKEDLVGKDVTRVYQTMSNPLSKLSVLNNSHTHFILADNGTLGKYGAEVKLRRLLEKHISLQKINTRLGQGVPLVGLVVEGGPNVVSIVLEYLQEEPPIPVVICDGSGRASDILSFAHKIINESLREQLLVTIQKTFNYNKAQSHQLFAIIMECMKKKELVTVFRMGSEGQQDIEMAILTALLKGTNVSAPDQLSLALAWNRVDIARSQIFVFGPHWPPLGSLAPPTDSKATEKEKKPPMATTKGGRGKGKGKKKGKVKEEVEEETDPRKIELLNWVNALEQAMLDALVLDRVDFVKLLIENGVNMQHFLTIPRLEELYNTRLGPPNTLHLLVRDVKKSNLPPDYHISLIDIGLVLEYLMGGAYRCNYTRKNFRTLYNNLFGPKRPKALKLLGMEDDEPPAKGKKKKKKKKEEEIDIDVDDPAVSRFQYPFHELMVWAVLMKRQKMAVFLWQRGEESMAKALVACKLYKAMAHESSESDLVDDISQDLDNNSKDFGQLALELLDQSYKHDEQIAMKLLTYELKNWSNSTCLKLAVAAKHRDFIAHTCSQMLLTDMWMGRLRMRKNPGLKVIMGILLPPTILFLEFRTYDDFSYQTSKENEDGKEKEEENTDANADAGSRKGDEENEHKKQRSIPIGTKICEFYNAPIVKFWFYTISYLGYLLLFNYVILVRMDGWPSLQEWIVISYIVSLALEKIREILMSEPGKLSQKIKVWLQEYWNITDLVAISTFMIGAILRLQNQPYMGYGRVIYCVDIIFWYIRVLDIFGVNKYLGPYVMMIGKMMIDMLYFVVIMLVVLMSFGVARQAILHPEEKPSWKLARNIFYMPYWMIYGEVFADQIDLYAMEINPPCGENLYDEEGKRLPPCIPGAWLTPALMACYLLVANILLVNLLIAVFNNTFFEVKSISNQVWKFQRYQLIMTFHDRPVLPPPMIILSHIYIIIMRLSGRCRKKREGDQEERDRGLKLFLSDEELKRLHEFEEQCVQEHFREKEDEQQSSSDERIRVTSERVENMSMRLEEINERETFMKTSLQTVDLRLAQLEELSNRMVNALENLAGIDRSDLIQARSRASSECEATYLLRQSSINSADGYSLYRYHFNGEELLFEDTSLSTSPGTGVRKKTCSFRIKEEKDVKTHLVPECQNSLHLSLGTSTSATPDGSHLAVDDLKNAEESKLGPDIGISKEDDERQTDSKKEETISPSLNKTDVIHGQDKSDVQNTQLTVETTNIEGTISYPLEETKITRYFPDETINACKTMKSRSFVYSRGRKLVGGVNQDVEYSSITDQQLTTEWQCQVQKITRSHSTDIPYIVSEAAVQAEHKEQFADMQDEHHVAEAIPRIPRLSLTITDRNGMENLLSVKPDQTLGFPSLRSKSLHGHPRNVKSIQGKLDRSGHASSVSSLVIVSGMTAEEKKVKKEKASTETEC

SEQ ID NO: 20851 - protein, 535 aa, Homo sapiens
MGDNPFQPKSNSKMAELFMECEEEELEPWQKKVKEVEDDDDDEPIFVGEISSSKPAISNILNRVNPSSYSRGLKNGALSRGITAAFKPTSQHYTNPTSNPVPASPINFHPESRSSDSSVIVQPFSKPGYITNSSRVVSNKSSELLFDLTQDTGLSHYQGGPTLSMAGMSESSFLSKRPSTSEVNNVNPKKPKPSESVSGANSSAVLPSVKSPSVTSSQAMLAKGTNTSSNQSKNGTPFPRACPKCNIHFNLLDPLKNHMKYCCPDMINNFLGLAKTEFSSTVNKNTTIDSEKGKLIMLVNDFYYGKHEGDVQEEQKTHTTFKCFSCLKILKNNIRFMNHMKHHLELEKQSSESWENHTTCQHCYRQFPTPFQLQCHIESTHTPHEFSTICKICELSFETEHVLLQHMKDNHKPGEMPYVCQVCNYRSSSFSDVETHFRTSHENTKNLLCPFCLKVIKIATPYMHHYMKHQKKGIHRCTKCRLQFLTCKEKMDHKTQHHRTFIKPKQLEGLPPGTKSALEYLLQWRETEAWIIQSE

SEQ ID NO: 20852 - protein, 169 aa, Homo sapiens
FVKDVRKRFPQHTIMAGNVVTGEMVEELILSGADIIKVGIGPGSVCTTRKKTGVGYPQLSAVMECADAAHGLKGHIISDGGCSCPGDVAKAFGAGADFVMLGGMLAGHSESGGELIERDGKKYKLFYGMSSEMAMKKYAGGVAEYRRCGTYHPRHPRRDPLYVYLCGSS

SEQ ID NO: 20853 - protein, 793 aa, Homo sapiens
YAIKKHFAATHSLEFMWRQTWDSDSSTDIFCHMMPFYSYDVPHTCGPDPKICCQFDFKRLPGGRINCPWKVPPRAITEANVAERAALLLDQYRKKSQLFRSNVLLVPLGDDFRYDKPQEWDAQFFNYQRLFDFFNSRPNLHVQDHYWTGYYTSRPFYKSLDRVLEAHLRGAEVLYSLAAAHARRSGLAGRYPLSDFTLLTEARRTLGLFQHHDAITGTAKEAVVVDYGVRLLRSLVNLKQVIIHAAHYLVLGDKETYHFDPEAPFLQVDDTRLSHDALPERTVIQLDSSPRFVVLFNPLEQERFSMVSLLVNSPRVRVLSEEGQPLAVQISAHWSSATEAVPDVYQVSVPVRLPALGLGVLQLQLGLDGHRTLPSSVRIYLHGRQLSVSRHEAFPLRVIDSGTSDFALSNRYMQVWFSGLTGLLKSIRRVDEEHEQQVDMQVLVYGTRTSKDKSGAYLFLPDGEAKPYVPKEPPVLRVTEGPFFSEVVAYYEHIHQAVRLYNLPGVEGLSLDISSLVDIRDYVNKELALHIHTDIDSQGIFFTDLNGFQVQPRRYLKKLPLQANFYPMPVMAYIQDAQKRLTLHTAQALGVSSLKDGQLEVILDRRLMQDDNRGLGQGLKDNKRTCNRFRLLLERRTVGSEVQDSHSTSYPSLLSHLTSMYLNAPALALPVARMQLPGPGLRSFHPLASSLPCDFHLLNLRTLQAEEDTLPSAETALILHRKGFDCGLEAKNLGFNCTTSQGKVALGSLFHGLDVVFLQPTSLTLLYPLASPSNSTDVYLEPMEIATFRLRLG

SEQ ID NO: 20854 - protein, 749 aa, Homo sapiens
MAHRKLESVGSGMLDHRVRPGPVPHSQEPESEDMELPLEGYVPEGLELAALRPESPAPEEQECHNHSPDGDSSSDYVNNTSEEEDYDEGLPEEEEGITYYIRYCPEDDSYLEGMDCNGEEYLAHSAHPVDTDECQEAVEEWTDSAGPHPHGHEAEGSQDYPDGQLPIPEDEPSVLEAHDQEEDGHYCASKEGYQDYYPEEANGNTGASPYRLRRGDGDLEDQEEDIDQIVAEIKMSLSMTSITSASEASPEHGPEPGPEDSVEACPPIKASCSPSRHEARPKSLNLLPEAKHPGDPQRGFKPKTRTPEERLKWPHEQVCNGLEQPRKQQRSDLNGPVDNNNIPETKKVASFPSFVAVPGPCEPEDLIDGIIFAANYLGSTQLLSERNPSKNIRMMQAQEAVSRVKRMQKAAKIKKKANSEGDAQTLTEVDLFISTQRIKVLNADTQETMMDHALRTISYIADIGNIVVLMARRRMPRSASQDCIETTPGAQEGKKQYKMICHVFESEDAQLIAQSIGQAFSVAYQEFLRANGINPEDLSQKEYSDIINTQEMYNDDLIHFSNSENCKELQLEKHKGEILGVVVVESGWGSILPTVILANMMNGGPAARSGKLSIGDQIMSINGTSLVGLPLATCQGIIKGLKNQTQVKLNIVSCPPVTTVLIKRPDLKYQLGFSVQNGIICSLMRGGIAERGGVRVGHRIIEINGQSVVATAHEKIVQALSNSVGEIHMKTMPAAMFRLLTGQETPLYI

SEQ ID NO: 20855 - protein, 48 aa, Homo sapiens
MAKPCGVRLSGEARKQVEVFRQNLFQEILATENHIPESALARGLPQCG

SEQ ID NO: 20856 - protein, 290 aa, Homo sapiens
MLLSGAPPAGSRPGPRTQGSAGGGPGGSRRGAGGAGAGPGGGGSGGVAKWLREHLGFRGGGGGGGGSKPAPPEPDYRPPAPSPAAPPAPPPDILAAYRLQRERDFEDPYSGGSSGSAALATPVAPGPTPPPRHGSPPHRLIRVETPGPPAPPADERISGPPASSDRLAILEDYADPFDVQETGEGSAGASGAPEKVPENDGYMEPYEAQKMMAEIRGSKETATQPLPLYDTPYEPEEDGATAEGEGAPWPRESRLPEDDERPPEEYDQPWEWKKERISKAFAGAARDSCT

SEQ ID NO: 20857 - protein, 1085 aa, Homo sapiens
MSAADEVDGLGVARPHYGSVLDNERLTAEEMDERRRGIWQSNKDTQEAQKFALGIFAINEAVESGDVGKTLSALRSPDVGLYGVIPECGETYHSDLAEAKKKKLAVGDNNSKWVKHWVKGGYYYYHNLETQEGGWDEPPNFVQNSMQLSREEIQSSISGVTAAYNREQLWLANEGLITRLQARCRGYLVRQEFRSRMNFLKKQIPAITCIQSQWRGYKQKKAYQDRLAYLRSHKDEVVKIQSLARMHQARKRYRDRLQYFRDHINDIIKIQAFIRANKARDDYKTLINAEDPPMVVVRKFVHLLDQSDQDFQEELDLMKMREEVITLIRSNQQLENDLNLMDIKIGLLVKNKITLQDVVSHSKKLTKKNKEQLSDMMMINKQKGGLKALSKEKREKLEAYQHLFYLLQTNPTYLAKLIFQMPQNKSTKFMDSVIFTLYNYASNQREEYLLLRLFKTALQEEIKSKVDQIQEIVTGNPTVIKMVVSFNRGARGQNALRQILAPVVKEIMDDKSLNIKTDPVDIYKSWVNQMESQTGEASKLPYDVTPEQALAHEEVKTRLDSSIRNMRAVTDKFLSAIVSSVDKIPYGMRFIAKVLKDSLHEKFPDAGEDELLKIIGNLLYYRYMNPAIVAPDAFDIIDLSAGGQLTTDQRRNLGSIAKMLQHAASNKMFLGDNAHLSIINEYLSQSYQKFRRFFQTACDVPELQDKFNVDEYSDLVTLTKPVIYISIGEIINTHTLLLDHQDAIAPEHNDPIHELLDDLGEVPTIESLIGESSGNLNDPNKEALAKTEVSLTLTNKFDVPGDENAEMDARTILLNTKRLIVDVIRFQPGETLTEILETPATSEQEAEHQRAMQRRAIRDAKTPDKMKKSKSVKEDSNLTLQEKKEKIQTGLKKLTELGTVDPKNKYQELINDIARDIRNQRRYRQRRKAELVKLQQTYAALNSKATFYGEQVDYYKSYIKTCLDNLASKGKVSKKPREMKGKKSKKISLKYTAARLHEKGVLLEIEDLQVNQFKNVIFEISPTEEVGDFEVKAKFMGVQMETFMLHYQDLLQLQYEGVAVMKLFDRAKVNVNLLIFLLNKKFYGK

SEQ ID NO: 20858 - protein, 71 aa, Homo sapiens
GFHPSDIEVDLLKNGERIEKVEHSDLSFSKDWSFYLLYYTEFTPTEKDEYACRVNHVTLSQPKIVKWDRDM

SEQ ID NO: 20859 - protein, 339 aa, Homo sapiens
MDEQPRLMHSHAGVGMAGHPGLSQHLQDGAGGTEGEGGRKQDIGDILQQIMTITDQSLDEAQARKHALNCHRMKPALFNVLCEIKEKTVLSIRGAQEEEPTDPQLMRLDNMLLAEGVAGPEKGGGSAAAAAAAAASGGAGSDNSVEHSDYRAKLSQIRQIYHTELEKYEQACNEFTTHVMNLLREQSRTRPISPKEIERMVSIIHRKFSSIQMQLKQSTCEAVMILRSRFLDARRKRRNFNKQATEILNEYFYSHLSNPYPSEEAKEELAKKCGITVSQVDTLRHVISQTGGYSDGLAASQMYSPQGISANGGWQDATTPSSVTSPTEGPGSVHSDTSN

SEQ ID NO: 20860 - protein, 119 aa, Homo sapiens
MSRSVALAVLALLSLSGLEAIQRTPKIQVYSRHPAENGKSNFLNCYVSGFHPSDIEVDLLKNGERIEKVEHSDLSFSKDWSFYLLYYTEFTPTEKDEYACRVNHVTLSQPKIVKWDRDM

SEQ ID NO: 20861 - protein, 39 aa, Homo sapiens
MAKPCGVRLSGEARKQVEVFRQNLFQEVFSFLICKSWTQ

SEQ ID NO: 20862 - protein, 1450 aa, Homo sapiens
MAAERGARRLLSTPSFWLYCLLLLGRRAPGAAAARSGSAPQSPGASIRTFTPFYFLVEPVDTLSVRGSSVILNCSAYSEPSPKIEWKKDGTFLNLVSDDRRQLLPDGSLFISNVVHSKHNKPDEGYYQCVATVESLGTIISRTAKLIVAGLPRFTSQPEPSSVYAGNNAILNCEVNADLVPFVRWEQNRQPLLLDDRVIKLPSGMLVISNATEGDGGLYRCVVESGGPPKYSDEVELKVLPDPEVISDLVFLKQPSPLVRVIGQDVVLPCVASGLPTPTIKWMKNEEALDTESSERLVLLAGGSLEISDVTEDDAGTYFCIADNGNETIEAQAELTVQAQPEFLKQPTNIYAHESMDIVFECEVTGKPTPTVKWVKNGDMVIPSDYFKIVKEHNLQVLGLVKSDEGFYQCIAENDVGNAQAGAQLIILEHAPATTGPLPSAPRDVVASLVSTRFIKLTWRTPASDPHGDNLTYSVFYTKEGIARERVENTSHPGEMQVTIQNLMPATVYIFRVMAQNKHGSGESSAPLRVETQPEVQLPGPAPNLRAYAASPTSITVTWETPVSGNGEIQNYKLYYMEKGTDKEQDVDVSSHSYTINGLKKYTEYSFRVVAYNKHGPGVSTPDVAVRTLSDVPSAAPQNLSLEVRNSKSIMIHWQPPAPATQNGQITGYKIRYRKASRKSDVTETLVSGTQLSQLIEGLDRGTEYNFRVAALTINGTGPATDWLSAETFESDLDETRVPEVPSSLHVRPLVTSIVVSWTPPENQNIVVRGYAIGYGIGSPHAQTIKVDYKQRYYTIENLDPSSHYVITLKAFNNVGEGIPLYESAVTRPHTDTSEVDLFVINAPYTPVPDPTPMMPPVGVQASILSHDTIRITWADNSLPKHQKITDSRYYTVRWKTNIPANTKYKNANATTLSYLVTGLKPNTLYEFSVMVTKGRRSSTWSMTAHGTTFELVPTSPPKDVTVVSKEGKPKTIIVNWQPPSEANGKITGYIIYYSTDVNAEIHDWVIEPVVGNRLTHQIQELTLDTPYYFKIQARNSKGMGPMSEAVQFRTPKASGSGGKGSRLPDLGSDYKPPMSGSNSPHGSPTSPLDSNMLLVIIVSVGVITIVVVVIIAVFCTRRTTSHQKKKRAACKSVNGSHKYKGNSKDVKPPDLWIHHERLELKPIDKSPDPNPIMTDTPIPRNSQDITPVDNSMDSNIHQRRNSYRGHESEDSMSTLAGRRGMRPKMMMPFDSQPPQPVISAHPIHSLDNPHHHFHSSSLASPARSHLYHPGSPWPIGTSMSLSDRANSTESVRNTPSTDTMPASSSQTCCTDHQDPEGATSSSYLASSQEEDSGQSLPTAHVRPSHPLKSFAVPAIPPPGPPTYDPALPSTPLLSQQALNHHIHSVKTASIGTLGRSRPPMPVVVPSAPEVQETTRMLEDSESSYEPDELTKEMAHLEGLMKDLNAITTA

SEQ ID NO: 20863 - protein, 505 aa, Homo sapiens
MNKLRQSFRRKKDVYVPEASRPHQWQTDEEGVRTGKCSFPVKYLGHVEVDESRGMHICEDAVKRLKAERKFFKGFFGKTGKKAVKAVLWVSADGLRVVDEKTKDLIVDQTIEKVSFCAPDRNFDRAFSYICRDGTTRRWICHCFMAVKDTGERLSHAVGCAFAACLERKQKREKECGVTATFDASRTTFTREGSFRVTTATEQAEREEIMKQMQDAKKVPEVEGEAESISSLCSQITNAFSTPEDPFSSAPMTKPVTVVAPQSPTFQGTEWGQSSGAASPGLFQAGHRRTPSEADRWLEEVSKSVRAQQPQASAAPLQPVLQPPPPTAISQPASPFQGNAFLTSQPVPVGVVPALQPAFVPAQSYPVANGMPYPAPNVPVVGITPSQMVANVFGTAGHPQAAHPHQSPSLVRQQTFPHYEASSATTSPFFKPPAQHLNGSAAFNGVDDGRLASADRHTEVPTGTCPVDPFEAQWAALENKSKQRTNPSPTNPFSSDLQKTFEIEL

SEQ ID NO: 20864 - protein, 405 aa, Homo sapiens
MLSSFPVVLLETMSHYTDEPRFTIEQIDLLQRLRRTGMTKHEILHALETLDRLDQEHSDKFGRRSSYGGSSYGNSTNNVPASSSTATASTQTQHSGMSPSPSNSYDTSPQPCTTNQNGRENNERLSTSNGKMSPTRYHANSMGQRSYSFEASEEDLDVDDKVEELMRRDSSVIKEEIKAFLANRRISQAVVAQVTGISQSRISHWLLQQGSDLSEQKKRAFYRWYQLEKTNPGATLSMRPAPIPIEDPEWRQTPPPVSATSGTFRLRRGSRFTWRKECLAVMESYFNENQYPDEAKREEIANACNAVIQKPGKKLSDLERVTSLKVYNWFANRRKEIKRRANIAAILESHGIDVQSPGGHSNSDDVDGNDYSEQDTWQVRNGEEEEGRSSEGGREAEKVEEERRI

SEQ ID NO: 20865 - protein, 126 aa, Homo sapiens
MAAPEAPPLDRVFRTTWLSTECDSHPLPPSYRKFLFETQAADLAGGTTVAAGNLLNESEKDCGQDRRAPGVQPCRLVTMTSVVKTVYSLQPPSALSGGQPAGPKKSMFPNSFIQEVQRMMLQKSPN

SEQ ID NO: 20866 - protein, 610 aa, Homo sapiens
RQARMDYSFDTTAEDPWVRISDCIKNLFSPIMSENHGHMPLQPNASLNEEEGTQGHPDGTPPKLDTANGTPKVYKSADSSTVKKGPPVAPKPAWFRQSLKGLRNRASDPRGLPDPALSTQPAPASREHLGSHIRASSSSSSIRQRISSFETFGSSQLPDKGAQRLSLQPSSGEAAKPLGKHEEGRFSGLLGRGAAPTLVPQQPEQVLSSGSPAASEARDPGVSESPPPGRQPNQKTLPPGPDPLLRLLSTQAEESQGPVLKMPSQRARSFPLTRSQSCETKLLDEKTSKLYSISSQVSSAVMKSLLCLPSSISCAQTPCIPKEGASPTSSSNEDSAANGSAETSALDTGFSLNLSELREYTEGLTEAKEDDDGDHSSLQSGQSVISLLSSEELKKLIEEVKVLDEATLKQLDGIHVTILHKEEGAGLGFSLAGGADLENKVITVHRVFPNGLASQEGTIQKGNEVLSINGKSLKGTTHHDALAILRQAREPRQAVIVTRKLTPEAMPDLNSSTDSAASASAASDVSVESTEATVCTVTLEKMSAGLGFSLEGGKGSLHGDKPLTINRIFKGVGCVWFFACSPVVGMWPGPQKASGHFLGYVVSHNSMSSS

SEQ ID NO: 20867 - protein, 648 aa, Homo sapiens
MLNIWGVMLFIRLSWIVGEAGIGLGVLIILLSTMVTSITGLSTSAIATNGFVRGGGAYYLISRSLGPEFGGSIGLIFAFANAVAVAMYVVGFAETVVDLLKESDSMMVDPTNDIRIIGSITVVILLGISVAGMEWEAKAQVILLVILLIAIANFFIGTVIPSNNEKKSRGFFNYQASIFAENFGPRFTKGEGFFSVFAIFFPAATGILAGANISGDLEDPQDAIPRGTMLAIFITTVAYLGVAICVGACVVRDATGNMNDTIISGMNCNGSAACGLGYDFSRCRHEPCQYGLMNNFQVMSMVSGFGPLITAGIFSATLSSALASLVSAPKVFQALCKDNIYKALQFFAKGYGKNNEPLRGYILTFLIAMAFILIAELNTIAPIISNFFLASYALINFSCFHASYAKSPGWRPAYGIYNMWVSLFGAVLCCAVMFVINWWAAVITYVIEFFLYVYVTCKKPDVNWGSSTQALSYVSALDNALELTTVEDHVKNFRPQCIVLTGGPMTRPALLDITHAFTKNSGLCICCEVFVGPRKLCVKEMNSGMAKKQAWLIKNKIKAFYAAVAADCFRDGVRSLLQASGLGRMKPNTLVIGYKKNWRKAPLTEIENYVGIIHDAFDFEIGVVIVRISQGFDISQVLQVQEELERLE

SEQ ID NO: 20868 - protein, 276 aa, Homo sapiens
GKYFEIQFSPGGEPDGGKISNFLLEKSRVVMRNPGERSFHIFYQLIEGASAEQKHSLGITSMDYYYYLSLSGSYKVDDIDDRREFQETLHAMNVIGIFAEEQTLVLQIVAGILHLGNISFKEVGNYAAVESEEFLAFPAYLLGINQDRLKEKLTSRQMDSKWGGKSESIHVTLNVEQACYTRDALAKALHARVFDFLVDGVKRDLLLTPKCLYLIGREKVKQGPDKGLVKEVLKRKIEIERILSVSLSTMQDDIFILHEQEYDSLLESVFKTEFLS

SEQ ID NO: 20869 - protein, 190 aa, Homo sapiens
SSSTEGEEDLFVSASENHQNNPAVPSGSIDEDVVVIEASSTPQVTANEEINVTSTDSEVEIVTVGESYRSRSTLGHSRSHWSQGSSSHASRPQEPRNRSRISTVIQPLRQNAAEVVDLTVDEDEPTVVPTTSARMESQATSASINNSNPSTSEQASDTASAVTSSQPSTVSETSATLTSNSTTGTSIGGM

SEQ ID NO: 20870 - protein, 594 aa, Homo sapiens
MESHSRAGKSRKSAKFRSISRSLMLCNAKTSDDGSSPDEKYPDPFEISLAQGKEGIFHSSVQLADTSEAGPSSVPDLALASEAAQLQAAGNDRGKTCRRIFFMKESSTASSREKPGKLEAQSSNFLFPKACHQRARSNSTSVNPYCTREIDFPMTKKSAAPTDRQPYSLCSNRKSLSQQLDCPAGKAAGTSRPTRSLSTAQLVQPSGGLQASVISNIVLMKGQAKGLGFSIVGGKDSIYGPIGIYVKTIFAGGAAAADGRLQEGDEILELNGESMAGLTHQDALQKFKQAKKGLLTLTVRTRLTAPPSLCSHLSPPLCRSLSSSTCITKDSSSFALESPSAPISTAKPNYRIMVEVSLQKEAGVGLGIGLCSVPYFQCISGIFVHTLSPGSVAHLDGRLRCGDEIVEISDSPVHCLTLNEVYTILSHCDPGPVPIIVSRHPDPQVSEQQLKEAVAQAVENTKFGKERHQWSLEGVKRLESSWHGRPTLEKEREKNSAPPHRRAQKVMIRSSSDSSYMSGSPGGSPGSGSAEKPSSDVDISTHSPSLPLAREPVVLSIASSRLPQESPPLPESRDSHPPLRLKKSFEILVRKPMS

SEQ ID NO: 20871 - protein, 414 aa, Homo sapiens
MLLSGAPPAGSRPGPRTQGSAGGGPGGSRRGAGGAGAGPGGGGSGGVAKWLREHLGFRGGGGGGGGSKPAPPEPDYRPPAPSPAAPPAPPPDILAAYRLQRERDFEDPYSGGSSGSAALATPVAPGPTPPPRHGSPPHRLIRVETPGPPAPPADERISGPPASSDRLAILEDYADPFDVQETGEGSAGASGAPEKVPENDGYMEPYEAQKMMAEIRGSKETATQPLPLYDTPYEPEEDGATAEGEGAPWPRESRLPEDDERPPEEYDQPWEWKKERISKAFAVDIKVIKDLPWPPPVGQLDSSPSLPDGDRDISGPASPLPEPSLEDSSAQFEGPEKSCLSPGREEKGRLPPRLSAGNPKSAKPLSMEPSSPLGEWTDPALPLENQLVSRGHQPNRRREPAPAVQRGQLPGAQQ

SEQ ID NO: 20872 - protein, 316 aa, Homo sapiens
MSSNSSTSQWPRPGGQAPSSPSYENSLHSLQSRMEDRLDRLDDAIHVLRNHAVGPSTSLPAGHSDIHSLLGPSHNAPIGSLNSNYGGSSLVASSRSASMVGTHREDSVSLNGNHSVLSSTVTTSSTDLNHKTQENYRGGLQSQSGTVVTTEIKTENKEKDENLHEPPSSDDMKSDDESSQKDIKVSSRGRTSSTNEDEDLNPEQKIEREKERRMANNARERLRVRDINEAFKELGRMCQLHLKSEKPQTKLLILHQAVAVILSLEQQVRERNLNPKAACLKRREEEKVSAVSAEPPTTLPGTHPGLSETTNPMGHM

SEQ ID NO: 20873 - protein, 1182 aa, Homo sapiens
INLIERKLFFTTANAHFKVGCPVLALEVLSKIPKVTKTSALSAKKDQPDFISHRMDDVPSHSKALSDGNGSSGIEWSNVTSSQYDWSQPIVKVDEEPLNLDWGEDHDSALDEEEDDAVGLVMKSTDAREKDKQSDQKASDPNMLLTPQEEDDPEGDTEVDVIAEQLKFRACLKILMTELRTLATGYEVDGGKLRFQLYNWLEKEIAALHEICNHESVIKEYSSKTYSKVESDLLDQEEMVDKPDIGSYERHQIERRRLQAKREHAERRKSWLQKNQDLLRVFLSYCSLHGAQGGGLASVRMELKFLLQESQQETTVKQLQSPLPLPTTLPLLSASIASTKTVIANPVLYLNNHIHDILYTIVQMKTPPHPSIEDVKVHTLHSLAASLSASIYQALCDSHSYSSQTEGNQFTGMAYQGLLLSDRRRLRTESIEEHATPNSSPAQWPGVSSLINLLSSAQDEDQPKLNILLCEAVVAVYLSLLIHALATNSSSELFRLAAHPLNNRMWAAVFGGGVKLVVKPRRQSENISAPPVLSEDIDKHRRRFNMRMLVPGRPVKDATPPPVPAERPSYKEKFIPPELSMWDYFVAKPFLPLSDSGVIYDSDESIHSDEEDDAFFSDTQIQEHQDPNSYSWALLHLTMVKLALHNVKNFFPIAGLEFSELPVTSPLGIAVIKNLENWEQILQEKMDQFEGPPPNYINTYPTDLSVGAGPAILRNKAMLEPENTPFKSRDSSAFPVKRLWHFLVKQEVLQETFIRYIFTKKRKQSESIEEHVEQVNQNCIAEDCHIKVEADLGYPGGKAKVIHKESDMIMAFSVNKANCNEIVLASTHDVQELDVTSLLACQSYIWIGEEYDRESKSSDDVDYRGSTTTLYQPSATSYSASQVHPPSSLPWLGTGQTSTGASVLMKRNLHNVKRMTSHPVHQYYLTGAQDGSVRMFEWTRPQQLVCFRQAGNARVTRLYFNSQGNKCGVADGEGFLSIWQVNQTASNPKPYMSWQCHSKATSDFAFITSSSLVATSGHSNDNRNVCLWDTLISPGNSLIHGFTCHDHGATVLQYAPKQQLLISGGRKGHVCIFDIRQRQLIHTFQAHDSAIKALALDPYEEYFTTGSAEGNIKVWRLTGHGLIHSFKSEHAKQSIFRNIGAGVMQIDIIQGNRLFSCGADGTLKTRVLPNAFNIPNRILDIL

SEQ ID NO: 20874 - protein, 691 aa, Homo sapiens
MIPGKYRSVSGRAANNVNCGLHLVIQTSSLPEKNKVRFKKVEFKLNKDTSSFPGRLLQHDLERNYSSRQGDHINLVSSSLSSFPILQRSSEEKILYSDRLSLERQKLTVCPIINGEDHLRLLNFQHNFITRIQNISNLQKLISLDLYDNQIEEISGLSTLRCLRVLLLGKNRIKKISNLENLKSLDVLDLHGNQITKIENINHLCELRVLNLARNFLSHVDNLNGLDSLTELNLRHNQITFVRDVDNLPCLQHLFLSFNNISSFDSVSCLADSSSLSDITFDGNPIAQESWYKHTVLQNMMQLRQLDMKRITEEERRMASVLAKKEEEKKRESHKQSLLKEKKRLTINNVARQWDLQQQRVANIATNEDRKDSDSPQDPCQIDGSTLSAFPEETGPLDSGLNNALQGLSVIDTYLVEVDGDTLSLYGSGALESLDRNWSVQTAGMITTVSFTFIEFDEIVQVLPKLKIKFPNSLHLKFKETNLVMLQQFNALAQLRRIDQLTIDPQGNPVVNFTLWKYYVLFRLSHFSMQKINGTEVTQNDMIMAERLFGILAHVASSELPQYRLISILGDARKKQFRYLLESKGKKPGIINEENNDSKRLVGENTNRATLNYTTRDFYNEKLEEIKEKKKFCKTYIEDLVKEATEINMKNEALQKLWPQMFIELVRDAVIEIRNKNSYMKLCLQQITDQK

SEQ ID NO: 20875 - protein, 1864 aa, Homo sapiens
MSQKSWIESTLTKRECVYIIPSSKDPHRCLPGCQICQQLVRCFCGRLVKQHACFTASLAMKYSDVKLGDHFNQAIEEWSVEKHTEQSPTDAYGVINFQGGSHSYRAKYVRLSYDTKPEVILQLLLKEWQMELPKLVISVHGGMQKFELHPRIKQLLGKGLIKAAVTTGAWILTGGVNTGVAKHVGDALKEHASRSSRKICTIGIAPWGVIENRNDLVGRDVVAPYQTLLNPLSKLNVLNNLHSHFILVDDGTVGKYGAEVRLRRELEKTINQQRIHARIGQGVPVVALIFEGGPNVILTVLEYLQESPPVPVVVCEGTGRAADLLAYIHKQTEEGGNLPDAAEPDIISTIKKTFNFGQNEALHLFQTLMECMKRKELITVFHIGSDEHQDIDVAILTALLKGTNASAFDQLILTLAWDRVDIAKNHVFVYGQQWLVGSLEQAMLDALVMDRVAFVKLLIENGVSMHKFLTIPRLEELYNTKQGPTNPMLFHLVRDVKQGNLPPGYKITLIDIGLVIEYLMGGTYRCTYTRKRFRLIYNSLGGNNRRSGRNTSSSTPQLRKSHESFGNRADKKEKMRHNHFIKTAQPYRPKIDTVMEEGKKKRTKDEIVDIDDPETKRFPYPLNELLIWACLMKRQVMARFLWQHGEESMAKALVACKIYRSMAYEAKQSDLVDDTSEELKQYSNDFGQLAVELLEQSFRQDETMAMKLLTYELKNWSNSTCLKLAVSSRLRPFVAHTCTQMLLSDMWMGRLNMRKNSWYKVILSILVPPAILLLEYKTKAEMSHIPQSQDAHQMTMDDSENNFQNITEEIPMEVFKEVRILDSNEGKNEMEIQMKSKKLPITRKFYAFYHAPIVKFWFNTLAYLGFLMLYTFVVLVQMEQLPSVQEWIVIAYIFTYAIEKVREIFMSEAGKVNQKIKVWFSDYFNISDTIAIISFFIGFGLRFGAKWNFANAYDNHVFVAGRLIYCLNIIFWYVRLLDFLAVNQQAGPYVMMIGKMVANMFYIVVIMALVLLSFGVPRKAILYPHEAPSWTLAKDIVFHPYWMIFGEVYAYEIDVCANDSVIPQICGPGTWLTPFLQAVYLFVQYIIMVNLLIAFFNNVYLQVKAISNIVWKYQRYHFIMAYHEKPVLPPPLIILSHIVSLFCCICKRRKKDKTSDGPKLFLTEEDQKKLHDFEEQCVEMYFNEKDDKFHSGSEERIRVTFERVEQMCIQIKEVGDRVNYIKRSLQSLDSQIGHLQDLSALTVDTLKTLTAQKASEASKVHNEITRELSISKHLAQNLIDDGPVRPSVWKKHGVVNTLSSSLPQGDLESNNPFHCNILMKDDKDPQCNIFGQDLPAVPQRKEFNFPEAGSSSGALFPSAVSPPELRQRLHGVELLKIFNKNQKLGSSSTSIPHLSSPPTKFFVSTPSQPSCKSHLETGTKDQETVCSKATEGDNTEFGAFVGHRDSMDLQRFKETSNKIKILSNNNTSENTLKRVSSLAGFTDCHRTSIPVHSKQEKISRRPSTEDTHEVDSKAALIPDWLQDRPSNREMPSEEGTLNGLTSPFKPAMDTNYYYSAVERNNLMRLSQSIPFTPVPPRGEPVTVYRLEESSPNILNNSMSSWSQLGLCAKIEFLSKEEMGGGLRRAVKVQCTWSEHDILKSGHLYIIKSFLPEVVNTWSSIYKEDTVLHLCLREIQQQRAAQKLTFAFNQMKPKSIPYSPRFLEVFLLYCHSAGQWFAVEECMTGEFRKYNNNNGDEIIPTNTLEEIMLAFSHWTYEYTRGELLVLDLQGVGENLTDPSVIKAEEKRSCDMVFGPANLGEDAIKNFRAKHHCNSCCRKLKLPDLKRNDYTPDKIIFPQDEPSDLNLQPGNSTKESESTNSVRLML

SEQ ID NO: 20876 - protein, 1363 aa, Homo sapiens
MSSSRAQQMHAFSWIRNTLEEHPETSLPKQEVYDEYKSYCDNLGYHPLSAADFGKIMKNVFPNMKARRLGTRGKSKYCYSGLRKKAFVHMPTLPNLDFHKTGDGLEGAEPSGQLQNIDEEVISSACRLVCEWAQKVLSQPFDTVLELARFLVKSHYIGTKSMAALTVMAAAPAGMKGITQPSAFIPTAESNSFQPQVKTLPSPIDAKQQLQRKIQKKQQEQKLQSPLPGESAAKKSESATSNGVTNLPNGNPSILSPQPIGIVVAAVPSPIPVQRTRQLVTSPSPMSSSDGKVLPLNVQVVTQHMQSVKQAPKTPQNVPASPGGDRSARHRYPQILPKPANTSALTIRSPTTVLFTSSPIKTAVVPASHMSSLNVVKMTTISLTPSNSNTPLKHSASVSSATGTTEESRSVPQIKNGSVVSLQSPGSRSSSAGGTSAVEVKVEPETSSDEHPVQCQENSDEAKAPQTPSALLGQKSNTDGALQKPSNEGVIEIKATKVCDQRTKCKSRCNEMLPGTSTGNNQSTITLSVASQNLTFTSSSSPPNGDSINKDPKLCTKSPRKRLSSTLQETQVPPVKKPIVEQLSAATIEGQKQGSVKKDQKVPHSGKTEGSTAGAQIPSKVSVNVSSHIGANQPLNSSALVISDSALEQQTTPSSSPDIKVKLEGSVFLLDSDSKSVGSFNPNGWQQITKDSEFISASCEQQQDISVMTIPEHSDINDLEKSVWELEGMPQDTYSQQLHSQIQESSLNQIQAHSSDQLPLQSELKEFEPSVSQTNESYFPFDDELTQDSIVEELVLMEQQMSMNNSHSYGNCLGMTLQSQSVTPGAPMSSHTSSTHFYHPIHSNGTPIHTPTPTPTPTPTPTPTPTPTSEMIAGSQSLSRESPCSRLAQTTPVDSALGSSRHTPIGTPHSNCSSSVPPSPVECRNPFAFTPISSSMAYHDASIVSSSPVKPMQRPMATHPDKTKLEWMNNGYSGVGNSSVSGHGILPSYQELVEDRFRKPHAFAVPGQSYQSQSRHHDTHFGRLTPVSPVQHQGATVNNTNKQEGFAVPAPLDNKGTNSSASSNFRCRSVSPAVHRQRNLSGSTLYPVSNIPRSNVTPFGSPVTPEVHVFTNVHTDACANNIAQRSQSVPLTVMMQTAFPNALQKQANSKKITNVLLSKLDSDNDDAVRGLGMNNLPSNYTARMNLTQILEPSTVFPSANPQNMIDSSTSVYEFQTPSYLTKSNSTGQINFSPGDNQAQSEIGEQQLDFNSTVKDLLSGDSLQTNQQLVGQGASDLTNTASDFSSDIRLSSELSGSINDLNTLDPNLLFDPGRQQGQDDEATLEELKNDPLFQQICSESMNSMTSSGFEWIESKDHPTVEMLG

SEQ ID NO: 20877 - protein, 862 aa, Homo sapiens
MEKATVPVAAATAAEGEGSPPAVAAVAGPPAAAEVGGGVGGSSRARSASSPRGMVRVCDLLLKKKPPQQQHHKAKRNRTCRPPSSSESSSDSDNSGGGGGGGGGGGGGGGTSSNNSEEEEDDDDEEEEPDKPPANVATTLPIRNKAASKQKSSSHLPANSQDVQGYITNQSPESIVEEAQGKLTELEQRIKEAIEKNAQLQSLELAHADQLTKEKIEELNKTREEQIQKKQKILEELQKVERELQLKTQQQLKKQYLEVKAQRIQLQQQQQQSCQHLGLLTPVGVGEQLSEGDYARLQQVDPVLLKDEPQQTAAQMGFAPIQPLAMPQALPLAAGPLPPGSIANLTELQGVIVGQPVLGQAQLAGLGQGILTETQQGLMVASPAQTLNDTLDDIMAVSGRASAMSNTPTHSIAASISQPQTPTPSPIISPSAMLPIYPAIDIDAQTESNHDTALTLACAGGHEELVQTLLERGASIEHRDKKGFTPLILAATAGHVGVVEILLDNGADIEAQSERTKDTPLSLACSGGRQEVVELLLARGANKEHRNVSDYTPLSLAASGGYVNIIKILLNAGAEINSRTGSKLGISPLMLAAMNGHTAAVKLLLDMGSDINAQIETNRNTALTLACFQGRTEVVSLLLDRKANVEHRAKTGLTPLMEAASGGYAEVGRVLLDKGADVNAPPVPSSRDTALTIAADKGHYKFCELLIGRGAHIDVRNKKGNTPLWLAANGGHLDVVQLLVQAGADVDAADNRKITPLMAAFRKGHVKVVRYLVKEVNQFPSDSECMRYIATITDKEMLKKCHLCMESIVQAKDRQAAEANKNASILLEELDLEKLREESRRLALAAKREKRKEKRRKKKEEQ

SEQ ID NO: 20878 - protein, 824 aa, Homo sapiens
MRGLGLWLLGAMMLPAIAPSRPWALMEQYEVVLPWRLPGPRVRRALPSHLGLHPERVSYVLGATGHNFTLHLRKNRDLLGSGYTETYTAANGSEVTEQPRGQDHCFYQGHVEGYPDSAASLSTCAGLRGFFQVGSDLHLIEPLDEGGEGGRHAVYQAEHLLQTAGTCGVSDDSLGSLLGPRTAAVFRPRPGDSLPSRETRYVELYVVVDNAEFQMLGSEAAVRHRVLEVVNHVDKLYQKLNFRVVLVGLEIWNSQDRFHVSPDPSVTLENLLTWQARQRTRRHLHDNVQLITGVDFTGTTVGFARVSAMCSHSSGAVNQDHSKNPVGVACTMAHEMGHNLGMDHDENVQGCRCQERFEAGRCIMAGSIGSSFPRMFSDCSQAYLESFLERPQSVCLANAPDLSHLVGGPVCGNLFVERGEQCDCGPPEDCRNRCCNSTTCQLAEGAQCAHGTCCQECKVKPAGELCRPKKDMCDLEEFCDGRHPECPEDAFQENGTPCSGGYCYNGACPTLAQQCQAFWGPGGQAAEESCFSYDILPGCKASRYRADMCGVLQCKGGQQPLGRAICIVDVCHALTTEDGTAYEPVPEGTRCGPEKVCWKGRCQDLHVYRSSNCSAQCHNHGVCNHKQECHCHAGWAPPHCAKLLTEVHAASGSLPVFVVVVLVLLAVVLVTLAGIIVYRKARSRILSRNVAPKTTMGRSNPLFHQAASRVPAKGGAPAPSRGPQELVPTTHPGQPARHPASSVALKRPPPAPPVTVSSPPFPVPVYTRQAPKQVIKPTFAPPVPPVKPGAGAANPGPAEGAVGPKVALKPPIQRKQGAGAPTAP

SEQ ID NO: 20879 - protein, 1909 aa, Homo sapiens
MACCHKVMLLLDTAGGAARHSRVRRAALRLLTYLSCRFGLARVHWAFKFFDSQGARSRPSRVSDFRELGSRSWEDFEEELEARLEDRAHLPGPAPRATHTHGALMETLLDYQWDRPEITSPTKPILRSSGRRLLDVESEAKEAEAALGGLVNAVFLLAPCPHSQRELLQFVSGCEAQAQRLPPTPKQVMEKLLPKRVREVMVARKITFYWVDTTEWSKLWESPDHLGYWTVCELLHHGGGTVLPSESFSWDFAQAGEMLLRSGIKLSSEPHLSPWISMLPTDATLNRLLYNSPEYEASFPRMEGMLFLPVEGKEIQETWTVTLEPLAMHQRHFQKPVRIFLKGSVAQWSLPTSSTLGTDSWMLGSPEESTATQRLLFQQLVSRLTAEELHLVADVDPGEGRPPITGVISPLSASAMILTVCRTKEAEFQRHVLQTAVADSPRDTASLFSDVVDSILNQTHDSLADTASAASPVPEWAQQELGHTTPWSPAVVEKWFPFCNISGASSDLMESFGLLQAASANKEESSKTEGELIHCLAELYQRKSREESTIAHQEDSKKKRGVPRTPVRQKMNTMCRSLKMLNVARLNVKAQKLHPDGSPDVAGEKGIQKIPSGRTVDKLEDRGRTLRSSKPKDFKTEEELLSYIRENYQKTVATGEIMLYACARNMISTVKMFLKSKGTKELEVNCLNQVKSSLLKTSKSLRQNLGKKLDKEDKVRECQLQVFLRLEMCLQCPSINESTDDMEQVVEEVTDLLRMVCLTEDSAYLAEFLEEILRLYIDSIPKTLGNLYNSLGFVIPQKLAGVLPTDFFSDDSMTQENKSPLLSVPFLSSARRSVSGSPESDELQELRTRSAKKRRKNALIRHKSIAEVSQNLRQIEIPKVSKRATKKENSHPAPQQPSQPVKDTVQEVTKVRRNLFNQELLSPSKRSLKRGLPRSHSVSAVDGLEDKLDNFKKNKGYHKLLTKSVAETPVHKQISKRLLHRQIKGRSSDPGPDIGVVEESPEKGDEISLRRSPRIKQLSFSRTHSASFYSVSQPKSRSVQRVHSFQQDKSDQRENSPVQSIRSPKSLLFGAMSEMISPSEKGSARMKKRSRNTLDSEVPAAYQTPKKSHQKSLSFSKTTPRRISHTPQTPLYTPERLQKSPAKMTPTKQAAFKESLKDSSSPGHDSPLDSKITPQKRHTQAGEGTSLETKTPRTPKRQGTQPPGFLPNCTWPHSVNSSPESPSCPAPPTSSTAQPRRECLTPIRDPLRTPPRAAAFMGTPQNQTHQQPHVLRAARAEEPAQKLKDKAIKTPKRPGNSTVTSSPPVTPKKLFTSPLCDVSKKSPFRKSKIECPSPGELDQKEPQMSPSVAASLSCPVPSTPPELSQRATLDTVPPPPPSKVGKRCRKTSDPRRSIVECQPDASATPGVGTADSPAAPTDSRDDQKGLSLSPQSPPERRGYPGPGLRSDWHASSPLLITSDTEHVTLLSEAEHHGIGDLKSNVLSVEEGEGLRTADAEKSSLSHPGIPPSPPSCGPGSPLMPSRDVHCTTDGRQCQASAQLDNLPASAWHSTDSASPQTYEVELEMQASGLPKLRIKKIDPSSSLEAEPLSKEESSLGEESFLPALSMPRASRSLSKPEPTYVSPPCPRLSHSTPGKSRGQTYICQACTPTHGPSSTPSPFQTDGVPWTPSPKHSGKTTPDIIKDWPRRKRAVGCGAGSSSGRGEVGADLPGSLSLLESEGKDHGLELSIHRTPILEDFELEGVCQLPDQSPPRNSMPKAEEASSWGQFGLSSRKRVLLAKEEADRGAKRICDLREDSEVSKSKEGSPSWSAWQLPSTGDEEVFVSGSTPPPSCAVRSCLSASALQALTQSPLLFQGKTPSSQSKDPRDEDVDVLPSTVEDSPFSRAFSRRRPISRTYTRKKLMGTWLEDL

SEQ ID NO: 20880 - protein, 1408 aa, Homo sapiens
MAAERGARRLLSTPSFWLYCLLLLGRRAPGAAAARSGSAPQSPGASIRTFTPFYFLVEPVDTLSVRGSSVILNCSAYSEPSPKIEWKKDGTFLNLVSDDRRQLLPDGSLFISNVVHSKHNKPDEGYYQCVATVESLGTIISRTAKLIVAGLPRFTSQPEPSSVYAGNNAILNCEVNADLVPFVRWEQNRQPLLLDDRVIKLPSGMLVISNATEGDGGLYRCVVESGGPPKYSDEVELKVLPDPEVISDLVFLKQPSPLVRVIGQDVVLPCVASGLPTPTIKWMKNEEALDTESSERLVLLAGGSLEISDVTEDDAGTYFCIADNGNETIEAQAELTVQAQPEFLKQPTNIYAHESMDIVFECEVTGKPTPTVKWVKNGDMVIPSDYFKIVKEHNLQVLGLVKSDEGFYQCIAENDVGNAQAGAQLIILEHAPATTGPLPSAPRDVVASLVSTRFIKLTWRTPASDPHGDNLTYSVFYTKEGIARERVENTSHPGEMQVTIQNLMPATVYIFRVMAQNKHGSGESSAPLRVETQPEVQLPGPAPNLRAYAASPTSITVTWETPVSGNGEIQNYKLYYMEKGTDKEQDVDVSSHSYTINGLKKYTEYSFRVVAYNKHGPGVSTPDVAVRTLSDVPSAAPQNLSLEVRNSKSIMIHWQPPAPATQNGQITGYKIRYRKASRKSDVTETLVSGTQLSQLIEGLDRGTEYNFRVAALTINGTGPATDWLSAETFESDLDETRVPEVPSSLHVRPLVTSIVVSWTPPENQNIVVRGYAIGYGIGSPHAQTIKVDYKQRYYTIENLDPSSHYVITLKAFNNVGEGIPLYESAVTRPHTDTSEVDLFVINAPYTPVPDPTPMMPPVGVQASILSHDTIRITWADNSLPKHQKITDSRYYTVRWKTNIPANTKYKNANATTLSYLVTGLKPNTLYEFSVMVTKGRRSSTWSMTAHGTTFELVPTSPPKDVTVVSKEGKPKTIIVNWQPPSEANGKITGYIIYYSTDVNAEIHDWVIEPVVGNRLTHQIQELTLDTPYYFKIQARNSKGMGPMSEAVQFRTPKADSSDKMPNDQASGSGGKGSRLPDLGSDYKPPMSGSNSPHGSPTSPLDSNMLLVIIVSVGVITIVVVVIIAVFCTRRTTSHQKKKRAACKSVNGSHKYKGNSKDVKPPDLWIHHERLELKPIDKSPDPNPIMTDTPIPRNSQDITPVDNSMDSNIHQRRNSYRGHESEDSMSTLAGRRGMRPKMMMPFDSQPPQQSVRNTPSTDTMPASSSQTCCTDHQDPEGATSSSYLASSQEEDSGQSLPTAHVRPSHPLKSFAVPAIPPPGPPTYDPALPSTPLLSQQALNHHIHSVKTASIGTLGRSRPPMPVVVPSAPEVQETTRMLEDSESSYEPDELTKEMAHLEGLMKDLNAITTA

SEQ ID NO: 20881 - protein, 222 aa, Homo sapiens
MTAAVFFGCAFIAFGPALALYVFTIATEPLRIIFLIAGAFFWLVSLLISSLVWFMARVIIDNKDGPTQKYLLIFGAFVSVYIQEMFRFAYYKLLKKASEGLKSINPGETAPSMRLLAYVSGLGFGIMSGVFSFVNTLSDSLGPGTVGIHGDSPQFFLYSDLHKFLLWNKPGVSIYNPGAHGHLGILSCGRQLPKPETLPALPRQELSSLQPALQITSGNQHF

SEQ ID NO: 20882 - protein, 2053 aa, Homo sapiens
VVFHYRPGPTRYSLTFEEAQQACLRTGAVIASPEQLQAAYEAGYEQCDAGWLRDQTVRYPIVSPRTPCVGDKDSSPGVRTYGVRPSTETYDVYCFVDRLEGEVFFATRLEQFTFQEALEFCESHNATLATTGQLYAAWSRGLDKCYAGWLADGSLRYPIVTPRPACGGDKPGVRTVYLYPNQTGLPDPLSRHHAFCFRGISAVPSPGEEEGGTPTSPSGVEEWIVTQVVPGVAAVPVEEETTAVPSGETTAILEFTTEPENQTEWEPAYTPVGTSPLPGILPTWPPTGAATEESTEGPSATEVPSASEEPSPSEVPFPSEEPSPSEEPFPSVRPFPSVELFPSEEPFPSKEPSPSEEPSASEEPYTPSPPVPSWTELPSSGEESGAPDVSGDFTGSGDVSGHLDFSGQLSGDRASGLPSGDLDSSGLTSTVGSGLPVESGLPSGDEERIEWPSTPTVGELPSGAEILEGSASGVGDLSGLPSGEVLETSASGVGDLSGLPSGEVLETTAPGVEDISGLPSGEVLETTAPGVEDISGLPSGEVLETTAPGVEDISGLPSGEVLETTAPGVEDISGLPSGEVLETTAPGVEDISGLPSGEVLETTAPGVEDISGLPSGEVLETAAPGVEDISGLPSGEVLETAAPGVEDISGLPSGEVLETAAPGVEDISGLPSGEVLETAAPGVEDISGLPSGEVLETAAPGVEDISGLPSGEVLETAAPGVEDISGLPSGEVLETAAPGVEDISGLPSGEVLETAAPGVEDISGLPSGEVLETAAPGVEDISGLPSGEVLETAAPGVEDISGLPSGEVLETAAPGVEDISGLPSGEVLETAAPGVEDISGLPSGEVLETAAPGVEDISGLPSGEVLETAAPGVEDISGLPSGEVLETAAPGVEDISGLPSGEVLETAAPGVEDISGLPSGEVLETTAPGVEEISGLPSGEVLETTAPGVDEISGLPSGEVLETTAPGVEEISGLPSGEVLETSTSAVGDLSGLPSGGEVLEISVSGVEDISGLPSGEVVETSASGIEDVSELPSGEGLETSASGVEDLSRLPSGEEVLEISASGFGDLSGLPSGGEGLETSASEVGTDLSGLPSGREGLETSASGAEDLSGLPSGKEDLVGSASGDLDLGKLPSGTLGSGQAPETSGLPSGFSGEYSGVDLGSGPPSGLPDFSGLPSGFPTVSLVDSTLVEVVTASTASELEGRGTIGISGAGEISGLPSSELDISGRASGLPSGTELSGQASGSPDVSGEIPGLFGVSGQPSGFPDTSGETSGVTELSGLSSGQPGISGEASGVLYGTSQPFGITDLSGETSGVPDLSGQPSGLPGFSGATSGVPDLVSGTTSGSGESSGITFVDTSLVEVAPTTFKEEEGLGSVELSGLPSGEADLSGKSGMVDVSGQFSGTVDSSGFTSQTPEFSGLPSGIAEVSGESSRAEIGSSLPSGAYYGSGTPSSFPTVSLVDRTLVESVTQAPTAQEAGEGPSGILELSGAHSGAPDMSGEHSGFLDLSGLQSGLIEPSGEPPGTPYFSGDFASTTNVSGESSVAMGTSGEASGLPEVTLITSEFVEGVTEPTISQELGQRPPVTHTPQLFESSGKVSTAGDISGATPVLPGSGVEVSSVPESSSETSAYPEAGFGASAAPEASREDSGSPDLSETTSAFHEANLERSSGLGVSGSTLTFQEGEASAAPEVSGESTTTSDVGTEAPGLPSATPTASGDRTEISGDLSGHTSQLGVVISTSIPESEWTQQTQRPAETHLEIESSSLLYSGEETHTVETATSPTDASIPASPEWKRESESTAADIDECLSSPCLNGATCVDAIDSFTCLCLPSYEGDLCEIDQEVCEEGWNKYQGHCYRHFPDRETWVDAERRCREQQSHLSSIVTPEEQEFVNNNAQDYQWIGLNDRTIEGDFRWSDGHPMQFENWRPNQPDNFFAAGEDCVVMIWHEKGEWNDVPCNYHLPFTCKKGTVACGEPPVVEHARTFGQKKDRYEINSLVRYQCTEGFVQRHMPTIRCQPSGHWEEPQITCTDPTTYKRRLQKRSSRHPRRSRPSTAH

SEQ ID NO: 20883 - protein, 303 aa, Homo sapiens
MFRAAAPGQLRRAASLLRFQSTLVIAEHANDSLAPITLNTITAATRLGGEVSCLVAGTKCDKVAQDLCKVAGIAKVLVAQHDVYKGLLPEELTPLILATQKQFNYTHICAGASAFGKNLLPRVAAKLEVAPISDIIAIKSPDTFVRTIYAGNALCTVKCDEKVKVFSVRGTSFDAAATSGGSASSEKASSTSPVEISEWLDQKLTKSDRPELTGAKVVVSGVGASRAAVDAGFVPNDMQVGQTGKIVAPELYIAVGISGAIQHLAGMKDSKTIVAINKDPEAPIFQVADYGIVADLFKVVPEM

SEQ ID NO: 20884 - protein, 858 aa, Homo sapiens
MGPWGWKLRWTVALLLAAAGTAVGDRCERNEFQCQDGKCISYKWVCDGSAECQDGSDESQETCLSVTCKSGDFSCGGRVNRCIPQFWRCDGQVDCDNGSDEQGCPPKTCSQDEFRCHDGKCISRQFVCDSDRDCLDGSDEASCPVLTCGPASFQCNSSTCIPQLWACDNDPDCEDGSDEWPQRCRGLYVFQGDSSPCSAFEFHCLSGECIHSSWRCDGGPDCKDKSDEENCAVATCRPDEFQCSDGNCIHGSRQCDREYDCKDMSDEVGCVNVTLCEGPNKFKCHSGECITLDKVCNMARDCRDWSDEPIKECGTNECLDNNGGCSHVCNDLKIGYECLCPDGFQLVAQRRCEDIDECQDPDTCSQLCVNLEGGYKCQCEEGFQLDPHTKACKAVGSIAYLFFTNRHEVRKMTLDRSEYTSLIPNLRNVVALDTEVASNRIYWSDLSQRMICSTQLDRAHGVSSYDTVISRDIQAPDGLAVDWIHSNIYWTDSVLGTVSVADTKGVKRKTLFRENGSKPRAIVVDPVHGFMYWTDWGTPAKIKKGGLNGVDIYSLVTENIQWPNGITLDLLSGRLYWVDSKLHSISSIDVNGGNRKTILEDEKRLAHPFSLAVFEDKVFWTDIINEAIFSANRLTGSDVNLLAENLLSPEDMVLFHNLTQPRGVNWCERTTLSNGGCQYLCLPAPQINPHSPKFTCACPDGMLLARDMRSCLTEAEAAVATQETSTVRLKVSSTAVRTQHTTTRPVPDTSRLPGATPGLTTVEIVTMSHQALGDVAGRGNEKKPSSVRALSIVLPIVLLVFLCLGVFLLWKNWRLKNINSINFDNPVYQKTTEDEVHICHNQDGYSYPSMVSLEDDVA

SEQ ID NO: 20885 - protein, 333 aa, Homo sapiens
MTSCLPALRFIATPRLSAMPHIDNDVKLDFKDVLLRPKRSTLKSRSEVDLTRSFSFRNSKQTYSGVPIIAANMDTVGTFEMAKVLCKFSLFTAVHKHYSLVQWQEFAGQNPDCLEHLAASSGTGSSDFEQLEQILEAIPQAGNVVTGEMVEELILSGADIIKVGIGPGSVCTTRKKTGVGYPQLSAVMECADAAHGLKGHIISDGGCSCPGDVAKAFGAGADFVMLGGMLAGHSESGGELIERDGKKYKLFYGMSSEMAMKKYAGGVAEYRASEGKTVEVPFKGDVEHTIRDILGGIRSTCTYVGAAKLKELSRRTTFIRVTQQVNPIFSEAC

SEQ ID NO: 20886 - protein, 367 aa, Homo sapiens
MLLSGAPPAGSRPGPRTQGSAGGGPGGSRRGAGGAGAGPGGGGSGGVAKWLREHLGFRGGGGGGGGSKPAPPEPDYRPPAPSPAAPPAPPPDILAAYRLQRERDFEDPYSGGSSGSAALATPVAPGPTPPPRHGSPPHRLIRVETPGPPAPPADERISGPPASSDRLAILEDYADPFDVQETGEGSAGASGAPEKVPENDGYMEPYEAQKMMAEIRGSKETATQPLPLYDTPYEPEEDGATAEGEGAPWPRESRLPEDDERPPEEYDQPWEWKKERISKAFAAQFEGPEKSCLSPGREEKGRLPPRLSAGNPKSAKPLSMEPSSPLGEWTDPALPLENQLVSRGHQPNRRREPAPAVQRGQLPGAQQ

SEQ ID NO: 20887 - protein, 1276 aa, Homo sapiens
MSSSRAQQMHAFSWIRNTLEEHPETSLPKQEVYDEYKSYCDNLGYHPLSAADFGKIMKNVFPNMKARRLGTRGKSKYCYSGLRKKAFVHMPTLPNLDFHKTGDGLEGAEPSGQLQNIDEEVISSACRLVCEWAQKVLSQPFDTVLELARFLVKSHYIGTKSMAALTVMAAAPAGMKGITQPSAFIPTAESNSFQPQVKTLPSPIDAKQQLQRKIQKKQQEQKLQSPLPGESAAKKSESATSNGVTNLPNGNPSILSPQPIGIVVAAVPSPIPVQRTRQLVTSPSPMSSSDGKVLPLNVQVVTQHMQSVKQAPKTPQNVPASPGGDRSARHRYPQILPKPANTSALTIRSPTTVLFTSSPIKTAVVPASHMSSLNVVKMTTISLTPSNSNTPLKHSASVSSATGTTEESRSVPQIKNGSVVSLQSPGSRSSSAGGTSAVEVKVEPETSSDEHPVQCQENSDEAKAPQTPSALLGQKSNTDGALQKPSNEGVIEIKATKVCDQRTKCKSRCNEMLPGTSTGNNQSTITLSVASQNLTFTSSSSPPNGDSINKDPKLCTKSPRKRLSSTLQETQVPPVKKPIVEQLSAATIEGQKQGSVKKDQKVPHSGKTEGSTAGAQIPSKVSVNVSSHIGANQPLNSSALVISDSALEQQTTPSSSPDIKVKLEGSVFLLDSDSKSVGSFNPNGWQQITKDSEFISASCEQQQDISVMTIPEHSDINDLEKSVWELEGMPQDTYSQQLHSQIQESSLNQIQAHSSDQLPLQSELKEFEPSVSQTNESYFPFDDELTQDSIVEELVLMEQQMSMNNSHSYGNCLGMTLQSQSVTPGAPMSSHTSSTHFYHPIHSNGTPIHTPTPTPTPTPTPTPTPTPTSEMIAGSQSLSRESPCSRLAQTTPVDSALGSSRHTPIGTPHSNCSSSVPPSPVECRNPFAFTPISSSMAYHDASIVSSSPVKPMQRPMATHPDKTKLEWMNNGYSGVGNSSVSGHGILPSYQELVEDRFRKPHAFAVPGQSYQSQSRHHDTHFGRLTPVSPVQHQGATVNNTNKQEGFAVPAPLDNKGTNSSASSNFRCRSVSPAVHRQRNLSGSTLYPVSNIPRSNVTPFGSPVTPEVHVFTNVHTDACANNIAQRSQSVPLTVMMQTAFPNALQKQANSKKITNVLLSKLDSDNDDAVRGLGMNNLPSNYTARMNLTQILEPSTVFPSANPQNMIDSSTSVYEFQTPSYLTKSNSTGQINFSPGDNQAQSEIGEQQLDFNSTVKDLLSGDSLQTNQQLKYPDVLGE

SEQ ID NO: 20888 - protein, 1099 aa, Homo sapiens
MRTSLQAVALWGQKAPPHSITAIMITDDQRTIVTGSQEGQLCLWNLSHELKISAKELLFGHSASVTCLARARDFSKQPYIVSAAENGEMCVWNVTNGQCMEKATLPYRHTAICYYHCSFRMTGEGWLLCCGEYQDVLIIDAKTLAVVHSFRSSQFPDWINCMCIVHSMRIQDSLLVVSVAGELKVWDLSSSINSIQEKQDVYEKESKFLESLNCQTIRFCTYTERLLLVVFSKCWKVYDYCDFSLLLTEVSRNGQFFAGGEVIAAHRILIWTEDGHSYIYQLLNSGLSKSIYPADGRVLKETIYPHLLCSTSVQENKSRPFVMGYMNERKEPFYKVLFSGEVSGRITLWHIPDVPVSKFDGSPREIPVTATWTLQDNFDKHDTMSQSIIDYFSGLKDGAGTAVVTSSEYIPSLDKLICGCEDGTIIITQALNAAKARLLEGGSLVKDSPPHKVLKGHHQSVTSLLYPHGLSSKLDQSWMLSGDLDSCVILWDIFTEEILHKFFLEAGPVTSLLMSPEKFKLRGEQIICCVCGDHSVALLHLEGKSCLLHARKHLFPVRMIKWHPVENFLIVGCADDSVYIWEIETGTLERHETGERARIILNCCDDSQLVKSVLPIASETLKHKSIEQRSSSPYQLGPLPCPGLQVESSCKVTDAKFCPRPFNVLPVKTKWSNVGFHILLFDLENLVELLLPTPLSDVDSSSSFYGGEVLRRAKSTVEKKTLTLRKSKTACGPLSAEALAKPITESLAQGDNTIKFSEENDGIKRQKKMKISKKMQPKPSRKVDASLTIDTAKLFLSCLLPWGVDKDLDYLCIKHLNILKLQGPISLGISLNEDNFSLMLPGWDLCNSGMIKDYSGVNLFSRKVLDLSDKYTATLPNQVGIPRGLENNCDSLRESDTIVYLLSRLFLVNKLVNMPLELACRVGSSFRMESIHNKMRGAGNDILNMSSFYSCLRNGKNESHVPEADLSLLKLISCWRDQSVQVTEAIQAVLLAEVQQHMKSLGKIPVNSQPVSMAENGNCEMKQMLPKLEWTEELELQCVRNTLPLQTPVSPVKHDSNSNSANFQDVEDMPDRCALEESESPGEPRHHSWIAKVCPCKVS

SEQ ID NO: 20889 - protein, 182 aa, Homo sapiens
MAGQRTCQRRSSRAGPGKMQEPPKSIEEFLKFQNWDYWPREIHFRDDDKWSCTLKKIKEDSSFVSIYTHLWENVPRIFEALLIMESKLKEYSLILQNHTSEIFKWKSMISETSSYRKLERYGEFLKKYHKKKKIMLSDEMETEKNIEGCSFTGFKANELTQLPRHLDAEQIYLFILKAHNFD

SEQ ID NO: 20890 - protein, 810 aa, Homo sapiens
MKSARAKTPRKPTVKKGSQTNLKDPVGVYCRVRPLGFPDQECCIEVINNTTVQLHTPEGYRLNRNGDYKETQYSFKQVFGTHTTQKELFDVVANPLVNDLIHGKNGLLFTYGVTGSGKTHTMTGSPGEGGLLPRCLDMIFNSIGSFQAKRYVFKSNDRNSMDIQCEVDALLERQKREAMPNPKTSSSKRQVDPEFADMITVQEFCKAEEVDEDSVYGVFVSYIEIYNNYIYDLLEEVPFDPIKPKWNSCSTPMRNTDFVPPQSKLLREDKNHNMYVAGCTEVEVKSTEEAFEVFWRGQKKRRIANTHLNRESSRSHSVFNIKLVQAPLDADGDNVLQEKEQITISQLSLVDLAGSERTNRTRAEGNRLREAGNINQSLMTLRTCMDVLRENQMYGTNKMVPYRDSKLTHLFKNYFDGEGKVRMIVCVNPKAEDYEENLQVMRFAEVTQEVEVARPVDKAICGLTPGRRYRNQPRGPVGNEPLVTDVVLQSFPPLPSCEILDINDEQTLPRLIEALEKRHNLRQMMIDEFNKQSNAFKALLQEFDNAVLSKENHMQGKLNEKEKMISGQKLEIERLEKKNKTLEYKIEILEKTTTIYEEDKRNLQQELETQNQKLQRQFSDKRRLEARLQGMVTETTMKWEKECLLFQPDQNAPPIRLRHRRSRSAGDRWVDHKPASNMQTETVMQPHVPHAITVSVANEKALAKCEKYMLTHQELASDGEIETKLIKGDIYKTRGGGQSVQFTDIETLKQESPNGSRKRRSSTVAPAQPDGAESEWTDVETRCSVAVEMRAGSQLGPGYQHHAQPKRKKP

SEQ ID NO: 20891 - protein, 388 aa, Homo sapiens
MDGVGVPASMYGDPHAPRPIPPVHHLNHGPPLHATQHYGAHAPHPNVMPASMGSAVNDALKRDKDAIYGHPLFPLLALVFEKCELATCTPREPGVAGGDVCSSDSFNEDIAVFAKQVRAEKPLFSSNPELDNLMIQAIQVLRFHLLELEKVHELCDNFCHRYISCLKGKMPIDLVIDERDGSSKSDHEELSGSSTNLADHNPSSWRDHDDATSTHSAGTPGPSSGGHASQSGDNSSEQGDGLDNSVASPGTGDDDDPDKDKKRQKKRGIFPKVATNIMRAWLFQHLTHPYPSEEQKKQLAQDTGLTILQVNNWFINARRRIVQPMIDQSNRAGFLLDPSVSQGAAYSPEGQPMGSFVLDGQQHMGIRPAGPMSGMGMNMGMDGQWHYM

SEQ ID NO: 20892 - protein, 208 aa, Homo sapiens
MKSCDDEDDYSLRGLLPSEGIVHLHSETKPKTKNIDPVNKVQNKLHSANKGRKTNSSVKLKYSDVQTADDVAIPEDFSDFSLAKTISKIEGQLEEEGLPEYIDDIFSGVSNDIGTEAQIRFLKAKLHVMQEELDNVVCECNKKEDEIQNLKSQVKNFEEDFMRQQRTINMQQSQVEKYKTLFEEANKKYDGLQQQLSSVERVIIWYFS

SEQ ID NO: 20893 - protein, 350 aa, Homo sapiens
MNPRGLFQDFNPSKFLIYTCLLLFSVLLPLRLDGIIQWSYWAVFAPIWLWKLLVVAGASVGAGVWARNPRYRTEGEACVEFKAMLIAVGIHLLLLMFEVLVCDRVERGTHFWLLVFMPLFFVSPVSVAACVWGFRHDRSLELEILCSVNILQFIFIALKLDRIIHWPWLVVFVPLWILMSFLCLVVLYYIVWSLLFLRSLDVVAEQRRTHVTMAISWITIVVPLLTFEVLLVHRLDGHNTFSYVSIFVPLWLSLLTLMATTFRRKGGNHWWFGIRRDFCQFLLEIFPFLREYGNISYDLHHEDSEDAEETSVPEAPKIAPIFGKKARVVITQSPGKYVPPPPKLNIDMPD

SEQ ID NO: 20894 - protein, 441 aa, Homo sapiens
MIIPSLEELDSLKYSDLQNLAKSLGLRANLRATKLLKALKGYIKHEARKGNENQDESQTSASSCDETEIQISNQEEAERQPLGHVTKTRRRCKTVRVDPDSQQNHSEIKISNPTEFQNHEKQESQDLRATAKVPSPPDEHQEAENAVSSGNRDSKVPSEGKKSLYTDESSKPGKNKRTAITTPNFKKLHEAHFKEMESIDQYIERKKKHFEEHNSMNELKQQPINKGGVRTPVPPRGRLSVASTPISQRRSQGRSCGPASQSTLGLKGSLKRSAISAAKTGVRFSAATKDNEHKRSLTKTPARKSAHVTVSGGTPKGEAVLGTHKLKTITGNSAAVITPFKLTTEATQTPVSNKKPVFDLKASLSRPLNYEPHKGKLKPWGQSKENNYLNQHVNRINFYKKTYKQPHLQTKEEQRKKREQERKEKKAKVLGMRRGLILAED

SEQ ID NO: 20895 - protein, 422 aa, Homo sapiens
MDASERGRLLDKLADLVERDRAVLATMESLNGGKPFLQAFYVDLQGVIKTFRYYAGWADKIHGMTIPVDGDYFTFTRHEPIGVCGQIIPWNFPLLMFAWKIAPALCCGNTVVIKPAEQTPLSALYMGALIKEAGFPPGVINILPGYGPTAGAAIASHIGIDKIAFTGSTEVGKLIQEAAGRSNLKRVTLELGGKSPNIIFADADLDYAVEQAHQGVFFNQGQCCTAGSRIFVEESIYEEFVRRSVERAKRRVVGSPFDPTTEQGPQIDKKQYNKILELIQSGVAEGAKLECGGKGLGRKGFFIEPTVFSNVTDDMRIAKEEIFGPVQEILRFKTMDEVIERANNSDFGLVAAVFTNDINKALTVSSAMQAGTVWINCYNALNAQSPFGGFKMSGNGREMGEFGLREYSEVKTVTVKIPQKNS

SEQ ID NO: 20896 - protein, 2486 aa, Homo sapiens
EEEEDDDDEEEEVSEVESFILDQDDLENPMLETASKLLLSGTADGADLRTVDPETQARLEALLEAAGIGKLSTADGKAFADPEVLRRLTSSVSCALDEAAAALTRMRAESTANAGQSDNRSLAEACSEGDVNAVRKLLIEGRSVNEHTEEGESLLCLACSAGYYELAQVLLAMHANVEDRGIKGDITPLMAAANGGHVKIVKLLLAHKADVNAQSSTGNTALTYACAGGYVDVVKVLLESGASIEDHNENGHTPLMEAGSAGHVEVARLLLENGAGINTHSNEFKESALTLACYKGHLEMVRFLLEAGADQEHKTDEMHTALMEACMDGHVEVARLLLDSGAQVNMPADSFESPLTLAACGGHVELAALLIERGASLEEVNDEGYTPLMEAAREGHEEMVALLLGQGANINAQTEETQETALTLACCGGFLEVADFLIKAGADIELGCSTPLMEAAQEGHLELVKYLLAAGANVHATTATGDTALTYACENGHTDVADVLLQAGADLEHESEGGRTPLMKAARAGHVCTVQFLISKGANVNRTTANNDHTVLSLACAGGHLAVVELLLAHGADPTHRLKDGSTMLIEAAKGGHTSVVCYLLDYPNNLLSAPPPDVTQLTPPSHDLNRAPRVPVQALPMVVPPQEPDKPPANVATTLPIRNKAASKQKSSSHLPANSQDVQGYITNQSPESIVEEAQGKLTELEQRIKEAIEKNAQLQSLELAHADQLTKEKIEELNKTREEQIQKKQKILEELQKVERELQLKTQQQLKKQYLEVKAQRIQLQQQQQQSCQHLGLLTPVGVGEQLSEGDYARLQQVDPVLLKDEPQQTAAQMGFAPIQPLAMPQALPLAAGPLPPGSIANLTELQGVIVGQPVLGQAQLAGLGQGILTETQQGLMVASPAQTLNDTLDDIMAVSGRASAMSNTPTHSIAASISQPQTPTPSPIISPSAMLPIYPAIDIDAQTESNHDTALTLACAGGHEELVQTLLERGASIEHRDKKGFTPLILAATAGHVGVVEILLDNGADIEAQSERTKDTPLSLACSGGRQEVVELLLARGANKEHRNVSDYTPLSLAASGGYVNIIKILLNAGAEINSRTGSKLGISPLMLAAMNGHTAAVKLLLDMGSDINAQIETNRNTALTLACFQGRTEVVSLLLDRKANVEHRAKTGLTPLMEAASGGYAEVGRVLLDKGADVNAPPVPSSRDTALTIAADKGHYKFCELLIGRGAHIDVRNKKGNTPLWLAANGGHLDVVQLLVQAGADVDAADNRKITPLMAAFRKGHVKVVRYLVKEVNQFPSDSECMRYIATITDKEMLKKCHLCMESIVQAKDRQAAEANKNASILLEELDLEKLREESRRLALAAKREKRKEKRRKKKEEQRRKLEEIEAKNKENFELQAAQEKEKLKVEDEPEVLTEPPSATTTTTIGISATWTTLAGSHGKRNNTITTTSSKRKNRKNKITPENVQIIFDDPLPISYSQPEKVNGESKSSSTSESGDSDNMRISSCSDESSNSNSSRKSDNHSPAVVTTTVSSKKQPSVLVTFPKEERKSVSGKASIKLSETISEGTSNSLSTCTKSGPSPLSSPNGKLTVASPKRGQKREEGWKEVVRRSKKVSVPSTVISRVIGRGGCNINAIREFTGAHIDIDKQKDKTGDRIITIRGGTESTRQATQLINALIKDPDKEIDELIPKNRLKSSSANSKIGSSAPTTTAANTSLMGIKMTTVALSSTSQTATALTVPAISSASTHKTIKNPVNNVRPGFPVSLPLAYPPPQFAHALLAAQTFQQIRPPRLPMTHFGGTFPPAQSTWGPFPVRPLSPARATNSPKPHMVPRHSNQNSSGSQVNSAGSLTSSPTTTTSSSASTVPGTSTNGSPSSPSVRRQLFVTVVKTSNATTTTVTTTASNNNTAPTNATYPMPTAKEHYPVSSPSSPSPPAQPGGVSRNSPLDCGSASPNKVASSSEQEAGSPPVVETTNTRPPNSSSSSGSSSAHSNQQQPPGSVSQEPRPPLQQSQVPPPEVRMTVPPLATSSAPVAVPSTAPVTYPMPQTPMGCPQPTPKMETPAIRPPPHGTTAPHKNSASVQNSSVAVLSVNHIKRPHSVPSSVQLPSTLSTQSACQNSVHPANKPIAPNFSAPLPFGPFSTLFENSPTSAHAFWGGSVVSSQSTPESMLSGKSSYLPNSDPLHQSDTSKAPGFRPPLQRPAPSPSGIVNMDSPYGSVTPSSTHLGNFASNISGGQMYGPGAPLGGAPAAANFNRQHFSPLSLLTPCSSASNDSSAQSVSSGVRAPSPAPSSVPLGSEKPSNVSQDRKVPVPIGTERSARIRQTGTSAPSVIGSNLSTSVGHSGIWSFEGIGGNQDKVDWCNPGMGNPMIHRPMSDPGVFSQHQAMERDSTGIVTPSGTFHQHVPAGYMDFPKVGGMPFSVYGNAMIPPVAPIPDGAGGPIFNGPHAADPSWNSLIKMVSSSTENNGPQTVWTGPWAPHMNSVHMNQLG

SEQ ID NO: 20897 - protein, 767 aa, Homo sapiens
MYPQGRHPAPHQPGQPGFKFTVAESCDRIKDEFQFLQAQYHSLKVEYDKLANEKTEMQRHYVMYYEMSYGLNIEMHKQTEIAKRLNTILAQIMPFLSQEHQQQVAQAVERAKQVTMTELNAIIGQQQLQAQHLSHATHGPPVQLPPHPSGLQPPGIPPVTGSSSGLLALGALGSQAHLTVKDEKNHHELDHRERESSANNSVSPSESLRASEKHRGSADYSMEAKKRKAEEKDSLSRYDSDGDKSDDLVVDVSNEDPATPRVSPAHSPPENGLDKARSLKKDAPTSPASVASSSSTPSSKTKDLGHNDKSSTPGLKSNTPTPRNDAPTPGTSTTPGLRSMPGKPPGMDPIGIMASALRTPISITSSYAAPFAMMSHHEMNGSLTSPGAYAGLHNIPPQMSAAAAAAAAAYGRSPMVGFDPHPPMRATGLPSSLASIPGGKPAYSFHVSADGQMQPVPFPHDALAGPGIPRHARQINTLSHGEVVCAVTISNPTRHVYTGGKGCVKIWDISQPGSKSPISQLDCLNRDNYIRSCKLLPDGRTLIVGGEASTLTIWDLASPTPRIKAELTSSAPACYALAISPDAKVCFSCCSDGNIAVWDLHNQTLVRQFQGHTDGASCIDISHDGTKLWTGGLDNTVRSWDLREGRQLQQHDFTSQIFSLGYCPTGEWLAVGMESSNVEVLHHTKPDKYQLHLHESCVLSLKFAYCGKWFVSTGKDNLLNAWRTPYGASIFQSKESSSVLSCDISADDKYIVTGSGDKKATVYEVIY

SEQ ID NO: 20898 - protein, 584 aa, Homo sapiens
MSLDFGSVALPVQNEDEEYDEEDYEREKELQQLLTDLPHDMLDDDLSSPELQYSDCSEDGTDGQPHHPEQLEMSWNEQMLPKSQSVNGYNEIQSLYAGEKCGNVWEENRSKTEDRHPVYHPEEGGDEGGSGYSPPSKCEQTDLYHLPENFRPYTNGQKQEFNNQATNVIKFSDPQWNHFQGPSCQGLEPYNKVTYKPYQSSAQNNGSPAQEITGSDTFEGLQQQFLGANENSAENMQIIQLQVLNKAKERQLENLIEKLNESERQIRYLNHQLVIIKDEKDGLTLSLRESQKLFQNGKEREIQLEAQIKALETQIQALKVNEEQMIKKSRTTEMALESLKQQLVDLHHSESLQRAREQHESIVMGLTKKYEEQVLSLQKNLDATVTALKEQEDICSRLKDHVKQLERNQEAIKLEKTEIINKLTRSLEESQKQCAHLLQSGSVQEVAQLQFQLQQAQKAHAMSANMNKALQEELTELKDEISLYESAAKLGIHPSDSEGELNIELTESYVDLGIKKVNWKKSKVTSIVQEEDPNEELSKDEFILKLKAEVQRLLGSNSMKRHLVSQLQNDLKDCHKKIEDLHQV

SEQ ID NO: 20899 - protein, 1321 aa, Homo sapiens
MEGTHCTLQLHKPITELCYISFCLPKGEVRGFSYKGTVTLDRSNKGFHNCYQVREESDIISLSQEPDEHPGDIFFKQTPTKDILTELYKLTTERERLLTNLLSSDHILGITMGNQEGKLQELSVSLAPEDDCFQSAGDWQGELPVGPLNKRSTHGNKKPRRSSGRRESFGALPQKRTKRKGRGGRESAPLMGKDKICSSHSLPLSRTRPNLWVLEEKGNLLPNGALACSLQRRESCPPDIPKTPDTDLGFGSFETAFKDTGLGREVLPPDCSSTEAGGDGIRRPPSGLEHQQTGLSESHQDPEKHPEAEKDEMEKPAKRTCKQKPVSKVVAKVQDLSSQVQRVVKTHSKGKETIAIRPAAHAEFVPKADLLTLPGAEAGAHGSRRQGKERQGDRSSQSPAGETASISSVSASAEGAVNKVPLKVIESEKLDEAPEGKRLGFPVHTSVPHTRPETRNKRRAGLPLGGHKSLFLDLPHKVGPDSSQPRGDKKKPSPPAPAALGKVFNNSASQSSTHKQTSPVPSPLSPRLPSPQQHHRILRLPALPGEREAALNDSPCRKSRVFSGCVSADTLEPPSSAKVTETKGASPAFLRAGQPRLVPGETLEKSLGPGKTTAEPQHQSPPEYQAAILHLKREHKEEIENLQAQFELRAFHIRGEHAMITARLEETIENLKHELEHRWRGGCEERKDVCISTDDDCPPKTFRNVCVQTDRETFLKPCESESKTTRSNQLVPKKLNISSLSQLSPPNDHKDIHAALQPMEGMASNQQKALPPPPASIPPPPPLPSGLGSLSPAPPMPPVSAGPPLPPPPPPPPPLPPPSSAGPPPPPPPPPLPNSPAPPNPGGPPPAPPPPGLAPPPPPGLFFGLGSSSSQCPRKPAIEPSCPMKPLYWTRIQISDRSQNATPTLWDSLEEPDIRDPSEFEYLFSKDTTQQKKKPLSETYEKKNKVKKIIKLLDGKRSQTVGILISSLHLEMKDIQQAIFNVDDSVVDLETLAALYENRAQEDELVKIRKYYETSKEEELKLLDKPEQFLHELAQIPNFAERAQCIIFRSVFSEGITSLHRKVEIITRASKDLLHVKSVKDILALILAFGNYMNGGNRTRGQADGYSLEILPKLKDVKSRDNGINLVDYVVKYYLRYYDQEAGTEKSVFPLPEPQDFFLASQVKFEDLIKDLRKLKRQLEASEKQMVVVCKESPKEYLQPFKDKLEEFFQKAKKEHKMEESHLENAQKSFETTVRYFGMKPKSGEKEITPSYVFMVWYEFCSDFKTIWKRESKNISKERLKMAQESVSKLTSEKKVETKKINPTASLKERLRQKEASVTTN

SEQ ID NO: 20900 - protein, 509 aa, Homo sapiens
MGGGASKSGAEEWTQSSNGRDGLNWHGLSPLGWPSCRSIQTLRVLSGDLGQLPTGIRDFVEHSARLCQPEGIHICDGTEAENTATLTLLEQQGLIRKLPKYNNCWLARTDPKDVARVESKTVIVTPSQRDTVPLPPGGARGQLGNWMSPADFQRAVDERFPGCMQGRTMYVLPFSMGPVGSPLSRIGVQLTDSAYVVASMRIMTRLGTPVLQALGDGDFVKCLHSVGQPLTGQGEPVSQWPCNPEKTLIGHVPDQREIISFGSGYGGNSLLGKKCFALRIASRLARDEGWLAEHMLILGITSPAGKKRYVAAAFPSACGKTNLAMMRPALPGWKVECVGDDIAWMRFDSEGRLRAINPENGFFGVAPGTSATTNPNAMATIQSNTIFTNVAETSDGGVYWEGIDQPLPPGVTVTSWLGKPWKPGDKEPCAHPNSRFCAPARQCPIMDPAWEAPEGVPIDAIIFGGRRPKGVPLVYEAFNWRHGVFVGSAMRSESTAAAEHKGLLGTGGS

SEQ ID NO: 20901 - protein, 268 aa, Homo sapiens
MPSCGACTCGAAAVRLITSSLASAQRGISGGRIHMSVLGRLGTFETQILQRAPLRSFTETPAYFASKDGISKDGSGDGNKKSASEGSSKKSGSGNSGKGGNQLRCPKCGDLCTHVETFVSSTRFVKCEKCHHFFVVLSEADSKKSIIKEPESAAEAVKLAFQQKPPPPPKKIYNYLDKYVVGQSFAKKVLSVAVYNHYKRIYNNIPANLRQQAEVEKQTSLTPRELEIRRREDEYRFTKLLQIAGISPHGNALGASMQQQVKLCWHKP

SEQ ID NO: 20902 - protein, 505 aa, Homo sapiens
MKDSNRCCCGQFTNQHIPPLPSATPSKNEEESKQVETQPEKWSVAKHTQSYPTDSYGVLEFQGGGYSNKAMYIRVSYDTKPDSLLHLMVKDWQLELPKLLISVHGGLQNFEMQPKLKQVFGKGLIKAAMTTGAWIFTGGVSTAPCGENLYDEEGKRLPPCIPGAWLTPALMACYLLVANILLVNLLIAVFNNTFFEVKSISNQVWKFQRYQLIMTFHDRPVLPPPMIILSHIYIIIMRLSGRCRKKREGDQEERDRGLKLFLSDEELKRLHEFEEQCVQEHFREKEDEQQSSSDERIRVTSERVENMSMRLEEINERETFMKTSLQTVDLRLAQLEELSNRMVNALENLAGIDRSDLIQARSRASSECEATYLLRQSSINSADGYSLYRYHFNGEELLFEDTSLSTSPGTGVRKKTCSFRIKEEKDVKTHLVPECQNSLHLSLGTSTSATPDGSHLAVDDLKNAEESKLGPDIGISKEDDERQTDSKKEETISPSLNKTDVIHGQ

SEQ ID NO: 20903 - protein, 858 aa, Homo sapiens
MGDMKTPDFDDLLAAFDIPDPTSLDAKEAIQTPSEENESPLKPPGICMDESVSLSHSGSAPDVPAVSVIVKNTSRQESFEAEKDHITPSLLHNGFRGSDLPPDPHNCGKFDSTFMNGDSARSFPGKLEPPKSEPLPTFNQFSPISSPEPEDPIKDNGFGIKPKHSDSYFPPPLGCGAVGGPVLEALAKFPVPELHMFDHFCKKEPKPEPLPLGSQQEHEQSGQNTVEPHKDPDATRFFGEALEFNSHPSNSIGESKGLARELGTCSSVPPRQRLKPAHSKLSSCVAALVALQAKRVASVTKEDQPGHTKDLSGPTKESSKGSPKMPKSPKSPRSPLEATRKSIKPSDSPRSICSDSSSKGSPSVAASSPPAIPKVRIKTIKTSSGEIKRTVTRILPDPDDPSKSPVGSPLGSAIAEAPSEMPGDEVPVEEHFPEAGTNSGSPQGARKGDESMTKASDSSSPSCSSGPRVPKGAAPGSQTGKKQQSTALQASTLAPANLLPKAVHLANLNLVPHSVAASVTAKSSVQRRSQPQLTQMSVPLVHQVKKAAPLIVEVFNKVLHSSNPVPLYAPNLSPPADSRIHVPASGYCCLECGDAFALEKSLSQHYGRRSVHIEVLCTLCSKTLLFFNKCSLLRHARDHKSKGLVMQCSQLLVKPISADQMFVSAPVNSTAPAAPAPSSSPKHGLTSGSASPPPPALPLYPDPVRLIRYSIKCLECHKQMRDYMVLAAHFQRTTEETEGLTCQVCQMLLPNQCSFCAHQRIHAHKSPYCCPECGVLCRSAYFQTHVKENCLHYARKVHPLWCRPPDLGLAEKPHPGATLPGFPQMCILPHGLQDCQQHCRPQCHPAPHPAPQTLPAHL

SEQ ID NO: 20904 - protein, 236 aa, Homo sapiens
DSQHRAAINTYCSLAACVLTSVAISSALHKKGKLDMVHIQNATLAGGVAVGTAAEMMLMPYGALIIGFVCGIISTLGFVYLTPFLESRLHIQDTCGINNLHGIPGIIGGIVGAVTAASASLEVYGKEGLVHSFDFQGFNGDWTARTQGKFQIYGLLVTLAMALMGGIIVGLILRLPFWGQPSDENCFEDAVYWEMPEGNSTVYIPEDPTFKPSGPSVPSVPMVSPLPMASSVPLVP

SEQ ID NO: 20905 - protein, 394 aa, Homo sapiens
MAQRYDELPHYGGMDGVGVPASMYGDPHAPRPIPPVHHLNHGPPLHATQHYGAHAPHPNVMPASMGSAVNDALKRDKDAIYGHPLFPLLALVFEKCELATCTPREPGVAGGDVCSSDSFNEDIAVFAKQVRAEKPLFSSNPELDNLMIQAIQVLRFHLLELEKVHELCDNFCHRYISCLKGKMPIDLVIDERDGSSKSDHEELSGSSTNLADHNPSSWRDHDDATSTHSAGTPGPSSGGHASQSGDNSSEQGDGLDNSVASPGTGDDDDPDKDKKRQKKRGIFPKVATNIMRAWLFQHLTHPYPSEEQKKQLAQDTGLTILQVNNWFINARRRIVQPMIDQSNRAVSQGAAYSPEGQPMGSFVLDGQQHMGIRPAGPMSGMGMNMGMDGQWHYM

SEQ ID NO: 20906 - protein, 2492 aa, Homo sapiens
MTTLLWVFVTLRVITAAVTVETSDHDNSLSVSIPQPSPLRVLLGTSLTIPCYFIDPMHPVTTAPSTAPLAPRIKWSRVSKEKEVVLLVATEGRVRVNSAYQDKVSLPNYPAIPSDATLEVQSLRSNDSGVYRCEVMHGIEDSEATLEVVVKGIVFHYRAISTRYTLDFDRAQRACLQNSAIIATPEQLQAAYEDGFHQCDAGWLADQTVRYPIHTPREGCYGDKDEFPGVRTYGIRDTNETYDVYCFAEEMEGEVFYATSPEKFTFQEAANECRRLGARLATTGQLYLAWQAGMDMCSAGWLADRSVRYPISKARPNCGGNLLGVRTVYVHANQTGYPDPSSRYDAICYTGEDFVDIPENFFGVGGEEDITVQTVTWPDMELPLPRNITEGEARGSVILTVKPIFEVSPSPLEPEEPFTFAPEIGATAFAEVENETGEATRPWGFPTPGLGPATAFTSEDLVVQVTAVPGQPHLPGGVVFHYRPGPTRYSLTFEEAQQACLRTGAVIASPEQLQAAYEAGYEQCDAGWLRDQTVRYPIVSPRTPCVGDKDSSPGVRTYGVRPSTETYDVYCFVDRLEGEVFFATRLEQFTFQEALEFCESHNATLATTGQLYAAWSRGLDKCYAGWLADGSLRYPIVTPRPACGGDKPGVRTVYLYPNQTGLPDPLSRHHAFCFRGISAVPSPGEEEGGTPTSPSGVEEWIVTQVVPGVAAVPVEEETTAVPSGETTAILEFTTEPENQTEWEPAYTPVGTSPLPGILPTWPPTGAATEESTEGPSATEVPSASEEPSPSEVPFPSEEPSPSEEPFPSVRPFPSVELFPSEEPFPSKEPSPSEEPSASEEPYTPSPPVPSWTELPSSGEESGAPDVSGDFTGSGDVSGHLDFSGQLSGDRASGLPSGDLDSSGLTSTVGSGLPVESGLPSGDEERIEWPSTPTVGELPSGAEILEGSASGVGDLSGLPSGEVLETSASGVGDLSGLPSGEVLETTAPGVEDISGLPSGEVLETTAPGVEDISGLPSGEVLETTAPGVEDISGLPSGEVLETTAPGVEDISGLPSGEVLETTAPGVEDISGLPSGEVLETTAPGVEDISGLPSGEVLETAAPGVEDISGLPSGEVLETAAPGVEDISGLPSGEVLETAAPGVEDISGLPSGEVLETAAPGVEDISGLPSGEVLETAAPGVEDISGLPSGEVLETAAPGVEDISGLPSGEVLETAAPGVEDISGLPSGEVLETAAPGVEDISGLPSGEVLETAAPGVEDISGLPSGEVLETAAPGVEDISGLPSGEVLETAAPGVEDISGLPSGEVLETAAPGVEDISGLPSGEVLETAAPGVEDISGLPSGEVLETAAPGVEDISGLPSGEVLETAAPGVEDISGLPSGEVLETAAPGVEDISGLPSGEVLETTAPGVEEISGLPSGEVLETTAPGVDEISGLPSGEVLETTAPGVEEISGLPSGEVLETSTSAVGDLSGLPSGGEVLEISVSGVEDISGLPSGEVVETSASGIEDVSELPSGEGLETSASGVEDLSRLPSGEEVLEISASGFGDLSGLPSGGEGLETSASEVGTDLSGLPSGREGLETSASGAEDLSGLPSGKEDLVGSASGDLDLGKLPSGTLGSGQAPETSGLPSGFSGEYSGVDLGSGPPSGLPDFSGLPSGFPTVSLVDSTLVEVVTASTASELEGRGTIGISGAGEISGLPSSELDISGRASGLPSGTELSGQASGSPDVSGEIPGLFGVSGQPSGFPDTSGETSGVTELSGLSSGQPGISGEASGVLYGTSQPFGITDLSGETSGVPDLSGQPSGLPGFSGATSGVPDLVSGTTSGSGESSGITFVDTSLVEVAPTTFKEEEGLGSVELSGLPSGEADLSGKSGMVDVSGQFSGTVDSSGFTSQTPEFSGLPSGIAEVSGESSRAEIGSSLPSGAYYGSGTPSSFPTVSLVDRTLVESVTQAPTAQEAGEGPSGILELSGAHSGAPDMSGEHSGFLDLSGLQSGLIEPSGEPPGTPYFSGDFASTTNVSGESSVAMGTSGEASGLPEVTLITSEFVEGVTEPTISQELGQRPPVTHTPQLFESSGKVSTAGDISGATPVLPGSGVEVSSVPESSSETSAYPEAGFGASAAPEASREDSGSPDLSETTSAFHEANLERSSGLGVSGSTLTFQEGEASAAPEVSGESTTTSDVGTEAPGLPSATPTASGDRTEISGDLSGHTSQLGVVISTSIPESEWTQQTQRPAETHLEIESSSLLYSGEETHTVETATSPTDASIPASPEWKRESESTAADQEVCEEGWNKYQGHCYRHFPDRETWVDAERRCREQQSHLSSIVTPEEQEFVNNNAQDYQWIGLNDRTIEGDFRWSDGHPMQFENWRPNQPDNFFAAGEDCVVMIWHEKGEWNDVPCNYHLPFTCKKGTVACGEPPVVEHARTFGQKKDRYEINSLVRYQCTEGFVQRHMPTIRCQPSGHWEEPQITCTDPTTYKRRLQKRSSRHPRRSRPSTAH

SEQ ID NO: 20907 - protein, 173 aa, Homo sapiens
MSRQEKDAELDRRIVALRKKNQALLRRYQEIQEDRRQAEQGGMAVTTPALLQPDGLTVTISQVPGEKRVVSRNWARGTCGPRVTNEMLEDEDAEDHGGTFCLGELVELAVTMENKAEGKRIVSEKPTRARNQGIEGSPGGRVTRSPPTQVAISSDSARKGSWEPWSRPVGEPP

SEQ ID NO: 20908 - protein, 2542 aa, Homo sapiens
MVALSLKICVRHCNVVKTMQFEPSTAVYDACRVIRERVPEAQTGQASDYGLFLSDEDPRKGIWLEAGRTLDYYMLRNGDILEYKKKQRPQKIRMLDGSVKTVMVDDSKTVGELLVTICSRIGITNYEEYSLIQETIEEKKEEGTGTLKKDRTLLRDERKMEKLKAKLHTDDDLNWLDHSRTFREQGVDENETLLLRRKFFYSDQNVDSRDPVQLNLLYVQARDDILNGSHPVSFEKACEFGGFQAQIQFGPHVEHKHKPGFLDLKEFLPKEYIKQRGAEKRIFQEHKNCGEMSEIEAKVKYVKLARSLRTYGVSFFLVKEKMKGKNKLVPRLLGITKDSVMRVDEKTKEVLQEWPLTTVKRWAASPKSFTLDFGEYQESYYSVQTTEGEQISQLIAGYIDIILKKKQSKDRFGLEGDEESTMLEESVSPKKSTILQQQFNRTGKAEHGSVALPAVMRSGSSGPETFNVGSMPSPQQQVMVGQMHRGHMPPLTSAQQALMGTINTSMHAVQQAQDDLSELDSLPPLGQDMASRVWVQNKVDESKHEIHSQVDAITAGTASVVNLTAGDPADTDYTAVGCAITTISSNLTEMSKGVKLLAALMDDEVGSGEDLLRAARTLAGAVSDLLKAVQPTSGEPRQTVLTAAGSIGQASGDLLRQIGENETDERFQDVLMSLAKAVANAAAMLVLKAKNVAQVAEDTVLQNRVIAAATQCALSTSQLVACAKVVSPTISSPVCQEQLIEAGKLVDRSVENCVRACQAATTDSELLKQVSAAASVVSQALHDLLQHVRQFASRGEPIGRYDQATDTIMCVTESIFSSMGDAGEMVRQARVLAQATSDLVNAMRSDAEAEIDMENSKKLLAAAKLLADSTARMVEAAKGAAANPENEDQQQRLREAAEGLRVATNAAAQNAIKKKIVNRLEVAAKQAAAAATQTIAASQNAAVSNKNPAAQQQLVQSCKAVADHIPQLVQGVRGSQAQAEDLSAQLALIISSQNFLQPGSKMVSSAKAAVPTVSDQAAAMQLSQCAKNLATSLAELRTASQKAHEACGPMEIDSALNTVQTLKNELQDAKMAAVESQLKPLPGETLEKCAQDLGSTSKAVGSSMAQLLTCAAQGNEHYTGVAARETAQALKTLAQAARGVAASTTDPAAAHAMLDSARDVMEGSAMLIQEAKQALIAPGDAERQQRLAQVAKAVSHSLNNCVNCLPGQKDVDVALKSIGESSKKLLVDSLPPSTKPFQEAQSELNQAAADLNQSAGEVVHATRGQSGELAAASGKFSDDFDEFLDAGIEMAGQAQTKEDQIQVIGNLKNISMASSKLLLAAKSLSVDPGAPNAKNLLAAAARAVTESINQLITLCTQQAPGQKECDNALRELETVKGMLDNPNEPVSDLSYFDCIESVMENSKVLGESMAGISQNAKTGDLPAFGECVGIASKALCGLTEAAAQAAYLVGISDPNSQAGHQGLVDPIQFARANQAIQMACQNLVDPGSSPSQVLSAATIVAKHTSALCNACRIASSKTANPVAKRHFVQSAKEVANSTANLVKTIKALDGDFSEDNRNKCRIATAPLIEAVENLTAFASNPEFVSIPAQISSEGSQAQEPILVSAKTMLESSSYLIRTARSLAINPKDPPTWSVLAGHSHTVSDSIKSLITSIRDKAPGQRECDYSIDGINRCIRDIEQASLAAVSQSLATRDDISVEALQEQLTSVVQEIGHLIDPIATAARGEAAQLGHKVTQLASYFEPLILAAVGVASKILDHQQQMTVLDQTKTLAESALQMLYAAKEGGGNPKAQHTHDAITEAAQLMKEAVDDIMVTLNEAASEVGLVGGMVDAIAEAMSKLDEGTPPEPKGTFVDYQTTVVKYSKAIAVTAQEMMTKSVTNPEELGGLASQMTSDYGHLAFQGQMAAATAEPEEIGFQIRTRVQDLGHGCIFLVQKAGALQVCPTDSYTKRELIECARAVTEKVSLVLSALQAGNKGTQACITAATAVSGIIADLDTTIMFATAGTLNAENSETFADHRENILKTAKALVEDTKLLVSGAASTPDKLAQAAQSSAATITQLAEVVKLGAASLGSDDPETQVVLINAIKDVAKALSDLISATKGAASKPVDDPSMYQLKGAAKVMVTNVTSLLKTVKAVEDEATRGTRALEATIECIKQELTVFQSKDVPEKTSSPEESIRMTKGITMATAKAVAAGNSCRQEDVIATANLSRKAVSDMLTACKQASFHPDVSDEVRTRALRFGTECTLGYLDLLEHVLVILQKPTPEFKQQLAAFSKRVAGAVTELIQAAEAMKGTEWVDPEDPTVIAETELLGAAASIEAAAKKLEQLKPRAKPKQADETLDFEEQILEAAKSIAAATSALVKSASAAQRELVAQGKVGSIPANAADDGQWSQGLISAARMVAAATSSLCEAANASVQGHASEEKLISSAKQVAASTAQLLVACKVKADQDSEAMRRLQAAGNAVKRASDNLVRAAQKAAFGKADDDDVVVKTKFVGGIAQIIAAQEEMLKKERELEEARKKLAQIRQQQYKFLPTELREDEG

SEQ ID NO: 20909 - protein, 705 aa, Homo sapiens
MDVSLCPAKCSFWRIFLLGSVWLDYVGSVLACPANCVCSKTEINCRRPDDGNLFPLLEGQDSGNSNGNASINITDISRNITSIHIENWRSLHTLNAVDMELYTGLQKLTIKNSGLRSIQPRAFAKNPHLRYINLSSNRLTTLSWQLFQTLSLRELQLEQNFFNCSCDIRWMQLWQEQGEAKLNSQNLYCINADGSQLPLFRMNISQCDLPEISVSHVNLTVREGDNAVITCNGSGSPLPDVDWIVTGLQSINTHQTNLNWTNVHAINLTLVNVTSEDNGFTLTCIAENVVGMSNASVALTVYYPPRVVSLEEPELRLEHCIEFVVRGNPPPTLHWLHNGQPLRESKIIHVEYYQEGEISEGCLLFNKPTHYNNGNYTLIAKNPLGTANQTINGHFLKEPFPVDEVSPTPPITVTHKPEEDTFGVSIAVGLAAFACVLLVVLFVMINKYGRRSKFGMKGPVAVISGEEDSASPLHHINHGITTPSSLDAGPDTVVIGMTRIPVIENPQYFRQGHNCHKPDTYVQHIKRRDIVLKRELGEGAFGKVFLAECYNLSPTKDKMLVAVKALKDPTLAARKDFQREAELLTNLQHEHIVKFYGVCGDGDPLIMVFEYMKHGDLNKFLRAHGPDAMILVDGQPRQAKGELGLSQMLHIASQIASGMVYLASQHFVHRDLATRNCLVGANLLVKIGDFGMSRDVYSTDYYRVK

SEQ ID NO: 20910 - protein, 308 aa, Homo sapiens
LDGSDEASCPVLTCGPASFQCNSSTCIPQLWACDNDPDCEDGSDEWPQRCRGLYVFQGDSSPCSAFEFHCLSGECIHSSWRCDGGPDCKDKSDEENCAVATCRPDEFQCSDGNCIHGSRQCDREYDCKDMSDEVGCVNVTLCEGPNKFKCHSGECITLDKVCNMARDCRDWSDEPIKECDIDECQDPDTCSQLCVNLEGGYKCQCEEGFQLDPHTKACKAVGSIAYLFFTNRHEVRKMTLDRSEYTSLIPNLRNVVALDTEVASNRIYWSDLSQRMICSTQLDRAHGVSSYDTVISRDIQAPDGLAVD

SEQ ID NO: 20911 - protein, 19 aa, Homo sapiens
LYVFTIATEPLRIIFLIAG

SEQ ID NO: 20912 - protein, 160 aa, Homo sapiens
MAARGSGPRALRLLLLVQLVAGRCGLAGAAGGAQRGLSEPSSIAKHEDSLLKDLFQDYERWVRPVEHLNDKIKIKFGLAISQLVDVDEKNQLMTTNVWLKQEWIDVKLRWNPDDYGGIKVIRVPSDSVWTPDIVLFDNADGRFEGTSTKTVIRLLKIGNS

SEQ ID NO: 20913 - protein, 315 aa, Homo sapiens
MPHIDNDVKLDFKDVLLRPKRSTLKSRSEVDLTRSFSFRNSKQTYSGVPIIAANMDTVGTFEMAKVLCKFSLFTAVHKHYSLVQWQEFAGQNPDCLEHLAASSGTGSSDFEQLEQILEAIPQAGNVVTGEMVEELILSGADIIKVGIGPGSVCTTRKKTGVGYPQLSAVMECADAAHGLKGHIISDGGCSCPGDVAKAFGAGADFVMLGGMLAGHSESGGELIERDGKKYKLFYGMSSEMAMKKYAGGVAEYRASEGKTVEVPFKGDVEHTIRDILGGIRSTCTYVGAAKLKELSRRTTFIRVTQQVNPIFSEAC

SEQ ID NO: 20914 - protein, 700 aa, Homo sapiens
LLSYKIPIKYLRVFHPYHFELVKPTESGKADEATAKTQLYATVVRKSSFIPRYIGCNHMALEIFLRGVNEPLANNPNPIVVIARVVPNYKEFKVSQANRDLASVGLPITPLSFPIPSMMNFDVPRVSQNGCPQLSKPGGPPEQPLWNQSFLFQGRDGATSFSEDTALVLEYYSSTSMKGSQPWTLNQPLGISVLPLKSRLYQKMLTGKGLDGLHVERLPIMDTSLKTINDEAPTVALSFQLLSSERPENFLTPNNSKALPTLDPKILDKKLRTIQESWSKDTVSSTMDLSTSTPREAEEEPLVPEMSHDTEMNNYRRAMQKMAEDILSLRRQASILEGENRILRSRLAQQEEEEGQGKASEAQNTVSMKQKLLLSELDMKKLRDRVQHLQNELIRKNDREKELLLLYQAQQPQAALLKQYQGKLQKMKALEETVRHQEKVIEKMERVLEDRLQDRSKPPPLNRQQGKPYTGFPMLSASGLPLGSMGENLPVELYSVLLAENAKLRTELDKNRHQQAPIILQQQALPVDPGELGAGGDLTERLQETHGPGHSECTETLPAQDLLSGTSDKFNLLAKLEHAQSRILSLESQLEDSARRWGREKQDLATRLQEQEKGFRHPSNSIIIEQPPYSLPPAPGASIFGKPRATVDPGGWREEAFQSRGQGDGPLPDPEKKQGHQRPALLGNTREACPFHLPQNIYHV

SEQ ID NO: 20915 - protein, 227 aa, Homo sapiens
MSTVHEILCKLSLEGDHSTPPSAYGSVKAYTNFDAERDALNIETAIKTKGVDEVTIVNILTNRSNAQRQDIAFAYQRRTKKELASALKSALSGHLETVILGLLKTPAQYDASELKASMKGLGTDEDSLIEIICSRTNQELQEINRVYKEMYKTDLEKDIISDTSGDFRKLMVALAKGRRAEDGSVIDYELIDQDARDLYDAGVKRKGTDVPKWISIMTERSVPHLQK

SEQ ID NO: 20916 - protein, 948 aa, Homo sapiens
MGPWGWKLRWTVALLLAAAGTAVGDRCERNEFQCQDGKCISYKWVCDGSAECQDGSDESQETCLSVTCKSGDFSCGGRVNRCIPQFWRCDGQVDCDNGSDEQGCPPKTCSQDEFRCHDGKCISRQFVCDSDRDCLDGSDEASCPVLTCGPASFQCNSSTCIPQLWACDNDPDCEDGSDEWPQRCRGLYVFQGDSSPCSAFEFHCLSGECIHSSWRCDGGPDCKDKSDEENCAVATCRPDEFQCSDGNCIHGSRQCDREYDCKDMSDEVGCVNVTLCEGPNKFKCHSGECITLDKVCNMARDCRDWSDEPIKECGTNECLDNNGGCSHVCNDLKIGYECLCPDGFQLVAQRRCEDIDECQDPDTCSQLCVNLEGGYKCQCEEGFQLDPHTKACKAVGSIAYLFFTNRHEVRKMTLDRSEYTSLIPNLRNVVALDTEVASNRIYWSDLSQRMICSTQLDRAHGVSSYDTVISRDIQAPDGLAVDWIHSNIYWTDSVLGTVSVADTKGVKRKTLFRENGSKPRAIVVDPVHGFMYWTDWGTPAKIKKGGLNGVDIYSLVTENIQWPNGITLDLLSGRLYWVDSKLHSISSIDVNGGNRKTILEDEKRLAHPFSLAVFEDKVFWTDIINEAIFSANRLTGSDVNLLAENLLSPEDMVLFHNLTQPRGVNWCERTTLSNGGCQYLCLPAPQINPHSPKFTCACPDGMLLARDMRSCLTEAEAAVATQETSTVRLKVSSTAVRTQHTTTRPVPDTSRLPGATPGLTTVEIVTMSHQALGDVAGRGNEKKPSSVRALSIVLPIATELGLWSRGQLCDRACLSLQCSSSSFAWGSSFYGRTGGLRTSTASTLTTPSIRRPQRMRSTFATTRTATATPRDRWSVWRMTWREHLPGVPSLPRTLPETSPALFYSKTEKTKALPARALFYIFIHLGGRTGFGQCPCNGLGWDFGFFLSS

SEQ ID NO: 20917 - protein, 274 aa, Homo sapiens
MTSHKSGRDQRHVTQSGCNRKFKCTECGKAFKYKHHLKEHLRIHSGEKPYECPNCKKRFSHSGSYSSHISSKKCISLIPVNGRPRTGLKTSQCSSPSLSASPGSPTRPQIRQKIENKPLQEQLSVNQIKTEPVDYEFKPIVVASGINCSTPLQNGVFTGGGPLQATSSPQGMVQAVVLPTVGLVSPISINLSDIQNVLKVAVDGNVIRQVLENNQANLASKEQETINASPIQQGGHSVISAISLPLVDQDGTTKIIINYSLEQPSQLQVVPQNL

SEQ ID NO: 20918 - protein, 1426 aa, Homo sapiens
AKQERLEIASLSNQDHTSKKDPGGHRTAAILHGGSPDFVGNGKHRANSSGRSRRERQYSVCNSEDSPGSCEILYFNMGSPDQLMVHKGKCIGSDEQLGKLVYNALETATGGFVLLYEWVLQWQKKMGPFLTSQEKEKIDKCKKQIQGTETEFNSLVKLSHPNVVRYLAMNLKEQDDSIVVDILVEHISGVSLAAHLSHSGPIPVHQLRRYTAQLLSGLDYLHSNSVVHKVLSASNVLVDAEGTVKITDYSISKRLADICKEDVFEQTRVRFSDNALPYKTGKKGDVWRLGLLLLSLSQGQECGEYPVTIPSDLPADFQDFLKKCVCLDDKERWSPQQLLKHSFINPQPKMPLVEQSPEDSEGQDYVETVIPSNRLPSAAFFSETQRQFSRYFIEFEELQLLGKGAFGAVIKVQNKLDGCCYAVKRIPINPASRQFRRIKGEVTLLSRLHHENIVRYYNAWIERHERPAGPGTPPPDSGPLAKDDRAARGQPASDTDGLDSVEAAAPPPILSSSVEWSTSGERSASARFPATGPGSSDDEDDDEDEHGGVFSQSFLPASDSESDIIFDNEDENSKSQNQMEYCEKSTLRDTIDQGLYRDTVRLWRLFREILDGLAYIHEKGMIHRDLKPVNIFLDSDDHVKIGDFGLATDHLAFSADSKQDDQTGDLIKSDPSGHLTGMVGTALYVSPEVQGSTKSAYNQKVDLFSLGIIFFEMSYHPMVTASERIFVLNQLRDPTSPKFPEDFDDGEHAKQKSVISWLLNHDPAKRPTATELLKSELLPPPQMEESELHEVLHHTLTNVDGKAYRTMMAQIFSQRISPAIDYTYDSDILKGNFSIRTAKMQQHVCETIIRIFKRHGAVQLCTPLLLPRNRQIYEHNEAALFMDHSGMLVMLPFDLRIPFARYVARNNILNLKRYCIERVFRPRKLDRFHPKELLECAFDIVTSTTNSFLPTAEIIYTIYEIIQEFPALQERNYSIYLNHTMLLKAILLHCGIPEDKLSQVYIILYDAVTEKLTRREVEAKFCNLSLSSNSLCRLYKFIEQKGDLQDLMPTINSLIKQKTGIAQLVKYGLKDLEEVVGLLKKLGIKLQVLINLGLVYKVQQHNGIIFQFVAFIKRRQRAVPEILAAGGRYDLLIPQFRGPQALGPVPTAIGVSIAIDKISAAVLNMEESVTISSCDLLVVSVGQMSMSRAINLTQKLWTAGITAEIMYDWSQSQEELQEYCRHHEITYVALVSDKEGSHVKVKSFEKERQTEKRVLETELVDHVLQKLRTKVTDERNGREASDNLAVQNLKGSFSNASGLFEIHGATVVPIVSVLAPEKLSASTRRRYETQVQTRLQTSLANLHQKSSEIEILAVDLPKETILQFLSLEWDADEQAFNTTVKQLLSRLPKQRYLKLVCDEIYNIKVEKKVSVLFLYSYRDDYYRILF

SEQ ID NO: 20919 - protein, 2568 aa, Homo sapiens
MTTLLWVFVTLRVITAAVTVETSDHDNSLSVSIPQPSPLRVLLGTSLTIPCYFIDPMHPVTTAPSTAPLAPRIKWSRVSKEKEVVLLVATEGRVRVNSAYQDKVSLPNYPAIPSDATLEVQSLRSNDSGVYRCEVMHGIEDSEATLEVVVKGIVFHYRAISTRYTLDFDRAQRACLQNSAIIATPEQLQAAYEDGFHQCDAGWLADQTVRYPIHTPREGCYGDKDEFPGVRTYGIRDTNETYDVYCFAEEMEGEVFYATSPEKFTFQEAANECRRLGARLATTGQLYLAWQAGMDMCSAGWLADRSVRYPISKARPNCGGNLLGVRTVYVHANQTGYPDPSSRYDAICYTGEDFVDIPENFFGVGGEEDITVQTVTWPDMELPLPRNITEGEARGSVILTVKPIFEVSPSPLEPEEPFTFAPEIGATAFAEVENETGEATRPWGFPTPGLGPATAFTSEDLVVQVTAVPGQPHLPGGVVFHYRPGPTRYSLTFEEAQQACLRTGAVIASPEQLQAAYEAGYEQCDAGWLRDQTVRYPIVSPRTPCVGDKDSSPGVRTYGVRPSTETYDVYCFVDRLEGEVFFATRLEQFTFQEALEFCESHNATLATTGQLYAAWSRGLDKCYAGWLADGSLRYPIVTPRPACGGDKPGVRTVYLYPNQTGLPDPLSRHHAFCFRGISAVPSPGEEEGGTPTSPSGVEEWIVTQVVPGVAAVPVEEETTAVPSGETTAILEFTTEPENQTEWEPAYTPVGTSPLPGILPTWPPTGAATEESTEGPSATEVPSASEEPSPSEVPFPSEEPSPSEEPFPSVRPFPSVELFPSEEPFPSKEPSPSEEPSASEEPYTPSPPVPSWTELPSSGEESGAPDVSGDFTGSGDVSGHLDFSGQLSGDRASGLPSGDLDSSGLTSTVGSGLPVESGLPSGDEERIEWPSTPTVGELPSGAEILEGSASGVGDLSGLPSGEVLETSASGVGDLSGLPSGEVLETTAPGVEDISGLPSGEVLETTAPGVEDISGLPSGEVLETTAPGVEDISGLPSGEVLETTAPGVEDISGLPSGEVLETTAPGVEDISGLPSGEVLETTAPGVEDISGLPSGEVLETAAPGVEDISGLPSGEVLETAAPGVEDISGLPSGEVLETAAPGVEDISGLPSGEVLETAAPGVEDISGLPSGEVLETAAPGVEDISGLPSGEVLETAAPGVEDISGLPSGEVLETAAPGVEDISGLPSGEVLETAAPGVEDISGLPSGEVLETAAPGVEDISGLPSGEVLETAAPGVEDISGLPSGEVLETAAPGVEDISGLPSGEVLETAAPGVEDISGLPSGEVLETAAPGVEDISGLPSGEVLETAAPGVEDISGLPSGEVLETAAPGVEDISGLPSGEVLETAAPGVEDISGLPSGEVLETTAPGVEEISGLPSGEVLETTAPGVDEISGLPSGEVLETTAPGVEEISGLPSGEVLETSTSAVGDLSGLPSGGEVLEISVSGVEDISGLPSGEVVETSASGIEDVSELPSGEGLETSASGVEDLSRLPSGEEVLEISASGFGDLSGLPSGGEGLETSASEVGTDLSGLPSGREGLETSASGAEDLSGLPSGKEDLVGSASGDLDLGKLPSGTLGSGQAPETSGLPSGFSGEYSGVDLGSGPPSGLPDFSGLPSGFPTVSLVDSTLVEVVTASTASELEGRGTIGISGAGEISGLPSSELDISGRASGLPSGTELSGQASGSPDVSGEIPGLFGVSGQPSGFPDTSGETSGVTELSGLSSGQPGISGEASGVLYGTSQPFGITDLSGETSGVPDLSGQPSGLPGFSGATSGVPDLVSGTTSGSGESSGITFVDTSLVEVAPTTFKEEEGLGSVELSGLPSGEADLSGKSGMVDVSGQFSGTVDSSGFTSQTPEFSGLPSGIAEVSGESSRAEIGSSLPSGAYYGSGTPSSFPTVSLVDRTLVESVTQAPTAQEAGEGPSGILELSGAHSGAPDMSGEHSGFLDLSGLQSGLIEPSGEPPGTPYFSGDFASTTNVSGESSVAMGTSGEASGLPEVTLITSEFVEGVTEPTISQELGQRPPVTHTPQLFESSGKVSTAGDISGATPVLPGSGVEVSSVPESSSETSAYPEAGFGASAAPEASREDSGSPDLSETTSAFHEANLERSSGLGVSGSTLTFQEGEASAAPEVSGESTTTSDVGTEAPGLPSATPTASGDRTEISGDLSGHTSQLGVVISTSIPESEWTQQTQRPAETHLEIESSSLLYSGEETHTVETATSPTDASIPASPEWKRESESTAAAPARSCAEEPCGAGTCKETEGHVICLCPPGYTGEHCNIDIDECLSSPCLNGATCVDAIDSFTCLCLPSYEGDLCEIDQEVCEEGWNKYQGHCYRHFPDRETWVDAERRCREQQSHLSSIVTPEEQEFVNNNAQDYQWIGLNDRTIEGDFRWSDGHPMQFENWRPNQPDNFFAAGEDCVVMIWHEKGEWNDVPCNYHLPFTCKKGTVACGEPPVVEHARTFGQKKDRYEINSLVRYQCTEGFVQRHMPTIRCQPSGHWEEPQITCTDPTTYKRRLQKRSSRHPRRSRPSTAH

SEQ ID NO: 20920 - protein, 811 aa, Homo sapiens
IPFLSNLPSERGAARLSPHCLLSFPRKPSHGCRAASKARLEAKPANSPFPSHPSLAHITQFRMMVSLGHLAKGASLDDLIDSCIQSFDADGNLCRSNQLLQVMLTMHRIVISSAELLQKVITLYKDALAKNSPGLCLKICYFVRYWITEFWVMFKMDASLTDTMEEFQELVKAKGEELHCRLIDTTQINARDWSRKLTQRIKSNTSKKRKVSLLFDHLEPEELSEHLTYLEFKSFRRISFSDYQNYLVNSCVKENPTMERSIALCNGISQWVQLMVLSRPTPQLRAEVFIKFIQVAQKLHQLQNFNTLMAVIGGLCHSSISRLKETSSHVPHEINKVLGEMTELLSSSRNYDNYRRAYGECTDFKIPILGVHLKDLISLYEAMPDYLEDGKVNVHKLLALYNHISELVQLQEVAPPLEANKDLVHLLTLSLDLYYTEDEIYELSYAREPRNHRAPPLTPSKPPVVVDWASGVSPKPDPKTISKHVQRMVDSVFKNYDHDQDGYISQEEFEKIAASFPFSFCVMDKDREGLISRDEITAYFMRASSIYSKLGLGFPHNFQETTYLKPTFCDNCAGFLWGVIKQGYRCKDCGMNCHKQCKDLVVFECKKRAKNPVAPTENNTSVGPVSNLCSLGAKDLLHAPEEGPFTFPNGEAVEHGEESKDRTIMLMGVSSQKISLRLKRAVAHKATQTESQPWIGSEGPSGPFVLSSPRKTAQDTLYVLPSPTSPCPSPVLVRKRAFVKWENKDSLIKSKEELRHLRLPTYQELEQEINTLKADNDALKIQLKYAQKKIESLQLEKSNHVLAQMEQGDCS

SEQ ID NO: 20921 - protein, 2079 aa, Homo sapiens
MAAEEGVASAASAGGSWGTAAMGRVLPMLLVPVPAEAMGQLGSRAQLRTQPEALGSLTAAGSLQVLSLTPGSRGGGRCCLEGPFWHFLWEDSRNSSTPTEKPKLLALGENYELLIYEFNLKDGRCDATILYSCSREALQKLIDDQDISISLLSLRILSFHNNTSLLFINKCVILHIIFPERDAAIRVLNCFTLPLPAQAVDMIIDTQLCRGILFVLSSLGWIYIFDVVDGTYVAHVDLALHKEDMCNEQQQEPAKISSFTSLKVSQDLDVAVIVSSSNSAVALNLNLYFRQHPGHLLCERILEDLPIQGPKGVDEDDPVNSAYNMKLAKFSFQIDRSWKAQLSSLNETIKNSKLEVSCCAPWFQDILHLESPESGNHSTSVQSWAFIPQDIMHGQYNVLQKDHAKTSDPGRSWKIMHISEQEEPIELKCVSVTGFTALFTWEVERMGYTITLWDLETQGMQCFSLGTKCIPVDSSGDQQLCFVLTENGLSLILFGLTQEEFLNRLMIHGSASTVDTLCHLNGWGRCSIPIHALEAGIENRQLDTVNFFLKSKENLFNPSSKSSVSDQFDHLSSHLYLRNVEELIPALDLLCSAIRESYSEPQSKHFSEQLLNLTLSFLNNQIKELFIHTEELDEHLQKGVNILTSYINELRTFMIKFPWKLTDAIDEYDVHENVPKVKESNIWKKLSFEEVIASAILNNKIPEAQTFFRIDSHSAQKLEELIGIGLNLVFDNLKKNNIKEASELLKNMGFDVKGQLLKICFYTTNKNIRDFLVEILKEKNYFSEKEKRTIDFVHQVEKLYLGHFQENMQIQSFPRYWIKEQDFFKHKSVLDSFLKYDCKDEFNKQDHRIVLNWALWWDQLTQESILLPRISPEEYKSYSPEALWRYLTARHDWLNIILWIGEFQTQHSYASLQQNKWPLLTVDVINQNTSCNNYMRNEILDKLARNGVFLASELEDFECFLLRLSRIGGVIQDTLPVQNYKTKEGWDFHSQFILYCLEHSLQHLLYVYLDCYKLSPENCPFLEKKELHEAHPWFEFLVQCRQVASNLTDPKLIFQASLANAQILIPTNQASVSSMLLEGHTLLALATTMYSPGGVSQVVQNEENENCLKKVDPQLLKMALTPYPKLKTALFPQCTPPSVLPSDITIYHLIQSLSPFDPSRLFGWQSANTLAIGDAWSHLPHFSSPDLVNKYAIVERLNFAYYLHNGRPSFAFGTFLVQELIKSKTPKQLIQQVGNEAYVIGLSSFHIPSIGAACVCFLELLGLDSLKLRVDMKVANIILSYKCRNEDAQYSFIRESVAEKLSKLADGEKTTTEELLVLLEEGTWNSIQQQEIKRLSSESSSQWALVVQFCRLHNMKLSISYLRECAKANDWLQFIIHSQLHNYHPAEVKSLIQYFSPVIQDHLRLAFENLPSVPTSKMDSDQVCNKCPQELQGSKQEMTDLFEILLQCSEEPDSWHWLLVEAVKQQAPILSVLASCLQGASAISCLCVWIITSVEDNVATEAMGHIQDSTEDHTWNLEDLSVIWRTLLTRQKSKTLIRGFQLFFKDSPLLLVMEMYELCMFFRNYKEAEAKLLEFQKSLETLNTAATKVHPVIPAMWLEDQVCFLLKLMLQQCKTQYELGKLLQLFVEREHLFSDGPDVKKLCILCQILKDTSIAINHTIITSYSIENLQHECRSILERLQTDGQFALARRVAELAELPVDNLVIKEITQEMQTLKHIEQWSLKQARIDFWKKCHENFKKNSISSKAASSFFSTQAHVACEHPTGWSSMEERHLLLTLAGHWLAQEDVVPLDKLEELEKQIWLCRITQHTLGRNQEETEPRFSRQISTSGELSFDSLASEFSFSKLAALNTSKYLELNSLPSKETCENRLDWKEQESLNFLIGRLLDDGCVHEASRVCRYFHFYNPDVALVLHCRALASGEASMEDLHPEIHALLQSAELLEEEAPDIPLRRVHSTSSLDSQKFVTVPSSNEVVTNLEVLTSKCLHGKNYCRQVLCLYDLAKELGCSYTDVAAQDGEAMLRKILASQQPDRCKRAQAFISTQGLKPDTVAELVAEEVTRELLTSSQGTGALPPGDSQPL

SEQ ID NO: 20922 - protein, 489 aa, Homo sapiens
MKGRNWKTTKIFINNEWQNSESGRVFPVYNPATGEQVCEVQEADKADIDKAVQAARLAFSLGSVWRRMDASERGRLLDKLADLVERDRAVLATMESLNGGKPFLQAFYVDLQGVIKTFRYYAGWADKIHGMTIPVDGDYFTFTRHEPIGVCGQIIPWNFPLLMFAWKIAPALCCGNTVVIKPAEQTPLSALYMGALIKEAGFPPGVINILPGYGPTAGAAIASHIGIDKIAFTGSTEVGKLIQEAAGRSNLKRVTLELGGKSPNIIFADADLDYAVEQAHQGVFFNQGQCCTAGSRIFVEESIYEEFVRRSVERAKRRVVGSPFDPTTEQGPQIDKKQYNKILELIQSGVAEGAKLECGGKGLGRKGFFIEPTVFSNVTDDMRIAKEEIFGPVQEILRFKTMDEVIERANNSDFGLVAAVFTNDINKALTVSSAMQAGTVWINCYNALNAQSPFGGFKMSGNGREMGEFGLREYSEVKTVTVKIPQKNS

SEQ ID NO: 20923 - protein, 113 aa, Homo sapiens
MLNIWGVMLFIRLSWIVGEAGIGLGVLIILLSTMVTSITGLSTSAIATNGFVRGGGAYYLISRSLGPEFGGSIGLIFAFANAVAVAMYVVGFAETVVDLLKESDSMMVDPTND

SEQ ID NO: 20924 - protein, 190 aa, Homo sapiens
MTNLKDIGLYNLRNITRGAIRIEKNADLCYLSTVDWSLILDAVSNNYIVGNKPPKECGDLCPGTMEEKPMCEKTTINNEYNYRCWTTNRCQKMCPSTCGKRACTENNECCHPECLGSCSAPDNDTACVACRHYYYAGVCVPACPPNTYRFEGWRCVDRDFCANILSAESSDSEGFVIHDGECMQECPSGF

SEQ ID NO: 20925 - protein, 592 aa, Homo sapiens
MGDNPFQPKSNSKMAELFMECEEEELEPWQKKVKEVEDDDDDEPIFVGEISSSKPAISNILNRVNPSSYSRGLKNGALSRGITAAFKPTSQHYTNPTSNPVPASPINFHPESRSSDSSVIVQPFSKPGYITNSSRVVSNKSSELLFDLTQDTGLSHYQGGPTLSMAGMSESSFLSKRPSTSEVNNVNPKKPKPSESVSGANSSAVLPSVKSPSVTSSQAMLAKGTNTSSNQSKNGTPFPRACPKCNIHFNLLDPLKNHMKYCCPDMINNFLGLAKTEFSSTVNKNTTIDSEKGKLIMLVNDFYYGKHEGDVQEEQKTHTTFKCFSCLKILKNNIRFMNHMKHHLELEKQSSESWENHTTCQHCYRQFPTPFQLQCHIESTHTPHEFSTICKICELSFETEHVLLQHMKDNHKPGEMPYVCQVCNYRSSSFSDVETHFRTSHENTKNLLCPFCLKVIKIATPYMHHYMKHQKKGIHRCTKCRLQFLTCKEKMDHKTQHHRTFIKPKQLEGLPPGTKVTIRASVGPLQSGASPTPSISASASTLQLSPPRTKNITAKNPAKSNTSKPNTVKSNASKPNTSIVGAFTNALSVVPK

SEQ ID NO: 20926 - protein, 191 aa, Homo sapiens
MKVFCEVLEELYKKVLLGATLENDSHDYIFYLNPAVSDQDCSTATSLEWANTCGIQGRHQPISVGVAPIAVAPVCLKTNSQMSGSREVMLLQLTVIKVMTTRILSVKTEFHAKEQYRDVIKILLESAKVDSKLICMFQNSDKLLSHMAAQCLALLLYFQLREKITLSNSWIAFCQKNLSEYSESNKAIYCL

SEQ ID NO: 20927 - protein, 440 aa, Homo sapiens
MIIPSLEELDSLKYSDLQNLAKSLGLRANLRATKLLKALKGYIKHEARKGNENQDESQTSASSCDETEIQISNQEEAERQPLGHVTKTRRRCKTVRVDPDSQNHSEIKISNPTEFQNHEKQESQDLRATAKVPSPPDEHQEAENAVSSGNRDSKVPSEGKKSLYTDESSKPGKNKRTAITTPNFKKLHEAHFKEMESIDQYIERKKKHFEEHNSMNELKQQPINKGGVRTPVPPRGRLSVASTPISQRRSQGRSCGPASQSTLGLKGSLKRSAISAAKTGVRFSAATKDNEHKRSLTKTPARKSAHVTVSGGTPKGEAVLGTHKLKTITGNSAAVITPFKLTTEATQTPVSNKKPVFDLKASLSRPLNYEPHKGKLKPWGQSKENNYLNQHVNRINFYKKTYKQPHLQTKEEQRKKREQERKEKKAKVLGMRRGLILAED

SEQ ID NO: 20928 - protein, 1267 aa, Homo sapiens
MASISEPVTFREFCPLYYLLNAIPTKIQKGFRSIVVYLTALDTNGDYIAVGSSIGMLYLYCRHLNQMRKYNFEGKTESITVVKLLSCFDDLVAAGTASGRVAVFQLVSSLPGRNKQLRRFDVTGIHKNSITALAWSPNGMKLFSGDDKGKIVYSSLDLDQGLCNSQLVLEEPSSIVQLDYSQKVLLVSTLQRSLLFYTEEKSVRQIGTQPRKSTGKFGACFIPGLCKQSDLTLYASRPGLRLWKADVHGTVQATFILKDAFAGGVKPFELHPRLESPNSGSCSLPERHLGLVSCFFQEGWVLSWNEYSIYLLDTVNQATVAGLEGSGDIVSVSCTENEIFFLKGDRNIIRISSRPEGLTSTVRDGLEMSGCSERVHVQQAEKLPGATVSETRLRGSSMASSVASEPRSRSSSLNSTDSGSGLLPPGLQATPELGKGSQPLSQRFNAISSEDFDQELVVKPIKVKRKKKKKKTEGGSRSTCHSSLESTPCSEFPGDSPQSLNTDLLSMTSSVLGSSVDQLSAESPDQESSFNGEVNGVPQENTDPETFNVLEVSGSMPDSLAEEDDIRTEMPHCHHAHGRELLNGAREDVGGSDVTGLGDEPCPADDGPNSTQLPFQEQDSSPGAHDGEDIQPIGPQSTFCEVPLLNSLTVPSSLSWAPSAEQWLPGTRADEGSPVEPSQEQDILTSMEASGHLSTNLWHAVTDDDTGQKEIPISERVLGSVGGQLTPVSALAASTHKPWLEQPPRDQTLTSSDEEDIYAHGLPSSSSETSVTELGPSCSQQDLSRLGAEDAGLLKPDQFAESWMGYSGPGYGILSLVVSEKYIWCLDYKGGLFCSALPGAGLRWQKFEDAVQQVAVSPSGALLWKIEQKSNRAFACGKVTIKGKRHWYEALPQAVFVALSDDTAWIIRTSGDLYLQTGLSVDRPCARAVKVDCPYPLSQITARNNVVWALTEQRALLYREGVSSFCPEGEQWKCDIVSERQALEPVCITLGDQQTLWALDIHGNLWFRTGIISKKPQGDDDHWWQVSITDYVVFDQCSLFQTIIHATHSVATAAQAPVEKVADKLRMAFWSQQLQCQPSLLGVNNSGVWISSGKNEFHVAKGSLIGTYWNHVVPRGTASATKWAFVLASAAPTKEGSFLWLCQSSKDLCSVSAQSAQSRPSTVQLPPEAEMRAYAACQDALWALDSLGQVFIRTLSKSCPTGMHWTRLDLSQLGAVKLTSLACGNQHIWACDSRGGVYFRVGTQPLNPSLMLPAWIMIEPPVQVSRS

SEQ ID NO: 20929 - protein, 1104 aa, Homo sapiens
MASELGARDDGGCTELAKPLYLQYLERALRLDHFLRQTSAIFNRNISSDDSEDGLDDSNPLLPQSGDPLIQVKEEPPNSLLGETSGAGSSGMLNTYSLNGVLQSESKCDKGNLYNFSKLKKSRKWLKSILLSDESSEADSQSEDDDEEELNLSREELHNMLRLHKYKKLHQNKYSKDKELQQYQYYSAGLLSTYDPFYEQQRHLLGPKKKKFKEEKKLKAKLKKVKKKRRRDEELSSEESPRRHHHQTKVFAKFSHDAPPPGTKKKHLSIEQLNARRRKVWLSIVKKELPKANKQKASARNLFLTNSRKLAHQCMKEVRRAALQAQKNCKETLPRARRLTKEMLLYWKKYEKVEKEHRKRAEKEALEQRKLDEEMREAKRQQRKLNFLITQTELYAHFMSRKRDMGHDGIQEEILRKLEDSSTQRQIDIGGGVVVNITQEDYDSNHFKAQALKNAENAYHIHQARTRSFDEDAKESRAAALRAANKSGTGFGESYSLANPSIRAGEDIPQPTIFNGKLKGYQLKGMNWLANLYEQGINGILADEMGLGKTVQSIALLAHLAERENIWGPFLIISPASTLNNWHQEFTRFVPKFKVLPYWGNPHDRKVIRRFWSQKTLYTQDAPFHVVITSYQLVVQDVKYFQRVKWQYMVLDEAQALKSSSSVRWKILLQFQCRNRLLLTGTPIQNTMAELWALLHFIMPTLFDSHEEFNEWFSKDIESHAENKSAIDENQLSRLHMILKPFMLRRIKKDVENELSDKIEILMYCQLTSRQKLLYQALKNKISIEDLLQSSMGSTQQAQNTTSSLMNLVMQFRKVCNHPELFERQETWSPFHISLKPYHISKFIYRHGQIRVFNHSRDRWLRVLSPFAPDYIQRSLFHRKGINEESCFSFLRFIDISPAEMANLMLQGLLARWLALFLSLKASYRLHQLRSWGAPEGESHQRYLRNKDFLLGVNFPLSFPNLCSCPLLKSLVFSSHCKAVSGYSDQVVHQRRSATSSLRRCLLTELPSFLCVASPRVTAVPLDSYCNDRSAEYERRVLKEGGSLAAKQCLLNGAPELAADWLNRRSQFFPEPAGGLWSIRPQNGWSFIRIPGIHGLQEAYLHEA

SEQ ID NO: 20930 - protein, 717 aa, Homo sapiens
MFCSEKKLREVERIVKANDREYNEKFQYADNRIHTSKYNILTFLPINLFEQFQRVANAYFLCLLILQLIPEISSLTWFTTIVPLVLVITMTAVKDATDDYFRHKSDNQVNNRQSEVLINSKLQNEKWMNVKVGDIIKLENNQFVAADLLLLSSSEPHGLCYVETAELDGETNLKVRHALSVTSELGADISRLAGFDGIVVCEVPNNKLDKFMGILSWKDSKHSLNNEKIILRGCILRNTSWCFGMVIFAGPDTKLMQNSGKTKFKRTSIDRLMNTLVLWIFGFLICLGIILAIGNSIWESQTGDQFRTFLFWNEGEKSSVFSGFLTFWSYIIILNTVVPISLYVSVEVIRLGHSYFINWDRKMYYSRKAIPAVARTTTLNEELGQIEYIFSDKTGTLTQNIMTFKRCSINGRIYGEVHDDLDQKTEITQEKEPVDFSVKSQADREFQFFDHHLMESIKMGDPKVHEFLRLLALCHTVMSEENSAGELIYQVQSPDEGALVTAARNFGFIFKSRTPETITIEELGTLVTYQLLAFLDFNNTRKRMSVIVRNPEGQIKLYSKGADTILFEKLHPSNEVLLSLTSDHLSEFAGEGLRTLAIAYRDLDDKYFKEWHKMLEDANAATEERDERIAGLYEEIERDLMLLGATAVEDKLQEGVIETVTSLSLANIKIWVLTGDKQETAINIGYACNMLTDDMNDVFVIAGNNAVEVREELRLMP

SEQ ID NO: 20931 - protein, 169 aa, Homo sapiens
NVVALDTEVASNRIYWSDLSQRMICSTQLDRAHGVSSYDTVISRDIQAPDGLAVDWIHSNIYWTDSVLGTVSVADTKGVKRKTLFRENGSKPRAIVVDPVHGFMYWTDWGTPAKIKKGGLNGVDIYSLVTENIQWPNGITLGQSILDRYHQRSHFQCQPPHRFRCQLVG

SEQ ID NO: 20932 - protein, 906 aa, Homo sapiens
MHPPETTTKMASVRFMVTPTKIDDIPGLSDTSPDLSSRSSSRVRFSSRESVPETSRSEPMSEMSGATTSLATVALDPPSDRTSHPQDVIEDLSQNSITGEHSQLLDDGHKKARNAYLNNSNYEEGDEYFDKNLALFEEEMDTRPKVSSLLNRMANYTNLTQGAKEHEEAENITEGKKKPTKTPQMGTFMGVYLPCLQNIFGVILFLRLTWVVGTAGVLQAFAIVLICCCCTMLTAISMSAIATNGVVPAGGSYFMISRALGPEFGGAVGLCFYLGTTFAAAMYILGAIEIFLVYIVPRAAIFHSDDALKESAAMLNNMRVYGTAFLVLMVLVVFIGVRYVNKFASLFLACVIVSILAIYAGAIKSSFAPPHFPVCMLGNRTLSSRHIDVCSKTKEINNMTVPSKLWGFFCNSSQFFNATCDEYFVHNNVTSIQGIPGLASGIITENLWSNYLPKGEIIEKPSAKSSDVLGSLNHEYVLVDITTSFTLLVGIFFPSVTGIMAGSNRSGDLKDAQKSIPIGTILAILTTSFVYLSNVVLFGACIEGVVLRDKFGDAVKGNLVVGTLSWPSPWVIVIGSFFSTCGAGLQSLTGAPRLLQAIAKDNIIPFLRVFGHSKANGEPTWALLLTAAIAELGILIASLDLVAPILSMFFLMCYLFVNLACALQTLLRTPNWRPRFRYYHWALSFMGMSICLALMFISSWYYAIVAMVIAGMIYKYIEYQGAEKEWGDGIRGLSLSAARFALLRLEEGPPHTKNWRPQLLVLLKLDEDLHVKHPRLLTFASQLKAGKGLTIVGSVIVGNFLENYGEALAAEQTIKHLMEAEKVKGFCQLVVAAKLREGISHLIQSCGLGGMKHNTVVMGWPNGWRQSEDARAWKTFIAMWSNFLRATLMCGGLCMMGGCLCYYHSY

SEQ ID NO: 20933 - protein, 158 aa, Homo sapiens
MGDNPFQPKSNSKMAELFMECEEEELEPWQKKVKEVEDDDDDEPIFVGEISSSKPAISNILNRVNPSSYSRGLKNGALSRGITAAFKPTSQHYTNPTSNPVPASPINFHPESRSSDSSVIVQPFSKPVSVSKTIRPAQGSIGCCLSISTVPSYNSGLS

SEQ ID NO: 20934 - protein, 263 aa, Homo sapiens
MAHRKLESVGSGMLDHRVRPGPVPHSQEPESEDMELPLEGYVPEGLELAALRPESPAPEEQECHNHSPDGDSSSDYVNNTSEEEDYDEGLPEEEEGITYYIRYCPEDDSYLEGMDCNGEEYLAHSAHPVDTDECQEAVEEWTDSAGPHPHGHEAEGSQDYPDGQLPIPEDEPSVLEAHDQEEDGHYCASKEGYQDYYPEEANGNTGASPYRLRRGDGDLEDQEEDIDQIVAEIKMSLSMTSITSASEASPEHGPEPGPEDSVE

SEQ ID NO: 20935 - protein, 1471 aa, Homo sapiens
EKCAQDLGSTSKAVGSSMAQLLTCAAQGNEHYTGVAARETAQALKTLAQAARGVAASTTDPAAAHAMLDSARDVMEGSAMLIQEAKQALIAPGDAERQQRLAQVAKAVSHSLNNCVNCLPGQKDVDVALKSIGESSKKLLVDSLPPSTKPFQEAQSELNQAAADLNQSAGEVVHATRGQSGELAAASGKFSDDFDEFLDAGIEMAGQAQTKEDQIQVIGNLKNISMASSKLLLAAKSLSVDPGAPNAKNLLAAAARAVTESINQLITLCTQQAPGQKECDNALRELETVKGMLDNPNEPVSDLSYFDCIESVMENSKVLGESMAGISQNAKTGDLPAFGECVGIASKALCGLTEAAAQAAYLVGISDPNSQAGHQGLVDPIQFARANQAIQMACQNLVDPGSSPSQVLSAATIVAKHTSALCNACRIASSKTANPVAKRHFVQSAKEVANSTANLVKTIKALDGDFSEDNRNKCRIATAPLIEAVENLTAFASNPEFVSIPAQISSEGSQAQEPILVSAKTMLESSSYLIRTARSLAINPKDPPTWSVLAGHSHTVSDSIKSLITSIRDKAPGQRECDYSIDGINRCIRDIEQASLAAVSQSLATRDDISVEALQEQLTSVVQEIGHLIDPIATAARGEAAQLGHKVTQLASYFEPLILAAVGVASKILDHQQQMTVLDQTKTLAESALQMLYAAKEGGGNPKAQHTHDAITEAAQLMKEAVDDIMVTLNEAASEVGLVGGMVDAIAEAMSKLDEGTPPEPKGTFVDYQTTVVKYSKAIAVTAQEMMTKSVTNPEELGGLASQMTSDYGHLAFQGQMAAATAEPEEIGFQIRTRVQDLGHGCIFLVQKAGALQVCPTDSYTKRELIECARAVTEKVSLVLSALQAGNKGTQACITAATAVSGIIADLDTTIMFATAGTLNAENSETFADHRENILKTAKALVEDTKLLVSGAASTPDKLAQAAQSSAATITQLAEVVKLGAASLGSDDPETQVVLINAIKDVAKALSDLISATKGAASKPVDDPSMYQLKGAAKVMVTNVTSLLKTVKAVEDEATRGTRALEATIECIKQELTVFQSKDVPEKTSSPEESIRMTKGITMATAKAVAAGNSCRQEDVIATANLSRKAVSDMLTACKQASFHPDVSDEVRTRALRFGTECTLGYLDLLEHVLVILQKPTPEFKQQLAAFSKRVAGAVTELIQAAEAMKGTEWVDPEDPTVIAETELLGAAASIEAAAKKLEQLKPRAKPKQADETLDFEEQILEAAKSIAAATSALVKSASAAQRELVAQGKVGSIPANAADDGQWSQGLISAARMVAAATSSLCEAANASVQGHASEEKLISSAKQVAASTAQLLVACKVKADQDSEAMRRLQVMVTDAGGKILLLERAAGNAVKRASDNLVRAAQKAAFGKADDDDVVVKTKFVGGIAQIIAAQEEMLKKERELEEARKKLAQIRQQQYKFLPTELREDEG

SEQ ID NO: 20936 - protein, 826 aa, Homo sapiens
MSSEEDKSVEQPQPPPPPPEEPGAPAPSPAAADKRPRGRPRKDGASPFQRARKKPRSRGKTAVEDEDSMDGLETTETETIVETEIKEQSAEEDAEAEVDNSKQLIPTLQRSVSEESANSLVSVGVEAKISEQLCAFCYCGEKSSLGQGDLKQFRITPGFILPWRNQPSNKKDIDDNSNGTYEKMQNSAPRKQRGQRKERSPQQNIVSCVSVSTQTASDDQAGKLWDELSLVGLPDAIDIQALFDSTGTCWAHHRCVEWSLGVCQMEEPLLVNVDKAVVSGSTERCAFCKHLGATIKCCEEKCTQMYHYPCAAGAGTFQDFSHIFLLCPEHIDQAPERSKEDANCAVCDSPGDLLDQFFCTTCGQHYHGMCLDIAVTPLKRAGWQCPECKVCQNCKQSGEDSKMLVCDTCDKGYHTFCLQPVMKSVPTNGWKCKNCRICIECGTRSSSQWHHNCLICDNCYQQQDNLCPFCGKCYHPELQKDMLHCNMCKRWVHLECDKPTDHELDTQLKEEYICMYCKHLGAEMDRLQPGEEVEIAELTTDYNNEMEVEGPEDQMVFSEQAANKDVNGQESTPGIVPDAVQVHTEEQQKSHPSESLDTDSLLIAVSSQHTVNTELEKQISNEVDSEDLKMSSEVKHICGEDQIEDKMEVTENIEVVTHQITVQQEQLQLLEEPETVVSREESRPPKLVMESVTLPLETLVSPHEESISLCPEEQLVIERLQGEKEQKENSELSTGLMDSEMTPTIEGCVKDVSYQGGKSIKLSSETESSFSSSADISKADVSSSPTPSSDLPSHDMLHNYPSALSSSAGNIMPTTYISVTPKIGMG

SEQ ID NO: 20937 - protein, 230 aa, Homo sapiens
MSTVHEILCKLSLEGDHSTPPSAYGSVKAYTNFDAERDALNIETAIKTKGVDEVTIVNILTNRSNAQRQDIAFAYQRRTKKELASALKSALSGHLETVILGLLKTPAQYDASELKASMKGLGTDEDSLIEIICSRTNQELQEINRVYKEMYKTDLEKDIISDTSGDFRKLMVALAKGRRAEDGSVIDYELIDQDARDLYDAGVKRKGTDVPKWISIMTERSVPHLQKGGI

SEQ ID NO: 20938 - protein, 772 aa, Homo sapiens
MPPPPPLSCLRGLQAPHQPGQPGFKFTVAESCDRIKDEFQFLQAQYHSLKVEYDKLANEKTEMQRHYVMYYEMSYGLNIEMHKQTEIAKRLNTILAQIMPFLSQEHQQQVAQAVERAKQVTMTELNAIIGQQLQAQHLSHATHGPPVQLPPHPSGLQPPGIPPVTGSSSGLLALGALGSQAHLTVKDEKNHHELDHRERESSANNSVSPSESLRASEKHRGSADYSMEAKKRKAEEKDSLSRYDSDGDKSDDLVVDVSNEDPATPRVSPAHSPPENGLDKARSLKKDAPTSPASVASSSSTPSSKTKDLGHNDKSSTPGLKSNTPTPRNDAPTPGTSTTPGLRSMPGKPPGMDPIGIMASALRTPISITSSYAAPFAMMSHHEMNGSLTSPGAYAGLHNIPPQMSAAAAAAAAAYGRSPMVGFDPHPPMRATGLPSSLASIPGGKPAYSFHVSADGQMQPVPFPHDALAGPGIPRHARQINTLSHGEVVCAVTISNPTRHVYTGGKGCVKIWDISQPGSKSPISQLDCLNRDNYIRSCKLLPDGRTLIVGGEASTLTIWDLASPTPRIKAELTSSAPACYALAISPDAKVCFSCCSDGNIAVWDLHNQTLVRQFQGHTDGASCIDISHDGTKLWTGGLDNTVRSWDLREGRQLQQHDFTSQIFSLGYCPTGEWLAVGMESSNVEVLHHTKPDKYQLHLHESCVLSLKFAYCGKWFVSTGKDNLLNAWRTPYGASIFQSKESSSVLSCDISADDKYIVTGSGDKKATVYEVIY

SEQ ID NO: 20939 - protein, 100 aa, Homo sapiens
MCQRCGLKLIVIICFFVQLARDLLHPSLEEEKKKHKKKRLVQSPNSYFMDVKCPGCYKITTVFSHAQTVVLCVGCSTVLCQPTGGKARLTEGCSFRRKQH

SEQ ID NO: 20940 - protein, 1745 aa, Homo sapiens
MKLNPQQAPLYGDCVVTVLLAEEDKAEDDVVFYLVFLGSTLRHCTSTRKVSSDTLETIAPGHDCCETVKVQLCASKEGLPVFVVAEEDFHFVQDEAYDAAQFLATSAGNQQALNFTRFLDQSGPPSGDVNSLDKKLVLAFRHLKLPTEWNVLGTDQSLHDAGPRETLMHFAVRLGLLRLTWFLLQKPGGRGALSIHNQEGATPVSLALERGYHKLHQLLTEENAGEPDSWSSLSYEIPYGDCSVRHHRELDIYTLTSESDSHHEHPFPGDGCTGPIFKLMNIQQQLMKTNLKQMDSLMPLMMTAQDPSSAPETDGQFLPCAPEPTDPQRLSSSEETESTQCCPGSPVAQTESPCDLSSIVEEENTDRSCRKKNKGVERKGEEVEPAPIVDSGTVSDQDSCLQSLPDCGVKGTEGLSSCGNRNEETGTKSSGMPTDQESLSSGDAVLQRDLVMEPGTAQYSSGGELGGISTTNVSTPDTAGEMEHGLMNPDATVWKNVLQGGESTKERFENSNIGTAGASDVHVTSKPVDKISVPNCAPAASSLDGNKPAESSLAFSNEETSTEKTAETETSRSREESADAPVDQNSVVIPAAAKDKISDGLEPYTLLAAGIGEAMSPSDLALLGLEEDVMPHQNSETNSSHAQSQKGKSSPICSTTGDDKLCADSACQQNTVTSSGDLVAKLCDNIVSESESTTARQPSSQDPPDASHCEDPQAHTVTSDPVRDTQERADFCPFKVVDNKGQRKDVKLDKPLTNMLEVVSHPHPVVPKMEKELVPDQAVISDSTFSLANSPGSESVTKDDALSFVPSQKEKGTATPELHTATDYRDGPDGNSNEPDTRPLEDRAVGLSTSSTAAELQHGMGNTSLTGLGGEHEGPAPPAIPEALNIKGNTDSSLQSVGKATLALDSVLTEEGKLLVVSESSAAQEQDKDKAVTCSSIKENALSSGTLQEEQRTPPPGQDTQQFHEKSISADCAKDKALQLSNSPGASSAFLKAETEHNKEVAPQVSLLTQGGAAQSLVPPGASLATESRQEALGAEHNSSALLPCLLPDGSDGSDALNCSQPSPLDVGVKNTQSQGKTSACEVSGDVTVDVTGVNALQGMAEPRRENISHNTQDILIPNVLLSQEKNAVLGLPVALQDKAVTDPQGVGTPEMIPLDWEKGKLEGADHSCTMGDAEEAQIDDEAHPVLLQPVAKELPTDMELSAHDDGAPAGVREVMRAPPSGRERSTPSLPCMVSAQDAPLPKGADLIEEAASRIVDAVIEQVKAAGALLTEGEACHMSLSSPELGPLTKGLESAFTEKVSTFPPGESLPMGSTPEEATGSLAGCFAGREEPEKIILPVQGPEPAAEMPDVKAEDEVDFRASSISEEVAVGSIAATLKMKQGPMTQAINRENWCTIEPCPDAASLLASKQSPECENFLDVGLGRECTSKQGVLKRESGSDSDLFHSPSDDMDSIIFPKPEEEHLACDITGSSSSTDDTASLDRHSSHGSDVSLSQILKPNRSRDRQSLDGFYSHGMGAEGRESESEPADPGDVEEEEMDSITEVPANCSVLRSSMRSLSPFRRHSWGPGKNAASDAEMNHRSFSLEGLTGGAGVGNKPSSSLEVSSANAEELRHPFSGEERVDSLVSLSEEDLESDQREHRMFDQQICHRSKQQGFNYCTSAISSPLTKSISLMTISHPGLDNSRPFHSTFHNTSANLTESITEENYNFLPHSPSKKDSEWKSGTKVSRTFSYIKNKMSSSKKSK

SEQ ID NO: 20941 - protein, 326 aa, Homo sapiens
MVQLEQKVSKRMLAGGVRSMPSPLLACWQPILLLVLGSVLSGSATGCPPRCECSAQDRAVLCHRKRFVAVPEGIPTETRLLDLGKNRIKTLNQDEFASFPHLEELELNENIVSAVEPGAFNNLFNLRTLGLRSNRLKLIPLGVFTGLSNLTKLDISENKIVILLDYMFQDLYNLKSLEVGDNDLVYISHRAFSGLNSLEQLTLEKCNLTSIPTEALSHLHGLIVLRLRHLNINAIRDYSFKRLYRLKVLEISHWPYLDTMTPNCLYGLNLTSLSITHCNLTAVPYLAVRHLVYLRFLNLSYNPISTIEGSMLHELLRLQEIQLVGG

SEQ ID NO: 20942 - protein, 157 aa, Homo sapiens
MALVFEKCELATCTPREPGVAGGDVCSSDSFNEDIAVFAKQVRAEKPLFSSNPELDNLMIQAIQVLRFHLLELEKVHELCDNFCHRYISCLKGKMPIDLVIDERDGSSKSDHEELSGSSTNLADHNPSSWRDHDDATSTHSAGTPGPSSGGHASQSG

SEQ ID NO: 20943 - protein, 133 aa, Homo sapiens
KEDSSFVSIYTHLWENVPRIFEALLIMESKLKEYSLILQNHTSEIFKWKSMISETSSYRKLERYGEFLKKYHKKKKIMLSDEMETEKNIEGCSFTGFKANELTQLPRHLDAEQIYLFILKAHNFDVCKYFILL

SEQ ID NO: 20944 - protein, 477 aa, Homo sapiens
MAQRYDELPHYGGMDGVGVPASMYGDPHAPRPIPPVHHLNHGPPLHATQHYGAHAPHPNVMPASMGSAVNDALKRDKDAIYGHPLFPLLALVFEKCELATCTPREPGVAGGDVCSSDSFNEDIAVFAKQVRAEKPLFSSNPELDNLMIQAIQVLRFHLLELEKVHELCDNFCHRYISCLKGKMPIDLVIDERDGSSKSDHEELSGSSTNLADHNPSSWRDHDDATSTHSAGTPGPSSGGHASQSGDNSSEQGDGLDNSVASPGTGDDDDPDKDKKRQKKRGIFPKVATNIMRAWLFQHLTHPYPSEEQKKQLAQDTGLTILQVNNWFINARRRIVQPMIDQSNRAGFLLDPSVSQGAAYSPEGQPMGSFVLDGQQHMGIRPAGLQSMPGDYVSQGGPMGMSMAQPSYTPPQMTPHPTQLRHGPPMHSYLPSHPHHPAMMMHGGPPTHPGMTMSAQSPTMLNSVDPNVGGQVMDIHAQ

SEQ ID NO: 20945 - protein, 775 aa, Homo sapiens
MRTSLQAVALWGQKAPPHSITAIMITDDQRTIVTGSQEGQLCLWNLSHELKISAKELLFGHSASVTCLARARDFSKQPYIVSAAENGEMCVWNVTNGQCMEKATLPYRHTAICYYHCSFRMTGEGWLLCCGEYQDVLIIDAKTLAVVHSFRSSQFPDWINCMCIVHSMRIQEDSLLVVSVAGELKVWDLSSSINSIQEKQDVYEKESKFLESLNCQTIRFCTYTERLLLVVFSKCWKVYDYCDFSLLLTEVSRNGQFFAGGEVIAAHRILIWTEDGHSYIYQLLNSGLSKSIYPADGRVLKETIYPHLLCSTSVQENKEQSRPFVMGYMNERKEPFYKVLFSGEVSGRITLWHIPDVPVSKFDGSPREIPVTATWTLQDNFDKHDTMSQSIIDYFSGLKDGAGTAVVTSSEYIPSLDKLICGCEDGTIIITQALNAAKARLLEGGSLVKDSPPHKVLKGHHQSVTSLLYPHGLSSKLDQSWMLSGDLDSCVILWDIFTEEILHKFFLEAGPVTSLLMSPEKFKLRGEQIICCVCGDHSVALLHLEGKSCLLHARKHLFPVRMIKWHPVENFLIVGCADDSVYIWEIETGTLERHETGERARIILNCCDDSQLVKSVLPIASETLKHKSIEQRSSSPYQLGPLPCPGLQVESSCKVTDAKFCPRPFNVLPVKTKWSNVGFHILLFDLENLVELLLPTPLSDVDSSSSFYGGEVLRRAKSTVEKKTLTLRKSKTACGPLSAEALAKPITESLAQGDNTIKFSEENDGIKRQKKMKIS

SEQ ID NO: 20946 - protein, 614 aa, Homo sapiens
MLAGGVRSMPSPLLACWQPILLLVLGSVLSGSATGCPPRCECSAQDRAVLCHRKRFVAVPEGIPTETRLLDLGKNRIKTLNQDEFASFPHLEELELNENIVSAVEPGAFNNLFNLRTLGLRSNRLKLIPLGVFTGLSNLTKLDISENKIVILLDYMFQDLYNLKSLEVGDNDLVYISHRAFSGLNSLEQLTLEKCNLTSIPTEALSHLHGLIVLRLRHLNINAIRDYSFKRLYRLKVLEISHWPYLDTMTPNCLYGLNLTSLSITHCNLTAVPYLAVRHLVYLRFLNLSYNPISTIEGSMLHELLRLQEIQLVGGQLAVVEPYAFRGLNYLRVLNVSGNQLTTLEESVFHSVGNLETLILDSNPLACDCRLLWVFRRRWRLNFNRQQPTCATPEFVQGKEFKDFPDVLLPNYFTCRRARIRDRKAQQVFVDEGHTVQFVCRADGDPPPAILWLSPRKHLVSAKSNGRLTVFPDGTLEVRYAQVQDNGTYLCIAANAGGNDSMPAHLHVRSYSPDWPHQPNKTFAFISNQPGEGEANSTRATVPFPFDIKTLIIATTMGFISFLGVVLFCLVLLFLWSRGKGNTKHNIEIEYVPRKSDAGISSADAPRKFNMKMI

SEQ ID NO: 20947 - protein, 1101 aa, Homo sapiens
MDRAPTEQNVKLSAEVEPFIPQKKSPDTFMIPMALPNDNGSVSGVEPTPIPSYLITCYPFVQENQSNRQFPLYNNDIRWQQPNPNPTGPYFAYPIISAQPPVSTEYTYYQLMPAPCAQVMGFYHPFPTPYSNTFQAANTVNAITTECTERPSQLGQVFPLSSHRSRNSNRGSVVPKQQLLQQHIKSKRPLVKNVATQKETNAAGPDSRSKIVLLVDASQQTDFPSDIANKSLSETTATMLWKSKGRRRRASHPTAESSSEQGASEADIDSDSGYCSPKHSNNQPAAGALRNPDSGTMNHVESSMCAGGVNWSNVTCQATQKKPWMEKNQTFSRGGRQTEQRNNSQVGFRCRGHSTSSERRQNLQKRPDNKHLSSSQSHRSDPNSESLYFEDEDGFQELNENGNAKDENIQQKLSSKVLDDLPENSPINIVQTPIPITTSVPKRAKSQKKKALAAALATAQEYSEISMEQKKLQEALSKAAGKKNKTPVQLDLGDMLAALEKQQQAMKARQITNTRPLSYTVVTAASFHTKDSTNRKPLTKSQPCLTSFNSVDIASSKAKKGKEKEIAKLKRPTALKKVILKEREEKKGRLTVDHNLLGSEEPTEMHLDFIDDLPQEIVSQEDTGLSMPSDTSLSPASQNSPYCMTPVSQGSPASSGIGSPMASSTITKIHSKRFREYCNQVLCKEIDECVTLLLQELVSFQERIYQKDPVRAKARRRLVMGLREVTKHMKLNKIKCVIISPNCEKIQSKGGLDEALYNVIAMAREQEIPFVFALGRKALGRCVNKLVPVSVVGIFNYFGAESLFNKLVELTEEARKAYKDMVAAMEQEQAEEALKNVKKVPHHMGHSRNPSAASAISFCSVISEPISEVNEKEYETNWRNMVETSDGLEASENEKEVSCKHSTSEKPSKLPFDTPPIGKQPSLVATGSTTSATSAGKSTASDKEEVKPDDLEWASQQSTETGSLDGSCRDLLNSSITSTTSTLVPGMLEEEEDEDEEEEEDYTHEPISVEVQLNSRIESWVSETQRTMETLQLGKTLNGSEEDNVEQSGEEEAEAPEVLEPGMDSEAWTADQQASPGQQKSSNCSSLNKEHSDSNYTTQTT

SEQ ID NO: 20948 - protein, 256 aa, Homo sapiens
MSTVHEILCKLSLEGDHSTPPSAYGSVKAYTNFDAERDALNIETAIKTKGVDEVTIVNILTNRSNAQRQDIAFAYQRRTKKELASALKSALSGHLETVILGLLKTPAQYDASELKASMKGLGTDEDSLIEIICSRTNQELQEINRVYKEMYKTDLEKDIISDTSGDFRKLMVALAKGRRAEDGSVIDYELIDQDARDLYDAGVKRKGTDVPKWISIMTERSVPHLQKVFDRYKSYSPYDMLESIRKEVKGDLENAF

SEQ ID NO: 20949 - protein, 564 aa, Homo sapiens
MMNCWFSCTPKNRHAADWNKYDDRLMKAAERGDVEKVTSILAKKGVNPGKLDVEGRSVFHVVTSKGNLECLNAILIHGVDITTSDTAGRNALHLAAKYGHALCLQKLLQYNCPTEHADLQGRTALHDAAMADCPSSIQLLCDHGASVNAKDVDGRTPLVLATQMSRPTICQLLIDRGADVNSRDKQNRTALMLGCEYGCRDAVEVLIKNGADISLLDALGHDSSYYARIGDNLDILTLLKTASENTNKGRELWKKGPSLQQRNLTHMQDEVNVKSHQREHQNIQDLEIENEDLKERLRKIQQEQRILLDKVNGLQLQLNEREKLKSLLAAKEKQHEESLRTIEALKNRFKYFESDHLGSGSHFSNRKEDMLLKQGQMYMADSQCTSPGIPAHMQSRSMLRPLELSLPSQTSYSENEILKKELEAMRTFCESAKQDRLKLQNELAHKVAECKALALECERVKEDSDEQIKQLEDALKDVQKRMYESEGKVKQMQTHFLALKEHLTSEAASGNHRLTEELKDQLKDLKVKYEGASAEVGKLRNQIKQNEMIVEEFKRDEGKLIEEN

SEQ ID NO: 20950 - protein, 995 aa, Homo sapiens
MSQWTPEYNELYTLKVDMKSEIPSDAPKTQESLKGILLHPEPIGAAKSFPAGVEMINSKVGNEFSHLCDDSQKQEKEMNGNQQEQEKSLVVRKKRKSQQAGPSYVQNCVKENQGILGLRQHLGTPSDEDNDSSFSDCLSSPSSSLHFGDSDTVTSDEDKEVSVRHSQTILNAKSRSHSARSHKWPRTETESVSGLLMKRPCLHGSSLRRLPCRKRFVKNNSSQRTQKQKERILMQRKKREVLARRKYALLPSSSSSSENDLSSESSSSSSTEGEEDLFVSASENHQNNPAVPSGSIDEDVVVIEASSTPQVTANEEINVTSTDSEVEIVTVGESYRSRSTLGHSRSHWSQGSSSHASRPQEPRNRSRISTVIQPLRQNAAEVVDLTVDEDEPTVVPTTSARMESQATSASINNSNPSTSEQASDTASAVTSSQPSTVSETSATLTSNSTTGTSIGDDSRRTTSSAVTETGPPAMPRLPSCCPQHSPCGGSSQNHHALGHPHTSCFQQHGHHFQHHHHHHHTPHPAVPVSPSFSDPACPVERPPQVQAPCGANSSSGTSYHEQQALPVDLSNSGIRSHGSGSFHGASAFDPCCPVSSSRAAIFGHQAAAAAPSQPLSSIDGYGSSMVAQPQPQPPPQPSLSSCRHYMPPPYASLTRPLHHQASACPHSHGNPPPQTQPPPQVDYVIPHPVHAFHSQISSHATSHPVAPPPPTHLASTAAPIPQHLPPTHQPISHHIPATAPPAQRLHPHEVMQRMEVQRRRMMQHPTGLFVFCVSRRAHERPPPHPHRMHPNYGHGHHIHVPQTMSSHPRQAPERSAWELGIEAGVTAATYTPGALHPHLAHYHAPPRLHHLQLGALPLMVPDMAGYPHIRYISSGLDGTSFRGPFRGNFEELIHLEERLGNVNRGASQGTIERCTYPHKYKKRKLHCKQDGEEGTEEDTEEKCTICLSILEEGEDVRRLPCMHLFHQVCVDQWLITNKKCPICRVDIEAQLPSES

SEQ ID NO: 20951 - protein, 666 aa, Homo sapiens
MNPQQQRMAAIGTDKELSDLLDFSAMFSPPVNSGKTRPTTLGSSQFSGSGTIHEMKQLNSKARQKGQRIKGFTDSPHYSDHLNDSRLGAHEGLSPTPFMNSNLMGKTSERGSFSLYSRDTGLPGCQSSLLRQDLGLGSPAQLSSSGKPGTAYYSFSATSSRRRPLHDSAALDPLQAKKVRKVPPGLPSSVYAPSPNSDDFNRESPSYPSPKPPTSMFASTFFMQDGTHNSSDLWSSSNGMSQPGFGGILGTSTSHMSQSSSYGNLHSHDRLSYPPHSVSPTDINTSLPPMSSFHRGSTSSSPYVAASHTPPINGSDSILGTRGNAAGSSQTGDALGKALASIYSPDHTSSSFPSNPSTPVGSPSPLTGTSQWPRPGGQAPSSPSYENSLHSLKNRVEQQLHEHLQDAMSFLKDVCEQSRMEDRLDRLDDAIHVLRNHAVGPSTSLPAGHSDIHSLLGPSHNAPIGSLNSNYGGSSLVASSRSASMVGTHREDSVSLNGNHSVLSSTVTTSSTDLNHKTQENYRGGLQSQSGTVVTTEIKTENKEKDENLHEPPSSDDMKSDDESSQKDIKVSSRGRTSSTNEDEDLNPEQKIEREKERRMANNARERLRVRDINEAFKELGRMCQLHLKSEKPQTKLLILHQAVAVILSLEQQVRERNLNPKAACL

SEQ ID NO: 20952 - protein, 147 aa, Homo sapiens
MQELHLLWWALLLGLAQACPEPCDCGEKYGFQIADCAYRDLESVPPGFPANVTTLSLSANRLPGLPEGAFREVPLLQSLWLAHNEIRTVAAGALASLSHLKSLDLSHNLISDFAWSDLHNLSALQLLKMDSNELTFIPRDAFRSLRA

SEQ ID NO: 20953 - protein, 356 aa, Homo sapiens
MADEGKSYSEHDDERVNFPQRKKKGRGPFRWKYGEGNRRSGRGGSGIRSSRLEEDDGDVAMSDAQDGPRVRYNPYTTRPNRRGDTWHDRDRIHVTVRRDRAPPERGGAGTSQDGTSKNWFKITIPYGRKYDKAWLLSMIQSKCSVPFTPIEFHYENTRAQFFVEDASTASALKAVNYKILDRENRRISIIINSSAPPHTILNELKPEQVEQLKLIMSKRYDGSQQALDLKGLRSDPDLVAQNIDVVLNRRSCMAATLRIIEENIPELLSLNLSNNRLYRLDDMSSIVQKAPNLKILNLSGNELKSERELDKIKGLKLEELWLDGNSLCDTFRDQSTYIRSVVACVSPPGDLHPLGG

SEQ ID NO: 20954 - protein, 165 aa, Homo sapiens
MSEMAELSELYEESSDLQMDVMPGEGDLPQMEEGPMEEEEAQPMAAPEGKRSLANGPNAGEQPGQVAGADFESEDEGEEFDDWEDDYDYPEEEQLSGAGYRVSAALEEADKMFLRTREPALDGGFQMHYEKTPFDQLAFIEELFSLMVVNRLTEELGCDEIIDRE

SEQ ID NO: 20955 - protein, 138 aa, Homo sapiens
PGGVSQVVQNEENENCLKKVDPQLLKMALTPYPKLKTALFPQCTPPSVLPSDITIYHLIQSLSPFDPSRLFGWQSANTLAIGDAWSHLPHFSSPDLVNKYAIVERLNFAYYLHNGRPSFAFGTFLVQELIKSKTPKQL

SEQ ID NO: 20956 - protein, 355 aa, Homo sapiens
ALGGYWSGLVELENLKAVTTEDREMRKKKEEYLTFSPLTVVIFVVICCVMMVLLYFFYKWLVYVMIAIFCIASAMSLYNCLAALIHKIPYGQCTIACRGKNMEVRLIFLSGLCIAVAVVWAVFRNEDRWAWILQDILGIAFCLNLIKTLKLPNFKSCVILLGLLLLYDVFFVFITPFITKNGESIMVELAAGPFGNNEKNDGNLVEATGQPSAPHEKLPVVIRVPKLIYFSVMSVCLMPVSILGFGDIIVPGLLIAYCRRFDVQTGSSYIYYVSSTVAYAIGMILTFVVLVLMKKGQPALLYLVPCTLITASVVAWRRKEMKKFWKGNSYQMMDHLDCATNEENPVISGEQIVQQ

SEQ ID NO: 20957 - protein, 793 aa, Homo sapiens
MALSPWTPGLGAGEKLVQAAAVSTGPSLELCTLPSTLGSSVAVEALEQLFVVEQSLQSDYFKCNEEAKIFLKDIAVAVKKLEEMRKATIDLLEIESMELNKLYYLLETLPNSIKRELEECVRDARRLNLFEINTIKMRITRTENEIELLKKKITDLTKYNEALGEKQEELARKHARFVLSLNQTMEKKATTTVYINETYTKINLKREDIALQKKCIQEAEELMEKERAEYLIRKQELTAQINEFENTREVKRMETYQKKKELDKLQTKMSKIKETVTVSAAVLSDHNLEIARLHESIRYWEQEVSELKKDLAILEAKLCFFTDNKEKLDDISNDEKNEFLNKIKQLVETLHAARMEYKDLREKMKTLARQYKIVLSEEEKAFLQKQKIHDENQKQLTFISQKEYFLSQKRVDIKNMEEGLITLQELQQATKTVYQQQIKILSANLERESQRCVITQWKMACLRKKHARWTAKIKAEIQAITEKIQNAEVRRIELLNETSFRQQEISGFVAQIEKLTTELKEEEKAFVNKEKMLMKELSKYEEIFVKETQINKEKEEELVEYLPQLQVAEQEYKEKRRKLEELSNIITAQRQEEDLLNNHIFLFTRDFSRYISNMEDVKQELQQLRDQESKKNKDHFETLKNLENGFYINDQKADLLLLENKKLKEYILYLKNNIEKYREGQEALMHTSSDLSRQLIAQEAQYKDLWAEFQTTVKILVDNGEETLQDINNLTDKLRERDEKMQHVSTWLRGSLEGLRLLVEQESPMDLLKKKKHIRTRVHFPVVKCTEKNTLTK

SEQ ID NO: 20958 - protein, 852 aa, Homo sapiens
LGKAWGTPCEMCPAVNTSEYKILCPGGEGFRPNPITVILEDIDECQELPGLCQGGKCINTFGSFQCRCPTGYYLNEDTRVCDDVNECETPGICGPGTCYNTVGNYTCICPPDYMQVNGGNNCMDMRRSLCYRNYYADNQTCDGELLFNMTKKMCCCSYNIGRAWNKPCEQCPIPSTDEFATLCGSQRPGFVIDIYTGLPVDIDECREIPGVCENGVCINMVGSFRCECPVGFFYNDKLLVCEDIDECQNGPVCQRNAECINTAGSYRCDCKPGYRFTSTGQCNDRNECQEIPNICSHGQCIDTVGSFYCLCHTGFKTNDDQTMCLDINECERDACGNGTCRNTIGSFNCRCNHGFILSHNNDCIDVDECASGNGNLCRNGQCINTVGSFQCQCNEGYEVAPDGRTCVDINECLLEPRKCAPGTCQNLDGSYRCICPPGYSLQNEKCEDIDECVEEPEICALGTCSNTEGSFKCLCPEGFSLSSSGRRCQDLRMSYCYAKFEGGKCSSPKSRNHSKQECCCALKGEGWGDPCELCPTEPDEAFRQICPYGSGIIVGPDDSAVDMDECKEPDVCKHGQCINTDGSYRCECPFGYILAGNECVDTDECSVGNPCGNGTCKNVIGGFECTCEEGFEPGPMMTCEDINECAQNPLLCAFRCVNTYGSYECKCPVGYVLREDRRMCKDEDECEEGKHDCTEKQMECKNLIGTYMCICGPGYQRRPDGEGCVDENECQTKPGICENGRCLNTRGSYTCECNDGFTASPNQDECLDVILSLLLLSPAFPSCFFSPRTIGKGTASQRCYKTCVRSAPATGTPSPNRNAAVTEGEAGVPTVRSALSRGLWLSRNSVPMAEDS

SEQ ID NO: 20959 - protein, 355 aa, Homo sapiens
WLVGFWGGSGCKEFGLCLPAGRQTQPTRWGRRLAWWTRAAWPCGSRAMVSKLSQLQTELLAALLESGLSKEALIQALGEPGPYLLAGEGPLDKGESCGGGRGELAELPNGLGETRGSEDETDDDGEDFTPPILKELENLSPEEAAHQKAVVETLLQEDPWRVAKMVKSYLQQHNIPQREVVDTTGLNQSHLSQHLNKGTPMKTQKRAALYTWYVRKQREVAQQFTHAGQGGLIEEPTGDELPTKKGRRNRFKWGPASQQILFQAYERQKNPSKEERETLVEECNRAECIQRGVSPSQPQPAEYRSQAGLSSWGPPPPCQHPDSTAQLGADIPRPQPAAPEPHHGLTSWGHDHRAW

SEQ ID NO: 20960 - protein, 534 aa, Homo sapiens
MISCAEQRSRQGEAGRGPAPVAPAFLPLWLPRGCSGILSVPAVAMHSAGTPRAESPMSRQEKDAELDRRIVALRKKNQALLRRYQEIQEDRRQAEQGGMAVTTPALLQPDGLTVTISQVPGEKRVVSRNWARGTCGPRVTNEMLEDEDAEDHGGTFCLGELVELAVTMENKAEGKRIVSEKPTRARNQGIEGSPGGRVTRSPPTQVAISSDSARKGSWEPWSRPVGEPPEAGWDYAQWKQEREQIDLARLARHRDAQGDWRRPWDLDKAKSTLQDCSQLRGEGPARAGSRRGPRSHQKLQPPPLLPDGKGRGGQASRPSVAPATGSKARGKERLTGRARRWDMKEDKEELEGQEGSQSTRETPSEEEQAQKQSGMEQGRLGSAPAASPALASPEGPKGESVASTASSVPCSPQEPDLAPLDLSLGGAGIPGPRESGCVLGLRPGAQESPVSWPEGSKQQPLGWSNHQAELEVQTCPEPQRGAGLPEPGEDRSGKSGAQQGLAPRSRPTRGGSQRSRGTAGVRRRTGRPGPAGRC

SEQ ID NO: 20961 - protein, 658 aa, Homo sapiens
MSFPRGSQTQKIKHPIGTRKGPLEVPPPTEKDWPKDDEQDHVLVDPDEELDSLPQPYRMINKLVNLLFDQSWEIIEERNALREAESSQIQPTVYPPLGEIQLNKMPNCMAVSQDYVFIGGAKGFSIYNLYSAKQIYAWEKLKVDVTSIWATDLGNEILIAPVDEMGIIRLFYFYKEGLYLVKAINEVDDTSKQTTCIKMEISQGGDFAAFLLQGAGDIWLDVYKLPKETWLKKLEHPQLTSNPKKKVRQPQLNSLGPISADPLEMDANVSFKGDIKLSLPVYIMKIKPPKPVTGTTFKSPLEVFAKIKDCYGLGSGQNHFIKDSQWEQQAEIFNASYKKYLDREWEEEPLSTATFYFLLPSCLFAMPPEVKGPSGMACVLGIHWTRSHNFFLYSLNRTLKDKADPEGVWPCAAPIAVSQLSCSSSYLVLACEDGVLTLWDLAKGQNMYPEGQVKSQMKCVVLCTDASLHLVEASGTQGPTISVLVERPVKHLDKTICAVAPVPALPGMVLIFSKNGSVCLMDVAKREIICAFAPPGAFPLEVPWKPVFAVSPDHPCFLLRGDYSHETASTDDAGIQYSVFYFNFEACPLLENISKNCTIPQRDLDNMAFPQALPLEKRCERFLQKSYRKLEKNPEKEEEHWARLQRYSLSLQRENFKK

SEQ ID NO: 20962 - protein, 1181 aa, Homo sapiens
MSLLNPVLLPPKVKAYLSQGERFIKWDDETTVASPVILRVDPKGYYLYWTYQSKEMEFLDITSIRDTRFGKFAKMPKSQKLRDVFNMDFPDNSFLLKTLTVVSGPDMVDLTFHNFVSYKENVGKAWAEDVLALVKHPLTANASRSTFLDKILVKLKMQLNSEGKIPVKNFFQMFPADRKRVEAALSACHLPKGKNDAINPEDFPEPVYKSFLMSLCPRPEIDEIFTSYHAKAKPYMTKEHLTKFINQKQRDSRLNSLLFPPARPDQVQGLIDKYEPSGINAQRGQLSPEGMVWFLCGPENSVLAQDKLLLHHDMTQPLNHYFINSSHNTYLTAGQFSGLSSAEMYRQVLLSGCRCVELDCWKGKPPDEEPIITHGFTMTTDIFFKEAIEAIAESAFKTSPYPIILSFENHVDSPRQQAKMAEYCRTIFGDMLLTEPLEKFPLKPGVPLPSPEDLRGKILIKNKKNQFSGPTSSSKDTGGEAEGSSPPSAPAVWAGEEGTELEEEEVEEEEEEESGNLDEEEIKKMQSDEGTAGLEVTAYEEMSSLVNYIQPTKFVSFEFSAQKNRSYVISSFTELKAYDLLSKASVQFVDYNKRQMSRIYPKGTRMDSSNYMPQMFWNAGCQMVALNFQTMDLPMQQNMAVFEFNGQSGYLLKHEFMRRPDKQFNPFSVDRIDVVVATTLSITVISGQFLSERSVRTYVEVELFGLPGDPKRRYRTKLSPSTNSINPVWKEEPFVFEKILMPELASLRVAVMEEGNKFLGHRIIPINALNSGYHHLCLHSESNMPLTMPALFIFLEMKDYIPGAWADLTVALANPIKFFSAHDTKSVKLKEAMGGLPEKPFPLASPVASQVNGALAPTSNGSPAARAGAREEAMKEAAEPRTASLEELRELKGVVKLQRRHEKELRELERRGARRWEELLQRGAAQLAELGPPGVGGVGACKLGPGKGSRKKRSLPREESAGAAPGEGPEGVDGRVRELKDRLELELLRQGEEQYECVLKRKEQHVAEQISKMMELAREKQAAELKALKETSENDTKEMKKKLETKRLERIQGMTKVTTDKMAQERLKREINNSHIQEVVQVIKQMTENLERHQEKLEEKQAACLEQIREMEKQFQKEALAEYEARMKGLEAEVKESVRACLRTCFPSEAKDKPERACECPPELCEQDPLIAKADAQESRL

SEQ ID NO: 20963 - protein, 552 aa, Homo sapiens
MLKSRISMRSRHPRRAISEGHKSEGTMPPNKEASGLSSSPAGLICLPPISEELQLVWTQAAQTSELDSNEHLLKTFSYFPYPSLADIALLCLRYGLQMEKVKTWFMAQRLRCGISWSSEEIEETRARVVYRRDQLHFKSLLSFTHHAGRPPEEVPPPPVPAPEQVGIGIGPPTLSKPTQTKGLKVEPEEPSQMPPLPQSHQKLKESLMTPGSGAFPYQSDFWQHLQSSGLSKEQAGRGPNQSHGIGTASWNHSTTVPQPQARDKPPPIALIASSCKEESASSVTPSSSSTSSSFQVLANGATAASKPLQPLGCVPQSVSPSEQALPPHLEPAWPQGLRHNSVPGRVGPTEYLSPDMQRQRKTKRKTKEQLAILKSFFLQCQWARREDYQKLEQITGLPRPEIIQWFGDTRYALKHGQLKWFRDNAVPGAPSFQDPAIPTPPPSTRSLNERAETPPLPIPPPPPDIQPLERYWAAHQQLRETDIPQLSQASRLSTQQVLDWFDSRLPQPAEVVVCLDEEEEEEEEELPEDDEEEEEEEEEDDDDDDDDVIIQD

SEQ ID NO: 20964 - protein, 938 aa, Homo sapiens
MKLKKQVTVCGAAIFCVAVFSLYLMLDRVQHDPTRHQNGGNFPRSQISVLQNRIEQLEQLLEENHEIISHIKDSVLELTANAEGPPAMLPYYTVNGSWVVPPEPRPSFFSISPQDCQFALGGRGQKPELQMLTVSEELPFDNVDGGVWRQGFDISYDPHDWDAEDLQVFVVPHSHNDPGWIKTFDKYYTEQTQHILNSMVSKLQEDPRRRFLWAEVSFFAKWWDNINVQKRAAVRRLVGNGQLEIATGGWVMPDEANSHYFALIDQLIEGHQWLERNLGATPRSGWAVDPFGYSSTMPYLLRRANLTSMLIQRVHYAIKKHFAATHSLEFMWRQTWDSDSSTDIFCHMMPFYSYDVPHTCGPDPKICCQFDFKRLPGGRINCPWKVPPRAITEANVAERAALLLDQYRKKSQLFRSNVLLVPLGDDFRYDKPQEWDAQFFNYQRLFDFFNSRPNLHVQAQFGTLSDYFDALYKRTGVEPGARPPGFPVLSGDFFSYADREDHYWTGYYTSRPFYKSLDRVLEAHLRGAEVLYSLAAAHARRSGLAGRYPLSDFTLLTEARRTLGLFQHHDAITGTAKEAVVVDYGVRLLRSLVNLKQVIIHAAHYLVLGDKETYHFDPEAPFLQVDDTRLSHDALPERTVIQLDSSPRFVVLFNPLEQERFSMVSLLVNSPRVRVLSEEGQPLAVQISAHWSSATEAVPDVYQVSVPVRLPALGLGVLQLQLGLDGHRTLPSSVRIYLHGRQLSVSRHEAFPLRVIDSGTSDFALSNRYMQVWFSGLTGLLKSIRRVDEEHEQQVDMQVLVYGTRTSKDKSGAYLFLPDGEAKPYVPKEPPVLRVTEGPFFSEVVAYYEHIHQAVRLYNLPGVEGLSLDISSLVDIRDYVNKELALHIHTDIDSQGAAPTVSEEAPPPGQLLPHASHGLYPGRTEAPHAAHCPGPGCL

SEQ ID NO: 20965 - protein, 424 aa, Homo sapiens
MRRVLRLLLGCFLTELCARVCRAQERAGHGQLAQLGGVLLLAGGNRSGAASGEASEGAEASDAPPTRAPTPDFCRGYFDVMGQWDPPFNCSSGDFIFCCGTCGFRFCCTFKKRRLNQSTCTNYDTPLWLNTGKPPARKDDPLHDPTKDKTNLIVYIICGVVAVMVLVGIFTKLGLEKAHRPQREHMSRALADVMRPQGHCNTDHMERDLNIVVHVQHYENMDTRTPINNLHATQMNNAVPTSPLLQQMGHPHSYPNLGQISNPYEQQPPGKELNKYASLKAVGSSDGDWAVSTLKSPKADKVNDDFYTKRRHLAELAAKGNLPLHPVRVEDEPRAFSPEHGPAKQNGQKSRTNKMPPHPLAYTSTTNFKGWDPNEQSLRRQAYSNKGKLGTAETGSSDPLGTRPQHYPPPQPYFITNSKTEVTV

SEQ ID NO: 20966 - protein, 1401 aa, Homo sapiens
MMNCWFSCTPKNRHAADWNKYDDRLMKAAERGDVEKVTSILAKKGVNPGKLDVEGRSVFHVVTSKGNLECLNAILIHGVDITTSDTAGRNALHLAAKYGHALCLQKLLQYNCPTEHADLQGRTALHDAAMADCPSSIQLLCDHGASVNAKDVDGRTPLVLATQMSRPTICQLLIDRGADVNSRDKQNRTALMLGCEYGCRDAVEVLIKNGADISLLDALGHDSSYYARIGDNLDILTLLKTASENTNKGRELWKKGPSLQQRNLTHMQDEVNVKSHQREHQNIQDLEIENEDLKERLRKIQQEQRILLDKVNGLQLQLNEEVMVADDLESEREKLKSLLAAKEKQHEESLRTIEALKNRFKYFESDHLGSGSHFRKEDMLLKQGQMYMADSQCTSPGIPAHMQSRSMLRPLELSLPSQTSYSENEILKKELEAMRTFCESAKQDRLKLQNELAHKVAECKALALECERVKEDSDEQIKQLEDALKDVQKRMYESEGKVKQMQTHFLALKEHLTSEAASGNHRLTEELKDQLKDLKVKYEGASAEVGKLRNQIKQNEMIVEEFKRDEGKLIEENKRLQKELSMCEMEREKKGRKVTEMEGQAKELSAKLALSIPAEKFENMKSSLSNEVNEKAKKLVEMEREHEKSLSEIRQLKRELENVKAKLAQHVKPEEHEQVKSRLEQKSGELGKKITELTLKNQTLQKEIEKVYLDNKLLKEQAHNLTIEMKNHYVPLKVSEDMKKSHDAIIDDLNRKLLDVTQKYTEKKLEMEKLLLENDSLSKDVSRLETVFVPPEKHEKEIIALKSNIVELKKQLSELKKKCGEDQEKIHALTSENTNLKKMMSNQYVPVKTHEEVKMTLNDTLAKTNRELLDVKKKFEDINQEFVKIKDKNEILKRNLENTQNQIKAEYISLAEHEAKMSSLSQSMRKVQDSNAEILANYRKGQEEIVTLHAEIKAQKKELDTIQECIKVKYAPIVSFEECERKFKATEKELKDQLSEQTQKYSVSEEEVKKNKQENDKLKKEIFTLQKDLRDKTVLIEKSHEMERALSRKTDELNKQLKDLSQKYTEVKNVKEKLVEENAKQTSEILAVQNLLQKQHVPLEQVEALKKSLNGTIENLKEELKSMQRCYEKEQQTVTKLHQLLENQKNSSVPLAEHLQIKEAFEKEVGIIKASLREKEEESQNKMEEVSKLQSEVQNTKQALKKLETREVVDLSKYKATKSDLETQISSLNEKLANLNRKYEEVCEEVLHAKKKEISAKDEKELLHFSIEQEIKDQKERCDKSLTTITELQRRIQESAKQIEAKDNKITELLNDVERLKQALNGLSQLTYTSGNPTKRQSQLIDTLQHQVKSLEQQLADADRQHQEVIAIYRTHLLSAAQGHMDEDVQEALLQIIQMRQGLVC

SEQ ID NO: 20967 - protein, 1130 aa, Homo sapiens
GNETIEAQAELTVQAQPEFLKQPTNIYAHESMDIVFECEVTGKPTPTVKWVKNGDMVIPSDYFKIVKEHNLQVLGLVKSDEGFYQCIAENDVGNAQAGAQLIILEHDVAIPTLPPTSLTSATTDHLAPATTGPLPSAPRDVVASLVSTRFIKLTWRTPASDPHGDNLTYSVFYTKEGIARERVENTSHPGEMQVTIQNLMPATVYIFRVMAQNKHGSGESSAPLRVETQPEVQLPGPAPNLRAYAASPTSITVTWETPVSGNGEIQNYKLYYMEKGTDKEQDVDVSSHSYTINGLKKYTEYSFRVVAYNKHGPGVSTPDVAVRTLSDVPSAAPQNLSLEVRNSKSIMIHWQPPAPATQNGQITGYKIRYRKASRKSDVTETLVSGTQLSQLIEGLDRGTEYNFRVAALTINGTGPATDWLSAETFESDLDETRVPEVPSSLHVRPLVTSIVVSWTPPENQNIVVRGYAIGYGIGSPHAQTIKVDYKQRYYTIENLDPSSHYVITLKAFNNVGEGIPLYESAVTRPHTVPDPTPMMPPVGVQASILSHDTIRITWADNSLPKHQKITDSRYYTVRWKTNIPANTKYKNANATTLSYLVTGLKPNTLYEFSVMVTKGRRSSTWSMTAHGTTFELVPTSPPKDVTVVSKEGKPKTIIVNWQPPSEANGKITGYIIYYSTDVNAEIHDWVIEPVVGNRLTHQIQELTLDTPYYFKIQARNSKGMGPMSEAVQFRTPKASGSGGKGSRLPDLGSDYKPPMSGSNSPHGSPTSPLDSNMLLVIIVSVGVITIVVVVIIAVFCTRRTTSHQKKKRAACKSVNGSHKYKGNSKDVKPPDLWIHHERLELKPIDKSPDPNPIMTDTPIPRNSQDITPVDNSMDSNIHQRRNSYRGHESEDSMSTLAGRRGMRPKMMMPFDSQPPQPVISAHPIHSLDNPHHHFHSSSLASPARSHLYHPGSPWPIGTSMSLSDRANSTESVRNTPSTDTMPASSSQTCCTDHQDPEGATSSSYLASSQEEDSGQSLPTAHVRPSHPLKSFAVPAIPPPGPPTYDPALPSTPLLSQQALNHHIHSVKTASIGTLGRSRPPMPVVVPSAPEVQETTRMLEDSESSYEPDELTKEMAHLEGLMKDLNAITTA

SEQ ID NO: 20968 - protein, 211 aa, Homo sapiens
QRVARPRAQETLQEVHRFVVREYLARALRPRERFRGMERMHGSQKMSLDAQAISDTFQGLGSEATWLDQAIQCVAEILGETYKDDIQRHLETLIRSYPDIRRDHILAILALRRLGRQRNQHLLQHTQDLLRAAAGAAGAEAPRGRVLFEEIKPSAAVRPEGAAVQEAFQASLRGVFWGRRALNAAYRAGGGLPPDCPASPSSLKVKSRVFI

SEQ ID NO: 20969 - protein, 427 aa, Homo sapiens
MTSCLPALRFIATPRLSAMPHIDNDVKLDFKDVLLRPKRSTLKSRSEVDLTRSFSFRNSKQTYSGVPIIAANMDTVGTFEMAKVLCKFSLFTAVHKHYSLVQWQEFAGQNPDCLEHLAASSGTGSSDFEQLEQILEAIPQVKYICLDVANGYSEHFVEFVKDVRKRFPQHTIMAGNVVTGEMVEELILSGADIIKVGIGPGSVCTTRKKTGVGYPQLSAVMECADAAHGLKGHIISDGGCSCPGDVAKAFGAGADFVMLGGMLAGHSESGGELIERDGKKYKLFYGMSSEMAMKKYAGGVAEYRYVWRPRSLVIVWRQNSWLLRGGWYSSQRSMVNRGSMLGSVEKSLGLRNPEGEDNKVFPTLRASEGKTVEVPFKGDVEHTIRDILGGIRSTCTYVGAAKLKELSRRTTFIRVTQQVNPIFSEAC

SEQ ID NO: 20970 - protein, 845 aa, Homo sapiens
MGAPVKLTVSQGQPVKLNCSVEGMEEPDIQWVKDGAVVQNLDQLYIPVSEQHWIGFLSLKSVERSDAGRYWCQVEDGGETEISQPVWLTVEGVPFFTVEPKDLAVPPNAPFQLSCEAVGPPEPVTIVWWRGTTKIGGPAPSPSVLNVTGVTQSTMFSCEAHNLKGLASSRTATVHLQALPAAPFNITVTKLSSSNASVAWMPGADGRALLQSCTVQVTQAPGGWEVLAVVVPVPPFTCLLRDLVPATNYSLRVRCANALGPSPYADWVPFQTKGLAPASAPQNLHAIRTDSGLILEWEEVIPEAPLEGPLGPYKLSWVQDNGTQDELTVEGTRANLTGWDPQKDLIVRVCVSNAVGCGPWSQPLVVSSHDRAGQQGPPHSRTSWVPVVLGVLTALVTAAALALILLRKRRKETRFGQAFDSVMARGEPAVHFRAARSFNRERPERIEATLDSLGISDELKEKLEDVLIPEQQFTLGRMLGKGEFGSVREAQLKQEDGSFVKVAVKMLKADIIASSDIEEFLREAACMKEFDHPHVAKLVGVSLRSRAKGRLPIPMVILPFMKHGDLHAFLLASRIGENPFNLPLQTLIRFMVDIACGMEYLSSRNFIHRDLAARNCMLAEDMTVCVADFGLSRKIYSGDYYRQGCASKLPVKWLALESLADNLYTVQSDVWAFGVTMWEIMTRGQTPYAGIENAEIYNYLIGGNRLKQPPECMEDVYDLMYQCWSADPKQRPSFTCLRMELENILGQLSVLSASQDPLYINIERAEEPTAGGSLELPGRDQPYSGAGDGSGMGAVGGTPSDCRYILTPGGLAEQPGQAEHQPESPLNETQRLLLLQQGLLPHSSC

SEQ ID NO: 20971 - protein, 179 aa, Homo sapiens
VFSPGSSNSRPPSPMDPYAKMRQKLREIILQQQQQKKIAGRQEKGSQDSPAVPHPGPLQHWQPENVNQAFTRPPPPYPGNIRSPVAPPLGPRYAVFPKDQRGPYPPDVASMGMRPHGFRFGFPGGSHGTMPSQERFLVPPQQIQGSGVSPQLRRSVSVDMPRPLNNSQMNNPVGLPQHF

SEQ ID NO: 20972 - protein, 1197 aa, Homo sapiens
MWMHCCWAWPPRSQSERTMCWLKMCGVSLRLSLQVVNSWPLGRGSAGLPEPDFWPGPLKFSRTDHLASCLQRGRDLGLPSYTKARAALGLSPITRWQDINPALSRSNDTVLEATAALYNQDLSWLELLPGGLLESHRDPGPLFSTIVLEQFVRLRDGDRYWFENTRNGLFSKKEIEEIRNTTLQDVLVAVINIDPSALQPNVFVWHKGDPCPQPRQLSTEGLPACAPSVVRDYFEGSGFGFGVTIGTLCCFPLVSLLSAWIVARLRMRNFKRLQGQDRQSIVSEKLVGGMEALEWQGHKEPCRPVLVYLQPGQIRVVDGRLTVLRTIQLQPPQKVNFVLSSNRGRRTLLLKIPKEYDLVLLFNLEEERQALVENLRGALKESGLSIQEWELREQELMRAAVTREQRRHLLETFFRHLFSQVLDINQADAGTLPLDSSQKVREALTCELSRAEFAESLGLKPQDMFVESMFSLADKDGNGYLSFREFLDILVVFMKGSPEEKSRLMFRMYDFDGNGLISKDEFIRMLRSFIEISNNCLSKAQLAEVVESMFRESGFQDKEELTWEDFHFMLRDHNSELRFTQLCVKGVEVPEVIKDLCRRASYISQDMICPSPRVSARCSRSDIETELTPQRLQCPMDTDPPQEIRRRFGKKVTSFQPLLFTEAHREKFQRSCLHQTVQQFKRFIENYRRHIGCVAVFYAIAGGLFLERAYYYAFAAHHTGITDTTRVGIILSRGTAASISFMFSYILLTMCRNLITFLRETFLNRYVPFDAAVDFHRLIASTAIVLTVLHSVGHVVNVYLFSISPLSVLSCLFPGLFHDDGSELPQKYYWWFFQTVPGLTGVVLLLILAIMYVFASHHFRRRSFRGFWLTHHLYILLYVLLIIHGSFALIQLPRFHIFFLVPAIIYGGDKLVSLSRKKVEISVVKAELLPSGVTHLRFQRPQGFEYKSGQWVRIACLALGTTEYHPFTLTSAPHEDTLSLHIRAAGPWTTRLREIYSAPTGDRCARYPKLYLDGPFGEGHQEWHKFEVSVLVGGGIGVTPFASILKDLVFKSSVSCQVFCKKIYFIWVTRTQRQFEWLADIIREVEENDHQDLVSVHIYITQLAEKFDLRTTMLYICERHFQKVLNRSLFTGLRSITHFGRPPFEPFFNSLQEVHPQVRKIGVFSCGPPGMTKNVEKACQLINRQDRTHFSHHYENF

SEQ ID NO: 20973 - protein, 860 aa, Homo sapiens [sequence omitted]

SEQ ID NO: 20974 - protein, 854 aa, Homo sapiens
METSQETSLFLVKILEELDSKQNTVSYQDLCKSLCARFDLSQLAKLRSVLFYTACLDPNFPATLFKDKMKCTVNNQQSKKIMVAADIVTIFNLIQMNGGAAKEKLPTGRQKVRKKEASFESCRSDTEICNAAECEPLNCELSERSFSRGYPIRQSSKCRKMDCKDCPQFVPASEPNFLLGVSKEVKNRAASLDRLQALAPYSVTSPQPCEMQRTYFPMNIENESISDQDSLPINQSIKETFISNEEPFVVQSCVQKRNIFKEDFHNLMAVSPSLVGPISKAENEHREPQSRKEPHKPPFFNHSFEMPYNSQYLNPVYSPVPDKRRAKHESLDDLQASTYFGPTPVMGTQEARRCLGKPNKQTPWPAKSWSLNTEEVPDFERSFFNRNPSEEKLHYPNASSQTPNFPAPERRPTYLVPKDQQPILPIAYAAKQNGLKSKEISSPVDLEKHEPVKKFKDKSINCTSGQLSSDTSSVGTQTEHVLEPKKCRDLCTSGQGKYSDRHTMKHSDDDSEIVSDDISDIFRFLDDMSISGSTGVIQSSCYNSTGSLSQLHKSDCDSSPEHNLTKIANGVPNSKGDKGNRPENTHHSEEELKTSVCKLVLRIGEIERKLESLSGVRDEISQVLGKLNKLDQKMQQPEKVSVQIDLNSLTSEGPSDDSASPRMFHAHSGSHGPKLENNPDWCCSDASGSNSESLRVKALKKSLFTRPSSRSLTEENSATESKIASISNSPRDWRTITYTNRVGLNEEEIKDTGPGDNKDWHRKSKEADRQYDIPPQHRLPKQPKDGFLVEQVFSPHPYPASLKAHMKSNPLYTDMRLTELAEVKRGQPSWTIEEYARNAGDKGKLTALDLQHVG

SEQ ID NO: 20975 - protein, 553 aa, Homo sapiens
MNHVAKQQSEEAFPQEQQKAPPVVGGFNSNVGSKVLGLKYEEIDCLINDEHTIKGRREGNEVFLPFTWVEKYFDVYGKVVQYDGYDRFEFSHSYSKVYAQRAPYHPDGVFMSFEGYNVEVRDRVKCISGVEGVPLSTQWGPQGYFYPIQIAQYGLSHYSKNLTEKPPHIEVYETAEDRDKNKPNDWTVPKGCFMANVADKSRFTNVKQFIAPETSEGVSLQLGNTKDFIISFDLKFLTNGSVSVVLETTEKNQLFTIHYVSNAQLIAFKERDIYYGIGPRTSWSTVTRDLVTDLRKGVGLSNTKAVKPTKIMPKKVVRLIAKGKGFLDNITISTTAHMAAFFAASDWLVRNQDEKGGWPIMVTRKLGEGFKSLEPGWYSAMAQGQAISTLVRAYLLTKDHIFLNSALRATAPYKFLSEQHGVKAVFMNKHDWYEEYPTTPSSFVLNGFMYSLIGLYDLKETAGEKLGKEARSLYERGMESLKAMLPLYDTGSGTIYDLRHFMLGIAPNLARWDYHTTHINQLQLLSTIDESPVFKEFVKRWKSYLKGSRAKHN

SEQ ID NO: 20976 - protein, 175 aa, Homo sapiens
MSTVHEILCKLSLEGDELASALKSALSGHLETVILGLLKTPAQYDASELKASMKGLGTDEDSLIEIICSRTNQELQEINRVYKEMYKTDLEKDIISDTSGDFRKLMVALAKGRRAEDGSVIDYELIDQDARDLYDAGVKRKGTDVPKWISIMTERSVPHLQKVFDRYKSYSPYDM

SEQ ID NO: 20977 - protein, 439 aa, Homo sapiens
MIIPSLEELDSLKYSDLQNLAKSLGLRANLRATKLLKALKGYIKHEARKGNENQDESQTSASSCDETEIQISNQEEAERQPLGHVTKTRRRCKTVRVDPDSQNHSEIKISNPTEFQNHEKQESQDLRATAKVPSPPDEHQEAENAVSSGNRDSKVPSEGKKSLYTDESSKPGKNKRTAITTPNFKKLHEAHFKEMESIDQYIERKKKHFEEHNSMNELKQPINKGGVRTPVPPRGRLSVASTPISQRRSQGRSCGPASQSTLGLKGSLKRSAISAAKTGVRFSAATKDNEHKRSLTKTPARKSAHVTVSGGTPKGEAVLGTHKLKTITGNSAAVITPFKLTTEATQTPVSNKKPVFDLKASLSRPLNYEPHKGKLKPWGQSKENNYLNQHVNRINFYKKTYKQPHLQTKEEQRKKREQERKEKKAKVLGMRRGLILAED

SEQ ID NO: 20978 - protein, 777 aa, Homo sapiens
MTHTRRKSLPMLSSGLTGRREPLQMEDSNMEQGVEGVEPGMPESPGHLTGRRKNYPLRKRPLVPEKPKACKVLLTRLENVAGPRSADEADELPPDLPKPPSPAPSSEDPGLAQPRKRRLASLNAEALNNLLLEREDTSSLAGTRRSRAGDPHRSRDRDRATGGWSSSKKRPRLGDLGGGSRDLSPEPAPDEGPRRDGDPAPKRLASLNAAAFLKLSQERELPLRLPRAHAEVDGRSTEPPAPKAPRPKWPKVNGKNYPKAWQGASSGEAAGPPGWQGCPDEPWPSATPCGPSVQPSHQPLSKALESPLGLRPHLPLLMGGQAALKPEPGRPGEESPAPKQELHQPSFPTPQLSPLPMPGNPADYNGLCVGPELTALGSFYLYCGQEGLQCGGYSPCPMLPEGKLSPVAAPHEEGLLLAPSSVPSGTPFQHPPWGSSRYCSSEDTGVNGYSICGVLPLSVTHAGTTCGGCPYKMPFAAEGCRSLGQLEFPLPEAGHPASPAHPLLGCPVPSVPPAAEPVPHLQTPTSEPQTVARACPQSAKPPSGSKSGLRTGSSCRHTARSKAARRPSHPKQPRVQRPRPRRRRRRRTNGWVPVGAACEKAVYVLDEPEPAIRKSYQAVERHGETIRVRDTVLLKSGPRKTSTPYVAKISALWENPESGELMMSLLWYYRPEHLQGGRSPSMHENEVFASRHQDQNSVACIEEKCYVLTFAEYCRFCAMAKRRGEGLPSRKTALVPPSADYSTPPHRTVPEDTDPELVFLCRHVYDFRHGRILKNPQ

SEQ ID NO: 20979 - protein, 339 aa, Homo sapiens
MSSNSSTSQWPRPGGQAPSSPSYENSLHSLKNRVEQQLHEHLQDAMSFLKDVCEQSRMEDRLDRLDDAIHVLRNHAVGPSTSLPAGHSDIHSLLGPSHNAPIGSLNSNYGGSSLVASSRSASMVGTHREDSVSLNGNHSVLSSTVTTSSTDLNHKTQENYRGGLQSQSGTVVTTEIKTENKEKDENLHEPPSSDDMKSDDESSQKDIKVSSRGRTSTNEDEDLNPEQKIEREKERRMANNARERLRVRDINEAFKELGRMCQLHLKSEKPQTKLLILHQAVAVILSLEQQVRERNLNPKAACLKRREEEKVSAVSAEPPTTLPGTHPGLSETTNPMGHM

SEQ ID NO: 20980 - protein, 535 aa, Homo sapiens
MSDFHVHPQATVGEEGGVARFQCQIHGLPKPLITWEKNRVPIDTDNERYTLLPKGVLQITGLRAEDGGIFHCVASNIASIRISHGARLTVSGSGSGAYKEPAILVGPENLTLTVHQTAVLECVATGNPRPIVSWSRLDGRPIGVEGIQVLGTGNLIISDVTVQHSGVYVCAANRPGTRVRRTAQGRLVVQAPAEFVQHPQSISRPAGTTAMFTCQAQGEPPPHVTWLKNGQVLGPGGHVRLKNNNSTLTISGIGPEDEAIYQCVAENSAGSSQASARLTVLWAEGLPGPPRNVRAVSVSSTEVRVSWSEPLANTKEIIGYVLHIRKAADPPELEYQEAVSKSTFQHLVSDLEPSTAYSFYIKAYTPRGASSASVPTLASTLGEAPAPPPLSVRVLGSSSLQLLWEPWPRLAQHEGGFKLFYRPASKTSFTGPILLPGTVSSYNLSQLDPTAVYEVKLLAYNQHGDGNATVRFVSLRGASERTALSPPCDCRKEEAANQTSTTGIVIGIHIGVTCIIFCVLFLLFGQRGRVLLCKD

SEQ ID NO: 20981 - protein, 966 aa, Homo sapiens
MAELFMECEEEELEPWQKKVKEVEDDDDDEPIFVGEISSSKPAISNILNRVNPSSYSRGLKNGALSRGITAAFKPTSQHYTNPTSNPVPASPINFHPESRSSDSSVIVQPFSKPGYITNSSRVVSNKSSELLFDLTQDTGLSHYQGGPTLSMAGMSESSFLSKRPSTSEVNNVNPKKPKPSESVSGANSSAVLPSVKSPSVTSSQAMLAKGTNTSSNQSKNGTPFPRACPKCNIHFNLLDPLKNHMKYCCPDMINNFLGLAKTEFSSTVNKNTTIDSEKGKLIMLVNDFYYGKHEGDVQEEQKTHTTFKCFSCLKILKNNIRFMNHMKHHLELEKQSSESWENHTTCQHCYRQFPTPFQLQCHIESTHTPHEFSTICKICELSFETEHVLLQHMKDNHKPGEMPYVCQVCNYRSSSFSDVETHFRTSHENTKNLLCPFCLKVIKIATPYMHHYMKHQKKGIHRCTKCRLQFLTCKEKMDHKTQHHRTFIKPKQLEGLPPGTKVTIRASVGPLQSGASPTPSISASASTLQLSPPRTKNITAKNPAKSNTSKPNTVKSNASKPNTSKPNGSKSKYKPKISNMQKKQSTLASSNKKSKVNTALRNLRYRRGIHKCIECCSEIKDFANHFPTYVHCSFCRYNTSCSKAYVNHMMSFHSNRPSKRFCIFKKHSENLRGITLVCLNCDFLSDVSGLDNMATHLSQHKTHTCQVVMQKVSVCIPTSEHLSELKKEAPAKEQEPVSKEIARPNMAERETETSNSESKQDKAASSKEKNGCNANSFEGSSTTKSEESITVSDKENETCLADQETGSKNIVSCDSNIGADKVEKKKQIQHVCQEMELKMCQSSENIILSDQIKDHNSSEARFSSKNIKDLRLASDNVSIDQFLRKRHEPESVSSDVSEQGSIHLEPLTPSEVLEYEATEILQKGSGDPSAKTDEVVSDQTDDIPGGNNPSTTEATVDLEDEKERS

SEQ ID NO: 20982 - protein, 316 aa, Homo sapiens
DQTLLQKLQMQIGSHEHFNSWNQGFIIHHYAGKVSYDMDGFCERNRDVLFMDLIELMQSSELPFIKSLFPENLQADKKGRPTTAGSKIKKQANDLVSTLMKCTPHYIRCIKPNETKKPRDWEESRYAILTKATWPSWQGEEKQGVLHLLQSVNMDSDQFQLGRSKVFIKAPESLFLLEEMRERKYDGYARVIQKSWRKFVARKKYVQMREEASDLLLNKKERRRNSINRNFIGDYIGMEEHPELQQFVGKREKIDFADTVTKYDRRFKGVKRDLLLTPKCLYLIGREKVKQGPDKGLVKEVLKRKIEIERILSVSL

SEQ ID NO: 20983 - protein, 125 aa, Homo sapiens
MAGNVVTGEMVEELILSGADIIKVGIGPGSVCTTRKKTGVGYPQLSAVMECADAAHGLKGHIISDGGCSCPGDVAKAFGAGADFVMLGGMLAGHSESGGELIERDGKKYKLFYGMSSEMAMKKYA

SEQ ID NO: 20984 - protein, 716 aa, Homo sapiens
MQRHYVMYYEMSYGLNIEMHKQTEIAKRLNTILAQIMPFLSQEHQQQVAQAVERAKQVTMTELNAIIGQQQLQAQHLSHATHGPPVQLPPHPSGLQPPGIPPVTGSSSGLLALGALGSQAHLTVKDEKNHHELDHRERESSANNSVSPSESLRASEKHRGSADYSMEAKKRKAEEKDSLSRYDSDGDKSDDLVVDVSNEDPATPRVSPAHSPPENGLDKARSLKKDAPTSPASVASSSSTPSSKTKDLGHNDKSSTPGLKSNTPTPRNDAPTPGTSTTPGLRSMPGKPPGMDPIGIMASALRTPISITSSYAAPFAMMSHHEMNGSLTSPGAYAGLHNIPPQMSAAAAAAAAAYGRSPMVSFGAVGFDPHPPMRATGLPSSLASIPGGKPAYSFHVSADGQMQPVPFPHDALAGPGIPRHARQINTLSHGEVVCAVTISNPTRHVYTGGKGCVKIWDISQPGSKSPISQLDCLNRDNYIRSCKLLPDGRTLIVGGEASTLTIWDLASPTPRIKAELTSSAPACYALAISPDAKVCFSCCSDGNIAVWDLHNQTLVRQFQGHTDGASCIDISHDGTKLWTGGLDNTVRSWDLREGRQLQQHDFTSQIFSLGYCPTGEWLAVGMESSNVEVLHHTKPDKYQLHLHESCVLSLKFAYCGKWFVSTGKDNLLNAWRTPYGASIFQSKESSSVLSCDISADDKYIVTGSGDKKATVYEVIY

SEQ ID NO: 20985 - protein, 747 aa, Homo sapiens
MSAEEDARWLRWVTQQFKTIAGEDGEISLQEFKAALHVKESFFAERFFALFDSDRSGTITLQELQEALTLLIHGSPMDKLKFLFQVYDIDVCARQGASAGTEWGAGAGPHWASSPLGTGSGSIDPDELRTVLQSCLRESAISLPDEKLDQLTLALFESADADGNGAITFEELRDELQRFPGVMENLTISAAHWLTAPAPRPRPRRPRQLTRAYWHNHRSQLFCLATYAGLHVLLFGLAASAHRDLGASVMVAKGCGQCLNFDCSFIAVLMLRRCLTWLRATWLAQVLPLDQNIQFHQLMGYVVVGLSLVHTVAHTVNFVLQAQAEASPFQFWELLLTTRPGIGWVHGSASPTGVALLLLLLLMFICSSSCIRRSGHFEVFYWTHLSYLLVWLLLIFHGPNFWKWLLVPGILFFLEKAIGLAVSRMAAVCIMEVNLLPSKVTHLLIKRPPFFHYRPGDYLYLNIPTIARYEWHPFTISSAPEQKDTIWLHIRSQGQWTNRLYESFKASDPLGRGSKRLSRSVTMRKSQRSSKGSEILLEKHKFCNIKCYIDGPYGTPTRRIFASEHAVLIGAGIGITPFASILQSIMYRHQKRKHTCPSCQHSWIEGVQDNMKLHKVDFIWINRDQRSFEWFVSLLTKLEMDQAEEAQYGRFLELHMYMTSALGKNDMKAIGLQMALDLLANKEKKDSITGLQTRTQPGRPDWSKVFQKVAAEKKGKVQVFFCGSPALAKVLKGHCEKFGFRFFQENF

SEQ ID NO: 20986 - protein, 121 aa, Homo sapiens
MGFSSELCSPQGHGVLQQMQEAELRLLEGMRKWMAQRVKSDREYAGLLHHMSLQDSGGQSRAISPDSPISQVGLYGTLVGAGCICLLLPLLGALWGSGWRSGRPMLGSHCAPLPASPICAV

SEQ ID NO: 20987 - protein, 779 aa, Homo sapiens
MTHTRRKSLPMLSSGLTGRREPLQMEDSNMEQGVEGVEPGMPESPGHLTGRRKNYPLRKRPLVPEKPKACKVLLTRLENVAGPRSADEADELPPDLPKPPSPAPSSEDPGLAQPRKRRLASLNAEALNNLLLEREDTSSLAGTRRSRAGDPHRSRDRDRATGGWSSSKKRPRLGDLGGGSRDLSPEPAPDEGPRRDGDPAPKRLASLNAAAFLKLSQERELPLRLPRAHAEVDGRSTEPPAPKAPRPKWPKVNGKNYPKAWQGASSGEAAGPPGWQGCPDEPWPSATPCGPSVQPSHQPLSKALESPLGLRPHLPLLMGGQAALKPEPGRPGEESPAPKQELHQPSFPTPQLSPLPMPGNPADYNGLCVGPELTALGSFYLYCGQEGLQCGGYSPCPMLPEGKLSPVAAPHEEGLLLAPSSVPSGTPFQHPPWGSSRYCSSEDTGVNGYSICGVLPLSVTHAGTTCGGCPYKMPFAAGCRSLGQLEFPLPEAGHPASPAHPLLGCPVPSVPPAAEPVPHLQTPTSEPQTVARACPQSAKPPSGSKSGLRTGSSCRHTARSKAARRPSHPKQPRVQRPRPRRRRRRRTNGWVPVGAACEKAVYVLDEPEPAIRKSYQAVERHGETIRVRDTVLLKSGPRKTSTPYVAKISALWENPESGELMMSLLWYYRPEHLQGGRSPSMHEPLQNEVFASRHQDQNSVACIEEKCYVLTFAEYCRFCAMAKRRGEGLPSRKTALVPPSADYSTPPHRTVPEDTDPELVFLCRHVYDFRHGRILKNPQ

SEQ ID NO: 20988 - protein, 1286 aa, Homo sapiens
MAAVPQNNLQEQLERHSARTLNNKLSLSKPKFSGFTFKKKTSSDNNVSVTNVSVAKTPVLRNKDVNVTEDFSFSEPLPNTTNQQRVKDFFKNAPAGQETQRGGSKSLLPDFLQTPKEVVCTTQNTPTVKKSRDTALKKLEFSSSPDSLSTINDWDDMDDFDTSETSKSFVTPPQSHFVRVSTAQKSKKGKRNFFKAQLYTTNTVKTDLPPPSSESEQIDLTEEQKDDSEWLSSDVICIDDGPIAEVHINEDAQESDSLKTHLEDERDNSEKKKNLEEAELHSTEKVPCIEFDDDDYDTDFVPPSPEEIISASSSSSKCLSTLKDLDTSDRKEDVLSTSKDLLSKPEKMSMQELNPETSTDCDARQISLQQQLIHVMEHICKLIDTIPDDKLKLLDCGNELLQQRNIRRKLLTEVDFNKSDASLLGSLWRYRPDSLDGPMEGDSCPTGNSMKELNFSHLPSNSVSPGDCLLTTTLGKTGFSATRKNLFERPLFNTHLQKSFVSSNWAETPRLGKKNESSYFPGNVLTSTAVKDQNKHTASINDLERETQPSYDIDNFDIDDFDDDDDWEDIMHNLAASKSSTAAYQPIKEGRPIKSVSERLSSAKTDCLPVSSTAQNINFSESIQNYTDKSAQNLASRNLKHERFQSLSFPHTKEMMKIFHKKFGLHNFRTNQLEAINAALLGEDCFILMPTGGGKSLCYQLPACVSPGVTVVISPLRSLIVDQVQKLTSLDIPATYLTGDKTDSEATNIYLQLSKKDPIIKLLYVTPEKICASNRLISTLENLYERKLLARFVIDEAHCVSQWGHDFRQDYKRMNMLRQKFPSVPVMALTATANPRVQKDILTQLKILRPQVFSMSFNRHNLKYYVLPKKPKKVAFDCLEWIRKHHPYDSGIIYCLSRRECDTMADTLQRDGLAALAYHAGLSDSARDEVQQKWINQDGCQVICATIAFGMGIDKPDVRFVIHASLPKSVEGYYQESGRAGRDGEISHCLLFYTYHDVTRLKRLIMMEKDGNHHTRETHFNNLYSMVHYCENITECRRIQLLAYFGENGFNPDFCKKHPDVSCDNCCKTKDYKTRDVTDDVKSIVRFVQEHSSSQGMRNIKHVGPSGRFTMNMLVDIFLESLSSDPEVLLQIDGVTEDKLEKYGAEVISVLQKYSEWTSPAEDSSPGISLSSSRGPGRSAAEELDEEIPVSSHYFASKTRNERKRKKMPASQRSKRRKTASSGSKAKGGSATCRKISSKTKSSSIIGSSSASHTSQATSGANSKLGIMAPPKPINRPFLKPSYAFS

SEQ ID NO: 20989 - protein, 377 aa, Homo sapiens
MLQTLYDYFWWERLWLPVNLTWADLEDRDGRVYAKASDLYITLPLALLFLIVRYFFELYVATPLAALLNIKEKTRLRAPPNATLEHFYLTSGKQPKQSGLSGRQVERWFRRRRNQDRPSLLKKFREASWRFTFYLIAFIAGMAVIVDKPWFYDMKKVWEGYPIQSTIPSQYWYYMIELSFYWSLLFSIASDVKRKDFKEQIIHHVATIILISFSWFANYIRAGTLIMALHDSSDYLLESAKMFNYAGWKNTCNNIFIVFAIVFIITRLVILPFWILHCTLVYPLELYPAFFGYYFFNSMMGVLQLLHIFWAYLILRMAHKFITGKELGGVASPETSGQGSTIRKTQFLRKRQFKKGWEEGCPLKKTSSAFNGPTATE

SEQ ID NO: 20990 - protein, 383 aa, Homo sapiens
MSSKMVISEPGLNWDISPKNGLKTFFSRENYKDHSMAPSLKELRVLSNRRIGENLNASASSVENEPAVSSATQAKEKVKTTIGMVLLPKPRVPYPRFSRFSQREQRSYVDLLVKYAKIPANSKAVGINKNDYLQYLDMKKHVNEEVTEFLKFLQNSAKKCAQDYNMLSDDARLFTEKILRACIEQVKKYSEFYTLHEVTSLMGFFPFRVEMGLKLEKTLLALGSVKYVKTVFPSMPIKLQLSKDDIATIETSEQTAEAMHYDISKDPNAEKLVSRYHPQIALTSQSLFTLLNNHGPTYKEQWEIPVCIQVIPVAGSKPVKVIYINSPLPQKKMTMRERNQIFHEVPLKFMMSKNTSVPVSAVFMDKPEEFISEMDVCNAFFFP

SEQ ID NO: 20991 - protein, 153 aa, Homo sapiens
EPNAHRKDGTRLGLGSLRQAFSRASQRALTQVSKEDTGLFRRSSCSLFRSFRQALNDGPATGHSQATPEVPSGVMNGVSQQASTGAASEELKPEAVLTSWAPRGWRCPPSRCLRSWRRTCGPDWRATTPASWRPRSQAASTASCSWSRVTGRP

SEQ ID NO: 20992 - protein, 546 aa, Homo sapiens
MGTLGKAREAPRKPSHGCRAASKARLEAKPANSPFPSHPSLAHITQFRMMVSLGHLAKGASLDDLIDSCIQSFDADGNLCRSNQLLQVMLTMHRIVISSAELLQKVITLYKDALAKNSPGLCLKICYFVRYWITEFWVMFKMDASLTDTMEEFQELVKAKGEELHCRLIDTTQINARDWSRKLTQRIKSNTSKKRKVSLLFDHLEPEELSEHLTYLEFKSFRRISFSDYQNYLVNSCVKENPTMERSIALCNGISQWVQLMVLSRPTPQLRAEVFIKFIQVAQKLHQLQNFNTLMAVIGGLCHSSISRLKETSSHVPHEINKVLGEMTELLSSSRNYDNYRRAYGECTDFKIPILGVHLKDLISLYEAMPDYLEDGKVNVHKLLALYNHISELVQLQEVAPPLEANKDLVHLLTLSLDLYYTEDEIYELSYAREPRNHRAPSVFKNYDHDQDGYISQEEFEKIAASFPFSFCVMDKDREGLISRDEITAYFMRASSIYSKLGLGFPHNFQETTYLKPTFCDNCAGFLWGVIKQGYRCKGNKYSESR

SEQ ID NO: 20993 - protein, 392 aa, Homo sapiens
MMQLRQLDMKRITEEERRMASVLAKKEEEKKRESHKQSLLKEKKRLTINNVARQWDLQQQRVANIATNEDRKDSDSPQDPCQIDGSTLSAFPEETGPLDSGLNNALQGLSVIDTYLVEVDGDTLSLYGSGALESLDRNWSVQTAGMITTVSFTFIEFDEIVQVLPKLKIKFPNSLHLKFKETNLVMLQQFNALAQLRRIDQLTIDPQGNPVVNFTLWKYYVLFRLSHFSMQKINGTEVTQNDMIMAERLFGILAHVASSELPQYRLISILGDARKKQFRYLLESKGKKPGIINEENNDSKRLVGENTNRATLNYTTRDFYNEKLEEIKEKKKFCKTYIEDLVKEATEINMKNEALQKLWPQMFIELVRDAVIEIRNKNSYMKLCLQQITDQK

SEQ ID NO: 20994 - protein, 253 aa, Homo sapiens
ATQKQFNYTHICAGASAFGKNLLPRVAAKLEVAPISDIIAIKSPDTFVRTIYAGNALCTVKCDEKVKVFSVRGTSFDAAATSGGSASSEKASSTSPVEISEWLDQKLTKSDRPELTGAKVVVSGGRGLKSGENFKLLYDLADQLHAAVGASRAAVDAGFVPNDMQVGQTGKIVAPELYIAVGISGAIQHLAGMKDSKTIVAINKDPEAPIFQVADYGIVADLFKPPWTALLCPSSHKAALHWKLQLQPLHCHD

SEQ ID NO: 20995 - protein, 436 aa, Homo sapiens
MKVFCEVLEELYKKVLLGATLENDSHDYIFYLNPAVSDQDCSTATSLEWANTCGIQGRHQPISVGVAPIAVAPVCLKTNSQMSGSREVMLLQLTVIKVMTTRILSVKTEFHAKEQYRDVIKILLESAKVDSKLICMFQNSDKLLSHMAAQCLALLLYFQLREKITLSNSWIAFCQKNLSEYSESNKAIYCLWTLTAIIKEIFKDSCSQKTEILKQFLTHFDTIFEVFYNSLFSQHFENCRDTSKIVNILMCFLDLLELLIASRIHLKLHFTCQRILFLKPSCMLEVITWPIQAFVKRKVIIFLKKCLLCKVGEDLCRGSVPALMPPDHHVAVDMLALANAVLQAVNSGLLKTLSVYEKHSFFGGDEVQPECELITSPDHVILRAASLVIMKSLEIKFQNYSSASEVKGNSPNSFCMQCVIIYLSTVIHNYQISGLV

SEQ ID NO: 20996 - protein, 370 aa, Homo sapiens
MAQRYDDLPHYGGMDGVGIPSTMYGDPHAARSMQPVHHLNHGPPLHSHQYPHTAHTNAMAPSMGSSVNDALKRDKDAIYGHPLFPLLALIFEKCELATCTPREPGVAGGDVCSSESFNEDIAVFAKQIRAEKPLFSSNPELDNLMIQAIQVLRFHLLELEKVHELCDNFCHRYISCLKGKMPIDLVIDDREGGSKSDSEDITRSANLTDQPSWNRDHDDTASTRSGGTPGPSSGGHTSHSGDNSSEQGDGLDNSVASPSTGDDDDPDKDKKRHKKRGIFPKVATNIMRAWLFQHLTHPYPSEEQKKQLAQDTGLTILQVNNWFINARRRIVQPMIDQSNRAGKSPIVTVFKSRKRKPSSSHSPGGPLPGK

SEQ ID NO: 20997 - protein, 80 aa, Homo sapiens
ANLQLFWNMYNRPAPTQRAARGWARSTTPWRCPVEALDPADDAHVEAPPPSLRRLMFPLVYFCEGKGEEMGFCLKKMRGS

SEQ ID NO: 20998 - protein, 533 aa, Homo sapiens
MMSEGKPPDKKRPRRSLSISKNKKKASNSIISCFNNAPPAKLACPVCSKMVPRYDLNRHLDEMCANNDFVQVDPGQVGLINSNVSMVDLTSVTLEDVTPKKSPPPKTNLTPGQSDSAKREVKQKISPYFKSNDVVCKNQDELRNRSVKVICLGSLASKLSRKYVKAKKSIDKDEEFAGSSPQSSKSTVVKSLIDNSSEIEDEDQILENSSQKENVFKCDSLKEECIPEHMVRGSKIMEAESQKATRECEKSALTPGFSDNAIMLFSPDFTLRNTLKSTSEDSLVKQECIKEVVEKREACHCEEVKMTVASEAKIQLSDSEAKSHSSADDASAWSNIQEAPLQDDSCLNNDIPHSIPLEQGSSCNGPGQTTGHPYYLRSFLVVLKTVLENEDDMLLFDEQEKGIVTKFYQLSATGQKLYVRLFQRKLSWIKMTKLEYEEIALDLTPVIEELTNAGFLQTESELQELSEVLELLSAPELKSLAKTFHLVNPNGQKQQLVDAFLKLAKQRSVCTWGKNKPGIGAVILKRFCWLLLQ

SEQ ID NO: 20999 - protein, 1149 aa, Homo sapiens
MEASLTRRLLFKDRHFTCSKIIGRRFACFAQRLSHRRKQSQCDLLNESTGQLPTTCSSAASNSINWNCRVKMTQQMQNLHLCQSKKHSAPSSPNAAKRLYRNLSEKLKGSHSSFDEAYFRTRTDRLSLRKTSVNFQGNEAMFEAVEQQDMDAVQILLYQYTPEELDLNTPNSEGLTPLDIAIMTNNVPIARILLRTGARESPHFVSLESRAMHLNTLVQEAQERVSELSAQVENEGFTLDNTEKEKQLKAWEWRYRLYRRMKTGFEHARAPEMPTNVCLMVTSSTSLTVSFQEPLSVNAAVVTRYKVEWSMSEDFSPLAGEIIMDNLQTLRCTITGLTMGQQYFVQVSAYNMKGWGPAQTTTPACASPSNWKDYDDREPRHKGQSEVLEGLLQQVRALHQHYSCRESTKLQTTGRKQSVSRSLKHLFHSSNKFVKTLKRGLYIAVIFYYKDNILVTNEDQVPIVEIDDSHTSSITQDFLWFTKLSCMWEDIRWLRQSIPISSSSSTVLQTRQKMLAATAQLQNLLGTHNLGRVYYEPIKDRHGNILIVTIREVEMLYSFFNGKWMQISKLQSQRKSLSTPEEPTALDILLITIQDILSYHKRSHQRLFPGLYLGYLKLCSSVDQIKVLVTQKLPNILCHVKIRENNNISREEWEWIQKLSGSESMESVDHTSDCPMQLFFYELQMAVKALLQQINIPLHQARNFRLYTQEVLEMGHNVSFLLLLPASDDVCTAPGQNNPYTPHSGFLNLPLQMFELVHFCSYREKFISLYCRLSAVVELDSLNTQQSLREAISDSEVAAAKQRHQQVLDFIQQIDEVWREMRWIMDALQYARYKQPVSGLPITKLIDPSDEQSLKKINSTSSSHIDCLPSPPPSPEMHRRKTVSDSQPCSDEEACSEVFLPTNSDYDSSDALSPRDLDLVYLSSHDIAQQTLSGLSGSAPDVLQVHDVKTPLGPGQDPQGEGPNPDHSCAEFLHSLTLTGFTPKNHAKTVSGGRPPLGFLGKRKPGKHPHYGGFSRHHRWLRIHSETQSLSLSEGIYTQHLSQACGLAQEPKEAKRAGPALDDPRGLTLAHAASLPEERNSSLQDARPSVRRLYVEPYAAAVVAQDEKPWASLSPPSGGRITLPSPTGPDVSQEGPTASPMSEILSSML

SEQ ID NO: 21000 - protein, 163 aa, Homo sapiens
MGLHLRPYRVGLLPDGLLFLLLLLMLLADPALPAGRHPPVVLVPGDLGNQLEAKLDKPTVVHYLCSKKTESYFTIWLNLELLLPVIIDCWIDNIRLVYNKTSRATQFPDGVDVRVPGFGKTFSLEFLDPSKSSVDENGPYFLALREMIEEMYQLYGGPVVLVA

SEQ ID NO: 21001 - protein, 170 aa, Homo sapiens
LEGESFALSFSSASDAEFDAVVGYLEDIIMDDEFQLLQRNFMDKYYLEFEDTEENKLIYTPIFNEYISLVEKYIEEQLLQRIPEFNMAAFTTTLQHHKDEVAGDIFDMLLTFTDFLAFKEMFLDYRALPRTICGTRSYLQPMNGIILDVTSPIGSAHDDRTHLGKTDSVM

SEQ ID NO: 21002 - protein, 360 aa, Homo sapiens
MLSAAHDILSHKRTSGNQSHAVLLADILPTLVIKLLAPLGLHLLPYSPRVLVSGICAAGSFVLVAFSHSVGTSLCGVVFASISSGLGEVTFLSLTAFYPRAVISWWSSGTGGAGLLGALSYLGLTQAGLSPQQTLLSMLGIPALLLASYFLLLTSPEAQDPGGEEEAESAARQPLIRTEAPESKPGSSSSLSLRERWTVFKGLLWYIVPLVVVYFAEYFINQGLFELLFFWNTSLSHAQQYRWYQMLYQAGVFASRSSLRCCRIRFTWALALLQCLNLVFLLADVWFGFLPSIYLVFLIILYEGLLGGAAYVNTFHNIALETSDEHREFAMAATCISDTLGISLSGLLALPLHDFLCQLS

SEQ ID NO: 21003 - protein, 639 aa, Homo sapiens
MKTNGGRCRIRALCWSRREWRGAGMAQKKYLQAKLTQFLREDRIQLWKPPYTDENKKVGLALKDLAKQYSDRLECCENEVEKVIEEIRCKAIERGTGNDNYRTTGIATIEVFLPPRLKKDRKNLLETRLHITGRELRSKIAETFGLQENYIKIVINKKQLQLGKTLEEQGVAHNVKAMVLELKQSEEDARKNFQLEEEEQNEAKLKEKQIQRTKRGLEILAKRAAETVVDPEMTPYLDIANQTGRSIRIPPSERKALMLAMGYHEKGRAFLKRKEYGIALPCLLDADKYFCECCRELLDTVDNYAVLQLDIVWCYFRLEQLECLDDAEKKLNLAQKCFKNCYGENHQRLVHIKGNCGKEKVLFLRLYLLQGIRNYHSGNDVEAYEYLNKARQLFKELYIDPSKVDNLLQLGFTAQEARLGLRACDGNVDHAATHITNRREELAQIRKEEKEKKRRRLENIRFLKGMGYSTHAAQQVLHAASGNLDEALKILLSNPQMWWLNDSNPETDNRQESPSQENIDRLVYMGFDALVAEAALRVFRGNVQLAAQTLAHNGGSLPPELPLSPEDSLSPPATSPSDSAGTSSASTDEDMETEAVNEILEDIPEHEEDYLDSTLEDEEIIIAEYLSYVENRKSATKKN

SEQ ID NO: 21004 - protein, 249 aa, Homo sapiens
MNPFWSMSTSSVRKRSEGEEKTLTGDVKTSPPRTAPKKQLPSIPKNALPITKPTSPAPAAQSTNGTHASYGPFYLEYSLLAEFTLVVKQKLPGVYVQPSYRSALMWFGVIFIRHGLYQDGVFKFTVYIPDNYPDGDCPLSRGTSVLCSSFRHAIRALFLCSGSAREAGCLPSCSTHQRLVFDIPVFHPLVDPTSGELDVKRAFAKWRRNHNHIWQVLMYARRVFYKIDTASPLNPEAAVLYEKDIQLFK

SEQ ID NO: 21005 - protein, 33 aa, Homo sapiens
LLCAEMPKKAGATTKASSRVKARARNQRDHFLP

SEQ ID NO: 21006 - protein, 878 aa, Homo sapiens
MGPLSRDAWAQRLGAFRASPSAFMAGPEGEDLGRDLLSDLRSEKLSEQTKVSLLALSMEYPAQLWPDASAAEVAATSLLDTLVLLPPRPSALRRPLLLAATTALAAGGALGPTSGASCRLLPLLLGLAAGSDLGRGFVPASEQRPLQATACECLRELESCKPGLLGGSLGLLRGLLGQEGPVQPLSLLLALALRNTLVLQSRVGAGLGGLLTDKVSPTGGGPWDWTLVEEGDGRLQPQAPSWPAAEEGEGERSLTAREHSPEEARELRAAVIQLLDTSYLLTPVAQAQLLWLLGWALRGLQGQPPALFKPQLVRLLGTAQLTLLHAMLALKAAFGEALFTAQDEALLLRRLTLAAQHPALPPPTHLFYLHCVLSFPENWPLGPEGEEAAPLLLGPQLCRGLLPSLLHDPMALLARLHLLCLLCAEEEEEEKGQLPSPRHYLEELLAGLRQRAALDGGPRALATLCFQASYLVACCLAGQPTVLTPLIHGLAQLYQARPMLAPHFVDLLDQVDSELREPLKVVLRQVVVSRPGRDEALCWHLQMLAKVADGDAQSATLNFLQAAAAHCTNWDLQQGLLRVCRALLRAGVRGGLVDLLQVLARQLEDPDGRDHARLYYILLAHLAAPKLGVALGPSLAAPALASSLVAENQGFVAALMVQEAPALVRLSLGSHRVKGPLPVLKLQPEALEPIYSLELRFRVEGQLYAPLEAVHVPCLCPGRPARPLLLPLQPRCPAPARLDVHALYTTSTGLTCHAHLPPLFVNFADLFLPFPQPPEGAGLGFFEELWDSCLPEGAESRVWCPLGPQGLEGLVSRHLEPFVVVAQPPTSYCVAIHLPPDSKLLLRLEAALADGVPVALRTDDWAVLPLAGDYLRGLAAAV

SEQ ID NO: 21007 - protein, 241 aa, Homo sapiens
MINPYRNLPLAIIISLPIVTLVYVLTNLAYFTTLSTEQMLSSEAVAVDFGNYHLGVMSWIIPVFVGLSCFGSVNGSLFTSSRLFFVGSREGHLPSILSMIHPQLLTPVPSLVFTCVMTLLYAFSKDIFSVINFFSFFNWLCVALAIIGMIWLRHRKPELERPIKVNLALPVFFILACLFLIAVSFWKTPVECGIGFTIILSGLPVYFFGVWWKNKPKWLLQGIFSTTVLCQKLMQVVPQET

SEQ ID NO: 21008 - protein, 607 aa, Homo sapiens
MHHQQRMAALGTDKELSDLLDFSAMFSPPVSSGKNGPTSLASGHFTGSNVEDRSSSGSWGNGGHPSPSRNYGDGTPYDHMTSRDLGSHDNLSPPFVNSRIQSKTERGSYSSYGRESNLQGCHQVYAPSASTADYNRDSPGYPSSKPATSTFPSSFFMQDGHHSSDPWSSSSGMNQPGYAGMLGNSSHIPQSSSYCSLHPHERLSYPSHSSADINSSLPPMSTFHRSGTNHYSTSSCTPPANGTDSIMANRGSGAAGSSQTGDALGKALASIYSPDHTNNSFSSNPSTPVGSPPSLSAGTAVWSRNGGQASSSPNYEGPLHSLQSRIEDRLERLDDAIHVLRNHAVGPSTAMPGGHGDMHGIIGPSHNGAMGGLGSGYGTGLLSANRHSLMVGTHREDGVALRGSHSLLPNQVPVPQLPVQSATSPDLNPPQDPYRGMPPGLQGQSVSSGSSEIKSDDEGDENLQDTKSSEDKKLDDDKKDIKSITSNNDDEDLTPEQKAEREKERRMANNARERLRVRDINEAFKELGRMVQLHLKSDKPQTKLLILHQAVAVILSLEQQVRERNLNPKAACLKRREEEKVSSEPPPLSLAGPHPGMGDASNHMGQM

SEQ ID NO: 21009 - protein, 589 aa, Homo sapiens
MNTKKRGSPARTHSMMSLSVRPQRRLLSARVNRSQSFAGVLGSHERGPRAYLEVHQQEQEKLQGQIRESKRNSRLGFLYDLDKQVKSIERFLRRLEFHASKIDELYEAYCVQRRLRDGAYNMVRAYTTGSPGSREARDSLAEATRGHREYTESMCLLESELEAQLGEFHLRMKGLAGFARLCVGDQYEICMKYGRQRWKLRGRIEGSGKQVWDSEETIFLPLLTEFLSIKVTELKGLANHVVVGSVSCETKDLFAALPQVVAVDINDLGTIKLSLEVTWSPFDKDDQPSAASSVNKASTVTKRFSTYSQSPPDTPSLREQAFYNMLRRQEELENGTAWSLSSESSDDSSSPQLSGTARHSPAPRPLVQQPEPLPIQVAFRRPETPSSGPLDEEGAVAPVLANGHAPYSRTLSHISEASVDAALAEASVEAVGPESLAWGPSPPTHPAPTHGEHPSPVPPALDPGHSATSSTLGTTGSVPTSTDPAPSAHLDSVHKSTDSGPSELPGPTHTTTGSTYSAITTTHSAPSPLTHTTTGSTHKPIISTLTTTGPTLNIIGPVQTTTSPTHTMPSPTHTTASPTHTSTSPTHTP

SEQ ID NO: 21010 - protein, 236 aa, Homo sapiens
PAGQQTVEIDLRHRIQLPDLENQRNFNELSRIVLEVRERVRQEQQEGGHEAGEGRGRQGPRESQPSPAQPRAEAPSKGPDGTPGEDGGEPGDAVAAAEQPAQCGQGQPFVLPVGVSSRNEDYPRTCRMWNSTFQTYKKEVCLPRHSMHPGPWAICCECQTRFGGRLPVSRVEAALPYWVPLSLRPRKQHPCWMHAAGTTAGGSAVMSACCPSSSSSRPPTRTSYRLLQRVCCPSAS

SEQ ID NO: 21011 - protein, 909 aa, Homo sapiens
MWPQPHLPPHPMMSEKTRQNKLAEAKKKFTDYRQWNIAGVGTRATDTKKKKINNGTNPETTTSEGCHSPEDTQQNRAQLKEEKKASHQHQEALRREIEAQDHTIRILTCQKTELETALYYSQDAARKFEDGNLGTPSSFNLALSQAFRGSPLGCVSTSLIPGESKDLAGRLHHSWHFAGELQRALSAVSTWHKKADRYIEELTKERDALSLELYRNTITNEELKKKNAELQEKLRLAESEKSEIQLNVKELKRKLERAKFLLPQVQTNTLQEEMWRQEEELREQEKKIRKQEEKMWRQEERLREQEGKMREQEEKMRRQEKRLREQEKELREQEKELREQKKLREQEEQMQEQEEKMWEQEEKMREQEEKMWRQEERLWEQEKQMREQEQKMRDQEERMWEQDERLREKEERMREQEKMWEQVEKMREEKKMQEQEKKTRDQEEKMQEEERIREREKKMREEEETMREQEEKMQKQEENMWEQEEKEWQQQRLPEQKEKLWEQEKMQEQEEKIWEQEEKIRDQEEMWGQEKKMWRQEKMREQEDVETGGEAAGAGEADVGAGGEDAGSGAEDVGPGGEDVGAGREAAGEGGENAGAEEDVAAGGEDAGGEEDAGAGEEDMGPGGEDARGGEDAGAGEEDAGGGGDDAGAGGEDAGAGREDAGAGGEDVGAGREDAGAGGEDVGAGGEDVGAGRRRCGSSRGCRNRRRSCGNTRRCRSRRSGAEDVGPEGEDVGAGREAAGEGGENAGAEDVAAGGEDAGEEEDAGGEDAGAAREDAGAGGDDVGAGREDAGAGGEDVGAGGEDAGAGGEDAGAGGEDAGPGGEDAGAGGEDAGPGGEDAGAGGEDAGPGGEDVGPGGEDVGAGGEDVGAGGDAREGGEDTRSEREDAGEAARARGAVLRALPPSLQSSL

SEQ ID NO: 21012 - protein, 553 aa, Homo sapiens
MDSPGYNCFVDKDKMDAAIQDLGPKELSCTELQELKQLARQGYWAQSHALRGKVYQRLIRDIPCRTVTPDASVYSDIVGKIVGKHSSSCLPLPEFVDNTQVPSYCLNARGEGAVRKILLCLANQFPDISFCPALPAVVALLLHYSIDEAECFEKACRILACNDPGRRLIDQSFLAFESSCMTFGDLVNKYCQAAHKLMVAVSEDVLQVYADWQRWLFGELPLCYFARVFDVFLVEGYKVLYRVALAILKFFHKVRAGQPLESDSVKQDIRTFVRDIAKTVSPEKLLEKAFAIRLFSRKEIQLLQMANEKALKQKGITVKQKRQFVHLAVHAENFRSEIVSVREMRDIWSWVPERFALCQPLLLFSSLQHGYSLARFYFQCEGHEPTLLLIKTTQKEVCGAYLSTDWSERNKFGGKLGFFGTGECFVFRLQPEVQRYEWVVIKHPELTKPPPLMAAEPTAPLSHSASSDPADRLSPFLAARHFNLPSKTESMFMAGGSDCLIVGGGGGQALYIDGDLNRGRTSHCDTFNNQPLCSENFLIAAVEAWGFQDPDTQ

SEQ ID NO: 21013 - protein, 84 aa, Homo sapiens
FLPVYHPSPEESRDPTLYANNVQRVMAQALGIPATECEFVGSLPVIVVGRLKVALEPQLWELGKVLRKAGIPRVWWTSEMWPLH

SEQ ID NO: 21014 - protein, 1301 aa, Homo sapiens
MEMVGFLPKTRRQIFSLLSAILHLGNICYKKKTYRDDSIDICNPEVLPIVSELLEVKEEMLFEALVTRKTVTVGEKLILPYKLAEAVTVRNSMAKSLYSALFDWIVFRINHALLNSKDLEHNTKTLSIGVLDIFGFEDYENNSFEQFCINFANERLQHYFNQHIFKLEQEEYRTEGISWHNIDYIDNTCCINLISKKPTGLLHLLDEESNFPQATNQTLLDKFKHQHEDNSYIEFPAVMEPAFIIKHYAGKVKYGVKDFREKNTDHMRPDIVALLRSSKNAFISGMIGIDPVAVFRWAILRAFFRAMVAFREAGKRNIHRKTGHDDTAPCAILKSMDSFSFLQHPVHQRSLEILQRCKEEKYSKATNPDKLLSHIHLEMETRSILHQGITRKNPRTPLSDLQGMNALNEKNQHDTFDIAWNGRTGIRQSRLSSGTSLLDKDGIFANSTSSKLLERAHGILTRNKNFKSKPALPKHLLEVNSLKHLTRLTLQDRITKSLLHLHKKKKPPSISAQFQASLSKLMETLGQAEPYFVKCIRSNAEKLPLRFSDVLVLRQLRYTGMLETVRIRQSGYSSKYSFQDFVSHFHVLLPRNIIPSKFNIQDFFRKINLNPDNYQVGKTMVFLKEQERQHLQDLLHQEVLRRIILLQRWFRVLLCRQHFLHLRQASVIIQRFWRNYLNQKQVRDAAVQKDAFVMASAAALLQASWRAHLERQRYLELRAAAIVIQQKWRDYYRRRHMAAICIQARWKAYRESKRYQEQRKKIILLQSTCRGFRARQRFKALKEQRLRETKPEVGLVNIKGYGSLEIQGSDPSGWEDCSFDNRIKAIEECKSVIESNRISRESSVDCLKESPNKQQERAQSQSGVDLQEDVLVRERPRSLEDLHQKKVGRAKRESRRMRELEQAIFSLELLKVRSLGGISPSEDRRWSTELVPEGLQSPRGTPDSESSQGSLELLSYEESQKSKLESVISDEGDLQFPSPKISSSPKFDSRDNALSASNETSSAEHLKDGTMKEMVVCSSESITCKPQLKDSFISNSLPTFFYIPQQDPLKTNSQLDTSIQRNKLLENEDTAGEALTLDINRETRRYHCSGKDQIVPSLNTESSNPVLKKLEKLNTEKEERQKQLQQQNEKEMMEQIRQQTDILEKERKAFKTIEKPRIGECLVAPSSYQSKQRVERPSSLLSLNTSNKGELNVLGSLSLKDAALAQKDSSSAHLPPKDRPVTVFFERKGSPCQSSTVKELSKTDRMGTQLNVACKLSNNRISKREHFRPTQSYSHNSDDLSREGNARPIFFTPKDNMSIPL

SEQ ID NO: 21015 - protein, 255 aa, Homo sapiens
MCEPEFGNDKAREPSVGGRWRVSWYERFVQPCLVELLGSALFIFIGCLSVIENGTDTGLLQPALAHGLALGLVIATLGNISGGHFNPAVSLAAMLIGGLNLVMLLPYWVSQLLGGMLGAALAKAVSPEERFWNASGAAFVTVQEQGQVAGALVAEIILTTLLALAVCMGAINEKTKGPLAPFSIGFAVTVDILAGGPVSGGCMNPARAFGPAVVANHWNFHWIYWLGPLLAGLLVGLLIRCFIGDGKTRLILKAR

SEQ ID NO: 21016 - protein, 125 aa, Homo sapiens
MLAGGVRSMPSPLLACWQPILLLVLGSVLSGSATGCPPRCECSAQDRAVLCHRKRFVAVPEGIPTETRLLDLGKNRIKTLNQDEFASFPHLEELELNENIVSAVEPGAFNNLFNLRTLGLRSNRL

SEQ ID NO: 21017 - protein, 1751 aa, Homo sapiens
MEGFSGASWSTMAKPTSKDSGLKEKFKILLGLGTPRPNPRSAEGKQTEFIITAEILRELSMECGLNNRIRMIGQICEVAKTKKFEEHAVEALWKAVADLLQPERPLEARHAVLALLKAIVQGQGERLGVLRALFFKVIKDYPSNEDLHERLEVFKALTDNGRHITYLEEELADFVLQWMDVGLSSEFLLVLVNLVKFNSCYLDEYIARMVQMICLLCVRTASSVDIEVSLQVLDAVVCYNCLPAESLPLFIVTLCRTINVKELCEPCWKLMRNLLGTHLGHSAIYNMCHLMEDRAYMEDAPLLRGAVFFVGMALWGAHRLYSLRNSPTSVLPSFYQAMACPNEVVSYEIVLSITRLIKKYRKELQVVAWDILLNIIERLLQQLQTLDSPELRTIVHDLLTTVEELCDQNEFHGSQERYFELVERCADQRPESSLLNLISYRAQSIHPAKDGWIQNLQALMERFFRSESRGAVRIKVLDVLSFVLLINRQFYEEELINSVVISQLSHIPEDKDHQVRKLATQLLVDLAEGCHTHHFNSLLDIIEKVMARSLSPPPELEERDVAAYSASLEDVKTAVLGLLVILQTKLYTLPASHATRVYEMLVSHIQLHYKHSYTLPIASSIRLQAFDFLLLLRADSLHRLGLPNKDGVVRFSPYCVCDYMEPERGSEKKTSGPLSPPTGPPGPAPAGPAVRLGSVPYSLLFRVLLQCLKQESDWKVLKLVLGRLPESLRYKVLIFTSPCSVDQLCSALCSMLSGPKTLERLRGAPEGFSRTDLHLAVVPVLTALISYHNYLDKTKQREMVYCLEQGLIHRCASQCVVALSICSVEMPDIIIKALPVLVVKLTHISATASMAVPLLEFLSTLARLPHLYRNFAAEQYASVFAISLPYTNPSKFNQYIVCLAHHVIAMWFIRCRLPFRKDFVPFITKGLRSNVLLSFDDTPEKDSFRARSTSLNERPKRIQTSLTSASLGSADENSVAQADDSLKNLHLELTETCLDMMARYVFSNFTAVPKRSPVGEFLLAGGRTKTWLVGNKLVTVTTSVGTGTRSLLGLDSGELQSGPESSSSPGVHVRQTKEAPAKLESQAGQQVSRGARDRVRSMSGGHGLRVGALDVPASQFLGSATSPGPRTAPAAKPEKASAGTRVPVQEKTNLAAYVPLLTQGWAEILVRRPTGNTSWLMSLENPLSPFSSDINNMPLQELSNALMAAERFKEHRDTALYKSLSVPAASTAKPPPLPRSNTDSAVVMEEGSPGEVPVLVEPPGLEDVEAALGMDRRTDAYSRSSSVSSQEEKSLHAEELVGRGIPIERVVSSEGGRPSVDLSFQPSQPLSKSSSSPELQTLQDILGDPGDKADVGRLSPEVKARSQSGTLDGESAAWSASGEDSRGQPEGPLPSSSPRSPSGLRPRGYTISDSAPSRRGKRVERDALKSRATASNAEKVPGINPSFVFLQLYHSPFFGDESNKPILLPNESQSFERSVQLLDQIPSYDTHKIAVLYVGEGQSNSELAILSNEHGSYRYTEFLTGLGRLIELKDCQPDKVYLGGLDVCGEDGQFTYCWHDDIMQAVFHIATLMPTKDVDKHRCDKKRHLGNDFVSIVYNDSGEDFKLGTIKGQFNFVHVIVTPLDYECNLVSLQCRKDMEGLVDTSVAKIVSDRNLPFVARQMALHANMASQVHHSRSNPTDIYPSKWIARLRHIKRLRQRICEEAAYSNPSLPLVHPPSHSKAPAQTPAEPTPGYEVGQRKRLISSVEDFTEFV

SEQ ID NO: 21018 - protein, 145 aa, Homo sapiens
RHLRATPNTRGSARLLCAEMPKKAGATTKGKSQSKEPERPLPPLGPVAVDPKGCVTIAIHAKPGSKQNAVTDLTAEAVNVAIAAPPSEGEANAELCRYLSKVLELRKSDVVLDKKLRDLLKIVPCKLATRTQILGLLVECSFSRL

SEQ ID NO: 21019 - protein, 1062 aa, Homo sapiens
MLKPQPLQQPSQPQQPPPTQQAVARRPPGGTSPPNGGLPGPLATSAAPPGPPAAASPCLGPVAAAGSGLRRGAEGILAPQPPPPQQHQERPGAAAIGSARGQSTGKGPPQSPVFEGVYNNSRMLHFLTAVVGSTCDVKVKNGTTYEGIFKTLSSKFELAVDAVHRKASEPAGGPRREDIVDTMVFKPSDVMLVHFRNVDFNYATKDKFTDSAIAMNSKVNGEHKEKVLQRWEGGDSNSDDYDLESDMSNGWDPNEMFKFNEENYGVKTTYDSSLSSYTVPLEKDNSEEFRQRELRAAQLAREIESSPQYRLRIAMENDDGRTEEEKHSAVQRQGSGRESPSLASREGKYIPLPQRVREGPRGGVRCSSSRGGRPGLSSLPPRGPHHLDNSSPGPGSEARGINGGPSRMSPKAQRPLRGAKTLSSPSNRPSGETSVPPPPAVGRMYPPRSPKSAAPAPISASCPEPPIGSAVPTSSASIPVTSSVSDPGVGSISPASPKISLAPTDVKELSTKEPGRTLEPQELARIAGKVPGLQNEQKRFQLEELRKFGAQFKLQPSSSPENSLDPFPPRILKEEPKGKEKEVDGLLTSEPMGSPVSSKTESVSDKEDKPPLAPSGGTEGPEQPPPPCPSQTGSPPVGLIKGEDKDEGPVAEQVKKSTLNPNAKEFNPTKPLLSVNKSTSTPTSPGPRTHSTPSIPVLTAGQSGLYSPQYISYIPQIHMGPAVQAPQMYPYPVSNSVPGQQGKYRGAKGSLPPQRSDQHQPASAPPMMQAAAAAGPPLVAATPYSSYIPYNPQQFPGQPAMMQPMAHYPSQPVFAPMLQSNPRMLTSGSHPQAIVSSSTPQYPSAEQPTPQALYATVHQSYPHHATQLHAHQPQPATTPTGSQPQSQHAAPSPVQHQAGQAPHLGSGQPQQNLYHPGALTGTPPSLPPGPSAQSPQSSFPQPAAVYAIHHQQLPHGFTNMAHVTQAHVQTGITAAPPPHPGAPHPPQVMLLHPPQSHGGPPQGAVPQSGVPALSASTPSPYPYIGHPQGEQPGQAPGFPGGADDRILQSHPSQQLPFHPPGN

SEQ ID NO: 21020 - protein, 1358 aa, Homo sapiens
MGEVEPGPAGPLEPPEPPEAPASRRPGGIRVLKRNMKRNGSRNCLNRRSRFGSRERDWLREDVKRGCVYLYGADTTTATTTTTTSSSSSSSSSSSDLHLVLCTVETPASEICAGEGRESLYLQLHGDLVRRLEPTERPLQIVYDYLSRLGFDDPVRIQEEATNPDLGCMIRFYGEKPCHMDRLDRILLSGIYNVRKGKTQLHKWAERLVVLCGTCLIVSSVKDCQTGKMHILPLVGGKIEEVKRRQYSLAFSSAGAQAQTYHVSFETLAEYQRWQRQASKVVSQRISTVDLSCYSLEEVPEHLFYSQDITYLNLRHNFMQLERPGGLDTLYKFSQLKGLNLSHNKLGLFPILLCEISTLTELNLSCNGFHDLPSQIGNLLNLQTLCLDGNFLTTLPEELGNLQQLSSLGISFNNFSQIPEVYEKLTMLDRVVMAGNCLEVLNLGVLNRMNHIKHVDLRMNHLKTMVIENLEGNKHITHVDLRDNRLTDLDLSSLCSLEQLHCGRNQLRELTLSGFSLRTLYASSNRLTAVNVYPVPSLLTFLDLSRNLLECVPDWACEAKKIEVLDVSYNLLTEVPVRILSSLSLRKLMLGHNHVQNLPTLVEHIPLEVLDLQHNALTRLPDTLFSKALNLRYLNASANSLESLPSACTGEESLSMLQLLYLTNNLLTDQCIPVLVGHLHLRILHLANNQLQTFPASKLNKLEQLEELNLSGNKLKTIPTTIANCKRLHTLVAHSNNISIFPEILQLPQIQFVDLSCNDLTEILIPEALPATLQDLDLTGNTNLVLEHKTLDIFSHITTLKIDQKPLPTTDSTVTSTFWSHGLAEMAGQRNKLCVSALAMDSFAEGVGAVYGMFDGDRNEELPRLLQCTMADVLLEEVQQSTNDTVFMANTFLVSHRKLGMAGQKLGSSALLCYIRPDTADPASSFSLTVANVGTCQAVLCRGGKPVPLSKVFSLEQDPEEAQRVKDQKAIITEDNKVNGVTCCTRMLGCTYLYPWILPKPHISSTPLTIQDELLILGNKALWEHLSYTEAVNAVRHVQDPLAAAKKLCTLAQSYGCQDNVGAMVVYLNIGEEGCTCEMNGLTLPGPVGFASTTTIKDAPKPATPSSSSGIASEFSSEMSTSEVSSEVGSTASDEHNAGGLDTALLPRPERRCSLHPTPTSGLFQRQPSSATFSSNQSDNGLDSDDDQPVEGVITNGSKVEVEVDIHCCRGRDLENSPPLIESSPTLCSEEHARGSCFGIRRQNSVNSGMLLPMSKDRMELQKSPSTSCLYGKKLSNGSIVPLEDSLNLIEVATEVPKRKTGYFAAPTQMEPEDQFVVPHDLEEEVKEQMKQHQDSRLEPEPHEEDRTEPPEEFDTAL

SEQ ID NO: 21021 - protein, 638 aa, Homo sapiens
MAAPLLHTRLPGDAAASSSAVKKLGASRTGISNMRALENDFFNSPPRKTVRFGGTVTEVLLKYKKGETNDFELLKNQLLDPDIKDDQIINWLLEFRSSIMYLTKDFEQLISIILRLPWLNRSQTVVEEYLAFLGNLVSAQTVFLRPCLSMIASHFVPPRVIIKEGDVDVSDSDDEDDNLPANFDTCHRALQIIARYVPSTPWFLMPILVEKFPFVRKSERTLECYVHNLLRISVYFPTLRHEILELIIEKLLKLDVNASRQGIEDAEETATQTCGGTDSTEGLFNMDEDEETEHETKAGPERLDQMVHPVAERLDILMSLVLSYMKDVCYVDGKVDNGKTKDLYRDLINIFDKLLLPTHASCHVQFFMFYLCSFKLGFAEAFLEHLWKKLQDPSNPAIIRQAAGNYIGSFLARAKFIPLITVKSCLDLLVNWLHIYLNNQDSGTKAFCDVALHGPFYSACQAVFYTFVFRHKQLLSGNLKEGLQYLQSLNFERIVMSQLNPLKICLPSVVNFFAAITNKYQLVFCYTIIERNNRQMLPVIRSTAGGDSVQICTNPLDTFFPFDPCVLKRSKKFIDPIYQVWEDMSAEELQEFKKPMKKDIVEDEDDDFLKGEVPQNDTVIGITPSSFDTHFRSPSSSF

SEQ ID NO: 21022 - protein, 507 aa, Homo sapiens
MASGDLYEVERIVDKRKNKKGKWEYLIRWKGYGSTEDTWEPEHHLLHCEEFIDEFNGLHMSKDKRIKSGKQSSTSKLLRDSRGPSVEKLSHRPSDPGKSKGTSHKRKRINPPLAKPKKGYSGKPSSGGDRATKTVSYRTTPSGLQIMPLKKSQNGMENGDAGSEKDERHFGNGSHQPGLDLNDHVGEQDMGECDVNHATLAENGLGGSALTNGGLNLHSPVKRKLEAEKDYVFDKRLRYSVRQNESNCRFRDIVVRKEEGFTHILLSSQTSDNNALTPEIMKEVRRALCNAATDDSKLLLLSAVGSVFCSGLDYSYLIGRLSSDRRKESTRIAEAIRDFVKAFIQFKKPIVVAINGPALGLGASILPLCDIVWASEKAWFQTPYATIRLTPAGCSSYTFPQILGVALANEMLFCGRKLTAQEACSRGLVSQVFWPTTFSQEVMLRVKEMASCSAVVLEESKCLVRSFLKSVLEDVNEKECLMLKQLWSSSKGLDSLFSYLQDKIYEV

SEQ ID NO: 21023 - protein, 727 aa, Homo sapiens
MTPPPPPPPPPGPDPAADPAADPCPWPGSLVVLFGATAGALGRDLGSDETDLILLVWQVVEPRSRQVGTLHKSLVRAEAAALSTQCREASGLSADSLARAEPLDKVLQQFSQLVNGDVALLGGGPYMLCTDGQQLLRQVLHPEASRKNLVLPDMFFSFYDLRREFHMQHPSTCPARDLTVATMAQGLGLETDATEDDFGVWEVKTMVAVILHLLKEPSSQLFSKPEVIKQKYETGPCSDSTVPCPYSSKADVVDSETVVRARGLPWQSSDQDVARFFKGLNVARGGVALCLNAQGRRNGEALIRFVDSEQRDLALQRHKHHMGVRYIEVYKATGEEFVKIAGGTSLEVARFLSREDQVILRLRGLPFSAGPTDVLGFLGPECPVTGGTEGLLFVRHPDGRPTGDAFALFACEELAQAALRRHKGMLGKRYIELFRSTAAEVQQVLNRYASGPLLPTLTAPLLPIPFPLAPGTGRDCVRLRGLPYTATIEDILSFLGEAAADIRPHGVHMVLNQQGRPSGDAFIQMTSAERALAAAQRCHKKVMKERYVEVVPCSTEEMSRVLMGGTLGRSGMSPPPCKLPCLSPPTYTTFQATPTLIPTETAALYPSSALLPAARVPAAPTPVAYYPGPATQLYLNYTAYYPSPPVSPTTVGYLTTPTAALASAPTSVLSQSGALVRMQGVPYTAGMKDLLSVFQAYQLPADDYTSLMPVGDPPRTVLQAPKEWVCL

SEQ ID NO: 21024 - protein, 298 aa, Homo sapiens
MGLHLRPYRVGLLPDGLLFLLLLLMLLADPALPAGRHPPVVLVPGDLGNQLEAKLDKPTVVHYLCSKKTESYFTIWLNLELLLPVIIDCWIDNIRLVYNKTSRATQFPDGVDVRVPGFGKTFSLEFLDPSKSSVGSYFHTMVESLVGWGYTRGEDVRGAPYDWRRAPTQWFRLQDPSHLTPAWLWPADENGPYFLALREMIEEMYQLYGGPVVLVAHSMGNMYTLYFLQRQPQAWKDKYIRAFVSLGAPWGGVAKTLRVLASGDNNRIPVIGPLKIREQQRSAVSTSWLLPYNYTWSP

SEQ ID NO: 21025 - protein, 189 aa, Homo sapiens
MADLDSPPKLSGVQQPSEGVGGGRCSEISAELIRSLTELQELEAVYERLCGEEKVVERELDALLEQQNTIESKMVTLHRMGPNLQLIEGDAKQLAGMITFTCNLAENVSSKVRQLDLAKNRLYQAIQRADDILDLKFCMDGVQTALRSEDYEQAAAHTHRYLCLDKSVICPRWSASSRSSHCWVCMRRD

SEQ ID NO: 21026 - protein, 501 aa, Homo sapiens
MWDQRLVRLALLQHLRAFYGIKVKGVRGQCDRRRHETAATEIGGKIFGVPFNALPHSAVPEYGHIPSFLVDACTSLEDHIHTEGLFRKSGSVIRLKALKNKVDHGEGCLSSAPPCDIAGLLKQFFRELPEPILPADLHEALLKAQQLGTEEKNKATLLLSCLLADHTVHVLRYFFNFLRNVSLRSSENKMDSSNLAVIFAPNLLQTSEGHEKMSSNTEKKLRLQAAVVQTLIDYASDIGRVPDFILEKIPAMLGIDGLCATPSLEGFEEGEYETPGEYKRKRRQSVGDFVSGALNKFKPNRTPSITPQEERIAQLSESPVILTPNAKRTLPVDSSHGFSSKKRKSIKHNFNFELLPSNLFNSSSTPVSVHIDTSSEGSSQSSLSPVLIGGNHLITAGVPRRSKRIAGKKVCRVESGKAGCFSPKISHKEKVRRSLRLKFNLGKNGREVNGCSGVNRYESVGWRLANQQSLKNRIESVKTGLLFSPDVDEKLPKKGTFTYYC

SEQ ID NO: 21027 - protein, 1077 aa, Homo sapiens
PYKPQWCRSREAWALYLFSPQNRFRVSCQKVITHKMFDHVVLVFIFLNCVTIALERPDIDPGSTERVFLSVSNYIFTAIFVAEMMVKVVALGLLSGEHAYLQSSWNLLDGLLVLVSLVDIVVAMASAGGAKILGVLRVLRLLRTLRPLRVISRAPGLKLVVETLISSLRPIGNIVLICCAFFIIFGILGVQLFKGKFYYCEGPDTRNISTKAQCRAAHYRWVRRKYNFDNLGQALMSLFVLSSKDGWVNIMYDGLDAVGVDQQPVQNHNPWMLLYFISFLLIVSFFVLNMFVGVVVENFHKCRQHQEAEEARRREEKRLRRLERRRRKAQRRPYYADYSPTRRSIHSLCTSHYLDLFITFIICVNVITMSMEHYNQPKSLDEALKYCNYVFTIVFVFEAALKLVAFGFRRFFKDRWNQLDLAIVLLSLMGITLEEIEMSAALPINPTIIRIMRVLRIARVLKLLKMATGMRALLDTVVQALPQVGNLGLLFMLLFFIYAALGVELFGRLECSEDNPCEGLSRHATFSNFGMAFLTLFRVSTGDNWNGIMKDTLRECSREDKHCLSYLPALSPVYFVTFVLVAQFVLVNVVVAVLMKHLEESNKEAREDAELDAEIELEMAQGPGSARRVDADRPPLPQESPGARDAPNLVARKVSVSRMLSLPNDSYMFRPVVPASAPHPRPLQEVEMETYGAGTPLESCASLQIPLAVSSPARSGEPLHALSPRGTARSPSLSRLLCRQEAVHTDSLEGKIDSPRDTLDPAEPGEKTPVRPVTQGGSLQSPPRSPRPASVRTRKHTFGQRCVSSRPAAPGGEEAEASDPADEEVSHITSSACPWQPTAEPHGPEASPVAGGERDLRRLYSVDAQGFLDKPGRADEQWRPSAELGSGEPGEAKAWGPEAEPALGARRKKKMSPPCISVEPPAEDEGSARPSAAEGGSTTLRRRTPSCEATPHRDSLEPTEGSGAGGDPAAKGERWGQASCRAEHLTVPSFAFEPLDLGVPSGDPFLDGSHSVTPESRASSSGAIVPLEPPESEPPMPVGDPPEKRRGLYLTVPQCPLEKPGSPSATPAPGGGADDPV

SEQ ID NO: 21028 - protein, 186 aa, Homo sapiens
TSGSHPQAIVSSSTPQYPSAEQPTPQALYATVHQSYPHHATQLHAHQPQPATTPTGSQPQSQHAAPSPVQAGQAPHLGSGQPQQNLYHPGALTGTPPSLPPGPSAQSPQSSFPQPAAVYAIHHQQLPHGFTNMAHVTQAHVQTGITAAPPPHPGAPHPPQVMLLHPPQSHGGPPQGAVPQSGVPAL

SEQ ID NO: 21029 - protein, 941 aa, Homo sapiens
MAAAPALKHWRTTLERVEKFVSPLYFTDCNLRGRLFGASCPVAVLSSFLTPERLPYQEAVQRDFRPAQVGDSFGPTWWTCWFRVELTIPEAWVGQEVHLCWESDGEGLVWRDGEPVQGLTKEGEKTSYVLTDRLGERDPRSLTLYVEVACNGLLGAGKGSMIAAPDPEKMFQLSRAELAVFHRDVHMLLVDLELLLGIAKAQQLEWVKSRYPGLYSRIQEFACRGQFVPVGGTWVEMDGNLPSGEAMVRQFLQGQNFFLQEFGKMCSEFWLPDTFGYSAQLPQIMHGCGIRRFLTQKLSWNLVNSFPHHTFFWEGLDGSRVLVHFPPGDSYGMQGSVEEVLKTVANNRDKGRANHSAFLFGFGDGGGGPTQTMLDRLKRLSNTDGLPRVQLSSPRQLFSALESDSEQLCTWVGELFLELHNGTYTTHAQIKKGNRECERILHDVELLSSLALARSAQFLYPAAQLQHLWRLLLLNQFHDVVTGSCIQMVAEEAMCHYEDIRSHGNTLLSAAAAALCAGEPGPEGLLIVNTLPWKRIEVMALPKPGGAHSLALVTVPSMGYAPVPPPTSLQPLLPQQPVFVVQETDGSVTLDNGIIRVKLDPTGRLTSLVLVASGREAIAEGAVGNQFVLFDDVPLYWDAWDVMDYHLETRKPVLGQAGTLAVGTEGGLRGSAWFLLQISPNSRLSQEVVLDVGCPYVRFHTEVHWHEAHKFLKVEFPARVRSSQATYEIQFGHLQRPTHYNTSWDWARFEVWAHRWMDLSEHGFGLALLNDCKYGASVRGSILSLSLLRAPKAPDATADTGRHEFTYALMPHKGSFQDAGVIQAAYSLNFPLLALPAPSPAPATSWSAFSVSSPAVVLETVKQAESSPQRRSLVLRLYEAHGSHVDCWLHLSLPVQEAILCDLLERPDPAGHLTLRDNRLKLTFSPFQVLSLLLVLQPPPH

SEQ ID NO: 21030 - protein, 186 aa, Homo sapiens
YGKQPKLWLCEYCLKYMKYEKSYRFHLGQCQWRQPPGKEIYRKSNISVYEVDGKDHKIYCQNLCLLAKLFLDHKTLYFDVEPFVFYILTEVDRQGAHIVGYFSKEKESPDGNNVACILTLPPYQRRGYGKFLIAFSYELSKLESTVGSPEKPLSDLGKLSYRSYWSWVLLEILRDFRGTLSIKDLR

SEQ ID NO: 21031 - protein, 439 aa, Homo sapiens
PTLAMNPQAQALRSLLEVVVLSRNSRDAIAALGLLQKAVEGLLDATSGADADLLLRYRECHLLVLKALQDGRAYGSPWCNKQITRCLIECRDEYKYNVEAVELLIRNHLVNMQQYDLHLAQSMENGLNYMAVAFAMQLVKILLVDERSVAHVTEADLFHTIETLMRINAHSRGNAPEGLPQLMEVVRSNYEAMIDRAHGGPNFMMHSGISQASEYDDPPGLREKAEYLLREWVNLYHSAAAGRDSTKAFSAFVGQVELLERKMHQQGILKTDDLITRFFRLCTEMCVEISYRAQAEQQHNPAANPTMIRAKCYHNLDAFVRLIALLVKHSGEATNTVTKINLLNKVLGIVVGVLLQDHDVRQSEFQQLPYHRIFIMLLLELNAPEHVLETINFQTLTAFCNTFHILRPTKAPGFVYAWLELISHRIFIARMLAHTPQQK

SEQ ID NO: 21032 - protein, 1169 aa, Homo sapiens
MTRTRAALLLFTALATSLGFNLDTEELTAFRVDSAGFGDSVVQYANSWVVVGAPQKITAANQTGGLYQCGYSTGACEPIGLQVPPEAVNMSLGLSLASTTSPSQLLACGPTVHHECGRNMYLTGLCFLLGPTQLTQRLPVSRQECPRQEQDIVFLIDGSGSISSRNFATMMNFVRAVISQFQRPSTQFSLMQFSNKFQTHFTFEEFRRSSNPLSLLASVHQLQGFTYTATAIQNVVHRLFHASYGARRDAAKILIVITDGKKEGDSLDYKDVIPMADAAGIIRYAIGVGLAFQNRNSWKELNDIASKPSQEHIFKVEDFDALKDIQNQLKEKIFAIEGTETTSSSSFELEMAQEGFSAVFTPDGPVLGAVGSFTWSGGAFLYPPNMSPTFINMSQENVDMRDSYLGYSTELALWKGVQSLVLGAPRYQHTGKAVIFTQVSRQWRMKAEVTGTQIGSYFGASLCSVDVDSDGSTDLVLIGAPHYYEQTRGGQVSVCPLPRGWRRWWCDAVLYGEQGHPWGRFGAALTVLGDVNGDKLTDVVIGAPGEEENRGAVYLFHGVLGPSISPSHSQRIAGSQLSSRLQYFGQALSGGQDLTQDGLVDLAVGARGQVLLLRTRPVLWVGVSMQFIPAEIPRSAFECREQVVSEQTLVQSNICLYIDKRSKNLLGSRDLQSSVTLDLALDPGRLSPRATFQETKNRSLSRVRVLGLKAHCENFNLLLPSCVEDSVTPITLRLNFTLVGKPLLAFRNLRPMLAADAQRYFTASLPFEKNCGADHICQDNLGISFSFPGLKSLLVGSNLELNAEVMVWNDGEDSYGTTITFSHPAGLSYRYVAEGQKQGQLRSLHLTCDSAPVGSQGTWSTSCRINHLIFRGGAQITFLATFDVSPKAVLGDRLLLTANVSSENNTPRTSKTTFQLELPVKYAVYTVVSSHEQFTKYLNFSESEEKESHVAMHRYQVNNLGQRDLPVSINFWVPVELNQEAVWMDVEVSHPQNPSLRCSSEKIAPPASDFLAHIQKNPVLDCSIAGCLRFRCDVPSFSVQEELDFTLKGNLSFGWVRQILQKKVSVVSVAEITFDTSVYSQLPGQEAFMRAQTTTVLEKYKVHNPTPLIVGSSIGGLLLLALITAVLYKVGFFKRQYKEMMEEANGQIAPENGTQTPSPPTPHYPQDNV

SEQ ID NO: 21033 - protein, 1245 aa, Homo sapiens
MLGWVQRVLPQPPGTPRKTKMQEEEEVEPEPEMEAEVEPEPNPEEAETESESMPPEESFKEEEVAVADPSPQETKEAALTSTISLRAQGAEISEMNSPSRRVLTWLMKGVEKVIPQPVHSITEDPAQILGHGSTGDTGCTDEPNEALEAQDTRPGLRLLLWLEQNLERVLPQPPKSSEVWRDEPAVATAPPGRPQEMGPKLQARETPSLPTPIPLQPKEEPKEAPAPEPQPGSQAQTSSLPPTRDPARLVAWVLHRLEMALPQPVLHGKIGEQEPDSPGICDVQTISILPGGQVEPDLVLEEVEPPWEDAHQDVSTSPQGTEVVPAYEEENKAVEKMPRELSRIEEEKEDEEEEEEEEEEEEEEEVTEVLLDSCVVSQVGVGQSEEDGTRPQSTSDQKLWEEVGEEAKKEAEEKAKEEAEEVAEEEAEKEPQDWAETKEEPEAEAEAASSGVPATKQHPEVQVEDTDADSCPLMAEENPPSTVLPPPSPAKSDTLIVPSSASGTHRKKLPSEDDEAEELKALSPAESPVVAWSDPTTPKDTDGQDRAASTASTNSAIINDRLQELVKLFKERTEKVKEKLIDPDVTSDEESPKPSPAKKAPEPAPDTKPAEAEPVEEEHYCDMLCCKFKHRPWKKYQFPQSIDPLTNLMYVLWLFFVVMAWNWNCWLIPVRWAFPYQTPDNIHHWLLMDYLCDLIYFLDITVFQTRLQFVRGGDIITDKKDMRNNYLKSRRFKMDLLSLLPLDFLYLKVGVNPLLRLPRCLKYMAFFEFNSRLESILSKAYVYRVIRTTAYLLYSLHLNSCLYYWASAYQGLGSTHWVYDGVGNSYIRCYYFAVKTLITIGGLPDPKTLFEIVFQLLNYFTGVFAFSVMIGQMRDVVGAATAGQTYYRSCMDSTVKYMNFYKIPKSVQNRVKTWYEYTWHSQGMLDESELMVQLPDKMRLDLAIDVNYNIVSKVALFQGCDRQMIFDMLKRLRSVVYLPNDYVCKKGEIGREMYIIQAGQVQVLGGPDGKSVLVTLKAGSVFGEISLLAVGGGNRRTANVVAHGFTNLFILDKKDLNEILVHYPESQKLLRKKARRMLRSNNKPKEEKSVLILPPRAGTPKLFNAALAMTGKMGGKGAKGGKLAHLRARLKELAALEAAAKQQELVEQAKSSQDVKGEEGSAAPDQHTHPKEAATDPPAPRTPPEPPGSPPSSPPPASLGRPEGEEEGPAEPEEHSVRICMSPGPEPGEQILSVKMPEEREEKAE

SEQ ID NO: 21034 - protein, 1586 aa, Homo sapiens
QDRKRRTGELRQFAGASEPFICHSSSSEIIEKKKDATRTPSSADPLAPDSPRSSAPVEEVRRVVSKKVVAALPSQAPYDDPRVTLHELSQSVPQETAEGIPPGSQDSSPEHQEPRTLDTTYGEVSDNLLVTAQGEKTAHFESQSVTCDVQNSTSASGPKQDHVQCPEASTGFEEGRASPKQDTILPGALTRVALEAPTQQCVQCKESVGSGLTEVCRAGSKHSRPIPLPDQRPSANPGGIGEEAPCRHPREALDGPVFSRNPEGSRTLSPSRGKESRTLPCRQPCSSQPVATHAYSSHSSTLLCFRDGDLGKEPFKAAPHTIHPPCVVPSRAYEMDETGEISRGPDVHLTHGLEPKDVNREFRLTESSTCEPSTVAAVLSRAQGCRSPSAPDVRTGSFSHSATDGSVGLIGVPEKKVAEKQASTELEAASFPAGMYSEPLRQFRDSSVGDQNAQVCQTNPEPPATTQGPHTLDLSEGSAESKLVVEPQHECLENTTRCFLEKPQFSTELRDHNRLDSQAKFVARLKHTCSPQEDSPWQEEEQHRDQASGGGEGFAQGVNPLPDEDGLDGCQILDAGREEVAVAKPPVSKILSQGFKDPATVSLRQNETPQPAAQRSGHLYTGREQPAPNHRGSLPVTTIFSGPKHSRSSPTPQFSVVGSSRSLQELNLSVEPPSPTDEDTQGPNRLWNPHLRGYSSGKSVARTSLQAEDSNQKASSRLDDGTTDHRHLKPATPPYPMPSTLSHMPTPDFTTSWMSGTLEQAQQGKREKLGVQVRPENWCSQMDKGMLHFGSSDISPYALPWRPEEPARISWKQYMSGSAVDVSCSQKPQGLTLSNVARCSSMDNGLEDQNSPFHSHLSTYANICDLSTTHSSTENAQGSNEAWEVFRGSSSIALGDPHIPTSPEGVAPTSGHDRRPQFRGPSGEADCLRSKPPLAKGSAAGPVDEIMLLYPSEAGCPVGQTRTNTFEQGTQTLGSRRHWSSTDISFAQPEASAVSAFDLASWTSMHNLSLHLSQLLHSTSELLGSLSQPDVARREQNTKRDIPDKAPQALMMDGSTQTTVDEGSQTDLTLPTLCLQTSEAEPQGANVILEGLGSDTSTVSQEEGDVPGVPQKREAEETAQKMAQLLYLQEESTPYKPQSPSIPSSHLRFQKAPVGQHLPSVSPSVSDAFLPPSSQPEESYCLVVSSPSPSSPHSPGLFPSTSEYPGDSRVQKKLGPTSALFVDRASSPILTLSASTQEPGLSPGSLTLSAPSTHPVEGHQKLDSSPDPVDAPRTPMDNYSQTTDELGGSQRGRSSLQRSNGRSFLELHSPHSPQQSPKLQFSFLGQHPQQLQPRTTIGVQSRLLPPPLRHRSQRLGNSFVPEKVASPEHCPLSGREPSQWQSRTENGGESSASPGEPQRTLDRPSSWGGLQHLSPCPVSELTDTAGLRGSALGLPQACQPEELLCFSCQMCMAPEHQHHSLRDLPVHNKFSNWCGVQKGSPGGLDMTEEELGASGDLSSEKQEQSPPQPPNDHSQDSEWSKREQIPLQVGAQNLSLSVELTEAKLHHGFGEADALLQVLQSGTGEALAADEPVTSTWKELYARGQR

SEQ ID NO: 21035 - protein, 598 aa, Homo sapiens
MELTGIKQAQVDEGVPLKICLSQFCKWIHKIQQQKNIIFATGISEPSASEVKLCAFVTWSDWDLGVCLEYECKRKQLLKPVFLNSWIDLRATYKLFYRRKPKGLSGALQEVGIEFSGREHSGLDDSRNTALLAWKMIRDGCVMKITRSLNKVPTKKNFSILARNLNTIQVEEMSACNISIQGPSIYNKEPKNIINPHEKVQMKSICANSPIKAQQDQLQVKNNIKASLHNVKSSLPLFNTKSSTSVGQLQSPTLNSPIYMQKQGKNEHLAFNTKSKASTVGSELVLVSTTVPTVHHVSDLEMSSTLDCLPVLADWEDVVLLPASQPEENVDCTVPISDSDLEISFNSGERLMVLKELEMSSHENFGDIEETPQKSETSKSIVYKSPHTTIYNVKEAKDPGSDISAFKLPEHKSSTFNRVNANMSHPLVLGKHPLLSGGTKRNPCSPQAFPPAKKQPFTIHEEKPTSSDCSPVRSSSWRRLPSILTSTVNLQEPWKSGKMTPPLCKCGRRSKRLVVSNNGPNHGKVFYCCPIGKYQENRKCCGYFKWEQTLQKERANSMVPSHSTGGLTFSSPETSHICDRNLSISTKNSLRLRPSMRN

SEQ ID NO: 21036 - protein, 249 aa, Homo sapiens
RTAGKELALAPLQDWGEETEDGAVYSVSLRRQRSQRRSPAEGPGGSQAPSPIANTFLHYRTSKVRVLRAARLERLVGELVFGDREQDPSFMPAFLATYRTFVPTACLLGFLLPPMPPPPPPGVEIKKTAVQDLSFNKNLRAVVSVLGSWLQDHPQDFRDHPAHSDLGSVRTFLGWAAPGSAEAQKAEKLLEDFLEEAEREQEEEPPQDLPELPKLLTQTLQRPARRKRKGSCLKVPSSWTSAWTRWPSS

SEQ ID NO: 21037 - protein, 253 aa, Homo sapiens
MGGCAGSRRRFSDSEGEETVPEPRLPLLDHQGAHWKNAVGFWLLGLCNNFSYVVMLSAAHDILSHKRTSGNQSHVDPGPTPIPHNSSSRFDCNSVSTAAVLLADILPTLVIKLLAPLGLHLLPYSPRVLVSGICAAGSFVLVAFSHSVGTSLCGSSSSLSLRERWTVFKGLLWYIVPLVVVYFAEYFINQGLFELLFFWNTSLSHAQQYRWYQMLYQAGVFASRSSLRCCRIRFTWALALLQMESRSVAQAGM

SEQ ID NO: 21038 - protein, 223 aa, Homo sapiens
MARSGSATPPARAPGAPPRSPPQRLDVSGPLRELRPRLCHLRKGPQGYGFNLHSDKSRPGQYIRSVDPGSPAARSGLRAQDRLIEVNGQNVEGLRHAEVVASIKAREDEARLLVVDPETDEHFKRLRVTPTEEHVEGPLPSPVTNGTSPAQLNGGSACSSRSDLPGSDKDTEDGSAWKQDPFQESGLHLSPTAAEAKEKARAMRVNKRAPQMDWNRKREIFSN

SEQ ID NO: 21039 - protein, 185 aa, Homo sapiens
MSDGDYDYLIKFLALGDSGVGKTSVLYQYTDGKFNSKFITTVGIDFREKRVVYRASGPDGATGRGQRIHLQLWDTAGQERFRSLTTAFFRDAMGFLLLFDLTNEQSFLNVRNWISQLQMHAYCENPDIVLCGNKSDLEDQRVVKEEEAIALAEKYGIPYFETSAANGTNISQAIEMLLDLIMKRM

SEQ ID NO: 21040 - protein, 891 aa, Homo sapiens
MTVSTDNLLVNKAISKSGQLPTSSNLEANISCSLNELTYNNLPANENQNLKEQNQTEKSLKSPSDTLDGRNENLQESEILSQPKSLSLEATSPLSAEKHSCTVPEGLLFPAEYYVRTTRSMSNCQRKVAVEAVIQSHLDVKKKGFKNKNKDASKNLNLSNEETDQSEIRMSGTCTGQPSSRTSQKLLSLTKVSSPAGPTEDNDLSRKAVAQAPGRRYTGKRKSACTPASDHCEPLLPTSSLSIVNRSKEEVTSHKYQHEKLFIQVKGKKSRHQKEDSLSWSNSAYLSLDDDAFTAPFHRDGMLSLKQLLSFLSITDFQLPDEDFGPLKLEKVKSCSEKPVEPFESKMFGERHLKEGSCIFPEELSPKRMDTEMEDLEEDLIVLPGKSHPKRPNSQSQHTKTGLSSSILLYTPLNTVAPDDNDRPTTDMCSPAFPILGTTPAFGPQGSYEKASTEVAGRTCCTPQLAHLKDSVCLASDTKQFDSSGSPAKPHTTLQVSGRQGQPTCDCDSVPPGTPPPIESFTFKENQLCRNTCQELHKHSVEQTETAELPASDSINPGNLQLVSELKNPSGSCSVDVSAMFWERAGCKEPCIITACEDVVSLWKALDAWQWEKLYTWHFAEVPVLQIVPVPDVYNLVCVALGNLEIREIRALFCSSDDESEKQVLLKSGNIKAVLGLTKRRLVSSSGTLSDQQVEVMTFAEDGGGKENQFLMPPEETILTFAEVQGMQEALLGTTIMNNIVIWNLKTGQLLKKMHIDDSYQASVCHKAYSEMGLLFIVLSHPCAKESESLRSPVFQLIVINPKTTLSVGVMLYCLPPGQAGRFLEGDVKDHCAAAILTSGTIAIWDLLLGQCTALLPPVSDQHWSFVKWSGTDSHLLAGQKDGNIFVYHYS

SEQ ID NO: 21041 - protein, 689 aa, Homo sapiens
MLSDDHVNEIIIQKLIASLIPMTSRDRIKAIRNQPRTMEEKRNLSRGGLTITTEDEGRAKAHLTWWKIVDKEKSKQTHRILQLNCCIQCLNSISRAYRRSKNSLSEILNSISLWQKTLKIIGGKFGTSVLSYFNFLRWLLKFNIFSFILNFSFIIIPQFTVAKKNTLQFTGLEFFTGVGYFRDTVMYYGFYTNSTIQHGNSGASYNMQLAYIFTIGACLTTCFFSLLFSMAKYFRNNFINPHIYSGGITKLIFCWDFTVTHEKAVKLKQKNLSTEIRENLSELRQENSKLTFNQLLTRFSAYMVAWVVSTGVAIACCAAVYYLAEYNLEFLKTHSNPGAVLLLPFVVSCINLAVPCIYSMFRLVERYEMPRHEVYVLLIRNIFLKISIIGILCYYWLNTVALSGEECWETLIGQDIYRLLLMDFVFSLVNSFLGEFLRRIIGMQLITSLGLQEFDIARNVLELIYAQTLVWIGIFFCPLLPFIQMIMLFIMFYSKNISLMMNFQPPSKAWRASQMMTFFIFLLFFPSFTGVLCTLAITIWRLKPSADCGPFRGLPLFIHSIYSWIDTLSTRPGYLWVVWIYRNLIGSVHFFFILTLIVLIITYLYWQITEGRKIMIRLLHEQIINEGKDKMFLIEKLIKLQDMEKKANPSSLVLERREVEQQGFLHLGEHDGSLDLRSRRSVQEGNPRA

SEQ ID NO: 21042 - protein, 84 aa, Homo sapiens
MKVKVIPVLEDNYMYLVIEELTREAVAVDVAVPKRGPRAGKPGAGAASSRAGGAGRGRAHLLADAQAGARRGAAEGVLRPRAHA

SEQ ID NO: 21043 - protein, 144 aa, Homo sapiens
MPAPIRLRELIRTIRTARTQAEEREMIQKECAAIRSSFREEDNTYRCRNVAKLLYMHMLGYPAHFGQLECLKLIASQKFTDKRIGYLGAMLLLDERQDVHLLMTNCIKNDLNHSTQFVQGLALCTLGCMGSSEMCRDLAGEVEK

SEQ ID NO: 21044 - protein, 470 aa, Homo sapiens
MLEPLNEGFLSRISGLLLCRWTCRHCCQKCYESSCCQSSEDEVEILGPFPAQTPPWLMASRSSDKDGDSVHTASEVPLTPRTNSPDGRRSSSDTSKSTYSLTRRISSLESRRPSSPLIDIKPIEFGVLSAKKEPIQPSVLRRTYNPDDYFRKFEPHLYSLDSNSDDVDSLTDEEILSKYQLGMLHFSTQYDLLHNHLTVRVIEARDLPPPISHDGSRQDMAHSNPYVKICLLPDQKNSKQTGVKRKTQKPVFEERYTFEIPFLEAQRRTLLLTVVDFDKFSRHCVIGKVSVPLCEVDLVKGGHWWKALIPSSQNEVELGELLLSLNYLPSAGRLNVDVIRAKQLLQTDVSQGSDPFVKIQLVHGLKLVKTKKTSFLRGTIDPFYNESFSFKVPQEELENASLVFTVFGHNMKSSNDFIGRIVIGQYSSGPSETNHWRRMLNTHRTAVEQWHSLRSRAECDRVSPASLEVT

SEQ ID NO: 21045 - protein, 357 aa, Homo sapiens
MEAAVKEEISLEDEAVDKNIFRDCNKIAFYRRQKQWLSKKSTYQALLDSVTTDEDSTRFQIINEASKVPLLAEIYGIEGNIFRLKINEETPLKPRFEVPDVLTSKPSTVRLISCSGDTGSLILADGKGDLKCHITANPFKVDLVSEEEVVISINSLGQLYFEHLQILHKQRAAKENEEETSVDTSQENQEDLGLWEEKFGKFVDIKANGPSSIGLDFSLHGFEHLYGIPQHAESHQLKNTGDGDAYRLYNLDVYGYQIYDKMGIYGSVPYLLAHKLGRTIGIFWLNASETLVEINTEPAVEYTLTQMGPVAAKQKVRSRTHVHWMSESGIIDVFLLTGPTPSDVFKQYSHLTDIGEK

SEQ ID NO: 21046 - protein, 1453 aa, Homo sapiens
MIESENLNQEEIIKELCLCNGLSYEMVGQEGSDTSKLEMFFLGYPRIVGLSLFPNLTSLTIVAQDIKEISGLEPCLQLKELWIAECCIEKIEGLQECRNLEKLYLYFNKISKIENLEKLIKLKVLWLNHNTIKNIEGLQTLKNLKDLNLAGNLINSIGRCLDSNEQLERLNLSGNQICSFKELTNLTRLPCLKDLCLNDPQYTTNPVCLLCNYSTHVLYHLPCLQRFDTLDVSAKQIKELADTTAMKKIMYYNMRIKTLQRHLKEDLEKLNDQKCKLQKLPEERVKLFSFVKKTLERELAELKGSGKGHSDGSNNSKVTDPETLKSCETVTEEPSLQQKILAKLNALNERVTFWNKKLDEIEAIYHIEVKQKKKSHGLLIPLLLIELETVGNFHFEEGTRSDDWFNFCYELILSRFCAWDFRTYGITGVKVKRIIKVNNRILRLKFEEKFQKFLENEDMHDSESYRRMLECLFYVFDPEVSVKKKHLLQILEKGFKDSETSKLPLKKEAIIVSNSLSISECPRIEFLQQKHKDEKKISLKHELFRHGILLITKVFLGQSVQAHEKESISQSNYPMVNSVFIPRKYLLNSVMGQRNCDCSVRQCKWFVFDHDLVLPEYVVEFEYITMVKAPSLFSVFNNVILEESKKNPEVSVFSKDLKFDDEVIKMEPRIKARPKLISLDDKTILSLAKTSVYSHIVSLNLHGNSLSKLRDLSKLTGLRKLNISFNEFTCLDDVYHLYNLEYLDASHNHVITLEGFRGLMKLKHLDLSWNQLKKSGNEINMLCKHTTSLLTLDIQHNPWQKPATLRLSVIGRLKTLTHLNGVFISEEEATAAMKFIAGTRITQLSLLRHSSTKEERPRILSIWPSAKILTQVSKLGPHLHLSGNCYLKITALNLDGQHLFEITNLEKLENLKWASFSNNNLTKMEGLESCINLEELTLDGNCISKIEGISKMTKLTRLSINNNLLTGWEEHTFDNMLHLHSLSLENNRITSLSGLQKSFTLVELYISNNYIAVNQEMHNLKGLCNLVILDMCGNIIIWNQENYRLFVIFHLPELKALDGIPIEPSETDSAKDLFGGRLTSDMIAERQGHSNFKQMQELNWTSSSIRTVDLIPVDQFRNVCNVNLQNNHLTSFSGLIYLPNVKVLCLNYNHIESIMPRLKPQTHLTSRQLLYQKVPSSGYGQQGISKTNRDIMSSENLPPIMHSLEVLHLGYNGICNLIQLQLNRLRNLKFLFLQGNEISQVEGLDNLVVLQELVVDHNRIRSFNDSAFAKPSSLLALHLEENRLRELGKLQSLVKLEKLFLGYNKIQDITELEKLDVISTLRELTVYGNPICRKMLHRHMLIFRLPNLQMLDGSPVNSDDRAKAEFHLAELQAKKNSLIPVTHSPMDGRSFGQVKTPPIEITNVLLPSGFSHYLGSDVTLTPEVEEFLGATFQDQIECNCLKRNEHTPRNSPV

SEQ ID NO: 21047 - protein, 401 aa, Homo sapiens
NKSTSTPTSPGPRTHSTPSIPVLTAGQSGLYSPQYISYIPQIHMGPAVQAPQMYPYPVSNSVPGQQGKYRGAKGSLPPQRSDQHQPASAPPMMQAAAAAGPPLVAATPYSSYIPYNPQQFPGQPAMMQPMAHYPSQPVFAPMLQSNPRMLTSGSHPQAIVSSSTPQYPSAEQPTPQALYATVHQSYPHHATQLHAHQPQPATTPTGSQPQSQHAAPSPVQQHQAGQAPHLGSGQPQQNLYHPGALTGTPPSLPPGPSAQSPQSSFPQPAAVYAIHHQQLPHGFTNMAHVTQAHVQTGITAAPPPHPGAPHPPQVMLLHPPQSHGGPPQGAVPQSGVPALSASTPSPYPYIGHPQGEQPGQAPGFPGGADDRIREFSLAGGIWHGRAEGLQVGQDARVLGGE

SEQ ID NO: 21048 - protein, 850 aa, Homo sapiens
MARHLLLPLVMLVISPIPGAFQDSALSPTQEEPEDLDCGRPEPSARIVGGSNAQPGTWPWQVSLHHGGGHICGGSLIAPSWVLSAAHCFMTNGTLEPAAEWSVLLGVHSQDGPLDGAHTRAVAAIVVPANYSQVELGADLALLRLASPASLGPAVWPVCLPRASHRFVHGTACWATGWGDVQEADPLPLPWVLQEVELRLLGEATCQCLYSQPGPFNLTLQILPGMLCAGYPEGRRDTCQGDSGGPLVCEEGGRWFQAGITSFGFGCGRRNRPGVFTAVATYEAWIREQVMGSEPGPAFPTQPQKTQSDPQEPREENCTIALPECGKAPRPGAWPWEAQVMVPGSRPCHGALVSESWVLAPASCFLDPNSSDSPPRDLDAWRVLLPSRPRAERVARLVQHENASWDNASDLALLQLRTPVNLSAASRPVCLPHPEHYFLPGSRCRLARWGRGEPALGPGALLEAELLGGWWCHCLYGRQGAAVPLPGDPPHALCPAYQEKEENDSRWSLLCQEEGTWFLAGIRDFPSGCLRPRAFFPLQTHGPWISHVTRGAYLEDQLAWDWGPDGEETETQTCPPHTEHGACGLRLEAAPVGVLWPWLAEVHVAGDRVCTGILLAPGWVLAATHCVLRPGSTTVPYIEVYLGRAGASSLPQGHQVSRLVISIRLPQHLGLRPPLALLELSSRVEPSPSALPICLHPAGIPPGASCWVLGWKEPQDRVPVAAAVSILTQRICDCLYQGILPPGTLCVLYAEGQENRCEMTSAPPLLCQMTEGSWILVGMAVQGSRELFAAIGPEEAWISQTVGEANFLPPSGSPHWPTGGSNLCPPELAKASGSPHAVYFLLLLTLLIQS

SEQ ID NO: 21049 - protein, 141 aa, Homo sapiens
MSEARKGPDEAEESQYDSGIESLRSLRSLPESTSAPASGPSDGSPQPCTHPPGPVKEPQEKEDADGERADSTYGSSSLTYTLSLLGGPEAEDPAPRLPLPHVGALSPQQLEALTYISEDGDTQHSIWLYIWTNRAQFGHWC

SEQ ID NO: 21050 - protein, 537 aa, Homo sapiens
MGPWSRSLSALLLLLQVSSWLCQEPEPCHPGFDAESYTFTVPRRHLERGRVLGRVNFEDCTGRQRTAYFSLDTRFKVGTDGVITVKRPLRFHNPQIHFLVYAWDSTYRKFSTKVTLNTVGHHHRPPPHQASVSGIQAELLTFPNSSPGLRRQKRDWVIPPISCPENEKGPFPKNLVQIKSNKDKEGKVFYSITGQGADTPPVGVFIIERETGWLKVTEPLDRERIATYTLFSHAVSSNGNAVEDPMEILITVTDQNDNKPEFTQEVFKGSVMEGALPGTSVMEVTATDADDDVNTYNAAIAYTILSQDPELPDKNMFTINRNTGVISVVTTGLDRESFPTYTLVVQAADLQGEGLSTTATAVITVTDTNDNPPIFNPTTYKGQVPENEANVVITTLKVTDADAPNTPAWEAVYTILNDDGGQFVVTTNPVNNDGILKTAKGLDFEAKQQYILHVAVTNVVPFEVSLTTSTATVTVDVLDVNEAPIFVPPEKRVEVSEDFGVGQEITSYTAQEPDTFMEQKITFSSCYWNRDTSADPV

SEQ ID NO: 21051 - protein, 790 aa, Homo sapiens
MVPAWLWLLCVSVPQALPKAQPAELSVEVPENYGGNFPLYLTKLPLPREGAEGQIVLSGDSGKATEGPFAMDPDSGFLLVTRALDREEQAEYQLQVTLEMQDGHVLWGPQPVLVHVKDENDQVPHFSQAIYRARLSRGTRPGIPFLFLEASDRDEPGTANSDLRFHILSQAPAQPSPDMFQLEPRLGALALSPKGSTSLDHALERTYQLLVQVKDMGDQASGHQATATVEVSIIESTWVSLEPIHLAENLKVLYPHHMAQVHWSGGDVHYHLESHPPGPFEVNAEGNLYVTRELDREAQAEYLLQVRAQNSHGEDYAAPLELHVLVMDENDNVPICPPRDPTVSIPELSPPGTEVTRLSAEDADAPGSPNSHVVYQLLSPEPEDGVEGRAFQVDPTSGSVTLGVLPLRAGQNILLLVLAMDLAGAEGGFSSTCEVEVAVTDINDHAPEFITSQIGPISLPEDVEPGTLVAMLTAIDADLEPAFRLMDFAIERGDTEGTFGLDWEPDSGHVRLRLCKNLSYEAAPSHEVVVVVQSVAKLVGPGPGPGATATVTVLVERVMPPPKLDQESYEASVPISAPAGSFLLTIQPSDPISRTLRFSLVNDSEGWLCIEKFSGEVHTAQSLQGAQPGDTYTVLVEAQDTDHGLIVSGPSKDPDLASGHGPYSFTLGPNPTVQRDWRLQTLNGSHAYLTLALHWVEPREHIIPVVVSHNAQMWQLLVRVIVCRCNVEGQCMRKVGRMKGMPTKLSAVGILVGTLVAIGIFLILIFTHWTMSRKKDPDQPADSVPLKATV

SEQ ID NO: 21052 - protein, 584 aa, Homo sapiens
MLFPTSAQESSRGLPDANDLCLGLQSLSLTGWDRPWSTQDSDSSAQSSTHSVLSMLHNPLGNVLGKPPLSFLPLDPLGSDLVDKFPAPSVRGSRLDTRPILDSRSSSPSDSDTSGFSSGSDHLSDLISSLRISPPLPFLSLSGGGPRDPLKMGVGSRMDQEQAALAAVTPSPTSASKRWPGASVWPSWDLLEAPKDPFSIEREARLHRQAAAVNEATCTWSGQLPPRNYKNPIYSCKVFLGGVPWDITEAGLVNTFRVFGSLSVEWPGKDGKHPRCPPKGYVYLVFELEKSVRSLLQACSHDPLSPDGLSEYYFKMSSRRMRCKEVQVIPWVLADSNFVRSPSQRLDPSRTVFVGALHGMLNAEALAAILNDLFGGVVYAGIDTDKHKYPIGSGRVTFNNQRSYLKAVSAAFVEIKTTKFTKKVQIDPYLEDSLCHICSSQPGPFFCRDQGRVRTKTVKKAARVIIEKYYTRLGNDFHTNKRVCEEIAIIPSKKLRNKIAGYVTHLMKRIQRGPVRGISIKLQEEERERRDNYVPEVSALDQEIIEVDPDTKEMLKLLDFGSLSNLQVTQPTVGMNFKTPRGPV

SEQ ID NO: 21053 - protein, 405 aa, Homo sapiens
MLPAGCSRRLVAELQGALDACAQRQLQLEQSLRVCRRLLHAWEPTGTRALKPPPGPETNGEDPLPACTPSPQDLKELEFLTQALEKAVRVRRGITKAGERDKAPSLKSRSIVTSSGTTASAPPHSPGQAGGHASDTRPTKGLRQTTVPAKGHPERRLLSVGDGTRVGMGARTPRPGAGLRDQQMAPSAAPQAPEAFTLKEKGHLLRLPAAFRKAASQNSSLWAQLSSTQTSDSTDAAAAKTQFLQNMQTASGGPQPRLSAVEVEAEAGRLRKACSLLRLRMREELSAAPMDWMQEYRCLLTLEGLQAMVGQCLHRLQELRAAVAEQPPRPCPVGRPPGASPSCGGRAEPAWSPQLLVYSSTQELQTLAALKLRVAVLDQQIHLEKVLLEEEVGVQQRSAALRTRG

SEQ ID NO: 21054 - protein, 806 aa, Homo sapiens
MACSILEGCRREVRRETWKPGPGSEIADPTLAEMGKNLKEAVKMLEDSQRRTEEENGKKLISGDIPGPLQGSGQDMVSILQLVQNLMHGDEDEEPQSPRIQNIGEQGHMALLGHSLGAYISTLDKEKLRKLTTRILSDTTLWLCRIFRYENGCAYFHEEEREGLAKICRLAIHSRYEDFVVDGFNVLYNKKPVIYLSAAARPGLGQYLCNQLGLPFPCLCRVPCNTVFGSQHQMDVAFLEKLIKDDIERGRLPLLLVANAGTAAVGHTDKIGRLKELCEQYGIWLHVEGVNLATLALGYVSSSVLAAAKCDSMTMTPGPWLGLPAVPAVTLYKHDDPALTLVAGLTSNKPTDKLRALPLWLSLQYLGLDGFVERIKHACQLSQRLQESLKKVNYIKILVEDELSSPVVVFRFFQELPGSDPVFKAVPVPNMTPSGVGRERHSCDALNRWLGEQLKQLVPASGLTVMDLEAEGTCLRFSPLMTAAVLGTRGEDVDQLVACIESKLPVLCCTLQLREEFKQEVEATAGLLYVDDPNWSGIGVVRYEHANDDKSSLKSDPEGENIHAGLLKKLNELESDLTFKIGPEYKSMKSCLYVGMASDNVDAAELVETIAATAREIEENSRLLENMTEVVRKGIQEAQVELQKASEERLLEEGVLRQIPVVGSVLNWFSPVQALQKGRTFNLTAGSLESTEPIYVYKAQGAGVTLPPTPSGSRTKQRLPGQKPFKRSLRGSDALSETSSVSHIEDLEKVERLSSGPEQITLEASSTEGHPGAPSPQHTDQTEAFQKGVPHPEDDHSQVEGPESLR

SEQ ID NO: 21055 - protein, 909 aa, Homo sapiens
MVMPRFYPDRPHQKSVGFFLQCNAESDSTSWSCHAQAVLKIINYRDDEKSFSRRISHLFFHKENDWGFSNFMAWSEVTDPEKGFIDDDKVTFEVFVQADAPHGVAWDSKKHTGYVGLKNQGATCYMNSLLQTLFFTNQLRKAVYMMPTEGDDSSKSVPLALQRVFYELQHSDKPVGTKKLTKSFGWETLDSFMQHDVQELCRVLLDNVENKMKGTCVEGTIPKLFRGKMVSYIQCKEVDYRSDRREDYYDIQLSIKGKKNIFESFVDYVAVEQLDGDNKYDAGEHGLQEAEKGVKFLTLPPVLHLQLMRFMYDPQTDQNIKINDRFEFPEQLPLDEFLQKTDPKDPANYILHAVLVHSGDNHGGHYVVYLNPKGDGKWCKFDDDVVSRCTKEEAIEHNYGGHDDDLSVRHCTNAYMLVYIRESKLSEVLQAVTDHDIPQQLVERLQEEKRIEAQKRKERQEAHLYMQVQIVAEDQFCGHQGNDMYDEEKVKYTVFKVLKNSSLAEFVQSLSQTMGFPQDQIRLWPMQARSNGTKRPAMLDNEADGNKTMIELSDNENPWTIFLETVDPELAASGATLPKFDKDHDVMLFLKMYDPKTRSLNYCGHIYTPISCKIRDLLPVMCDRAGFIQDTSLILYEEVKPNLTERIQDYDVSLDKALDELMDGDIIVFQKDDPENDNSELPTAKEYFRDLYHRVDVIFCDKTIPNDPGFVVTLSNRMNYFQVAKTVAQRLNTDPMLLQFFKSQGYRDGPGNPLRHNYEGTLRDLLQFFKPRQPKKLYYQQLKMKITDFENRRSFKCIWLNSQFREEEITLYPDKHGCVRDLLEECKKAVELGEKASGKLRLLEIVSYKIIGVHQEDELLECLSPATSRTFRIEEIPLDQVDIDKENEMLVTVAHFHKEVFGTFGIPFL
